United States Patent Application Publication US 2007/0042382 A1 - sequence listing, part 7

SEQ ID NO: 8908 - DNA, 31364 bp, Homo sapiens
cacatatcggtgttagcagtgttccgcgagtggtgcctgagagcagaggagaaacaatacccttgccttcatccaaaatatgtatggaaattactggtcaagtacttcattgatggttccatctaataatgatatggttccgtaaacatttagaaggtttttagatatctagaataggcaaatagacagaaaggagatcactggttgcctggagtcaggggcaaggagaacaggcagtggctgctaatgagtgcagggtttcctctcaggtgatgaaaatattctaaaattgactgtaggaattagctgggcgcagtggctcacgtctgtaatctcagcactttgggaggccaaggcgggcggatcacccgaggccaggagttcaagaccagcctgaccaacatggagaagcctcgtctctactaaaaatacaaaattagccgggtgtggtggcagacgcctgtaatcccagctacttgggaggctgaggcaggagaatcacttgaacccgggaggcagaggttgcagtgagctgagatcacaacattgcactcttgcctgggcaacaagagcgaaactccgtctcaaaaaaaaaaaaaaattgactgtaggaatggttgtacaactctgtgaatatactaatttttaaaaccccattgaattgtacactctacatgggtgaactgaatagtatgccaattatagtgcaataaaactgctaagaagggcatttagaaacaaccgcaacgctagaacaccagaatcccttttttttttgtcagggtctcgctctgtcacccaggctggagtgcagtggcgtgatcacagctctctgcaacctccgtctcctgggctcaagcaattcacctgcttcgatctcctgagtaggggggaccacaggttagccaccacacctcgttaattttttcgtatttgttgttgagatggagtctcgccatgttgcccaggctggtatgaagtcctgggctcaagtgatccacctgcctcagcctcctaaagtgtgggggtaacaggtgtgggccactgcacccggccccctgctaattttgaacaaatttttttgtaggaacaaagtctcactttattgcccaggatggtcttgaactcctggctttaagcgatcctcctgccttggcctcccaaagtgctgagcatataggcgtgagccactgtgccacgcttcttttttttttaaataaattagttgagtttggccctttgtaaatatgtaccaatggaatatatgagctattattaaaaccagatactgttacttctcctttgctatgactaactttttatttctgcagtatatgttgctctttggtttaggggactaacaactttttaaaaaaataaaatgttatctgtgtcttgcagggctgttacagggggttacgagcaaaatggcacctggccgggagggaggtgggggctgaaccagccccaattcaaccaggaaggggcatcttagtgttcacaccaaaaccaccttcaactggttgtgagctaggggtgctgctatggccagtgggggaggcctttaattctaagtcttacgttctgagtgtgcctctttctaattcaaaggtacaatataaatagactgtgtgacctgcatgaaaacattcctgtttgcaatggcacatctcacagaaagttaccatttttcaaaccacctataatgagaatggatgtcaaaatgggattctaacattttgtaagaccctaaatttatcaaataaagagtcaaatatgtgcaatgaactcttcctgagacaggaagaaggggcactttttagaaagatattcaacagaagggttttctagttgactgactatcaaggtagagaaaaccctataactccattcattaaaatatgactattaataccttactaaatatccttctacatccttacccacgtttttatacacatgcttttaacacgtgttttaaataacaaaaatgagattccactaaatcaactattttaacctgtcccactcactcccctctttattatactttttgtgtcaagttgatttatttattgaataaataaaatccagacttttctgtttaagtgcctgaatttgttcttacacaaagcaagtgctctcaagaagctcattcttgaagatggttgagaaatatcaatgaccaatatcaaaagaacattaacccatgaaatgtacatgaatatggccacgcgtggtggctcacgcttgtaatcccagtactttgggaggctgaggtgggtggatcacctgaggtcaggagttcaagaccagcctgaccaacatggtgaaaccccatctctactaaaaatacaaaacttagccaggcatggtggtgtatgcatgtagtcccagctacttgggaggctgaggtaggagaacagcttgaactcagaggcgggggtggaggtcgcagtgatccaagaccgtaccactgcattccagcctgggcgacagagtgagactctgtctcaaacaatgacaagaacaacaaaaatttacatgaatatgcatatcagctgaaggcaagcacattacaaatgtaagtacaatttagtagaaggggtgagggagcctgggtgtcaatggggaagccttggtgagctcctagaagtaggatgaaggctgtgagacagtctcagtcctggtgatacagtcaggatgatgtaacagggttcagtgagggagtgcaaggtgacagaacaatatggagtatcttatactaattcctgcaaacttctcaactatgtacaagaaaacaaatacttacgaaacagaagaaaatggccaggtatagtggctcatacctgtaatcccagcactctgggagaccgaagcagtatcacctgaggtcaggagttcgagaccagcctggccaacatggtgaaaccctatctctactaaaaatacaaaaattagccgggcatggtggtgggcgcctgtaatcccatctactcgggaggctggggcagaagaaccgcttgaacctagggtggggtggaggttgcagtgagctgagatcgagccattgcactccaacctgggcactaagagtgagactccatctcaaatttaaaaaaaagaaaaaaaaagaaatagaacaaaacacagcagtggatacagtgctttttggttcattcaaagcagtcccatcagagtagcatattaaactatacaaacggctccaaatggcaaaatctagacagtagaaaatcccaggtcctaattatgttgtcaaataacttacaaaaaaaaaaaaaagatgaaggaagaagctacagattaaaagagatttaacagatttatcaaacaaataaaaaaggacttttggaacctaattcaaataaagttaaaatacatatgacatttacaagaaaactggaaaatctggacagtagatatttgatatcaagaaattcctaattttttagatgtggtaatagtattgggttatgctttttaaaagtccttatccattagagatgcatatagaattatgggtgaaataatatgatgtacagaatttctttcaaaataacatgggaagggcggccaggtatggtagatcatgactgtaatcccagaactttgggaggctgacatgggaggatcgctggtgtcaaggagttcgagaacagcctgggcaacatagggagactgtctttactttaaaacacacacacacacacacacacacacacacacacacacacacaaacacacacacacatacaataaaaaataataatatgagaaaggagaagtggataacgaaagcacagacaaaagaagactgggcttgagctaaatcactgtggaagctgtgtgatgaggacaaggggtttcaacagattattctgtttttgcatatagttgaaatccttcataataaaagttaaacaaaaaagtgctacaaatcctaacgctgacactaaattctacagcatgaagaatttatggaagagtgagactctgtcaaaaaaaagaaaaggttgtggaaaattacctaatgatacaaaaagtataataaagggggtgagtgggacaggttaaaatagatgatttagtggaatctcatttttgttacttaaaaaaagcatgtatcatgtatataaaagcatgggtaaggatgtagaaagatacttagtaaggtgttaacagtcatcttttaatgaatggagttataggcttttctctaccttctttattacgtttaagaatttaatgataaaaagtcacgcatgttgtttcaccccagcagtgttggctttactaaaaacacatactctaagaatcccatacatgaaaggtggaacttaatcaagaacatgtcagagagaagctgcttgagcaagaaaatatctgaaaagcaagctctcctagaagagaagcaaggcctccttaacagtttataagcacacacctgttaggggcacatactgcctgccagtgcctttcactctaagtctctctgtaagctgtaaaagcaaacagtttaatggcaaatacatactctatccaggttaaggtgccacagatttataaacgtgtaaaaacaccagaccttgttttggggttaaggtgagaaaagggcttgctaaacagtctctttcctagaaggaagttctcttacccactcactccctgggacagaaggtcaaagagcatctctggttggaatcataatgcttcggcctgaagtgaccaggccactcactactttagttgcccaagcagtatcaaaggagctcacctcatagtctttccttggaagaatctcatcctcctcctcctgtgtttctccaaggatggtctagaaaaacagatccgcagagggagccttttttagtggttaggagtggaaggaggcagaagtatttactgaaatcagtggctagcttctaaatcatctggagccattatcaaataggaaccagccctcaaaaaaaacctttcaggggtgagggaccatgtgggtgaggatctacagccatcagctgagctcttcatttccactgatagtctccaaataaccaccctcctcttcaggacacctcaaagatgtccaacgccagctgaaaaggggggtaaaaatgcaggttccatttgacagtgtgacgtatctgaaatcagaaaggacttgtcaactctgggaacacaactcaagttttcccaggatgctttgcagggggaagctggactgtcagtgacccagaaagggtgagggatagagtgagaaaggactggagaagctaaaacagcagcatgataagcacaaagtcctgtgaggaagctcattctgaaaacgcttgtttcattccaaactcttttcagatggaaataaaaggaaacatgggtgggatttactggagctggcctggattctccctcagattccaggaggggttatgagaaaagaccccagacttaggcacgtgaagcagggtagacgcttcgagagccctggctgcggtccccaggccccacccgctgccacctgcgggcccagattggcccggccccacccccggcaacgcctctctcagtcccttagcaaccgccccctccccaggccgactccgccggcttcttaccagctcctcgggggtgcgggtctcacgctcaccgcagcagcagcaccacctgcagcagcagcacagagaccccctgcaccccgccatcttcctcctttactgccactctggacccctctaccaaccccctcccagccaggatctgcgcctcacgtgactggccccgggacggtcacgtggccctctcgagctctgggactgagaccaggagtggctgcagacgggtggggcgaggactcgcgtcacatgacgataaaggcacggcctccaacgagacctgtgggcacggccatgttgggggcggggcttccggtcacccgcgccggtggtttccgccctgtaggcccgcctctccagcaacctgacacctgcgccgcgccccttcactgcgttccccgcccctgcagcggccacagtggtgcggccggcggccgagcgttctgagtcacccgggactggagggtgagtgacggcgaggccggggtcgccgggagggagatcctggagccggcaaacaacctcccgggggcaaggacgtgcttgtgggcggggagcgctggaggccggcctgcctctcttcttggggggggctgccgcctcccttgcgcacccttcgcgggattagtgtaactcccaatggctaccacttccagcgaccgccaaccctcaagcgaagactgactttggctccctgcctggacggaggggcccctgagccaggggtgacgatcccgcccctctgaccggcccaggcccgtgtcctcgcccccatcggtgactcagtgacctggtgactggattctcggccacctgggcgccgagacggcttccggctcctgccttttaaacctgcctccccggcgakcacctggagaagagcgctgggcccggggcactgcggtccctggcgcccactgcgtcccgctgcgcacgggggtccgccgggacctttctgggagtcgtaggcttagtatcccagtgcttggcgcagactagttgttcagtaagtggcagaggcttattttgagagagtggcagcacctggccctttggcgctcagtgaatgttggctatcaccgtgtgccaaactctggggataccccaggcaggacaccggtcctgtctcagggaactggggaaagagaaaggagacaggycttttcacccacagttacaacccagggtgctatgggagtccagctgataacggataaatcgtgggagttggcttacaaatatggcacatgcgtggcatatactaggaatgcaataagtctttgaaaatcagagggtttacaggtggttcagcttcctcctactctaggttctgttccagcaagcaattaacgaggtgcgcccttaaacgctggaggaaagccaactggctgctcttgctgttactcctcccccccgcccccgttcctcactccccacagccatccccactgagaatctggagtttgaggtcagaatgaaagagagcagccctagagggagaaagctttggcccagggttcttagtctggaatcaactccttgtctttggatgtatccccgtgtagtctgtgcacctgtgtgtgtatttcaggggaagggagcagtgcatttaatcagattgtcaaaagagtctaagaccccaaatggttaggtacacagggttagtggtggacagtctgaaagaaatgaacctcacctgggctttcctctgttgtgccatgtcaccacacacccattcactactgtgtgtttgcccattgctgtgcaagtgttttgtttgtttttaagtgtttgtcttattttcttaaccagactgccagatgrccctatgccctctgttggcctgtctgtgccctggtggctctgattacttgtttctgttttttgtttttgttttttttttttgagatggagttttgcttttgtcgcccaggctggagtgctatggcacaatcttggttcactgcaacctctgccttccgggttcaagcgattctcctgcctcagcctccagagtagctgggattacaggygcccgccaccaaacctggctaatttttatatttttagtagagtcgggatttcaccatgttggccaggctggtctcaaactcctggcctcaggtgatccacccacctcggcctcccaaagtgctgggattacaggtgtgttttttgtttttttaagagatggagtctcgctatgttgcccaggctggccttgaactcctgggctcaggcawtccttctgcctcagccttcccagtagctgggtcactgtgatgatttgaattgaattctgtgatgtgtaagaagagcagcctgcaaggcaagcacagatggggcagcttttgttctgagaaattcgtgcccttactgaacttgggtctggctatttttggaacatggccagcatcaagttctaacccacaacackgtctttttggagtagcatgaattcaggagaaatctggctgcatagtcaagccctcaccccttccatcctrtgcacgaactgtttcaagtaacagatgttccaggcagagccagccagagtgagctgttccttctctggagggtgatctggtatccctgaacgcctgttggcctcatctccaccaacccctgcagtctctgcccctgagtccccctccttccatccgcctccccttactagagcctcagccctccctcctcgcctggaagccttgcccccgcccccttgtgctggctggagctcaagcctcttcctttgtcgcagctccgcccagttgaacacacccgctggggaaggtgcctctgttccctccccacgcactctgggcctgagctgacagagatggaccatcgaaaagccagggtcctcccagctgggcactactgcccctcgctaggaatatgggcctcgcaggtcggcagcgtgaggtcctctgtgccaccttccatcaggtagctgtcaccgaggagcatgttgcagtgccgggtgggggctgccttgcatgcaaggagcctggcagcagcggagggcaaggctttgagtgaggcggcccggacagccatagctgaggagcatggagccactgggagggggcagtgtcaccttttttggccttcttcctgtgtggaaatacagygcctccggcttgaacctgccactcaggtgtcttgatgtgtcgggggtgtggctgcctgccccctgatgctccctgccccaccctgtgcagtaggaacccagccatggtgaacgaagccwgaggaaacagcagcctcaacccctgcttggagggcagtgccagcagtggcagtgagagctccaaagatagttcgagatgttccaccccgggcctggacccygagcggcatgagagactccgggagaagatgaggcsgcrattggaatctggtgacaagtggttctccctggaattcttccctcctcraactgctgagggagctgtcaatctcatctcaaggtraactcatgcaaggttaaggtgggaggcgggagtggtggtgcctggggagcaaactgtcagccctgaggctgggctgccctttaacccggcagaaaaaagcagccggagggggcaggaaggagaaggcagagtgggtcatctgatctgcaacttctctgttgcctgtaaaagtccctccacagtgtcaaggtattttagacacactcttcaatgggttaaaaatgttgattctcacactgtattctttgagggaacttgggggctggatcacgagtgcagtttaggaagtcacaaagcagtgagattgttttcagcaagttagaaatttggattatgcttcttgaactctagaaatgccaactgaattacattagcacttcatgaattgcagttttttttttaagtttatgccttttactgtatgcacgtctcacgtgtcactcccaagtttttgaagtttaaatgcacaaggatgtttaaatacaccgttgatagcttgtaacacaagtactcgtgcacatccaggcttttttttgagtctcgtttcggaacttggccttggtctgcataactgtaagctgctgcacagggcttggggggtggcatgaaagaaagtgagtctgctgaccctctttctaactgttcctacagcgaggctgtgcttgccacagttaggattcccctaactctcaatcatgatgtcttaactcacctgagatartaaacaggcaagcgctgtgaaaagtctgaagtgctgctctcacacaaaatgatagcgctgttgttgtgtcttacctctgtaatagtgattataacggcacctcacatatactgagtattcggtttgtacaccaggcactgttctaagttctgtggaaccagctgccgtcatattctcctagtgttatggttttttgttgttgttgttgctttttttttttgagacagagtctcattctgtggcccaggctggagtgcagtggtgtgatcttggctcattgcaacctctgcctcctggctcaagcaattctcctgcctcagcctctcaagtagctgggattacaggtgcccaccaccacacccagctaatttttgtatttttagtagagatgaggtttcactatgttggccaggcggtctggaactcctgacctcaagtgatccactcacttcagcctcctgaagtgctgggattacaggcgtgagccaccacgcccagcatcctagtgttattatgaagtgggtactactatctgccgtgtcttataaataaggaaacagaactcacagagattaagtaatgtacccaagatcacacagctataagtagcaaagccaggatatgaacgctgattggtctgtctccaaccttcattgatgcttctctaactcccgggccccatgggaaggcagtgacggatggtatttctcctggaacctctcttcagaaacaaaccccctacaggtttgaccggatggcagcaggtggccccctctacatagacgtgacctggcacccagcaggtgaccctggctcagacaaggagacctcctccatgatgatcgccagcacmrccgtgaactactgtggcctggagaccatcctgcacatgacctgctgccgtcagcgcctggaggagatcacrggccatctgcacaaagctaagcagctgggcctgaagaacatcatggcgctgcrgggaggtgtggagccagcactcccctacactctgggttctggctttcccggaggccacttggtagcctgaacttggttcctgaaatggtcctttacttcytcctgggccccacgctgaggatccgcaggatcccatccccgccagtagtgtcagtaggcattgtgggtagtgagtcatcctgggcaccacacacaggcagccacctcttccacctcttgacctcgacataggagttccgtcaggaatgcagtcgcggcctgataaccctctgccttgcctacaccactgcatcgattgctggctgcacccagcacttggcccaatcacagagtaacagagtatccaggagtgagaatagccggtcaggcctctggtgcccgctgttgtcaggccacctaagagtgggaagagggagcctgatgggtgggatcctatggcctcgtgctccctaccacaagaccccttcacttgagatgagtagaaaattctcccaggaggcaggagccccaaggccgtgggatgggagagggtggcaggcgtgcccaggtagaagtagggaagggctctccaatcctccaggcacggtgagaagcagcggtggtctcctattctccaccgccagcacagggtcagcatgcagtgaatattgaactggtgggctgcttttttccctcctgctgtcttaccaagtgctagaaagagacgaaccaaacctaaataatatgaagtttctgccttccagggactcgcrgtcctsggtgtcrggrctaggtagagggaacagaaagggtctctggaggttgggtgagacccagtgactatgacctccaccaaccctgcagacccaataggtgaccagtgggaagaggaggagggaggcttcaactacgcagtggacctggtgaagcacatcygaagtgagtttggtgactactttgacatctgtgtggcaggtgagtggctggatcatcctggtggcggggatggagctagggaggctgagatgcccagagagcctgtcggtgttcggttcaggacacagtgatcaggggcactcatgggtccatgctggatgaaggacatgcagaggtgaactgcaccgtgtccttgctccttttgtatcacccactcccctcctgggcctgccaccatcgacccctagctttttgttcctctgcctggctgtgcccttagcctgcttggccttattcttttctttaaaacgaaagaggggtctgggcgcggtggctcacacctgtaaccccaacactttgggaggccgaggcaggcagatcacctgaggtcaggagttcgagacctgcctggccaacatagcgaaaccccgtctctactaaaaatacaaaaattagccaggtgtggtggtgcacggctgtagtcccagctactcaggaggctgagccaggagaatctcttggacccaagaggcggaggttgcagtgagccgagatggtgccgctgcagtccagcctcagtggcagagcaagactccatctcaaaaaaaaaaaaaaaacaacaccccacaaaagagggatatttactaacaggattccagagggcagggaacccaagatcaggagatggcctcagacctcacaaggcactggaagaggtcaaaaagcaaggccctccctcattccctctggggccacagggtcccccatctccgcttcccactgcacatctgtgcttcatctgggagacctgatacccatgcttttccacacacctggcctgctcctgagtgtgcagagtgtcagttccagccagttccccaggctaatggacaggcctccgttccaaattcccaggaaagagaatcaccattggccacagccacaagaccaggttcccccaacagaaatgggtgggttggacttctctcccacccttgaagctgaaggctggcattgagccctcagcgtctcagacagcgctcaggtatggcaagacagtgtgcaccagggacaggaagtcccgggattggcacattttctgggatgacagtttttttgccaatattctgggagaaatcctaccatttttatattaaacatggctatgttatggagtagcatctaaagtgatatgaactaaaaaaaaaaggccaggtgcggtggctgaagcctataatcccagcactttgggaggccaaggcgggtggatcatgagatcaggagtttgagaccatcctgtccaacatagtgaaaccccgtctctactaaaaatacaaaaattagccgggcatggtggcgcgtgcctgtagtcccagctacttggtaggctgaggcaggagaatcgcttgaacccaggaggcggagcttgcagtgagccgagatcgcaccaatgcactgtagcctgggcaacagagccagactccgtctcaaaaaaaacaaaacaaaaaacccaaaaaacaaaccacgtggcttcaagaaaattacatgttgtgagtaactttggccttgtccctaacccccgatggacatgtccattctgtcaacaggggtgtttaggtgctaagtctgggaagcgctgattaggagtcagagaacagacatttccaactgttaaattgtcatcgcttgtatcagccattatatagtcagttactgggggaatatgcacccgtgatgggcgttaggtgataatgattggaaactagtgaagctgtgagctcacagttgctgaatggtttcttactttgcttatcaagtgggtaatgaagatgagtggattagaaaacaccaacctgttgggcatggtagctcatgcctgtaatcccagagctttgggagactgaggcaggagatcaagaccagcctgggcaacacagtgagaccgtgtctctacaaaaaataaaaacattttaaaaaagaaagccctcagctgttcatgatagaaaaatagagtaaatagcaaaatctatacgtaatcaaatgctagatttgttcggtgatatttaggtattgtagctatacttttcagctattaaaaagccttgttgtttctgaaattcctactgggaaaatagctttgttattgcaagtgtgaagccccattgctttatcccccactcccttaccccttgaaacaatagtttttatattcattttttgatgactctgggtttcttaagaacggaactgccttatcagagcaaagcagcttggccttccgcctggctcagagtcctgccctgggcttgggctgatgaaaccagcactccatgtagtttcatgaaggcctatggtcrtcctgcttgcctgaccgagcaaggcggctagtaagtttagtcattgaggaaaggggtcagagagttcacagagccagtaaggagcctatgggacatctgatcccacctcctaagcaattctggaatcttgtcttcagcatccactgcccctgtgttttcagactccaggagctcattgttttgtgagtggcttatagtactctagccagctctctgaaccggatgctggttctgccattrgaaacaacacagaatatgactaataaagaacttcactagggggctgggtacagtggctcatgcctgtaatctcagcactttgggaggccaaggtgggaggattgcttgagcccagaagttccagacaaacctggacaagatagcaagaccccatctctaaaaaataaataattaattaaaaaaaawttttttaattagccagatgtggtggcttgcatctgtagtccaagctactcaggagactgaagtgggagatcacttgtgcccgggagttcaaggctacagtgagccatgattgtaccactgcactctagcctgggtgacagagcgagaccctgtctctgaaacaaaacaaaacaaactcacctatggtggatcctttttccccaggacagacctttggacatttgaaaggagtttctgtattcttttcattcttttttttttttttttttgagacggagtttcactctcgttgcccaggctagagtgcaatggtacgatctcggctcactgcaacctctgtctcgtgggttcaagcaattttcctgactcagcctcctgagtagctattacaggcatacaccaccacacctggctaatttttgtatttttggtagagacggggttttaccatgttggccaggctggtctcgaactcctgacctcaggtcatcctcctgccttggcctcccaaagtgctgggattacagacatgagccaccgcaccctgccatccattattttctttgaagaaaacatcactttcttcagttcttccttgtgtaacttggtttttagcttttcactatcttggacccctgagtaatttcagtgttacattaaaaacaatgtttaatccggtgcctagagaaaagtcaagcttagtaccccagatgctgcccagccagtgctaactgtagcattttctcttttctatggccaccaagtgcaggcctgatttgcttggctgctcaaggcaggacagtgtgggagtttggagcaatccacccccactcttggaactgggctctgagccacctcccctgagagtcatctctggggtcagaagcatatcagtcatgagcccagccactcactgttttagttcaggctgtgctgtgctgttggaaggtgcaagatcagagcccccaaagcagaggactctctctgcccagtccctgtggtctcttcatccctcgccttgaacaggtggaggccagcctctcctgactgtcatccctattggcaggttaccccaaaggccaccccgaagcagggagctttgaggctgacctgaagcacttgaaggagaaggtgtctgcgggagycgatttcatcaycaygcagcttttctttgaggctgacacattyttccgctttgtgaaggcatgcaccgacatgggcatcacttgccccatcgtccccgggatctttcccatccaggtgaggggcccaggagagcccataagctccctccaccccactctcaccgcaccgtcctcgcacaggctgggggctctgggtggagtgctgagttcgctgagttcttcccagatctcctctcaggtccagaacttgcacagcgttgcttggccaccccattttggttacctctaattttccccccaaaacccagcaacagtgtctgttgaggggtttgttgtactttggccaacaagcatcaccaaaagggattctaattctcattacaaatcctgcttaaatcagtgtttcccaaaggtggctgtcatcagaaccacttgataagctttttcaaaaagtggatctccaggtcccacccctggaggttctcactcagtaaatctgagggaggtcctyggaatgtgtgttttacttcttgagcttggcaggtgattcggatgatcagtgcagcatgggaacagctgggttagatgacaccatgttaccaacagacacatctagggctaaaaggctggctcaacccaaggctggaatgcttagggcagctgctctactctgtaaaaagtgggaaagctgggcatagtggcacgtgcctgtagtcccggctacttgagaagctgaggcaggaggatggcttgagccctggcgtttgagagcagtgagactcagtctctaaaaacagaaaaaagaggagaaaacggcaggccaagcccaggtgtgctcctagaatatgatcggactttcgtgggtccctctgcctgacactgtggttggcatggatgatggaagggggagaagtatttagggtgggagacrggctggccagcagccgccacagcccctcatgtcttggacagggctaccactcccttcggcagcttgtgaagctgtccaagctggaggtgccacaggagatcaaggacgtgattgagccaatcaaagacaacgatgctgccatccgcaactatggcatcgagctggccgtgagcctgtgccaggagcttctggccagtggcttggtrccaggcctccacttctacacccycarcygcgagatggctaccacagaggtgctgaagcgcctggggatgtggactgaggaccccaggtgagggcagtggcccagagatccccagaggagggtccaagagcagccccggctgcagtgctggctccccacggtggtacagrtggatgtctgtgccatggctagctgggcacatcraaggctccagtctcagagggcatcagatggaagaactcagcctcaggggtgctcccctgcttccggctccctctagccaatcccttgtctcaattctctgtccccatcctcrcccaggcgtcccctaccctgggctctcagygcccaccccaagygcygagaggaagatgtacgtcccatcttctgggcctccagaccaaagagttasatctaccgtacccaggagtgggacgagttccctaacgrccgctggtgagggcctgcagaccttccttgcaaatayatctttgttcttgggagcgggagggcagaagaagtttgcatgcttgtggttgacctgggaggagtcaggggcagaatttacaggaatggcctcctgggcatgtggtggcactgccctctgtcaggagtgtgccctgacctctgggcacccctctgccaggggcaattcctcttcccctgcctttggggagctgaaggactactacctcttctacctgaagagcaagtcccccaaggaggagctgctgaagatgtggggggakgagctgaccagtgaagmaagtgtctttgaagtcttygttctttacctctcgggagaaccaaaccggaatggtcacaaagtgagtgatgctggagtggrgaccctggttcatcccctgcccctggcctgaccccagctgcaggccaggctgcggggctgtgacttccccatcctgtgccctcccctccatgctgtggacatggcaaagggagaagggtaagttgggagacctccacctggaagggcttagggaggcaaagacaggctgggtctttgttgggggccgtgagagggactcagggtgccaaacctgatggtcgccccagccagctcaccgtctctcccaggtgacttgcctgccctggaacgatgagcccctggcggctgagaccagcctgctgaaggaggagctgctgcgggtgaaccgccagggcatcctcaccatcaactcacagcccaacatcaacgggaagccrtcctccgaccccatcgtgggctggggccccagcgggggctatgtcttccagaaggtgtggtagggaggcacggggtgcccccctctcttgaccggcacccgtkggttccccagagcttagggcagagcagcctgcctctcctgggctcttaaattttgaatgagcatggattggagcggatgggagctcatgctttaagtcagatagacctggctgggcacggaacccggccagcactttgggaggccaaggcgggtggatcacttgagcccaggagttcgagaccagcctgggcaacatggtgaaacccattctctacaaaaaatacaaaaatgaccgaggcatggtggtgtacacctgtagtcccaggtacttagggggctggggtgagaggatcgcttgagtccgagaggttgaggctccagtaagccatatttgtgcctctgcactccagcctggcccacaaagtgagaccctgtctcaaaaaaaaaaaaaaaagattggctgggcttggtggctcatgcctgtaatcccagcactttaggaggccaaggtgggcagatcacaaggtcaggagttcgagaccagcctgacaaacatgatgaaaccccatctctactaaaaatacaacaattagccgggtgtggtggcgggcacctgtagttgcagctacttgggaggctgaggcaggagaatcgcttgaacccgggagacggaggttgcagtgagctgagatcatgccactgcactccagcctgggcaacagagcaagactccatctcaaaaaaaaaaaaaaaaaagatagaaatcagacctatggaggcaggtcactcgacctctctgagcctggttttctcgtctgtaaaatgggatgtagcttgtgttctgggcatgaaacctaacaaagcatgtaacgtgcttggcacatggtaagagcaggaagcactccctgaaaggcagctgctgttactatcctgagttgacacctttctcccagggctgctggagttaacattatgttctgatctaaggcccacrggccctggagcagaaagacctgagtttaaggaccagctctactgtttactgtcagagtagccaacgtgctcaacttccctgaacccactttcctcacgtggggctcactgtgcccagcctcccgtattatcagcattctagcaaatgagtttgagtaaacccagcttaatccctgataggcactggttctagaggagatgtcaatgtcattgtcagcttgcactggggaggatggaatgtgtggggcctctctcccatgactcggcctgtcaaaccagttgctgctgttcagaaatggcttcttcgtggagtcttccctgactgattgggagaggggtggctgatagccctcagacctgtccagactgagaaactcacgtccccactcccctcaccctttgcttatggacgtgccaacgccacagttcattattccgcccacatkgctgccartagtcctgataccttaggtgtctgcgaaagggcgtctggcagggctggggttggtgacaggcacctgtctctcccacaggcctacttagagtttttcacttcccgcgagacagcggaagcacttctgcaagtgctgaagaagtacgagctccgggttaattaccaccttgtcaatgtgaaggtaggccaggccccagggttcccacagagtaycargcccttcgttgagcaaacacccagcacctagcctgggctaggcattgtgcaagacagasagatacaggcagaactggggccctgctcttaaggagctcccagcctagagtgagggaggcagatcaatgtgtgaccaccagccagtgtaagtgggaaaatcaagttcaggagaggatgctgtcrggtccaraggagggatatctcacctgggaggccagggaaggcttctcagagggtcatctgtgggaatcactgaggasaaagaggagttggccaacaggagagaagggtattcctgggacagggcagaggacaggcagaggcagtgagctgcaccatctggggaaacsgggaacatgagcaggaggaggcgggagtgttaagcaggggccaggcccgcagagatcatggttgtcctgctggaatttgagttttccctcaatgcaagggaagcctttctccagcagtggggtggcttggttcctgctttattttaggcaaatcacagtggatagtcatacggatgagagagattggggacggctagagccggggaggccagtgaagagacccctggagtgacccaagccaaacacactcctggaggtgggctagacaagagggaatggatcagagagtgagcagggggtgctcaaggaggagaggggaagtggccaggacgcctctaggttcaggcttgtgtggggagagatatcattcacagatgcaggcagaggaggccaggagcggaggcacagggagaggggagtggaggcgcagggagagtggaggccgggagtggaggcgcaggcagagggtattgagcccagacagcctcattgagtcaaggctgtccaggcagtgggactccagttrttcttggcccaggtcttacccccaccccacatcccctcagggtgaaaacatcaccaatgcccctgaactgcagccgaatgctgtcacttggggcatcttccctgrgygagagatcatccagcccaccgtagtggatcccgtcagcttcatgttctggwaggtaaaggagccgggggcaagcttgccccgcccacctggaaaaccgtsgggagggattgggaccaagtcccaagcgtgtrctgaaggccacactggacccagccttcagggcacacccagctctgactcacccatgtcactgctgaygcagggtgtttatttctgggcaggggtgggaagtgatactggcagtgggccttgttctattccgggaaatgtcctgttgagcagagcccttggagagccctgttaatcttgcctstgtgtgtgtgtgcatgtgtgcgtgtgtgcgggggtatgtgtgtgtaggacraggcctttgccctgtggattgagcrgtggggaaagctgtatgaggaggagtccccgtcccgcaccatcatccagtacatccacgacaactacttcctggtcaacctggtggacaatgacttcccactggacaactgcctctggcaggtggtggaagacacattggagcttctcaacaggcccacccagaatgcgagagaaayggaggctccatgaccctgcgtcctgacgccctgcgttggagccactcctgtcccgccttcctcctccacagtgctgcttctcttgggaactccactctccttcgtgtctctcccaccccggcctccactcccccacctgacaatggcagctagactggagtgaggcttccaggctcttcctggacctgagtcggccccacatgggaacctagtactctctgctctagccaggagtctgtgctcttttggtggggagcacttgcgtcctgcagaggaccacagtgggtggcacctcctgagaaggcgaggagagtggttgttgccaactaagccctcgaaccaaggcagcctccagagccagcctgggactcccagtgaacttacmcttggagcccgtgcagtacaggcaaaacacgcaagggcatcaggcactggtggcatcgtagaagagatgtggcaaagtgctgtacccttccacctcctagaggtgggcagctgggccccacctacttgtgactgaaggggcacaccactgccctgcctgcccacttagccgtccatggcaccagccccctggatgggcattgggctgacacctaccatgctgctttttggcacagttgtctattctgagccttgagagaaaaagtgccccttaagggttgaaggcagtctgaacccttgtgcttggtggggctcgtggccttccccttttgcctggctgtggaggcctgatgctgccccgttccctgtcagaggctaagatgagatttgccagcacaggggccccagatctgcctgggcctgtgcagcagcccagcttcctggtgtatttttcaggtaggcccttgtcctgccagctgccttcctcatcccctcgtcctgtcccagaggttatctgcctggcctggctccccacgagtcacctgcaagccccagggcctgggggcagtgactggcaggtgcagatgggctgtttcgtgtagtggaagagcagcctgatggccaagggggtggacgcaattgtgggatgtcctctttactcccttcctggcctcactggctggggcagaggggcagccgctaggagagactgaaagcagcagctaggactgaggagtgggttttattgtccttcagagctcttcaagctgtcccctctgtcatcactccctggatgtgtggggcatggttccttccctgggaaggctaagttcagttctgttttttattctatgagaacaagtcacagctgcagctgggccccatgctctgccccargcccccaaccccgcggtgctcyggcggcttcctgtccactctcggggcccttggggcctggcttgctccagggtcttgggctactggcagctcctctccttgggctcctggctgccaggcgttggtgccacttcttaaaggcctggaaccagggaggagaggaaatgctattgttgtgggctttctccggggtctgtgctgtgcctgctagagcaacccctgtacccagctccttttgtccccagggcccctccctctgccccaagcagccagccagtcttgcctaggccaaatgcacaagctcagaatagatctgatggtgagctgggaagctgtactcagagcagagcaaatgagggagggggcgctcaggacccaggccctccatgggctagtgtgagtggcagccatgcctcatgccacaccttcttcgcaaactgatggaccgggtgggcctggcctgagctggggccacaaatcaaagcaagggctccagcatccagcctgtgtgttctgtaatggaactgaccccctcccctgaaaacgaaggggccccggggctggcaagcagggaaagctccacggtgcgyggctgtggcacagacttctggaaggctggctgagtggaatgcagggaagagggcagtacctgggaaaggacccacccatcttcctgctgctgtaactgctgagccactcgcagtcgcaggatccgctgccaccacgtctgccaggcccatctcaggtgccactccctgagctttggggacagttggcagagaaggcctcttgtgctcacgctcccccgcagtccccagcccttctgcctttctcccccgacactgctgcaccagagtgaaagggctatggcaagggggtgtcatctgaggagtattaagaatgcagattcctgggcctgtcccccaaggttttggagtcagtaggtccaagggccatacttttgagaggggtttgggttaagtatgaggtgaaatgggagatggtcagtgtggagaggggtgcacccactcaccagggtccgcaccagctgctctgccccttgggcatccacccagtgctgccatgccactgccaggcacctggcctgctgggaaccccgcagcccgtgaagcagtgcctcgaggcaccggcgctgcaggtacttcctcctgatggccaagagcatcgtgacccttcagggccagaaggagggcagagccatgggcctgggcctgcttttccaggatcctgcaggaacgagcactggccagagagggcccagctgtagccatggctcaggcaagcccctcagcccttgcccccatccctcggacccaccaaactgcacacacagctcctcttaccgtagcctccgtttatgggccttgctttgggctttgsaggctctgggctcagggctggagtgcgctcttggtccctggtccctcgtccacaggggcaggcctgggacccagctactctgtccaggccactgtggccagagctggaaggcagggcagagggaatgttccctgcaccctggaaaggggagttgagtcacaagagkttaaggtgggtccaggaaggcagctgctcttagtgcccgcytaggagttgagtacagtgaggagggtggaggaaggtgctgagcttagccttgtgccctgcccccatctccccaggcctccagcctctcmcggctgcctgccrcccaaagagaaatcacaggggcggggcaggaatgcaaagtgttttctcagaacagctgaaacattccgaagagggaatggatggggagaatggtcaatacacataagaccgtgtcccaaggagctgatttccaggcccctgaggactggagaccgcttcacccctgcacttcagacaccgtttgtcccccggggcaaggtctccttactctgagcccaggccgttccccttggcttcctccgtccacccaggctgcactgcagtgatggcgcgggaggcaccagctctgtggcctgtgtccagcagctgygggtctgaaggartagccagagaggagcacctgaaccccatgggcttggacttcctggggccccgctgggatttcttcgctgctctagctggcaggacacatcccggcctcttcttccacccattcccccatgtggctgaagacattccaacaatggggtgggcccataatagttagccctcagtcagttcccggagcacagccctgggagggggctatttctctccccactgaaaacatttcaaagctgagttacttgtctgaggcctcatccctcggaagccgtctgactccagagtctgagcccccggctagtaccctatagagagggggctctccaaaggggctgctggggcatgtgtgcctgtggcagaaaagaggagaccctggaattcagcaccctgggtgccattcccagcgtttagtttctagaggcctcagtttctccatcagcttatgggatccttgtctttactgacaagaatggaatagaaatgtaaaagtactctgaaaagcaattgccctgtaacttatctagaaagaaaagaccctgagactccagaatctgctgttgccatagccccatatgtgtgaattctgcaactagccaaggctagttcctttcaattccatttaaaaaacaaaaaccagcaggtgtggtggctcatggcgtaatgggcctgcccaatgctttgggaggccaaggcagrtagatcgcttgagcccaggagtttgagacaagccctggcaacatagtgagatcccatttctacaaaaaaaaaaaaaaaattagccgggtgtggtggcacacgcctgtagtctcagctactcaggtggctgaggtgggaggatcgtttgagccctggaggttgaggctgcagtgagctgtgatcgcaccactgcactctggcctgggcgacagagtgagacactgtctgagaacaaaaaacgactgaaaaaaaaaatcaccttagctttttctcttagaatcttctctaaaatgtattctttgtggcattctgaaataggattcatgatgatgcctgttgatcttagggacactacctcacctgccagtatctttggggctgtgtccttcaaggacatgtccccagactgctgtgcagtgtcattttttgtgtttggtttggtggtggcttcttcccccttgctaggctatcaacctcttatcaccacttgttggtgtcagaactaactgcttctggtctggagagggactgaccgatgcctttgggtagagagaattatgaaagaaattttggtatttttctactttatattttctgaggtttctgtaataagcatatttcacttttccaataagaaaaaaaaaaaacttggcctggcgcggtggctcacacctgtaatcccagcactttgggaagtcgaggtgggaggatcacttgagttcaggagttcgagaccagcttgggcaatatggtgaaaccccgtctctactaaaaatacaaaaattagccaggcgtggtggcgtgcacttgtagtcccagctactcaggaagctgaggcgggagaatcacttgaacccgggaggcagaggttgcagtgagctgagatcactcctctgcttcagcctgggcaattgagccagactctgtctcaaaaataaacaaaaaaacttgacaaaaaaatgctactgtcctcgtgtacctattctgatcctcaactgcaccgtgagaaagcatgcatttcaatgtctccctaacaggctgtgacccaacatgctggtctttgcggccggacctgcagtggcctggcactcgagaggtgccaggttcatctttgctgatggattcagagttgcttgtcagaggctgactgagaactggggagaggtggtgcatacgaggttgctgggcccctggggaggcatccagccatgctgccaccacgggctgaatcaagctgattctaaggccggtggtccgagggtcatttttggacctcccgccctgcctaggctcccttcacctgtttccaaggggctggggcgtccagcagcaggctccccctgctggccatccggggccagagcgtgaggtcagtctggggcttggggcgtaccttgccggcccctggcagtcccagccgcaccctgagctgcactgtccgcaggaagcgcctgagctcagccggccggagctgggtgaggatggctcgctggacaccgccgcgcaccgccgactgcaccgaggcctctaggaccctgcgggagaggaaggagtctgcagccagggccatcaaggccaggactctctgcagggagcccccccagtgccctgcgggagggggccttctgggcccagccccaggctggggcccacccacctcccacactcccttttctggagggagaatctgggtaaacaggatggagagcgacctggaaggagaaaatcacagacggggacaagcatcctgtttaggggcagagaggggacagtcctgccagtgccactttgcctccccttccctggcaagagcgcgtttatggcgcttgctgagtggctggctgtgctggtgactgcaaggcatgaccattagagacttccccaaggaggggacacacagcaagaggcggtgccaggatgtggcccaggactagatggccagggcggcctctccctgtcacccccaaccaccctcttgagcctttgccctgccacccagccatgaattacgctctacccctgccaaaaacaggcttgaggcctgagctggaagcacagagtggggctgcacttagaccacagcactcaccaggctcgcggcttccaggaagcatgggctcggctgacctggccccgacaggactcatgcacccacagagcccagcaccaagtccagcactgggctgcctgggccccagcgctctctcctgcctgctgctgggcctcatggtgcatgcccggggccactggccatgctgggaaggcctgtggggcccgggccttcttctgctgcccatcttcctggccttgctgcccgcagcttctccagcgggcaagggaggcctgggccacacgctgctcctgtgccccggctgccacttcctgggcttcccgccatgtggcaaacacagcccccagtgctcttctcctcaggccatcctgaaaggcttgatgctgggcccggagcacccccgtgtctcttacaacctcacaccaggcctggaagtagctgcaaaacagacacattgggccaggtgtggtggctcatgcttgtaatcccagcactttgggaagccaaggtgagtggatcacctgaagtcagtttgagaccagcctgaccaacgtggtgaaaccccgtctctattaaaaatacaaaaattagccaggcctggtagtgggcacctgtaatcccagctacttgggagtctgaggcagaagaattgcctgaacccaggaggcagaggttgcagtaagccgagatcgcgcaagtgcactccagcctgggtgacaagagtgaaactccatctcaaaaaaacaaaacaaaaacagatgcatgggagggcttgtctcgttctcagagtcaaaagtcacatttattcaaagttacacttgcaaatctcccacaaaacagtaaacgaccagtaacaggtgaaagcactggctttccatcttgcaacctcagcctcagagggcaggggctgccctgcgagggggatgggaaccagcagtatgggttcaagtcccacatcagccatgccctgcctcccatcacatgcccaggtggttggtgagggagaggaacaccatctctcactcagtgagaagccaagaaaaaaaaccatctacggccaggcacagtggctcacacctgtaatcccagcattttgggaggcagaggcgggcggatcacctgaggtcgggagttcgagaccagcctgaccaacatggagaaaccccgtctctactaaaaatacaaaattagccaggtgtggtgccacatgcctgtaatcccagctactcgggaggctgaggcaggagaatcacttgaacccgggaggcggaggttgtggtaagccgagatcgcgccattgcactccaacctgggcaacaagagcgaaactctgtctcaaaaaacaaacaaacaaacaaaataaccatctacaccctcagatgcaaaagcacagacgtcagccattctgtagccaacagttcactgccccacggggacactgaacattcgcaaatttgtactgaactgtgggaggagccattctgtgtcctccgcttggttttacaatatgcattcatgaactgtatacatgttccaccagaacatctttacttaaatgaagatttcactctcttctcttagcgacagtgtacagcagaattctccttgctgtaactcctcacaatgggcgttatggtagatttccgaggagtggatttctcctcctttttttttttttttttgagatggagtctcgcactgtcgcccaggctggagtgcagtggtgcaatctcggctcactgcaacctccgcctcccggattcaagtgattctcctgcctgagcccaagtagctgggactacaggcacctgccaccatgcccgtctaatttttcatatttttagtagagatggggtttcaccatgttggccaggctggtctcgaactcctgatctcaagtgatccaccttcctcggcctcccaaagtgctgggattataggtatgatccactgttcccagctgatttctcccatcttaatcatatcctctaaaaccaaagaactgacctggccaggagctggactcccggggcttgttggggccacaggttaggggtggggtttgccaccactcccaaaataggtaataaggtgtcagtggtcatggccctgtgtttccaggctaggatctcccttcatgccccttttttcccaggccacaggcctcctatctgggccaccgtctgagcttcccaccccctgggtgctctccttgctattccttgcgtggggaggaccaacaccctcccacccccaggcccacccacctctgcagtagcagctgctctggccgggtcactgtgcatctctgatgagctgctgcctgctgccagctccggaacaccaccttctgcaggccctggaggtggacctgcacccatgtctggcacttttcatgcaggaactgctgccctggggccagagagatgctgaagagccactgggtgctcaccccagcctctccccatgggcctctacgcagccagcccttcgccccctaccaggtgggaacacaggaggccaccctgactgtctgggttaaaaagcctctattatgggtgtcctgctggtgaccaggccagcccagctcatagagttgttgggtttgtttttgtttgttaattttgccacagtattttcaaatctggagaattcaggtaaaaatctaattttctatttttttttttttttgagacggagtcttactccgtcgcccaggctggagtgcagtggcccgatctcagctcactgcaacctctgcctcctggattcatgccattctcctgcctcagcctcccgagtagctgggactacaggcgcacactaccacgcctggctaattttgtgtatttttagtagagacggggtttcaccatgttagccaagatggtctcgatctcctgacctcgtgatccgccagtccgggcctcccaaattgctgggattacaggcgtgagccactgcgcccggcccaaaaatctaattttcaatttttctgtaaaaactagaagttctggaaacactggctcagtgttcctgccggggaatgattgggctgcataagcagctgtctccagcggacaggacatgactttctagaaccaccacagccctgcctgccagctcattaatgcgatatgtcggtgtagtgggcagcctccaagacagcatcctgtgttcgtgtcctgggcaatgccccgccttgaatacaggctgggtttactaatttgcttttaacagacagaatttggcagaagcaatgggatgtcacttctgatatcaggttataaaaagactggttggggctgggtgcggtggctcacgcttgtaatcccagcactttggaaggccgaggcgggttgatcacttgaggtcaggagttcgagaccagcctggccaacatggtgaaaccccatctccactaaaaatacaaaaattagccaggtgtggtggcaggcgcctgtaatcccagctacgaggggagctgaggcaggagaattgcttgaacccagggggtggaggttgcagtgagctaagatcgcaccactgcatgcctgggcaacacagcgagatcgtctcaaaaaaaaaaaaaaaaaaaaaaaaagactggttgggccatgcaacagctctttttgcccagaggccaagacccagagagcaagcctgccttgggaccatccctcctcccttcactggccacattcctcagggcttctagcacactgcaccctcagccagcctctgcaaatccagtccttcccactgccctattttgctgaccccttcccacgcctcaacttctctcgccactgctctgcccgctgagccctcctcacctcctcctgggaccctccctgactaactctgctggcccctaagggcaccatgactctgcccacttctctcccaactcagggctccgaccagtgactcctagaggccaggtgaggataaggatgaagataaaggtgatgacatagggactacattatccccattttacagatgtgtaag

SEQ ID NO: 8909 - DNA, 60450 bp, Homo sapiens
ctccaatgccctgactttggcaaaatccacgccctttttgaggaaggcaaacccacccagaataattgttgagccaacaagcagcttaagccgctcataagccctgaggtgcctgtgaaggctgaggcccagcaatgagctgccactgccaaaaccagtaagagtcactgtttttgccaagctttttttttttttttttttcttagctgttgtcattgttttttgggaggagagatgggacatctcaggaattcgcctgtgctgctgaattctcacgtgcagcctcatgtggactcacagccactccctatcctctgtaccatcatgttttactgttctctttaattccaccatgaagagacttgataggaatgttctggaaactgcagcctaggggtggggacgggggatgcgaggagtggggagcagtttattctccctggcagcaggactgaactttggtgccagagggccactgggtgtgagactgtgggagatgtttgtttttttcctgcctctttatacattttatgggctttccatatttgcttaagcaaaaaagttaaaaaatgacaatgataatagttaacatttattgagcattgctggcatcgattgagcatttatcgaacatactgactttccatgtatgaactcacttaacccttacaaccaccttttttttttttttttttggaggcagtctcactctgtcacccaggctggagtgcagtggcgagattatagctcattgcagactctacctcccaggcttacatgatcctcccacctcagcctcccaagtagctaggaccccataggcatgtgccaccatgctcagctaatttttaaaaaattttttttgtagagatggggtctcactacgttgcccaggctggactcgaactcctgggctcaagcgatcctcccacttcggcctcccaaagtcctgggattataggtgtgagccactgcaccaggtcagatattcttttttttagaccaggtctcactctcacccaggctggcctggagtgtagtggtgcaatcttggcctctgggggttcaagtgattcttgtgcctcagcctcctgagtagctgggactacaggcacatgccaccatgcccagctaatttttttgcatttttactagagacggtgttaagcctttggccaggctggtctcaaactcctggtctcaagtgatccactcgcttcggtctcccaaagtgttgggattacaggtgtgagccactgcacctggccccaggtcagatagtcctatagtcttatttccagatgaagaactgagtacagaaaaggaaaaattaaaactattgaaatttaaaaagagatcattaataaagaggaacaaactactgatacatgctaccacatggatgagcctcaaagacattgtgctcaatgaaagtggccagacacaagagatcacatattgtaaaatgtcatttatctgatatatgtagaaaaggcaactccatagagacagatcccagattagcggttgtctggggcagggggtaggagtggggatgatgaaatattctaaaactggtttatagcgttgtttgcacaacttggtaaatttattaaaaaccattgacatgggtgaattacataatatgtaaaatattcctcaataaagtaaaaaaaagaaatgcaattacgttctgcaaatataacatttcctaagcagccatgatccactttacaggaatttctccagtaactaacagctcattcatttgttcacctgaactcatcttcgttgagcacctattatgtgccaggtaccatgccaggatatgggttccagggtgaatctgatcaagtgcttctgctctaatagagaatatgggttagcaagtgttagaaggctgggctagaaggggtggagatgcagatgagaaatccagcaatgacaagagcgtatacttggggctgccacagggtgggcagtgctggcagagcctggaggaagcaccctccacccagacctggcaggtacttgagaaggttccgagaagagaagtttccgagaagagaaggttccgtgcttgaggctgggacctgaaggatgaggagttgttagcaggtgaaatggctggggagtggggcaggaagaataaaagtcattttctcattcatttcttaattcttttattcattcattcagcaactgttcattgagagcagttatgcccatttccctgatgaggaaatagagcctcagagaggtaaagtgacttagatacaaaccttagccaatctcttgtcttaaaagcccacctttttccactccccactcttgcctccaaaaacagtctggacaggttagacacaccgctgtgactttgagggtcaaggggaggtaccctgccaaaaaacaaaaacctaattatccttgtttagtgagaggaggctggcgtcccccacagggatgttcctttgtctgttggaactcttccgctgccttgaggacccacctttagccccctttggatcttgaatgggggagccagcctgccagtgtctggggttaaggggaggagaccactgaattcattgtctgggccagggaggacctaccattggaaagggaatgggaccagaattccagaccaggctttgataccaattattcaggagacctgggtcagtccttacctctctgtggtcctcagttttctggtccctgaaacaagaaatctgggctggctgtatcctgaactataggacttctggcctcagatgcctccagattgatatgggctggaagtagggtgacacatttgttctgatttgctcgttctgatttactttccaggttttagcatcaagagaaaccttctcagttcctgataaattgggatggttggtcaccctagctggaggactgttaggttaacctaacctcacattttacccacaaagagcaagacacgcagcacccgcctttattcctatgtggccacgaagctattttcaagccattttgtttgcacatatcatgtttctagggttcagctgaaaaccctctcaggtccagctaccacttccctcaattccttcagatcttctgggctctgcttggccatctccttttcccccctctgcaccccctcccatgcctcaggatggtcttttttggttgtctccatcagctcccctggagcccctttagctccttcctctgcatttaatgcaggatttgtgccgaagcaggtgctccacaagtcatcacggaaagtctgaatatctccagggcccagggcagggctgcccccaccctcaaggagggctgcacaccccaattccagggcaactttgttggaaggacagatccttcctggaagaggttgcagggagccactccccaggtgtgacttcttaaccctttctcttccatgggaccactcaggcattgggtggagcctgtggaccccttctgagaataatttttttaaaaaggcattaggattactatgaaaagtcattttactaaaaatagatatcaaactattaacaatttctcatatagtaacatacgttctcttttactaatacattaaataagatttagtggtcggtctaatatgactttaatttcacagttctcgtagcttagatgatatcttgagatgtttacaataactgtagtgtgttacgtaaatacctgtgatttctactagtgacaaaatcacagggacatctacttgctgcctacattcataatcaaaggatatgttaaaaaccattggctgggcacggtggcttacgtctgtaatcccagaacttcgggaggtcaaggtgggcggatcacctgaggttgggggttcaagaccagcctgaccaacatagagaaacccccatctctactaagaatacaaaaaaattagccgggtgtggtggcgcatgcctgtaatcccagctacttgggaggctgaggcaggataatctcttgaaccccggaggtggaggttgtgatgagccaagatcgcaccattgcactctagcctgggcaacaagagtgaaactctgtttcaaacaaacaaataaacaaacagacaacaaagcctttagagattagtgaggctaaaggtataacttttgtccacccctgtgtcatggaccccccagaattctatcctcagtcctcttgggggtccatgaacctctgcttcaaggcaaaggggttttgattccttaggttagataaacaagaacatcatcaagagacgagagaacgaagagtaaagggcagtgtccagactgggttgggttaagcagagaaaggtttctagatgagtgagtttcagagctgggtgtttaaggtgagtccgtgttggcaggaagcaaggaactgtggttgagggaaggaactatggggaaggtttgcttttgtggctaaatcaaaaacacagcagactaacatcacagccacatcactccagggcaagcccgtgtctcctttgtcaccaagaacaccaaggcattgtccatgtaagacagtgtgcctgtcctcaagcttacatacaaagagacaaaacaaacacaaaagttaataacaagacaaaaattaaactgctagtaaaaaatgcagtcggaagtatctgaaacatgccacatatctggttaagtgcatacaatgcaagccacaggcgttcaaaggtgggggttcaaggtgggggtcacctcccctctgaggtttgcggtgaggaccaaatgcggaaatggacacgaggcccgaggccagcattgtggaaggccggttagagcatgcactttggaccattgtggctacttaacgtctcagtgaccttctctgtaaaatggggataataaataagtatggcgcctgacatatactaatgtttgcaacacggttcaggagacaccagagactggagaacttggcctttaacgtggtaggtgtgaaaacatttgaatgaatgaatgaatgaatgaatgggtcctcgggttgcctcggtctgccccaggcggcccgctaagccccatgtctgtgaaatgaatccccagctctcggggtcagcttcatctcagcgtgtgggtgtgggtggtggggaggtgctgagcagctcagcagaggcgaggcccaggccgagtttgtgggtgtcatcccgggagggtcttgctcggcctccccaacccccatgctgctcggctcctcagtgggcgggggaaccagcgggcttagctgtgcccgggccgatctcgagaggacaaggcccgcagctagcattcgaggagcccacccccgggtccgcagcgtggggcacgggcgccctcttatccccgaaaggtcgatctgggcctccccaggctagagtgggggtggggtgccgatgcaccttcggatactgtggtcccccagcccttccagccgcggtcgcgcacatccgaaggaatttggggccaggggcattgcgggcagagaggacagagaaacggagccctctcggcaggcgacgtgggagaggagcgccctaaaaagtggaaagcgagcgttgccgaggctgctggcccctttaagaggcccggctggctctgcggcggttccagctaacccggtccctggtgcagctctgcggtccgggtcccccagcagagaatcggcacccggcggggaggcaggaccagacgcaggagagggcgtggccccgccggggagctgggcggagtctatgctgcggagaaagcgggagaacccggaggtgggcggagccgagggtctgtgggtggggcccggcgctgcgggcctcgtggggcggagcctcgggctcggggaacgccgcagagggaggaggggtgggcggggccgcggcgggggcggggccagtgtctgcagtgggcggggcccgccgcagaaggggcagtgccggccgagagtcctctgcgtgcggctgccgcggcccctccacagcgtctctgacagcccgggcggtgagacccgcgacccttctggccccgcgcagataccgcggcctccaccgcgtcccgaggagcggccgagtgccctctctcgcctcggcgcccgcatccggggccatccgtcctgccgtckctgcggaggccgcatctggcgcgcatctggaaccgcycggccggccgcgctggagcccgcgcccaccctggcccggccgcgccgggagccctgcccggagctggagccgcacctggagccgcgggcccggggccctgagccgcgcagccggcgcatggtgaactcgctgctgttcggggagatggccttggccttcggctgcccgccgggcggcggcggcgggggctgccctggcgggggcggcggcggcggcggggcagggccgggtccgtcgccggtgacggcggcgctgcgggacgacctgggctccaacatccacctcttgaaggggctcaacgtgcgcttccgctgcttcctggctaaggtgcacgagctggagcggcgcaaccggctgctggagaagcagctggagcagcagcagagcgagcgcgagcggcggctgcgctacaagaccttctcccgcgagcaggccgtgcagaccgggcccgagttgctgcggcccccggcgcccggcggcgggcacggcctcagcagtggcgcggcggccggcgccaacgccaatgccgtggccctgggcggcctgccccccggcggcggctcgcacccgcagcactacggccgcctgcccgggaccatctggagctacacgcaggtgcggcgcacgggcggcggcggcgtggagaccgtgcagggccccggcgtgtcgtgggtgcaccccgacggcgtgggcgtgcagatcgacaccatcacgccggagatccgcgcgctctacaacgtgctggccaaggtgaagcgcgagcgcgacgagtataagcggaggtgagtggccgcccctcccccgccgccctgggacggggcgcccaggtccaggctgccgcggaatgcgtatgcgggacgggggccgggcgggcagctggtactggcaggtgggctggaagctgtgtttgcagagcgtcttacgtacgccaggaaggcccagttatctagatcccaggatgggggcgggcgctggctaccgtgggggccacctcgatgctgtcactggtgaggcacattgttttctaggtgacataataactgtctgtgttttatgcgatctcatttaattctcagcacaatacagcgtattgtgtaaggcagtcttatcctcatctcgcagatgaggaaaccgaggtgcagaaatgctaagtgatttgcctaaggtggcttggcgagtaagtggtgaaaccgggatttcaaccagagattttaaccactcctggctagtctgtctcctagcataagtatttttaccaaggaagtaggaaatatgctcccctccctcaacatatgaaaagaaaaactctaaccaacccactgcctttttatttcttgaattaaatgagatcacgtttttgaaaatggatggatctgcccctaccccctggggccagtgtctgccgtcttgctccagctctgtaaggtccagcttgctgggttggataaccacaactacaacagactgctcacaagcttttataaaatgcctcctttcatccctcttctccccactccctgagtctcatggtttattgagccctaacaaactcagccttaaaagcccccaggagaagataatgttgggctggagactggacattgaatggactgagaccacaatctctggctakaactggggtccagactctgcaagactggccagtgcattcctgcctagcccagattccccagctgggaaactgtcattgcttcctgtctgcagtctggccgacaatactgtctgcttggctttccgataagaggagaggggtctcctatcctcctcctcttcccataagagaagaagggtctgtctttggcatctcaggcctggctggggaaggggccctctggccctggcaatcgctgttccaggcacaggcagccttccattcggagctattggctctgaactccagggcttggaggatgtactgagaaggacccttccttccatctctaaaggtctgtccagggagctgggcataggtctccttccgtattctcccattggacaggctagcaactgggtaggattcaaatgccagccttatacctgctggtgagattatcaaatcacttgaaagcctgtttgctcatcagagaaatgggaataataaaatctgcccacagttgctcgaggagacagcaggatggtgatgctctttgggaggtataaagtaatcatgctggtgttattaaagatgataggcactttgtcaagctagcagggagtagaaatgctgagagtcctcaagctctctcatgtggcgcctagcttcctgggggtaggtcttacactccactgggagacgggcttctctcctgggttacctgtttctctggaggacttgagaatggcccgcctggtgccttgccacagggaggccacctcgccgcccctcatggtcaatgtcattggggcaggctagggaagcaggcacttgctctcaatggtgaaactggggagggatgggccgggccctcctgtctgccactgttgattgtgttgtcatgcctcaggcttgtgttgtgtttgttttattgtgtgtgtgcttcttggacctggctactaaggtgatggaaaaaccgtgcccagtcttggagggagatgggttggcattgagcaacgatctattcaagttgcacccagggcgtggggtgtgatgtcagcttctggcgctggcctggaatgagacggtgctgctgagacaggtggagtgcgggcgtctctcttcccgcccttctgggatgcgtgcacaccttgtcttccatttattttctgaagttaactcaagactcatgttggatttttccaaagcaggtatattcctttcctggggcctcagtttccccgtctgtgaagtgaggttgagggggggctagaattgcggtccttgaaaccccaggctttcttagagatgctttagggtttccttgaatatctaataaaaatgatcatttaaaagaacattaagacgttaatacagtgataaaaatgtgctcacccacctttaagttcttaatattaactcactgggttctactaacatgctaacttgttagtagtatgttttgggtatccctaagaattttctttggggaggagggcagacatttgataaacattttttaaaaagttgaaaaaccactgggctagatgatctcaaagggtcttcccagccttggcaatatataaatctgagtttgagctcccagcccgcttctgatcccctggccataagagaagtcaccgtctaagggatgagacccaggtgtctgcctggactgttgtggccatgaagggctttaaatcatcccaggatatctattacagaactccaagcaatgatgcccagaaggagcctaacccagaagggaaaggttccagggtttcccctggtccacctggaggaagctgcagctccagagacccccacttgcttccccaaaggacaacttaggctgcgaggctcagcgatcttcaagccggacgcttgttgagttccacctccatgatttctggccacatccatgtactaccgcctgtgctattacgtacataaaatattttaacaacttcattgaggtacaacttgcatatcacaaaaactgcccattttaagtgtacaagtcaagatgagtaaattcacagagttgtgcagtcattaccacaatcccgttttagggcattgcatcagcccccaaaaagatccttcatgtccatttacagaaaattccaattccaagcccagcccaggtaatcactgacctgctctgtctctagaaactagccttttccggacatttcatagaaatagaatcatacactctgcagtcttttgtgtttggcttttttcacttagagaattttttttgaagttcatccatgtcgtagcatgtatttgtaggctgttcctttttatagctaaaaatattcctctgtagtatagaccatattgtgtttatgaatccacccaggtattcaatgtattttaaatttaaaacgtcaactgtataccaccgagcatcatctcatgtgccatcagtggtccacaaactgtgctttggaaacaccaacccaaaccagagcccctggcctggggtgcctgggtcctggccccagtcaccactgctttggttttcccttggcccaaccaggtctttaccacgtgggaaatgtggtcgctgaagccgcaatgaggacgaggttgtcaagcgttgatttggaaaccaaaacaaacatctctactctgtcaccacccagggccactaaaatatcttgttctgactttgcaagctgggggcttttccctggagtttcccactgagtttatctgaactcaacagtggagagttccctgagttggcatccaggagacctggactttaggtccagctctgccactaggtgctgtgtgacctctggccaaccgctgccctctctgggcctcagctcctccacctttacatgcaggagttcctgtgggtgatctctctcagcttgctctctactttaggtcagtgactccaagaggcccgtgttgtggctgatctttctgcctctggagaccacactgtgttcgctgaagcctttctctgttctgggcttccccttccctctcctatctctgccccagataactagggtccaggctccaggcataggcagcgctggccatcccatccccaggcttaaccggttcaaccgtttcccctgtcttcattggctccaaggaaggatgcaggaaatctttaaggctgtcaagaaaaaggtccctccagcctggcagctgtcacaaagttgccatggactggtaggggaagttgccctgggctggtagaggaagttgcccggcgctagtagtgctggcctagctgcctatcagacagggcgactcttttgggggcctggtgtccctgtccagaagcctgtccagccatcctggccccctcaggcctagtgtgatttgcagctggctggcctggttccctcccgtgcgagtggctgactgtatgcgccccccagttgaagtcagcctggaggctaggtttctttttttcctggtgcctggggtgattggagggtggtttgggagcctggagagaccactgtgatcattcagcctggtggctttcaggtgggctttttagagccctggagtccatagcagggcgccttgggagactcgggggacagtgggaggctgagtacctgagatttgacccatgttgcccaccatagctccatgcctctctgactcccagactgtccaaaaagtattccattttaaaaagggttctgctgttttaaaaagaaagaaaccgctgattcagctgagtactttcattttaaaggtggggaaaccaaggcccagaggggggctggccctcagtgctgagctggacagaccttccatctgccgtgcagagctggcctccccgcctcgacatgatgcccgcatcatccgccagcagtcgaggctttgttatgttctttccacctttttgtgtgtctgttttaaacatttttttaaaaagccactttctgggatgggagggacttttgtcacagctatttctgactgtgagccggaaggggctgggctgtcggccggaatggaggactccaaaaagggatggtgggtgggtcagctggagtgtcccccgcccattcccgtcacaccccaggggggccctcaagcaggtgggtgctggcccctgaatgtcccgaagcccgaaggctgccctggaatagaaagctgagggctttgttccctgccactcccattgacactttcgttatttctgaagctggcaccgatacggattctttatttctgattttccagtgaggcagccttcgatggtggaaaagggtttygcatcctggctctgccactgtctgtgtgaacatgggcaagtggcttggcctctctgagctgcccgtggagctccccgcttcgtcctctgtaaaagagggatcatcttgttgctctcccagggwttgagaaggaacaaatgaggtctggtgttaaggtacctggggcttggcagattttgggcatacctacctccaccccagcccagcccccttcccctggcaaagtctgttcctttaatttacaaggatttctcagcatggccctgactgcctaacaagtccatttcagggcatgtcgccgctctctctgtcccatggaggcgccagagatggtgttgggggtggagggagaacggctgcttctttgtccggcatctaagaaggctgtttgacctactcttagcagttgatttgtgcctccggaaatctctcgccatcccccagccctttctcccaacttcctttaagagaaacacacaaacccctccatctagcgcctcgggtcccttgagaactatattacagaatcccttggctgggttggcattctcactggggacaaatttgggagcgattctcagagcctcaagctagagggaggggaatgaggtcccagaaaagaaaaggaagcagggagacagctgacgctgaagattccttctcagaggaatgcgaggcrgggctttgccttggcaaacgagaccggatgcgggtccctgggtcccccttccccccacgtgtatgcacactcacactcacacacatgtacgtgcacacacacacattcacatacacatgcagatgcacacaccagactctccgttcagtcctgtggcccacgtccccacacatgaccgtgtttgaaggacacagaagggtagacccggaatttgaacacgccctttgctgcaacgagatgcgttgccttccaggagaattgatttaaactgtgccatgtgtcagtgacaccggaggctgtgggctttgcatttgcagtcctggcttttgatcgyattgagaggtgaaggccggctggcattccatttatttcctatgtcgcggatggctgaaggcccgggacgggaaggaggcagccctgtcatgtccctgtgctcaggattagggatgtgttgctttttcctgactttctgctgtcaggcggtcctaagcacccaccacctcccgatcacagccccccacacccggagttgtaactacctggcatgtgtctgcccctgcatcgactggaagctctgtgggggcctgctccaactctggcttcgtctcccactggcagatcccagccaggacctggccaaggtccatgctgagtaaatactcatgcagcagggaggcctctgtgtctggctgctgtgagctagtaggcctccaggaggatgggacagaagacggacaacacagaccacgtccagggattcggctgtttgtggaggggagggcctgcacttggaatcagaaggcctgggccaaagttcaaagtttgaatgaacccccaagcctggcagtgcrgggtgctggggccccagggcaggagttaaaagccgagtgagcttgggctagtcactgcctctcgagcctcagtttcttcatctgtaaaacagggatgctaagctctgtgtccggaggttgtggaagaagtagacaggctcgcctagctacagcacagggcgtgtaaacagtcaagttcagaatgatttcacagggcagagagtgggtgccctacagaggcrgatctgtgctggccctgtggggtgggcagaggttgagaaccaagctggaaactgggagagggtgtcccgtgccctttgctggcagcatctgtgggttgcacagccctttgagcattgccagactgtgaggtgtttagaaaattccaggccagatgggagactgctgaaggtttgtgatgttgcckccgcctgcccacgaggggagtgtcctcccacccacactgggcaccgggtgcttggcttcctgrgcaggatgtggtttctcattctagacctggtacaagagagggtagttttcacccaacagtaaacctggcaaatggcaatgcctggttctctggagggtccgtggagcccaggtcctggtctgggtttgcctgcgatgtggtctgagcttcactgtgcccacctgggaatggggacagtgggaaggtgggcttgcccagcaaccctgtgaagactacgttctctctgtaatgtagcacaactctgtgcatgccatttaatctcttgcacctcagtttgtcgctctgtamaatgggggtgtggtttcttacgagttctgcttcccagggttgaggtaaaagtcaattaaaacagtgcagtaggaaaacattttgcaaaaggrtttgaaaataaatcaatatggcttaatgcttccgtttattgagcacctactttgtgctaggtgcagtgatgacttctttaaatatgtgataattatgggagcagtcccaagcagtgggaagtgattatgctcattttacaaatgagaggttcaragaggtgaagacttctgtcccagatctcgccacgagtccgtctgggtctctggaccccaaggtcagtgctcctcccaggaggtggccttgtcccatgcccctggaggttgccaaaggctggctcagggtgaggaggcaggcaggaggcacggggtctccccagcacctgtcacaatattgccatggcgggtggcagaataggaggcggctgctgcgctgggaagactccctgctgtcactttacagaaattatttcttgagaagcaaatgaatcactggcagtagcaggcagatgaggctcccgggccactgtagcaggcctgtccaggcccctgctctttggagaaggtctcaatgggggctggcagggctggcaggggaggagttggggaacagggaacacatattatgacccgtctggtgatttccacgcggtctcatttaaacccggtggtggcactgcaggatggaaaccgaggctcagagaggagaagtaacttggaagtcaggctccagatccaacctttatcctgtgctgtacccagaaagggccatgcccattgcaagccgctttcctgctgtgagcctcagttttcatttctgtgaaatgttgcctagcaaagctggggcaggctgtggatctcaggctctcaattaatgctccatttatcttgcccggcccctgagtgtcctcagggcacagccagcccgaggttctcatccacggatcaccagcagcagagggcctcgggcattctggtggctgtttgggagctcgcctccgccctgggctggagtatccctagcttttgctttcagtcagtgctgtgaactttgccagggaacagggaagttgttacaatcgtttggtgcctcttgttggggaagatgagactgctgggtgtggatgtctgagaagccaaagtggtggtggtttcagaacagtggctgagtacccaccgtgggccaggcccctgccctcgagaactcagaatctggggacatagacaaatgtgtcatgccatgtggcagcatcatgtgacaacagcatgtgcccagtaccttctccaacagtgcttgcggatagtaggaacacaataaacatgtgttagttaatgaatttcattaaatatttatacaacatttactctttgccaggcttcattcaaagtggtttgcaaacatttaattcatggaagctgtaataaccctgtgagttgggtgctatcattagcccattttagagatgctaaaactgagccacagaggcaggggagggaactgggccaagacaccttgaaagtggcaagcccaggcccggtgcggtagctcatgcctgtaatcccagcactttaggaggccgaggcgggtagatcatgaggtcaggagttcaagaccagcctggccaagatggtgaaaccctgtctctacaaaaaaaatacaaaaaaattagccgggcatggtggcaggcacctgtaatcccagctactcaggaagctgaggcaggagaatggcttgaacttggagggcggaggttgcagtgaaccgagatctcgccactgcactccagcctgggcaacagagtgagcctccatctcaaaaaaaaaaaaaaaaaaaaaaagaaagtggcaagcccagatctgaccgcaggaagtcaggttccagttccaaccttaaacctgtgtagtaccagaaagggccgtgcccattgcaagtagcttccctgcttgagcctcagttttcacttctatgaaatggaagtaataaatctgacctcatgaggctgtttggagggctgtctaaaatgatacccgtggagcactttgtaaactggcaagcggagtgcctgtggggaccaaatccttgggagccctgagctctacccacactgcggtttcttttccaacttcccatgcaggctgaagctccttgaagctccatgcaatgccttgtcctctcttgcctttacattcacacctcccctagatcctgggacgggaggttggacagaaacctgctatgttagacagcttagagcagaacgtttgtgtggaacccaaaagctgggaagagaggaacctgcagggtttatttctgctgcctgtcagctctgagaccttgggagagtcactgtgcctctctgagcctccgtttcttatctggaaatgggaatggtcatgttgcgtggatggcaagtgcgatgatggtgctccgattctggctgctgtggcaaaaatcactaaataaggctgggggttctggggagaggagctgggcaggaatcgaatggcgtttgggccttggccctggcagaagcccctccatgtggctgtgctgggggtggggcctgtctctgagctgtctctgagatgcttgctcagcgccctctggcctgcgtgctccgactctgggatgtgtgttcacacagaccctgctcatctgctgctcgatggagagaggcccctgcagcggagacagcgccttccgccctcttaattggctatctttattacttgagttatttaagacggttcttggctcactgccgcctgtttgctgtcttgggggaggggaagagctactggtctaagtagatcttgtgaagttccccagcagacaggctcctctctgtatagggtcagcccatcttcccagggcccgttggcacccccgttttgctcctggcccactgtggcaataggcagaaggccatcttggggggtggtagtggaagatttagggaaagcttgttgcaaagtcacgaccagagagtctcggaggtctgggtgggacactggtgagaccctagggtgcccaaaacccagggattctggaaggtacccaagccagttcagggccagtcaagaaaggtttcctggaggtgacatcacctaggttgtatctggaaggttcagtaagagtggaagagaaggagagagggtgttccagatagagaggacagcgtgtacaagggcctggagttgagctgctgtgcagaacagtgtggagctgctcctggtgcccgggcttgagcctggcactgccagaacttggcctgtcctgtgcttgcttctgccctgtcttgtcccctcctccctcctcatgctcttcttggctctcattttctgtcttgctctcctttcctctccctctttcctttctttcttgttttgatctctactctttatggctggctgtctcactcccatcctgcttggggcagggctctgagggacatcctgtcccccatccctcagccagatgctgggccctggtgagtggctcttactgctggggccttgtgagcccatgagtgtgcatgtatgtacgtgtgtgtgtgtatacacgcatgtgagcacaggtctggagcctctggatttggagcccttaaggtcattgccctgcctgtggcgggccctgcagaccccttgtactatggggctgggggtagggtcttgacatcatggtggggggcaagggaggctgcctagtgagagagaagctgctggtttggagctcaatgctggccactggagaccctcagcctccccatcccccattatggtccagggcctaggattagacacaggtcaggaattggggctggggggaggcttggctgctccccttacctctccccgccccggcccccgatcgccctggctgtcccttctccctcacacctatgacttcctctcatcccctggatgccccagaggacttgaggtacccttcaagctcatctcatccatcctcctgcttccaggcaaaatcattccctgacatcccaaccaagttagctatgccttctgtctttcaaagcgaccttcagccattctgtagtggtttctatttctctctcacccctatttgcatattcacgaccattttatagatgagaaaactgaggcccagcgaaggagagcagctaccttgaggtcacgcaacagagcaggggccggaacccaggtattttcaccctgtcccctccacaggactccccttaaacccttgagctcagggctccctctgggggctgctggcactttcaggaggggtttggaaaactcccagaggacagagcacttggagcagagaagcaactgccaaaggcatgactcggagcctgtacagtggggtccgcagagacagggccctgctccttgaccagacatctgggtccctggcgctgtggatgaagctccctccacctacaaaagagacatctgaggttgcccgtggggtttgtctccatgtcgcaaaaggcacttctccagcctctggcctggttttgaggtcttgggatgctgacactgatctgccttcccgatctgccagccctgtgcttggctgcaccatttctctgtgcctcgttttccttttgtatgggatgggatgggatgatgatacccacagggtgttggtgagcctgattcaggaaaggctgccctgtctccttatctctgggttaagccctggagctggaagtcttgagaactttgcctagaatgttggagttgggtgaaccgtagaggctgatctttcattccccataaagaccatgtttccagggctccttgtctgggcatgtggcctgacaaatagtactttgggatttgcacatgtttttatatggaaagacattttttttaagacagggtcttgctctgttgccctgcctggagtgctgttgaatagtcactgcttgctgcatccttcaactccttaggcacaagcaatcctcctgcctcagcctcccgaggagctaggacttcagacacacaccactacacccagctaatttttttttaaaaaaaataatttttgttgagataggggtctcgctatgttgccggggctggtcttgaactcctggcctcaagtgatcctcctgccttggcctcccaaagtactgggcttacagatgtgagccaccatggctggctgagtcttaatattacattgctgttggtttcacacttacctttaaataaaatattagcatttaaaacatcaggacttaaatttgccgggtgtggtggcacgagcctgtaatcccagctacttgggaggcagaggcaggagaatggcttgaacccgcaaggtggaggttgcagtgagccaagatcttgccactgcactccagcctaggcgacagaatgagamtccatctcaaaaaaaaaaaaaaaagaaataatataaaataaaacatcaggacttatctgacttggagactgatggccygaactcagcaagctactgctggcagagccagaattaacctgatgccaagttgagggacctccaacttgtaggttattccttttctgagccctaagacataattcaattgtggggaattaaaaagaaattgcttcatttgctcttgcttcatgtttcctgttggcccgtgatttgggccttctcttgggtgggaactctggctctgaggtgacactgcttggagttgtgttactgctctgagcctcagttctctcatctgtaaaatggggatgacaatcttagctgatgaggttgcgaggatttgatgttgcctgcagagtgctacgtgtgctgctggcccctcagctgttaccgctccctccctcctgccctggcctggctcccaccagcccccaggccccaatttgtacacataaaaatgtgaacaaatgccaaagtactatttgtcaggccacatccccagacaaggagctctggaaacatagtctttgtgggggaatgaaggatcagcctctatggttcacccaactccaacattctaggcaaagttctcaagccttccagctccagggcttaccccggagataaggagacagggcagcctttcctgggtcaggctcaccaacaccctgtggttctcatcatcccatcccatctcatacaaaaggaaaacgcggcacagtgagaactgcctgctccctcccgctttggctgaagactggccttttgtgttctgagcacttcctctccccggtagagccgcctgggcagccaggaggaggtcatgtcccctctcttctcgagcagactgtcagcacagggtgactgggaaggcaagacctggcattcaaggctgtgtccagtgcagggtgtcacctggagcctgtggctcctaggagggcctgatggaatgtggacatgaatgggggaatctttccctgtccccgcctccctggggatcatggactgtctcagcctccccgttgtgtggatttggaagcagcctcagggggtcacattgctggtctgaggtctcactatgaggtagggccaggatcaggattcgaacctgcctcttgcagactgttacccaaagtactctctgccacacatgcaagctcattctggcaggctgagataggggaattggaagacaggggttcaagccctgccctgcacccagcagcagcaaggcagccgttcctccttctgggcccctgtaggcgatgggtagatggtttctgtgttttcatagactgccttgcgaggccttgtgggtgaagggcccaatcccagaccttggcagaggagtgacgttgaaggctggcttggcattgtttttccagagttgacgtcagggcagctggtttagggtttcatctgtgagacaaaggctgctttgtagcttctgcccggtttaagtccaagcacatcaccccscaaggtgggaaacgaggtggaagggattgcagggcccaaacagagaagccttgggaggcttggcttgcgctcagcccctccaagaagggagccaagatctcataattctatcgccatcttgctcacttcccgagagcactctgtatgcccactgcagtgtttgaagccgcacacatgtgttctctggaacatcgcaccactccagcaaggtggctgtgggtatgtccattgtacagatgagaaaactttgagtcgtgccaggtgaaatgacttgttccttgtcaaagctagagagtggcagagtgggcatgtgacctcaggtctctttggcttccaagatcaccactgggttccaccactagagtctcgtgttgcacccagctttggaaagggaattctaaaagccaagataccctggaatcagactggagcagataaacctcatggcttttgggggggacttggagctttctcttgtcaggattcagagttgggtcactgctttgagcacgtgttgcgtatttgtatctgcatgtttaggtatttgcacgtgtacgtacaagttaaagaagggatttggatactggagggtctgtatcactggcaagtgattccagggaggccttgtgggcaggtgtaaagagtcatcccaggggacacctaggaccttctgctcttctttgccaggattaccctacttgatcatttattcttccatccgtctgtccgtccgtctgtccatccatccatccatccatccatccatccatccatccatccatccgtttgtccatcagtctgtccatccatccatccttttctgggccacggtgctcagtccctatgcttgggctttggggatgatgctgcatgaactgggagcttgcagaatctggggagcttgccaaggaactgttaaatcagggctggaagagtccttagagattggttagatattttctctcccttttgtcagagaggggcagtgacttgcccaaagttgcacggggcgagtggcggagctagggctcaaagtcaggtctgtaggtcccagccccaagtttctgcttctctgctgtgtcaacagacagctctcactcctggccggcagctcccttacctagctcttcctcctctgctgttttcatgggttcttggcttttcgggagttgctggcagcctctgttctgagagacttctagaggtgtctactgaaccagcatgcaggccccagactggggccaagcttggctatgctctgccctgagatgacaccctcccgcatctggaacagcaggttggctgagcccctgaggggagagactccaaggccctgtttactttaccctactggacactggcttcttttcctccaagggtctccagaggtcatctgtttcttcctcatcttggggctaggaccactgcaaatcctgcctgaagatcttactgcctaggaagcacattccagaaccctttctgagacgggccgtccagtgtccttgtggccttttccattgggaagtgcttcctggtgtctaaccatgatccctactgcttcatttccccctttgtttagcctttcacagaggaggaaagtggttggatatcaattgcctggtggttctcaaggcagcaccattaccttgctgcgtaccctcttcccacctacaatctcccttttctccacttcctgagagactgtgccttgactcagatacaagttgagacacaatcttcatgcagaaaagatctggctggtccctgtagtatcccacaagtttctgggagggaggcacattccttttctaggagtcagggagccctctgagctagaagtggcctgaatcccagggatcactctggtcccatctttcctgatggggaaactgaggcccagagaggttgagcaacatgtccacagccattcagccagcctgtccgagttgggtgtcctccttcatgtggcaatgctgtttctatggtttgggcagggggcttgataaaggtggccggtggcctctggcctggtggtccctgccgcagacagatgtcctggaagcagaacagccagccccatgtggccccagagggctccctggcctggaatcagtgctcctgcctgctggttccctgggttggcagattcctggcggtcctgggctgccctcagggccaagcagtggcatcttctccgctcccacccaccctgtggcttcctctctcccacagcctcccagcctcccttttggccctagaggtgccagggaggcccctcacctccaaggggagaggacaggaggcctgagtgtacaccagtaattaagttgccagggggacactagctcctgtggctggggcaagaaggggttaagcagtgttgcctgccagggctggactcccagctggtgtcccggcccctggggccaaccaggccatctggcctgacagataccacactgtgtcccatctgtcccaaggcaaaatcaccaggaggagactgcctactgcctttgagggcctgcaggggtgggcgtggcccctgctgtctgtccctgggggggccaggccagttgggaggggctccccactgggcaggctgtcctctggccaccctccctgcagggtctccctaggtgtgaggtgggggagtctcagtccctggtgtggtcggagcttccttgtgcagaaggtctagagaggtgcagggatgggctcaaggccacacagtaagtcagcacaggcagagctgggcttcccccgaggcctgctggtggttacgcccagtggctccagctcacaagctcattcatccagtcagtagcggttgagggcctacggtgtgctgggcacttggtcactctggataccagacagttccccagtcccagcatgggagagggaacccagagacagagcctctaaggggaagcatggtgcagctcagccaagcccggggccctggacgctgtagcagccctcccagtagcctccctcccagcyttcccagcagctggaggtggggcttgctcactaggaggagcaaaataatgttasgcactggtgtttatgatcttatggggtcttcaccatccagggaggtgtaggtactattgttattcccattttacagatgaggaaactgaggctcagagaggtaaagtcgctttagcagatcaccagctgcggagcggctgagttggacgcccatcccagctctgcctgacgtcaaagtgttttgggataagggacagggggtggctgcaagtggcctcccactttgccccaagccggcttcttctcgccatgctggcctggaccatctcctttttggctttttgctgagtccgggctgggaatcctgtggctggaggcccaaatctcagggggaagagagcccccgctgggttggagttgagaagagaggctgtgctggtgccggttcttttgcatagctggggctagtgaccctctgcatcccatgtgtggggtgctcggcagcatctgggcagcgcttgagggattcccctcggaggaccctccatccatctgagagccccaaggctctgccctccagtggcggctgggccaggccgttgggagcctccataatgctgttatgattatgtgaccctggatgagtcactgcaccttggtgagcctcactttccccatcagcagaatgagggtgaggagatgacaagctccaataaagatgccctccgaggggctttgcagtcatggaagggtccctgggaggctttgctccatttcattccccgtctcatcttaaggggactgacttctctctccagccccatgggtagttgggaggaacactcttgtttgtgtgttgtggggttgcctggtgctcagcctccacactccccagtggttcacatcaggtggaatgccagggcccgccatgatgacaggagcctgggattaagtaatgagtccatccccttgagctgtatttagtcactaattcttttggtgcgcgtgtttgcagtctaattacctgcctcagctgcgctggaacctgccccttcccagcyagtgaggaccatgacggctctgcacagacaggtgaccgttgccctgttacccatccttggttgcacaagccccacgtgtcttttgttagctgggtccttgtcactcttccctcctccctcctggagattgctctggaatgttctcctccccttaccagcggcatggcaggcagctcctagtctctggagttgcactgagccagccgctgcctgtgtgggaccttggacatatcacctcccacctctgagcttcagacttctcatttatgaatgacctggacttccccgtctgatgtcctaggatcctgtgttctgtgctttttttttttttttgccccacctgcagccwgtttgtgtttgcacatcctcattgaatccaggtggggtcattctcacccattttacaggtgaggagactgagccctagagaagtgacttggcttaaggccgcagagccttgctttcaacccaggtgtgctgactcttgcctggtgggctctgcctggctgccagcccctcattttttcaggctgcacatgataaggaaaatctgggctcccaggcagctggctccagggcggctgcgggtgagtaagtatgcgggagattaccctgaggtgccctacatttacctccagggcagcacagtcacttggaataaacagtggagagacccaaagtacatattaggtttccaaaatagccttgggagttgctgtttttctcaaagctgtaaacataaccctgggcctgggggcccccacactctcctgggcacagaccccctgggcctcctgcctcttgacctgagtgcccaaagacctgctgcccagaccccctgctggcttccacttaagcaagagccagcagacacgggatggggatggggtggagggtccatgggggcttggccaggcctaggcagaaagacaatgtcccagggatggagagccgtggacaccaactttcccatcatctgctccatgcaaggtaggcccaggcttcaaggtgcagagaagagagtagcagagttggcctggactgtggaggttgtttggggaaactgaggctggcagggaggggctggcagggtggccatatctaaggcgacagggctgcattggcctagattggatctcctagagaaggccctggagatgacacttactgggcctttttaatccagtgaatatttatggggcctcctatgtgccaggctctgtgctgggcactggagttgcagctgtgacccatagatgggcctgatcttgaaagagatgagggccgggcgcagtggctcacacctgtaatgccagcactttgggagtctgaggcgagaggatcgcttcagcccaggagtttgagaccaatctgggcaacatagtgagaccttgtctctacaaaaaaaaaaaaaaaaaaaaaaatagaaaaattagccaggtgtggtggcatgcacctataatcccagctacttgggaggctaaggcaggaggatcccttgagcctaggaggtcgagagagctgttgttgcacccctgtgctccagcctgggcacacagcgagatcttatctcaaaaaaaaaaaaaaagacagaaggagagagagaaaagaaagatgagttaagcagaggagaccagcaggggatcagtaacctcaataccaagtggcccagagcctttgtagtacagaatagtggcacttgaccctgaccaaggagtcgggtcagcctcctggagggggttataagctgggtcctgaagtcacattaggtaagggagagagagaggaaaaggacaaaggggaaggggtgtagaacctgttgggcagagaatgcagcccatgccttggaggtgtgatggagcttggcacaggggggctggaggtgttggggggatgctattcagccttactctaccctagcacgtggccttgttctccagggcttatcacccaccaggtgagacctctgtctacccttttggagaagaagtgtctggcccatttctcagatgagcctgatctcccaacccttgctccttggggaaggtagagggccactggtgaggaagaacagtatttatagcggagtcttcctgcacccaacggaggcaatcttttgactaatgaggaaactaaggcacaaaacattgttgctgcaggarctggagtaagggcccaggaccctgcttttccttggctccctgggcaactgggagcctgtggtagagaatgccagagagcgttctctcyaacacgtcacacatggctctttagaggggcacaaaagccttttctacatctgcacacttgatccagaaacccaatctgggtatcccagagggatacctggacacatatgcaaatgtgagggtacraaggtgttcacagtcttgtttagattgcaaggactctgcgctgacagtggaggacccatcaaaccagtggccctgcagccacctgctgtgtcacctgctcgggaggatgctgccgtatattgttaggtggaaaaaatgcatttgaaaaccacatatggtcgcatccygttgtcgttaaaaaccaatctcataagaagagaaaatctcataagaaaaagttgggaaggatatagagccgatgttaaccgtaattctctcagggagggggattcatttgggtgggttttacattggttttatctggcttacctgtttttttctttttctatttcttgtgtaatcattgtaaacactcatgcaatttaaagcaaggggaaaacgagcaggtatttttgtcttttaaaaatttaagtggttttgatgttttgagcaggtatacatgacatcattcaaaattaaaaagatacagaaggaggggaaattctgacacacactacaacatggatgaaccttgaggatattatgctaaatgaaatcagccaggctgggcgcggtggctcacacctgtcatctcaatactttgggaggccaaggtgggagaattgcttgagcccrggagttcgagacctgctggacagcatggtgaaaccccgtctctacaaaaaataatttttaaaaattaactgggcatggtggctcatgcctatagtcccagctgctccagaggctgaggcagggggattgcttgagcccaggaggtggaggtgcagtgagttgtgtgattgtaccactgcactccagcctgggcaacagagtgagacgctgtctcaaaaaaaaaaaaaaaaaaaaaaaaaaagaaataagagaaataagctattcacagaaggacagatactatctgattctatttatacaaagtacccagaagtcgaatccacagagacagaaagtagaagggtggttgccaggggctgcggggagaggggtacggggtactactgcttaacaggyacagttgcagttttgcaagatgaaagagttctggagatggatggaggtgatggttgcacagcagtgtgaatgcacttaatgccactttaaaaatggttaagatggtaaattctatgttatatggtttatttatttatttatttttgagacagggtcttgctctgtcacccaggctggagtgcagtggcgcgatcttggctcactgcagccttgaggtcctgggctcaagcaatcctcccacctcagcctcctgagtatctgggactataagcggtgccaccacacctggctaaattttttgtagagatggggtttcgccatgttgcccaggctggtctggaactcctgggctcaagtgatccacctgcccaaagtgctgggattacaggcgtgagccaacgtgcctggcctgttatgtgtattaagaaaagatacagaggggacagagtgacagttctaccccataatccccagccacccacgtcgctgctgaagggaaccaatgttttcagtgtgatggtggatgcttggtttcctttctcgtgcccctgggtacaaatgggcagtggcaacttggatggggccccttcactcatggacggaggaagatgccccctgtcccagggtgagcattcccttccatccctgcttgcctggcacaaggcagycagtgcccagaacttcccacacttcttgggttgaagggattgaggatctgaggctggaggagccagaggtcctgccccrgcgagagctccggaactcgcctcccctctctcagcaggaagagaatactcttaatccacttctgtgtccccagcacttggctcctgggtgagcacttgggaaatgtttgttgattctgtcctgggggaagaagatgaaatgtaagccggcagccagcctgagttgggctgtgggagatattctgggctgccgggcctgggtgtctccagaaacmcccaaygctcgctcatgaaggctctcttggtgccaggtcttgtgccaggcactgggatatggtgccgaattggatacaagggagatgggacgtcctcctgtgtgtcttgactgtcggtgtgttgccgagcattggtagcagagggggctggtttggcacccaggtaccctgcctcatccccggggccttggccagtctacacagaggaactgccctccagctgagttacccattttccatggcagggaggacagcagaaaggccgtgttccatgactaatcatagcttccatctattgagcatttactgggagctgggcactgtgctaagtgtgaaacgtgtgttgactcatttactacaacaacctggcaaggcaggttcttccgttagcccctgctcaaagctaggggacctggagcacaggcggtcaagtgcttggctcaaggcacacagctcagaagtgcagatcctctgcccctcctggcatcccagtctgggggggtcaggggtgggatctctgcagtcagtgcctgggggctggatgacaagctgcagcctccccgcaaccccacgatttccatagcgcagtggagccagaaagaaacagaccattttacagaccagagaaacaagggtgctgctctctcagaccctggagccagtgacagggaaggcggagaagggacgagagcctccgtttattcggagcctgtgtataccctccttttcacaaactgtagcagcctccagaggcaggggggatctttatgatgaccaaatggggaggcttagggattggaaatcacttgcccgggagcgtgtggttggtaccactgggatttgagccttgttccgtccagctccagagcttggtgcctttcttgctcaccacgtgccggccccagctcgttgccttggcagtggaggtggtggtgtgccgaggccttcctgcaccctgggttctctggcgctgagaaataagtgcatgggcaaagtggctttgtttccaggtcagtgactgtgaccccatgtgtacacatctgtgcatctgaccgtggcactgtaacccaggggcattttctaagtgatgtgctgggggtgtgggcagggagtggggcttatggagccgacgagacaccatcagaccatagagaggctgcccaggcttgggagccatatggacctggatttgaccttgaacaggtcatttcacctgagtgtgtatagtgggaatgataacatccggctcacagaactgtggtgagaattagagatggtgggtgtcgaatgattagcacctaatcagcattttacaataaatgcaaattcttcccttctcgtagaagagtggagtctgatgagagagacagggaagtgaaaattcacagcccctggatgccagtgctgaaggagtgggttcaggactgggaacatcagwatgggcatagtgacttattctggggaagtcatgaaaagctccctggaggaggtgatgaaggggtacccaagcctggaagaggctggcagtggtactccagaaacttcatggtggcctgcaatttgtgatgcagatttttcctcactgtgagatgctggttgagacaatttcctccttggagtggcctggttttttaggggtagggggagtgcccacgtgggtgtagtttctagacagaagcagtgggaggagggcactgccaagcatgctgcttgggattatgggtgtccacagagctgcagtttctccaaaggtgttttttgtttgtttttgagacagggtcacactctgtcacccaggatggagtgcagtggcccgatcctagctcactgcaaccttgaactactaggctcgagggatcctccaacctcagcctcccaagtagctaggactacaggtgcgtgccaccatgcctggctaatttttaaaattttttgtagggatgggatctcactatgttgttcaggctggtgttgaactcttggcttcaaatgatcctcctgcctcagcctcccaaagtgttgggattacagccgtgagccaccatgttcagcctctccaaagttgtgttcaataagcaataccaagtggcagtgatgctgggaacctgggcaaatatagacaggagrgaattggacaggtggctcagaaaacaactgaaacctcagattggcattggggcaggtgacccgggggttccctgggccccatgttgcccaaaagagccagcagctggcctgggtgaatacccttaaatgccttgtgtgtgttggaaggtgccatgagaccagctgggctctcctgccctggacccacctgctgccacagtggcccttgttaggacagacctcaaagggctgggcatgcccattagttcctggggtatgtctatggggtgtggacggygaaagcagggttttcagtgggttttgctgacgggggttctgtggcattagcatctggcttctttccttctgccaccctgtccccttgtactgccagccacccagccaggtgaaggcggcatctagctcattaccatgactatcaacaacatgactgttatgcagacagtggctctggggtcagatggccttgggttcaagtctgaccccctcacttacgatgtggtccaagagcattctcccagcctctccccacctctctgagcagctgtcattgggaggtcgtgaggatgagaatgacaccaatggcatgctcatggtagaccaggcactattctgggcacttttcatatgctattccatggaatgtgggcaaaacccctcggagctgggaggtattaccaaggcccagagagggtcatagcttgctcaaggtcacagaactgcaagatggatagctgggatttgatcccaggaccctctggctccagagtccctgctcccctctccactacacacactggttggaacgcaaggacagacgtctcagctggcttttgagcatttgtggtttgtcaggcggctttgtggtcagtgtaggatgcttgtccagggatcatggcagttgttttctggcttggctgggtgggcccttagaattcatccagtttgacatcattgcattactgatgggaaagtggtgccagaggaggggaagggacttgcccaagatcacggagccagctggggcagaggcaggactagcttcaggacttccagcacaaggctgctgcctcgttgcctgaaggggtgtgtggctggggggccggagcccagttaggggcttgccgttctttcccactcacctctcaagtcctstyrrstcaccacagagagcccagagaccagctagctgccctgcaaagggccccttggtcaccaggaaacaagtggggggaatgtcaggtgaggggaatgtcaggtgggggaatgtgatgaccccacacagctcatcccccctgcctggcgatgggactcactttcacctccttgctgggaaaactccttagcaactcgatttcagtgctgcctctctcagttgctcctgggtccccagagggccaggacaggttggagaagtgtccttgctgagggggcccagactttcacccacccatttgcccctccctcccccaggtgggtagagccagggtgacaccggtgaagagcatgggcatcatctgtcaagggcatctgtgtgcctcacttgagcctgctctcytgatccatccatgagccctacaaggtgggattgctatccccgttttacagaagtggagactgaggctcctagcttgaggtaggcaggccctcaggggatcacacagaggcagatgactttctcagctcacctgcccttccttctgcagaattgcctacaacctttgactctctaaggcctgcggggctcgtggcaagccctcaggaactgtttatggaatgaatgagtgaggggcaaacgaatgaatgcatgctcccacaccacgctgctgcttcttctgggagagggcacccagcgggtgtctgctgttgagtgcaggctgtcagagccctgatggcacccaggataactccggatggagttggtatccctgaggctgtcaccacttctggactccaaggaagggccctatccagggcgtgcaaataacactgcaaatgtcatgtcccgagggattttgggagatcctattatagatggggagactgaggcccagggcagagaagggacttgctcagggtcatgcagcaaattagcaacgcagccagggcatgaaccaggacctcctgcttcctagcccagtacccgctcttccacagggaacttccctatggatgtcagacccctctgcctctcccctgagcagccttgcgcagacctggcacgctgggatccctggaggaggctgccgtttctggttgaaagcagctctgtgtgtctgtgtgggtggcagtgttctgggggcacacttgattagtggcttctcaaacctggcccccatcctcagtgtacagcctgtgctccgtcctgctcaggccattactgcccgcctgtaatggaatcggctgccctggttaagtgttcacattaaattaatacctcctccgtggagacaatcagttggcatttaatttgtctttccttccgagagctggagagtacagctgggcagccgggctctgatgggcacgtctgcgagacagcctttccttgggatcaggggctccatggagatgggagccgggaggccacaagaggtggtgccaggtgtccccagggggtggggcttggggcaggcaggagggggcctctttcatgcgcaggggctagagcttattggctgtccattttcgggggagaagacgggcttgcagcgtgccatgtgggagagaaagtcaggaggcaaggcatccacacgtgcatcagtgctgagctgcccaggaggtgagccctgtgttagcagtggtggcgggatttccacattgtattcccagccctgccccactcccactcccttatcggattttctttctgccttaaatatgaattgtctgtggtattcgagggggatggtgtgcaaggaggaagttgactcggttgtggttttcaggttctctagaagggctcagaagaagcaagtggaggctgttgggggcacgcagccctgaccccaccggggagcctgctctggtcttcccaatccatcagcttctgcaaaactgcatttgcagaaagggctcccctggtctaccactgtgcctgcagcctcttcttccagctcagatattattttagagaagaacagctgattggggcccccaggcttggccctggctctgctgtgaggatgcctctgtgcatctgcaggtgggcaaacacaggagctagggcagcgcagagctgaggggcattggctgggccaaatctgtggtttgagcagccgggctccagcacagctccctggccacctgcatccagccctgctgcagtggggtgagctccccgaggccagggtggagctgagaaggtgccagccctccacccgccgggaaggaagctgctctctgcccccacctgccctctgccagaggccaggcccacgcttggcccagaatgaagtcttccactgagggctccagcccagcctcacctgagctcatttcccttcacctgagtgagtcggcctaggcgtgccggccgctcgccttcccgcaaggtgkgggccatttccacacctccctcccaactctggaggtgggaggcagccatgcgctgtgccgttgacgtggagctgctgaacacccatggtctgctggatgccagggtgcttttacccacaccatccccttcctgtagttctcacagccaccttcgaaagggggtggctggtttcccaactcacagaggggacaactgaggcccagagagggtaactgacttgctcaagatcacgcaactgggaagtgatggggcaggatttgaacccgtctcttgctgccctggtgtcttgggatgctcactccaggagccccaggttcgtccctggagggcttcattgttttgctgggcctgcacctactttcctcctgagcgggagcctcgagcctctttttctgactgcacaggaagtgaaaaatctgtgagtcagcccctctgctggtgacttcagcttgggtttccgcccctctgtagggcaggcttgtcggtccctttcctgcgggtctgtgtgtcatcttgagctgacgggagagggggaggcactggccctgagtggggtgggggtggggactggcatagaatctgcccaccccttttccccagaggccagcagagacttctcgtccctcacgtggttccagtggtggctcctcaggaatgcggagagaccacatctggctggggtggtgctgccacctctccctcctggccaccagcctcagagagtgcttgttctgctaagatggtggccgaggcccctgatctcagctgctttgtgcttttgtggagtcatttcctctccctgcactctttgttctgacatccctgcctcccctccctggcccagggctgtgggaagtgggaaagggaaggtttctccttctcctgcctgcttcctgccctggccatccctccccctggcctggcctggcctctcccaggagaggctctggagccgaatggatgaagctgagtgcaggggctatgctgggaatttgcctcctgtgagcccctgggctgggatgttcagtctaaggatgctctgggggaaaggagttctgtctggaggcgagggccatcagggcactgaggagtaagtgcagctttggatccatccatccatccatccatccaaccaatccatctatccatccaaccaatccatccatccatccatccatccaaccaatccattcgataaatgtctgactccttagcaagtgcccagccagtttgaggtgcagggaatacagtagcaagcacaggaatgatcatcataaccagctctctgggcctgcagaaggactggacccccgacctgagacccggctcctgtgcctgttttcccacctagaccagggaacttgcctcttgcttcctctttgccccatctctgtgcctgagacctcccgagatgagtgccagcccccggtggcggtggggaaggtggaagtggcggtgaccacacaatggagccatcactggccctggcgtcacgggactggctcctttgggcaagagctgtgtgccgtgggatcccacaaccatgccactggggaagaggagatcctggggcctccactgctttaagctgtggggcaaacaatggaagtggatgtgaggcttggggaagagatgacatttgagacaagcctgggagaatggctagggtttcaggaggctgaggaggagasaggaagaggggaaatgagttacctgacctctgagcctcatctgcaacatggggatgatccccaggggagggctcagcgggattttatagagggaagtatgagtgcctaatgtggtggataccaccgagaaggtaatcaataaatgtcccttctctcatccagcgctagaaaagagaaggatttggaagttttatgagctgttgggtcagggtgggcaggggcggctctcagtgattcaggccgtgtcagccgtggctggagttgtccataggccctgggtcttcattttcccacttgtaaagtggggacagggtagctttccagcccagtgcatgtgcagtatgatggaggggatctatggaaaggccctgcagagagcactgggatgtgtttgtcacctcattttctgccagtggcaggcctgtcaatattctggagtcttcaaaagaccagaaaggacccctccccagccaacagaacagctcctggactgctgagggagactcgaggaaaatggcctttgtgccccaaaagtgatctctttatgttcactccagccttccttcccctttcagccttaaagggcccgggcgtaggattctgtcagacctgggttcgaatccaggcgctgccacttcctaggcagtctttgggcaagtcgtttgctcagccatgggctggggctgggagaggggatggtgcaggctgaaaggaaacgatgtctgcaaaccgctgatccaaagtaggtgcacccgcctcttggtggcagacagcgcctggcctgtcccttcctgctgccctctttgtttctgttggtccctctgcctgaaacaccctccccactgaaaccttactcttgtgggcagacccagggaagagggagggttgtgcttgggaagctggtgttgaaatctctgtgccagcaacttggttcaccagttctcagttaagctgagtgctccctggctctgggtgggtgggcagggaatacaggtgtctggagtgccgtaagaaacacatcgcccacctggcccttcatgccagtcctcagaacgatccaaggacagagcttttctgcattgtcaacactggagctggcggagccaggttttctccaccaccgccgggagggatgtcagggcgggcgacaggctcttcagtcaagccagctgctgtccacatgcggggtctgtcctcaacctcctgggagcaggccagccggctgcctcccccgtctggctttggaaataaaaagcccgtgaaatcatttgtgcaagctcatcctgggggtgtggtatgtgcagtcaggaaacacgattgagatgtggggttgggagggtgcagaactcggggcaggaagggagaggtgaggtggaggggctgggttgtgtggtcttcagagcctggccactcagtgccatctgtagcccagcatcactggggagctgtctgccccmgccctcgcctgcggaaccagcttctgcatgttaataagatgcccaggtgattggtatgcacattctaggctgagacaygctgctttagagactggactagctttgagtcccagctccctgcttgctagctctgtgaccttagacaagttactttacctctttgaacctcagctccctcatctgcaagatgggcttagttagaaattctttccccaagagggttaataattcacattcaagccagtgatgtgtgtgtccaaggcagtgagccgggtgtgtggggcccagaacgtaccccccagttaatggttgctggtgctgttgctgttattgtgtctggaaagccaaagatctgggctcctgctgtcaccttgggtggatttggggcaagtctcattccctctctggtcctcgttttctccgtctgtacaagggttctattggcccctgcctcgccttcctcatgagatggttgctcaaaggagaagtgaggggtgctgggcctcattcccaagggcccctctggggaatggggagtgtcggggaggtgcccctgggtgcctgcgtccaagggaggagccatgccattctttattttttgtgcccttctttgctactcctgctcttgctgcaagatgtgttagcaggttcgctctagactccaggctgcagccagaggcttgccggggctcrcccttgcacctgccctgctcagcggctttggaattgagtcgccttccccrctctgagccgtgtggccaggagagatgattcagctcgggacctgtgctccagcctttaccccccagagaagccccagatgccctgtgctcctgggcagggatggggtggcctgggaactttccccccattgtgattcctgtccccaacatggggcctgctcttctcggtgagaggtggcctgggaccggactcctagccttgctcctgatatactgggtgatstgggcaaatggcttgaccactcggsttcagttgccccatctgtacaatgaggggaggttcagtgagatggtcctggctggattaggcccttaggttccctccctgccccctcttagctttctctgtgccctccagccctggaaggaatcccagccccttgccctccaggtccggrccygggagcccacgcagatctcagcctarcagctaatgctggggctgggaaaggctggagaaaagggggagagggagagagtgtgtgtcctccaggagccctggctgggctgtctcctgtgggagagaggaggaattttcctctgtgtgtgcaaacagtatccgttttctcttgtttccaaaagccggtgacgtaaccggctctccacccctccctcccctctggcctatttttagctggcccygacagcatcctaaaagggttccagactgccctgctccgaggccatgtagggagggwagcagtggggtgaggaaggaragaaactcctctgtctgtcccaggatggacagacatccgaggagggaaagaacctgcccccagcttcctccagggagggaggaactctgttggaggagctgggttagggcctttaggctttgacagttcctgggtctatgaggagctccgcaaggggattctgagcaaccagtctggagcgtccccacctgggtttcagtcctagttccacactatctcaccctggccttgggttcagcttgtgcctctgggccttgctttctgcacctggggataatgacggtgcctacgtcataggttgttacgaggattgaattaacttcatgtagaacagtgcctggtacaaagtaagtcccagtgaaggtggttctggaattggtaatatcatccagtcccagggaactgctcccaccccttcctgcagttaagggcgggggtccactgaaccctcctttgccttctcccctcccgcccrcgtttcctattcarcttcgggcagtactcgtgtcaaagtagtggtgtggaagcccttggaacaacagggcttggcacatagtaaacgctaaatcagtgggaactgtatttattgagttttgtttcaatgtaataaaacagccccacctgctgactcgctgtgtgtctttgggttagatgtttatttaacctctccgagcctcagtttccacttctgtaaaatggaatgataacacctacgtaggagagatctgtgttggtttgggtaggctgtcgggcatcgcaatgcttagcacaataaaagtttgtttcttgtgggtgcaaagaacagcctgagagtggagctggctgcagcctggctcctaaggactggctttgctactgcatcttgcagcaacaacaggagcagcagtgcttgcacagcactttacagtttgcatgcaggcagggtggtggtccctcccacctctgtcttcacgaagtgctgggctcataccttaacgtggcacttgtcaccaccacctgatactctggttatatgtcagcctggctgtcytctcacaccacctcccctaggctgggagctcccagagggcaggcagggatggatgccccaatgcaccttccttgcccagctcaagatagtccctgggtgggtgttggggttgtgtctgagggctggactggcacagggaactcaccttctgaccacctgttcctcttggcttttgcaggtgggaggaggagctcgccaagcgcatgaaccttcagaccatggtggacacgctgcaggaggtaagagccctccgatatcccgaccaggagaggcacgccagagagycatgtggccaaggggcacagtcttcatgcggcaaagccaggaaattcttgcacagcccctactctgttacctcctaccacctcagtctctcctttatggagccaagagatcccttccacttcctctgcttggaagctaggaatggaccagcacagtgttgcacaagagctctgatgcaggggttgagaagcctgggtccaggtcccggggtgcaagtcccagctgctgtatgacctgggaccagcgacccttctcacccgtcactgtctccccacctgaggcttggactaggtggtttgtaagcccccaagcaagaagggtgccctcggttggggctgaaggccttggagagggcaggtgggcacgtcgcaggtgggctcccagcctgagcaggctctctgtggtgggcatttgggaacattccccttgctgctctagctggaatctctgcattctgggctctgcaactcccccacctgcggtgtaacctgggcagcaaacttcatcttctcagcctctattttcctctctgacaagtgggagcaagagtagcaaccccatgagaaggcatgaaaagttcttccaaaaatgtctagaaattgcgttctgatactgaaagcatttgtcgtctaagacagttagagacagattaagataattgtcaatgcgtagaaggaaaaggttgaatatctccctttcttttataatgaaagggcttttttctttataaatttaacgggttcatcgtcaaatatgtggaaactatagaaaagcccaaaaataaaaattatttccagttcctccttccacagttgaaaaactggcgtgtgaccttccgatcttgtctgtgtggacacacacccacgctcttcagacgcatgttaggtcgacacacatgacattgtcatttttgaaagcagagatggcccaatactggcagtttcacacggattgatctcatatttttaacgtaataggattgcttgttaattaacctgctcttttaataccttccatggattttcccacgtaatagataacgctttgaaaagtgttttaagcagtcaacagtgttcagtgggaagtcaggctgggatgaggtccttggtgccccttccctggctgcaggtgcccagctggggtggacatcgggtgcctagggctctggactcaggtgtccagaccctcctatccccagaggacccggcccctctgaagcctccccatctccgtccccgcaggcagcacaggaggctgatgccatccaggaggagatgaatgagaagatcgagcggctcaaggccgagctggtggtgtttaaggggcttatgagtgacgtaagtgccgcccgccgcccctgggtgtcatgacctcccccacacccatcatgcaaaatgcttcattccctccgaggctccggggctcggcttctagttagaatcctggctggctgtgtttgaccatgaggatgacggatgcattggatgcatcggagaccaggcaccctcctccygccccctccccacttctgcttccctcggtctgagtagagatgcattaatctgccgcttaacctatcccgccctcccccgggctcccctgatggtctgtgtgtgtttgctcccactccttcccagctcrccttgatgaggrcaggcctcggtgtctgggcgtagcagggcgtctgkcaggttggsccaggtsccgtctggtctgtgcgggcctgagagactcgcaggcccagcggcctttggcagggttgctccatgaggtcaggaaaggccagtgcgcgtgtctttttgacaatctggggcccctctaagtatctgtgggtggggggagctgttggcagcaaagggctccttgctgctggggacccaggtctcctccccttcaaacagtgggcagtacagggggagaccccaccagaaggcagaaggggccagaacgtgggtgactgagcctggcatggctcctggtgtggagggacgtgaagctgggtgtggttggtagaagcctcccaggaccctagttggaggccactgggctccctctcacttgtgtccaaggggatcaaccctgtggtcctcagtgactcccactgccggccttgggaggcatccaggagagagagctgcctgtgtgggggacaggtggggtgtgccggtgggaaaagaagggctgtctttctccagcgggagttgtcttttttcttcgctctaacaaagtgaacacggaccctgtgtctgctgggaggatgccttccagcccttagggagagcagcacacacggcgtcacactggcccctgactcccaaggccccaaccccatcccaccctgaccagtgccgccgcagccctccactccacggaaaagcccaaggcaccctcggactctggaggcctccccgcaccacccctgctgacacctaggggtctccccacctctctgccaagccccccaggcttgctccatccctcgctcatgtaaaccctgctgtcctccctgcagcccatgacagacctggacacaaagatccaagaaaaggccatgaaggtggacatggacatctgccgccgaatcgatatcacggccaagctgtgcgatgtcgcacagcagcggaactcagaagacgtgtccaagatcttccaggtgactagggctgccctgctcaccagccaaccccccactctcccagagcagccctggcctccacccctgcccggccaacccgtttgcctccacatcccactcactccctccccttccccgagaggtagcactacctgaccctgtggcctccccaggaaaacgtagaatcaggcacccrtggactcataggctcgtctgactgcttcatcctatggctggggagaccgaggcccagagggtgatgtgctgtgctcacggaaggaagtggcagaaatcagtctcctgcccctccagggcttggttcaccagcccacactgtacccattgtcccgcttcctgccccttcctctgggtgccagaactgggcatcatccccacggttggggaaccctggccaggttatggggagaagtgggggagctggcctgagctctggtagaggggcctcagagttcagaagaggagctgttggcctttgactatttttcattccaccccaaagaggctctcgatacccccccgacctaacgtgcaagtgtgggtgcccccgagagacggcgatcaggttagcgccagtgaggctgtcttccagagagggcttggggggccagtccagccgaatgaggcacatgtcattctccgaaggctgcttcttgagtttcgggttgtggtttggcttttgcttgagcccagggcaatacggtgtgttgtcgctctgtgtgtgtgactttgacgtcgctgggccagatctgggcctccctggggccctctctccacctccatgccttcttgctgtccctctgccgggaagcaggggaggccaacgcagccttcgtttgctcgtggcttgtctgcttggagtggaagctttcggtgaaccttgggccgtctgtcctttgcctttgcatgtgagcaggagggctctggtcagcatggggccgtatagcctttgtcaggggttctccatctctctggctggctctgagatatcccaggcaactctgtgtcccggtctggcctgctcctctccccaaactgtggggctgcttctgtggtaaaagggcgagccgagccggcgcacccaccaggccgcccagggcagggaagagtccaggccgtctgtgtccccctgcatgtctcccacctcgcgcttcctgctaacgccgcctgcttcttagaggacctgcacctttcctggcactggccggccccagtcacgctcatcatcctgtgagatgccggctcccttcccarttcacccctaccytccatcctagccgagccccccagttaccttgattgcttcctttccggttcaggtggtccccaaaaagaaagagcgtaaggtggcttccgatgatgacatctctgagcaggacggggaggtgaaccggttctcggacgatgaggrcggctccatgaacatcaccgatgagatgaagcgcatgtttaaccagctgtgagtatcccsgtggcccgcacactctccgtttccccggattgcttgcacaggggcggtgaatgggaggcttgggctgagagtagcctgcagcactggaagaatttgaattcatttcctttttttttttgagacagggtctcactttgtcacccaggctggaggctggagtgcggcggcatggtcacagctcactgcagcctcaacctcttgggtttagggatcctttcatctcagcctcccaagtagttgggagcacaggcatgtgccaccatgcccagctaatttttaaatttttttgtagagacagggtctcactgtgttgcccaggctggtctcaaattcctgagctcaagcgatgcttctgccttggcctcccaaagtgctgggattacaggcgtgaaccactgcacacagccaagactcattttcaacatttgtaatttgggaaatttcatatgttcagcctctcttggaagctcgaggaggtcaggcattgctgagcctggggcacagttgacagggctggatggcagctgctgaatctggacaggcgcatactcttccattcgccagcatcctttatgttccctgtctgccattctcctgcctttccttcgaaagcttcctccaaaaaagcggtgggagaaggggtgttcttgcccatgagatacaggggctgggctgtcctctctctggacatgtctgtgtctgaggatgtcatgaacccagaaggggcaatggcagatgtggtcttatttgtaggctatttttttttttgagacagtctcactctgtcacccagactggagtatagcggccagatctcggctcactgcaacctctgcctcccgggttccagtgtttctcctgcctcagcctcccaagtagctggaatcacaggcatgcaccatgatgccyggctaatttttgcatgtttagtagaggcagggttttaccacgttggccaggctggtctcgaactcctgacctccagtgatctgcctacctctgcctcccaaagtgctgggattactggcatgagctaccattcctagcctgtgggccgttcttgagcagaccttaaccagacccacctgcactagtttcccttggtgggctggctgtgttgaccgcacggcttgcagaaatggctcctgatgttcgcttggagggggcttcacaaatgtcactttgctcactccagacgcccatcctaggagatggggtatcactccccttttgtagacagggaaactgagactctgagaggagaagggacttgggtaacaccactcagctagtatgtggctgagctgggattcagagccaggctgcctcccacgctagtacgctgtcagtaggaaacactgcttggggtggtggcagggtctgggctgggtatgatcagtggtgggcgagcctgctggygccagctcttagaagctgctatacccactccaggctcagtgatgtcatattagtaccttaaaatttgccattgcaggaaatcagcaaatgctaccaatcagagctctgggaggctctgccayctcccggaasccccccagagagggcatgctccttctagcagatgcctttgacatcatttgtttcaaaagcccagggcacgggctctcctaacctccctgcagagctctgaggctggctcagaattccatagtccagagctcactctgccyagccacttcattgtacaaatgagagaatggactcagaggggcacacagagccaggcccccaactcttggtccagtgctttgtcccccacgccatgcctggaagagaattctctcttctgtccctmttctaggctgacttttaaggtagacaggaggcagaggcagggttggaactgggtggggacaggaactcttttgcctgatacttcctggacctgccattcccttgaaacagaactgggatcggagctgtattttgggggtttgctatttaagggtgataaggagacccctagattcttgattcctcttttgataccccccatctcatattctcatcttttgctgcctgccaagaggggcttttttttttttttttttgagatggagccttgttctgttgcccaggctggagtgtggtggtgcgatctcagctcactgcagcttccacctcctgggttcaagcaattctcctgcctcagtctccgaagtagctgagactacaggcacacaccaccacacccagctaatttttttttgtatttttttagtagagactgggttttaccgtgttgcccaggctagtctcaaactcctgtcctaaagtgatccgcccaccttggcctcccgaagtcctggaattacaggcatgagccactgcacctggccaataggggcttttggaaagaagcagtggttgggtctaggttttctgaacgttgccctgggcacttctgagccctaagacaggattgtatgtcccggagatcccaggctgggtccatgtggttaaattaaaggacttatctgaagaaattgttgtccctgcttttataaagtccccagggcattgttaagctgaccagcaatggagtgagctaaaaaggagacagatcagagtggaagccagggggccccatgggcaaaggctccagtgtgtagaaagagcattcagatccaagtcaggcgagactggctgcaggagtgggcgcctctgtgttgatagagctaaattgggttcagtatggaattcgatttagctggttgtaaagttacctaagttaaaacaaacaggccgggcgcggtggctcacgcctgtaatcccagcactttgggaggccgaggcaggcggatcacgaggtcaggagatcgagaccrtcctggctaacacagtgaaacgctgtctctactaaaaatacaaaaaattagccgggcgtggtggcgggcgcctgtagtcccagctacgcaggaggctgaggcaggagaatggcgtgaaccccagggggcggagcctgcagtgagccgagatcgcaccactgcactccagcctgggcgacagcgagactccgtctcaaacaaacaaacaaacaaacaaaaaaacaacaacaacaacaaacaacgaaacctctgatcactttgatcaccccccacccccattctgcagttctgtgtgggccgccctgaccccaccccaggcggggccctgggcctttcccatggacrtctccaccagctgtgggcaggaccctagccaggctgcccctggccagatctgatgaagtgtttgaataatgcagccgtgttacagttgtgttttgttttgatccaagtcggttgtttgggcttcagaccaaggagaagagggggaacgtgtgggtctcccccgctggggccaaggctcctcctcagccccactccgcagatttgtgaagtggaggcctcttccgagtcccttctcttgcccgtctttctgtcctttccagcttcctgtccctcggctggggtttccttcagatcccagaygctgggaaggaagtgaagtcaggaattgagtgtgtgatgcagtgaccactggaccctggcggctccgggccacacggccctctccagcacccaccccctaccagctcaggaccctggactcggggagccacctatgggctcctgtgggaatggcttttggaggggagccggcccggcctgactccagggggcgctcgaggcagctttttaccagacggccttcttgggaccggcccagtccccaacccagtccattgggaacactcattgttgctctggaggatccaggaaggagttgagggagggcaggcaatggggagagccctgggatggcagcctggagacagggtccacattgtcctgtgctaccgatgcactgrgtcaagtgatttcactcctacagactcagccttccccttggaaataggggtatgttggatgagctgatctttaggtctcctccagttggggtaaccaakgcatcttgggaaccccttagtcccaggcaaacctgcctggttggtcaacctacttctagttctagccaatagggaggtcttgacatctcccaggctttgaattcaaatctcatttccagcatgtattggtctagaaggccactgaatccctctgagcctctgtttcctcacctgcaaawtgggaacgatagttatgcttacctcataggattgttttgagggtggaattgttttgagggcgttgcattttgctgcatgcttagtggctggtccagtgcccagcacctaatgggtgcttggggagtgtcttgatggggaggaaaaarctgtaggaaacagaaacattcggcattctagcctatttctgctacatgctagctgtgtggctttagacagttgagttatcctttctgagccaccatttcttcatctgtaaaataggtataataccaacctttccaaattgcagagaaratgatattatattgaacatctcactcaaactagaggctcaagaaatagctgttaaatgaatgaggaaaattgcaagattggacttggaggaaaatatctttagtcccaattaattaaagcctgacattaaaaaaaaaatacacatttttaattgtacaagcaatacataaatacattctgcattttaaaagagttaaactccttttggataaggcgaatgtcccctttggcttactacccctgtctttcctgaggacagccttgaagctgtgtacctgctgggcagctgcccctttctgtcccctgtatgggtccctggagcctgccttctgttcagtcatgccctctggtgtcacccccacaggcgggagacstttgactttgacgacgactgtgacagcctgacgtgggargagaatgaagacacgctgctgctctgggaggatttcaccaactgcaatccgaccatcgacctgcagggcgaggtaagcccagcgcctggcttcccaaaggccaggactaggggtctgggggacaccgcctttcaatggtccctcatccctgttatttttctacagcccccaccacacagctaaactgtcccctttgggccaggcgcagtggctcatgcctgtaatcccagcactttgggaggcygaggtgggcggatcacctgaggttgggagttcgagaccagcctggccaatatggcgaaatctcatctctactaaaaatataaaaattagccaggcctggtggtgggcacctgtaatcccagctattcgggaggctgaggcaggagaatcgcttgaattcaggaggcagaggttgtagtgagccgagatcatacctctgcactccagcctgggtgacagagcgagactccgtctcaagaataaataaataaataaataaataaataaataaataaataaawaaaataaactgtcccgtttgttctatttccccagcaagaggaaaacttgggcaacttgatccatgagaccgaatccttcttcaagacgagagacaaggagtaccaggaaacgataggtcagatcgaggtgagggctcgggacgtggagcccactcgtgaggctctcctgaggtccacatggttgagatcctggygatcaaacacccatgtgtcatgggcaggggctggtagagtggggcaggcgcaggatcgggagtcaggaggcctcggggcgagtaatgtctttcttagggcctcagtttcctaatctgtcaaatgggggtggtgatccttgcctgcctcagagaattagaaagaatatatgtagctgagatgatcccataataaccacagagctgacattcgagtgatagtgagtgacacaaggtgctgagtatgcccggtatccttacctgtgccctatgcagtaggcaccgtgcaccccttttacagaggaggagatgaggctggaaaggaccaagtgacttgcccaaggccttgcggccaggaagcagcattgaagtataattctctctggctccagaggctgtgcatgtgatcacttctataaacgatagtyattgctattatgcaggagaaagggaagcccagctccttccctagaggaagtatcacttgatagaggacaagagtcagaaacatgaaaaagccttcaggatttttrtaatcrggtctggataaaggaacccaaagatgttgagttctcagaaccgggtggggtgcatcagagccaggctgctgctggggttgctaagcaaccattcccctttggccagaaggagttctaggggaagtggacccatgtgcagagagcagagggtgagggaggttgatgtcyggaggcagggtcctgatggcatggtgtccaatggtggccttgatggcaccatccctgaggaatccaggaggagaggttgccgaggcttctgycacgaggatgacttgccctcacccttattcctcattggttcctcccagctcgagctggccacagccaaaagtgacatgaaccgacacctgcacgagtacatggagatgtgcagcatgaagcgaggcctggacgtgcagatggagacctgccgccggctcatcaaaggctcygcagacaggtacccrcccatcctcccaggggattcagctatggcatccttggaggggaattcccaaggctgcaactcggccatgtgtcatgctcccaacctgtctctctgtccgtccatctgtccgtccgtccgtccatccatccatccatccatccatccagtgactattagcacacctatgtgccagatgccttacatatctaacctcatgcaagtcccaccaccaccctgccctttgttgattcaatagatacttgscaaaggcctgctctgtgcaagacggtggggccagtaagtatagcccctgccctcaaggagcttaagccccattttctgctgaaatggggagcagaggtggacagggcatgctcccatttgctcacaggaagtgatttcccttcctttcccatctgttagtctgttctcatggtgctataaagaattgcctgaggctgggcgtggtggctcacacctgtaatcccagcactttgggaggctgaggtgggaggattgcttgagcccaggagttcacagctagcttgggcaacatagcaagaccccgtctcaaaaaaaaagaaatgcctgagactgggtaatttataaaggaaagaggtttcgttgactcaccgttccacatggctgaggaggcctcaggaaacttatagtcatggcagaaggcacctcttcacagggcggcaggggagagaatgagtgcctagcaaaggggaaacccccccttataaaaccatcagatctcgtgagaactaactccctatcacaagaacaggatgggggaaaccgcccccacgattcaattatctctaactggtccctctcatgacacgtggggattatgggagctacaattccagatgcaatttgggtgggaacacagccaaaccatagcatcctcttccaacccagggcctgtccccaggagactgacaagtgtcaggcatggcacataaagcagagcccctgccttcaaagacacacagccttatcgggggacagccacgctgagaatgagctaatatgaggagaatgcctgccacacagcacaaatacgttgtcactgttttcctcgttttgctgcattactgtacgagagggagggacagctctgtgggggccagatctgtgtgcagggccgtagccttgcctttcagacctttaactcctcaaacccccagaacccagtgtggttatctccattatccagacagaagagcagacgctcaggcaggttaaacggtttgcccaagttcccccacccccagctcatccgagatagaatcagaactgcaccccagtgatgttaaccrtatcccgcatggcctccttttgagctctgagtcattcaggttttacttagcacctactatatgcccagacatgggttaggtgcttggagagtaacagccaaacttgatccacggtccagctcccaaggggctttcttcctagagaagccaacacagccagaccaagtaggggctggtgcagggggttacctcgtgagcttaaaggatcttaaggatagctgagtgaggcaggagctcaggaccaggcccctctgagagtagatcttatagaagtggcagctcagccttcccactccttgacccttcagaggcccagggctgctctctgaatttccccactctcttgtgcttctcaggaattcaccgtcccccagctccrtggccagcagcgactcaggaagtacagatgagatccaggatgagttcgagcgcgaggcggatgtggagcccatggtcagctgatgactgaggccctgcgagcctggtggtcttggtgatggggccctgccacctctcctcatggggccaggaaggcccctcggagtggggttcgaagccacaccacacagactttctctgccctcccttctctggaggcccygagggactgctgcttccttccttccttccacaccaccaacgggtgccccgtctccatcccccacccacccaaggaatggtgctgtcaatttctattgttctccacattacaaatgcagacttctgtgcggactttgcagtgttaactgtgccttctcccttaagctgagccactttgagctccaaagaattattcctagcaggtgtttttatacagaactctaagctgagggccgggccaaccggccgtggtgtaatgtggtttctgccgtccgtcccacctgctcctctgattggccatgggctatgccctcccttcctcctgagccagcccagactcggcctggagcttggggtgctctgccaacccccaggaaggagccgcttgcctctgtgagctttctaggcctgggtagggaccaccccaattttctcactccctgaaggagagaaaggtggaaggaagggaaggaggacacattttaattttttggggggatcgagtggcaaagttgaagggacaaggcactgtgaggggaaggcagagcctcactgtgtttaaactactatgcaaaaaacaaaacaaacaacaaaagcagcttgccttatatcattgtggaaggcaggacctctcctgggctcctggcttccccctggagctgggagagaggccggggttagggtgatctgtgtggcagcactgactgggtagtgtgggtttggccgaggttggtcatgaggctggggttcccgcaaggcactggcctccctgaccgcttgcttccttccggacctctgggttcagggcgggggcggagggatccttgatttccctgataacttgatgttcttccctccctcgccagccaacaatagaggcttagagatctgtaatttctctgtgagaaagtctgaaggggccaggcctggtctctgctcccttctacccgccttgggttaggactgtccggcagttgcctgcttttggctgctggcaggagagaagcagggtgggctgctggcagtgcaggagctggagtgagggccatcctctttctgctcctcgacacacgcaagccgctctcagcagttccctcgactggccagtcggggtattgatctgagccagcatcccccaagacttgaatggcttgagtgggactgcgttgaagggcactgtgtggcccccttccaaatctcagcttggagccagctgagcaggctttgctttattattattttttaagcctactgcagtgggtctgttgccaattttaattttttattgtcccaggagctccctctagtggtcaaggtagcaaaatgtgcccaaggactagaacttgggtccctctgccttgcctggaggcagaaggagggggctctgggtttgactgggattgtggtccccaggggtccgtggcctttaaggctcttctctcttttctgtttcccccacctgtgttacagtcttaaaaatactgtacataaaagatatatgtagagagagagagagagcgtgagaatgtgttagtgactatgtgtgatgtaatttatcacgatttggtggccttcgtcatgagttttttcctttgttttcttttgctgggggcacctcccacgggtcccctgtggcagtctggctgtgacacttccatagtcagcatctcttgttagccaaacagttccctttgacaggtacttggagggacaatggttttggaagagagacggcccttctctctcctcactcacccttgttctaaaggttacagggttcaaacatacctgattcttgttgttattgttgttgaatttttattttaaccaaaggttatcagagccagttgggcttggacctcagctgctaaaaagattttccgtttcctcgagggcaggaaaacatccaccctcgtgggtctcctccgtccagggccgagggaggcattggacaatgtggtatgggagtttcgtgggcagcgtggaagccggccctgggttgttccccaaggtggtgggagggtgacagatatatctttagacttaagactgtaaggcagcagtgttagcatgggagtaactaaggttactgtggttatcggtgtccggcggtattatttttactttcctccttgtatacataggtcatttgtctttgaggactagggtactctagggagtttgaaaactgcaggagccagaaagagatcctggcctgagagtcccttctggctggcttttaatatctgctctcctcttgggagtgaggacttggggcaggtgggtaggagagggaaagccagagtgtgatgggcctgcctcctgggctggttcctgggtccggcctgcctgcctgcctgcctgcctctccaccacatgcttttttcagttaatgtcagtgggccctgcttgtcccctcaccatgagcccacagcttgccaagaaagaccccaacgctcgctggggcagcaccagtcctagctgggacgaattggtccatcctttgtaaagctgtaaatacttaattttgactttctatttctaagcccagtgtcatattgacactggtattttagaattttctcagatgggctctcctgcgctgccctctgtctcctgtttttgggggttttatacaaacagaggattggggagggataggaagactagcatccttttggctccctggttggttgtgaaatacacacacacacacacacacacacacacacactcgcactcctctgagactccgaacagagaaaaaaattattggcaaatcaacacatttttctttctcgtcttgagaaaatgtcttgaggtccctgaagggccaaatccatcgtggactaactctgtgggtagagctcagatgacctagggagaattaaaccacttaagcttggagtgggaggagagggggtggggtgggggagaatataagatgtaacttaagctaaatgtaatctatttataaagcaagagactctcatctatttttatgaaaggaagggttttttaatctagggtaggcagttgtggtagcccagcattttcctgtggacgagacatggtgcatgttgttgctggattgaatggaacccattcctgtcccccggcctcgtcttctgtcctcacttttggtcatccacacccatgagcagcttcagcagagtgtaggtcccacttcaccccattctcctctcctctgacccctcagctccttggaagtcttggggtggggatctgagggggtgggtgggctgcaggaaattcagaaatgtggtgggtgggggaagggacaaggcgcattagggagggaacaagctgggctctggggataggctctgattaattagttactctgactctggtctgccgagatccatttccaacccagttgcgttgggagagggttgggaggcagcagagcatgggtgacagtgggagcacacgacttccttggagcctgggcctttgcgggtcccaggtggtcaggcagctggagcagaagtggaaatggcttaagatgctcatagcccagccccggctgtgtctactccaggccaagcctgggctgcagtccttgctatgttccccccagggccctggggggagggatcagggtgctgggggtttcctaggacaggggtcttcccccttgagacaccaagctctggctctagaagagctctctcctggagtggggagtctggaggggactgggtgggtgcaggtaaagccagattctctctggaagggaattttctatgaatggatgatttccaggctcagggtgggctgtgtgttagttctgagcaaatccctcaccaagacccttccctcccaagccctcaaagaaatgaggcaaagcccttccctgcaagaccccttgtggatgtttttgcatctacctgatttttagccccacccagggagactttataccccatgatcctgccccaccgttgctgttgtctgccagctgggtctagcatcacagggaagggggggatttatactcatggaaagactactgatcctaccggaaaccaacctgtttactgtactgttgtaaatatcatgccctttatatcctgtatattggcttcttttaaataaagtgaaatgtcttagaactgatggtgcttttttttgtttttgtttttaaacagaagatgaatctggtgttgggggaggggtaggaggacggaaggccacagaaaccctcaaactcattagttaattagccataaaataggggatttcatatcacctgttacatttgtagctcacaataaaagctttggaagatgacaaagcaggaatcattacacacattttactgaaggggaagagaggacatgagacatcacaggctcagtaactggcttggcctggtttggaactgatgtccttttaaccacaaagcccccatttttccaggctctccaacgtgcccacaggaggtcaccttcccaggctctggatttgacagtaaccaatgttctagtttttcttgtcaatgggcatgttcagggcaacattgcccaaatgtgaactgagcccacctgtctagggttttctccaaaggtgaagacaaatagccgccaccaattccaatttgctttttgccattcctaatacttggcacttaggtaatctccctctcctactcttcatttaaatgtttacattctcccaaagtacctcaaatggtgtaatctggagaaaaataagtggcttaagatcacgggggctttgtgagttgggtactattacttccgttttacagatgaggaaactgaggcccggaaaggatatgtagtctgcctagtgccctgcttgaggaaccaaaatcagcatgggaactgactcctaagcaggtgcgcggttcatgctgctggaagaaatataaacaaattagaacagagagtaaggaaacgtaacattactttaggaatagattgggtccctgagacctcgtcatcagagaagacttcagaatccaagttttaaatagcattctagtgtttaccaagcacacaacattttgcaaagaaagctgaaatttttacttgggggtaaaaggctcaggaacaactggttttgcggccaaaggctttaaatgaaaagctaagcgttggccagctcaggttttatcttgcattgatcgtaatctgcaaggaagctaagaagctggccggccccgcgcctggagggtaggtggagagcggctgggtcctggccaagaagctggaaggcaggctcattccaggggccgcagcccccgggaagaagcagggggctggccgcgctgtggccctgcggggtcgaggagtctggtagcggacaggtttccagccttgtacaagccaccggcagcccgagagaagtcagtcggactcccatcgaacccggggcgcacgccagagggccggacgcagcgagtccttctgccccgcttcagcacgtgtcccatttcggttatctcattggctctattcagcccctctctgctccgctttggaaggctgccgcaggaccgccccgctgattggttcagaagctttggtgtgtcactctgactggtcgacagagttcacgccctctctcccgggtcataccataaagagaggaggggaaaacgcatgcatttcaggacttcgctttcgggttcccttgtcctgtgttgtgtaatgcccccgttatggcactagaaatattttttattagccgaagctaaatatagtgggactttggctgatcccgagctcggaggacagccggggtgatccgtttccccccgaggatcgaggtggtgcgctctggacggggttgtgcattctcgccgcgcccgggcggacgatccagcgaacagccccgcttctaacccgagatgctgctgccggcgcccgcgctccgccgcgccctgctgtcccgcccctggaccggggccgggtgagtgagcacggggcccggggcggcccgagcgcgcgcctggggcccgggagcctgagagtcactgggcgtcccccgcgccgcactccctccctgccggacccccaagctgcctcggtcaacgccgggttcctcaggggctcccctccgacccccacccaggcctttctcccactgagatcccttagcctcctccctcaggtagtcaccttcctttagcgaggggacccctcttcccgaatcctgcgaccgagtagggtgcctcggtggccctgccggttcccacgctcggaaagtagcctctgtagtcactcacctcactcctaatactggatcttcgcaatttgctggcttcccctgaggggcccttctatttttagcacaccacacatctcacttccccaccctcgtctcacgttcagtgtccccatcccgccccggattccccgagtcctctccttctaccaggatttctacctctctcttttccgctccccacacaccccgccgcccgtttttttttttttttttcaagttaaatgttggacagaaaaaaggattcctttcttcttgtaggtggaataatcatatttatagagtgcttataatgaaccaaatgctggccgggc

SEQ ID NO: 8910 - DNA, 38753 bp, Homo sapiens
ctagaaaaaagaaatgccagcaaaccccaaggccgaattgtggggggcaaggtgtgccccaaaggggagtgtccatggcaggtaaggcttcccctggcttcaggattccaagccctgagggtcttgaagccttttgaatgtgaacaacagctctggaagggaaaatgggcaggtcagccccaagcccaccaggctccaagtcagcacacctagcacctccagctcgcggcacccccatgcttttagtggggcaaggaaggagaaaagaaaacgacactcactgagggtctaccctgtgcagagaaccctgcgagatgccccatccgagttgtcacgtcgtcctcacggttactctttgaggtgggatctttgcctgatctttgcaaaatcaggagcattggatcaaagctatgtgaagatcctgtgaggtgaacagtgaaatctcacagcgacatttgtattcttgggccgtgcccaagagcacgtctcggctagagaggggcacagcctcccagagccaggtctgagcagctttgcctgggagggatctgcaaagaccccaggatttcagaaagaaattgtgcaatgccagaggttccttggcatgcccgggagggcgagtcatcagagaaacaatgacagcaatgtgacttccacacctcctgtccccccgcccaggtcctgttgttggtgaatggagctcagttgtgtggggggaccctgatcaacaccatctgggtggtctccgcggcccactgtttcgacaaaatcaagaactggaggaacctgatcgcggtgctgggtgggtaccactctcccctgtccgaccgcggtgctgggtgggtgccactcttccctgtccgaccgcggtgctgggtgggtgccactctcccctgtccgaccgcggtgctgggtgggtgccactctcccctgtccgaccgcggtgctgggtgggtgccactctccgctgtccgaccgcggtgctgggtgggtaccactctcccctgtctgaccgcagctctcaagtgtctcaggggctgtggctctgggcttcgtgctgtcacttccacagacagacagacatccccaaaaggggagcaaccatgctgggcacgactgctgtggccaccgtgctctcagccactttcccatgcccaaataaaacgataaaagactgggggcttctgcccatcctgcctcacttgaccaagagcccagaagaggatgcgacacccagggcctcatgggaccaccggctggcaggggttctgctcactgggtttatgggtgagacgagcactcccaggagggccactgggccgggaagaactgtggagaatcggggcacgccctgtcctcccagctgccagggcacagcatcccttccccacctcaacacccagaccccagattcaccccagttcacttgtccccacacgagccacaggctgccacctggggcaggctggccccaccttggggttagatgcaggtccccttgccccagaaggagactgcagcccctgcagacctagaaatggccacagcccatccccatgcaccagggggtgaggtggcaggtggtggaaagggcctgaggggggcttcttccttccaggcgagcacgacctcagcgagcacgacggggatgagcagagccggcgggtggcgcaggtcatcatccccagcacgtacgtcccgggcaccaccaaccacgacatcgcgctgctccgcctgcaccagcccgtggtcctcactgaccatgtggtgcccctctgcctgcccgaacggacgttctctgagaggacgctggccttcgtgcgcttctcattggtcagcggctggggccagctgctggaccgtggcgccacggccctggagctcatggtcctcaacgtgccccggctgatgacccaggactgcctgcagcagtcacggaaggtgggagactccccaaatatcacggagtacatgttctgtgccggctactcggatggcagcaaggactcctgcaagggggacagtggaggcccacatgccacccactaccggggcacgtggtacctgacgggcatcgtcagctggggccagggctgcgcaaccgtgggccactttggggtgtacaccagggtctcccagtacatcgagtggctgcaaaagctcatgcgctcagagccacgcccaggagtcctcctgcgagccccatttccctagcccagcagccctggcctgtggagagaaagccaaggctgcgtcgaactgtcctggcaccaaatcccatatattcttctgcagttaatggggtagaggagggcatgggagggagggagaggtggggagggagacagagacagaaacagagagagacagagacagagagagactgagggagagactctgaggacatggagagagactcaaagagactccaagattcaaagagactaatagagacacagagatggaatagaaaagatgagaggcagaggcagacaggcgctggacagaggggcaggggagtgccaaggttgtcctggaggcagacagcccagctgagcctccttacctcccttcagccaagcccacctgcacgtgatctgctggcctcaggctgctgctctgccttcattgctggagacagtagaggcatgaacacacatggatgcacacacacacacgccaatgcacacacacagagatatgcacacacacggatgcacacacagatggtcacacagagatacgcaaacacaccgatgcacacgcacatagagatatgcacacacagatgcacacacagatatacacatggatgcacgcacatgccaatgcacgcacacatcagtgcacacggatgcacagagatatgcacacaccgatgtgcgcacacacagatatgcacacacatggatgagcacacacacaccaatgcgcacacacaccgatgtacacacacagatgcacacacagatgcacacacaccgatgctgactccatgtgtgctgtcctctgaaggcggttgtttagctctcacttttctggttcttatccattatcatcttcacttcagacaattcagaagcatcaccatgcatggtggcgaatgcccccaaactctcccccaaatgtatttctcccttcgctgggtgccgggctgcacagactattccccacctgcttcccagcttcacaataaacggctgcgtctcctccgcacacctgtggtgcctgccacccactgggttgcccatgattcatttttggagcccccggtgctcatcctctgagatgctcttttctttcacaattttcaacatcactgaaatgaaccctcacatggaagctattttttaaaaacaaaagctgtttgatagatgtttgaggctgtagctcccaggatcctgtggaattggatgttctctccctgccacagcccttgtcaatgatatttcacagagaccctgggagcacctgctcaagagtcagggacacacgcatcactaaatgcaagttcccaggccctggctgcagtgggaggacctggcaagctgcactcttgctgagtccccagggtggtggaagaagaatgagaaacacatgaacagagaaatggggaggtgacaaacagtgcccccactcagactccggcaagcacggctcagagagtggactcgatgccatccctgcagggccgtcctgggcaccactggcactcacagcagcaaggtgggcaccattggcactcacagcagcaaggcaggcaccagcaacccacctcgggggcactcaggcatcatctacttcagagcagacagggtctatgaactacagccgtgggctgcttccaaggcaccctgctcttgtaaataaagttttatgggaacacacccatattagtgtccatggagtggccgtggcagagacgtccagccggacagaccagctgacccgccaagcccagcatggttagtgtcaggacctctgctgaagatgcttgctgaccctggccagaccccggttcctaatgccccctaaacgggacgggagccagtggcgggccctgatccaggtcagagctggctctgctttctcttttgtccgagtgaccatgcctcagtttcctcatctgtaaaacaggagcccaccgtgatgcttatggtgggatgagatcagcatggatggaacaaggccctggaagggcccatgccatggtcatcgacagcaaagccactctgcagacagatgcttcagtgaattggtagaaaattctgcaaccagaatgcccggggctcctgagggcctaagcccagcccagggttctggaagccgctctgacttcttgggagtggaagttggcaggactcttcctgggaagaagcggagggtggggatgagaggacagttcaggagcccacccagacccacaggaggaaactaggggagtcatgcggggtcctggtggagcgccagcctcccttcctgccaatgggaaatgcaggcgcccacctcatggtgctgccggaggagggggcccgggactccccagaggcttcgctgaagggcctgggcgcccccaaaggctacatgtttcatatgggacgtgccacctgccacggctcagctccagctttctgtgagtggcgagatagaatacggggaggccactggccatgggcctgggacagggtgggatgaggcggcaggcttgggccaccaaagccagcatcgccacccagcattgatgacaaagactgcgtgtctgccatgagcatcctgctgttggtgcacacaccgcattggtctctccatacaaacatgcctagaggcgatgtcagagggtggagaccaggagaggcaggagtcagacatctggtgccaccaggaaggcccttctcagaggaccaggctgtgcgtggtgcccgccgtgggaggccagcctggcgttggcatccagcatcatcagtttgtgcagttgggtggggctcagtgagtgcctcctgtgtgccaggcacaatgacgcacaatgtgtgcacaccaggctcatgtgcaggtggctgcgagacagggcgacccatcaaggcagatgcaccatgaggcagtggccagtgctgtgggtgttaggggcattgctccccggccactacggcatagcaggcagtgatcgccacactggccaagctttagaccatttattccagagaccccagaggcaaaaagcccggctgcacctcccagtgactcccacagccattgagcagagacgctcaggaccttgtgatgggaggtttctgcactggagaacgagcccagaagccctctcagcctcggaacagtgtggccagtggtgggcaggtcaggaggggcttcagacacagcctgtccctccagatggtcacgggaaggtcactccccacagaagtacgttttggggccatgcgggcacagaaggtttgggggtgggtggggcaggtgccagcctggcctgtgggaggccatggtgcagatgccaagcccccccgtgacatgagaccacctgataccacccagagagtggctgtgagcggaagggcccgcccagaaacaagcagggccttggggcagaagtcctgggctcagatcccacgctcactgccagcggcctcggctcaggcttctgcgctctctaaacttagttttctcttctggaaaaatgatggggaaaatgatatttgtatgtgattgtgaggactgagagttaaatgtaaacatctggaaactacaaaatgagcacgaaatgatgtttttattcttagaacagaaagtccccacacccgcggccctggtgactgatgaggatgaggttccgaggggcctctctggccgcccagctctgcctggggaaggtggggccagagtggatgtgttcccagcgtggtcactcccctgcctcgccagcaggtctcggctccaatcaggaggcctaagccaagtgataagcagccagacaacagccatcccagctgrggcgtggactttgctccagcagcctgtcccagtgaggacagggacacagtactcggccacaccatggggcgcccactgcacmtcgtcctgctcagtgcctccctggctggcctcctgctgctyggggaaagtcgtaagtgcccctcgcccttcagacccaaaagcagcgccagggagcagggaggggcggcagttggggaaaccctctcatctctgcagcctggacggtgggtgccttgagtgctgccagaggctgggctcggatggctgggcttggcctttccagccaacggcatcctcaaggccagctgtggctccctggggctgagagtcagacgggcggatcagaggtcacagagacaaaaacacaaggacagagtcagagagagaaagggagagggarggagaaacggagacacagtgagatgggaggccaagaggcagagacagaggtagaaagacggagacagagagagagggaggggttggggcaggcagagacaggacagttagccatctgccaccacagggaggcacaggacgaggggcacagcagaggagctcccagggaggaggaggctgagccgagccagtgccaccactctcggactggctccgtcggggaaggagctgcctaatgcacagctggacaggtgggggcagcagggctgtccaggacccccgggtctgtccaaaagcagaggcccagacaggacagaagccaggcmagcctggggacagcggaggaagaggaggcccctctggtggggacacgagagacagggaccctagacttgtttgcatcctggacaaagtggacaggcaggggcaccaaggggacccaggcctgggaagggaatgtgtgagggagagacggagcagggggagaccctcgtggggtggaaaggggagacccctgggaaggctgagtggatcctcagtgcatcactgacctaaacggcccctccgcctggtgacttggagctccagtcacatcacacgggggtcttctccatcccaccctcaaccccctgccctccccagcctctgtcccctgagccacatcttcctgtctcccacgcggaacgggactcccgtcttcatggggtactgtgtggctccaactcgcccagccttcttcctccccctcaggccacactgccccctgcaggagcccactgtgatgcttgtggtgggatgagatcagcgtgggtggaacaaggccctggaaggacccatgccatcatcatcgacagcaaagctactctgcaaacagacagatgcttccgcgaattggtagaaaattctgcagccrgaatgctctaggatcctgaggccctaagcccggcccggggctcccgaggccctaagcccggcccgggactctggaagctgctctggcttattgggaatggaagttggcaggactcctcttcctgggaagaagcagagggtggggatgagaagacaggccaggagcccacccagacccacaggaggaaactaggggagttatgcagagtcctggtggagcgccagcttcccttcctgccaatgggaaatgcaggcgcccacctcgcggacctctgggtccacagggtattggcacccttagctgtgtgatgcgggcctggctcataaccatggcctgtggtgtccccgggggccggcctggaccctgggtggacatggccagccccggagagccagggccaggccatctctctcccctactctgcctcagaggcctcggcagctgcactgtggggtgggtggggctgaacacaggtcccagaaggtcccactcaggaccctgctgtgcacacttttgattttaataaaatcagaatgcgcacagcatctgcagtctagcctttaaacgagcacagctgtcctggcagtcacggaagttcttctggggcggtgggacctcagcattcctttgctggtactgctacaagaaaggacaatggaccaagtagcttaaagcaacagaaacatttctcccacagctctggaggctggaagttcaaaatcaaggcgtcagcggggctggttcctccagaggctgggagagagtctgctctaggcctgtttcctggcctcggggtgccagcggcctcacagcccrtggcttgtgggagcattgctcccatcgctgcctccatcatcgcatggggttctcaccatggctgtttttctgtcttcttttctctcagaaggacaccagtcattggatttagggctcactctactcccataaaatgtcttcctaactaaatacatcacaaaagttctatttccaattaaggtcaggttctgaggttctgggaaagacatgaatttggagggacattattcagccctgtcctgccacctgtgagtgttttctgcaatccaactttttattttaataaaatcagaatacgcagagcacctgcagtgccagcctttaaactactgctgttgtactggcaatcattaaagctacgtggcttcagtttcaatctttacattcaacaagtttaaacccattcttcatgagtttggaccttactgactgaaaattttgcttgctggtaaaacttgctcaaatgcagttgctgactgtggaattcactgatgttgccaaaacaacaaacacaactgtgtgctcgaggattgcaatgctcccaacagcttctgaagaaacaaaccacacgacaaatgtctaccaatctggatgctccatatcagagttctagagtgttccattaatttcttgagacaagtgcctaaaaaccttgttttaatttcgttttgccaaaatcccattttactcacatcagaaagtgtggccacgtggcccagacccggcctgctcagtctgactgaagcgttgatgcgactcagccataacagatagcagaagcgcccagattcagtccagagggcygagccaggcacgccatctttccttcattccctcaacacatattggttaagttccggccgtgctaggcacgggcatacagctgtgaccaaacacgtcaagtctttttccagcggagggaaggataagcctgtcagcatgtaatgtcagagaggggttgggtgctagaagacaaatagcacagtgtaaggggatgaaagagacacgagtgggggcaacgtcagagggcgtggtcagggagggtgtctcggagggcgctgggcctgagccacttgggtatctgtggaaagaatgttccagacagggaggtgactggtgcaaaagtcctggggtgtgagtgttgggctcagccagggtcagcgcagagcccagtgtggcagagagaggtgaatgagggcagagttgaaggtggtgaggcctgggaggcctggccatgggaagaccctgggctctgttctaagaccactagaggcagattctgggtagtccttgacttccttgcatcaccctttccaccccgtgcctgccacctgtaccctcttcctcacacagtccagctcaaccttataggccgtgtcctacccccatgagctggggagagctgagcaggcttcagggagatgggaaaaggcgggaactggacaggggctgcaaaggaaaggtgacttcttactggtcaatcagcctggggatgctcgggggtggatgccaaggggaacagagctgtggccgctatcacagaacagcgagttcctctaagaggtcagaggaggcgcaagggatcgaccagagacagtgagggcgtcaggctccagttgagtggggaccaatccttgtggcaagtctgtgaaccatcactgtggctctagggyagcagagaaaaaagcaggcatatgtccatctggccacaaggaaggagaccaaggggaagagagaaggtaccaagagaggtgttcacatggaggtgcgtcagaacaccgagggcaaggcagaacgcggtcttcagaccccaactggagcccaggaggcccgcgagtcccagtttgggaaacactaagccaggcttggataacttgtctgaggctgtggtcatcccaacatgwgagccagaggccccaagggagatgggcattccccacccctcagcttcctcagtgccttttgtggagtggaggtgacatgaggctgcaggttgcagggagccacgtgtgggctgcatttcagagcaagtgtgtgggagtggagcagacacgcagagtaatggggcagggtcaagaaataataaatctaagtctagcgttggtgggataatgtcggtgtcactaaaagaaatggggaatttggaaggtaaagtaactggaggtaggaatgaacccaagatttactaagcaccttctgtataccaaactcaacactaggagtttatacaatctttaaaacagctctaagagtagayattataattcccttctgccaataataaataataagtgactaaggtgtttttgaagctcaagattgcttgattctgcagtcttgttttaaattttggacatrgagagtttggagttctgagatgagggaaggcatctgtcatagtgagagagctgaaaacatggagctcaggacaaaagtcagtgctagagagatcagttggaagagttatctttattgtagtgagacattgaatttttcagtggaaaaaaagcacagaaaaagactacagagggccaagaaaagaaactgaggctgtcaaaatgaaaagaggaggaggagtgggtgagagacaaaggagacacaggcagagagatgtggacagcacagcccacagacacacactctacaagggacacagactctcggatccagggcattttaaccagcagatcaagactcatttgccmgtcatgaaatcaactcagtatttttttttaaaagagtagaatcaaatagaaaactttgtactaagtactgtattttaggaaatactaataaatactatttcttgaaagttggcatgtatgtgtgtcctggcacttcataaattgtactattatagtttgtaattgaaacagcatcaccaatccccacataacaaagagcagagaccttaaagacgagtggggccaggctgaaggggcacagcttgagccaaagcacagaacagtgggctgaaagcaccctagggagggagaattcaaggaagggggcttgggtggccaggctgagccagcgtgagcatgtgaggaggctggtgagctgattgggtgggatgtgtctacttctccagagaagggtgcatgggtctagagcaggtgcctcatgctgtacctcatagagaactggggggaggggggaaatgggcatttccctccacagcccccaaagtgcctgaggaaagtgttgataaagaagccaaactctgtaaaatatttgaagagatttattctgagccaaatgtgaggaccacgacccatgacacagccttggaaggtcctgagaacatgtgtccaaggtagttgggtcacagcttgattttatgtattttagggggacagaagttacatacagacaccaatcaataagcataagttgtacactggttcgttccagaaaaggggaaggtgggggcttccaggtcataggtggcttcaaagatattctgattggcaatcagttgaaagagttattatctaaagacctggaataaatggaaaggagtatctgggttaagataagaggttgtggagaccaaggttcttgttatgtagatgaagactcataggtggccacccttagagggaatagatggcaactgtttcctcttcagacctttaaaaggtgctacacacatggccaggcgccttggctcatcctgtaatcccagcactttgggaggctgaggcaggtggatcacttaaggtcaggagttcaagaccagcctggccaacatggtgaaactccatctctactaaaaatacaaaaattagccgggtgtggtggtgcttgcctgtagtttcagctactcgggaggctgagacagtagaatctcctcctgaggcaggacaatggcttgaacctgggaggcagatgttgcagtgagctgagattgtgccattgcactccagcctggatgacagagcaaaacaccatcttaaagagaaaaaaaaaaaaaaaaaaaaaaaaaggtgctagactctcagctcagaaaaagacctggaatggtaagggggttctctacagaatgtggatttccctgagatagctttgcagggccatttcaaaatatgtcaaacaaatacaatttggagtaaaatcatttattttagggcctgctatatgtcatgtgatcctatactagagaagtcaggttggaaactggtatcttattgctacaaagactctgtttggtcagcctcaaggtctcttaacgtgaatgctggtcagctgtgcccgaattccaaaggaagaaataatgaggcgtgtgggacctgcttcccctcatggcctcaactagtctttcaggttcctatggaattcccttggcagagaggacgggtccactcagtgagttgggggcttagaattttatttttggtttacaagagagtgatccgccttttgtgatctggatatggcaagggacatggcagtcagggagcataggtgagggggagcctgggtgagggtgaccagagcttttaaccctgtcctccctgccttccagtgttcatcygcagggagcasgccaacaacatcctggcgagggtcaygasggccaattcctttcttgaagrgatgaagaaaggacacctcrraagagagtgcatggaagagacctgctcatacgaagaggcccgcgaggtctttgaggacagcgacaagacggtaagggctggggatagcctggctgttggtaaggagctcaggccacagcgccctcgctggcccygctgctccgyccatccaggggggcrgcctggaggaaggggcagcgtgcgcgaaggctttcaggggcggggcccagcaaatcgaggcctcggcggagtcctgcccacagggacatcagtgccgcccccgcgctgactccttcccggcgaggactcagcggggagggatgcgcccaagtcccttgagggtcacagggcttctgccagagttaagttctatttaaaaataaaakgttaacctaaaaaccaatagtcatggtctcggccagcgcctcgccgagttgcagtgagctgagatcgtgccctcccacgcccgcagcccgcgtcctgccttggcctccgtagtcgctgagagccacagcctagagcgccagcgcgcaggcgcacaactgacgccaggccacgaacccagtactgckcctgcacagcagaagcactagcactgaggccgggcsgcgaacccggcactgcgcctgcgcagcaaaaggacacgcactgaggccaggccgcgaacccagcacggtgcctgcgcagcaggaagaccggcatccmcaccggacgacgaacccagcatcgcgcctgcgcagtaggaggagagcratgccaccaggccgcgattgcgcagccgcagcagccccgcgcggaagacgctaccytcctctcccccgaagaggcggggcttcgaacgaacctggaaatggccgaggggtctcgacttcctcaccccaggcrtcaggaaaggtgcctgcaggacagggctctgaagtggaagtgggcggtggtgatgccgaactgacaagaatgagctgaagagaagaaagtagccgagaagggggccaagccggagctcagtgagcaacagctaggccagccgcggctggtgccatcagccacaccactaactgtggacccaaatggaaactttgaggccccttacaggtcccccagcgcaggccaccgccgaaggttactggggaagacccctgcagcttccatgtggacattactckcttgcttcatcccggagtgcagtcacctgcagcctgggaccacctgactgatgtcaccctggagatccatgccaaaagagctggggaaagttcaccttctaatgacccctgcggaccagggtgaagttacaagttatggccaggtcaaggaattataagtcaataaataaactgcctcagggagacgtactcagagtccaggaaaatctaggaaacaccaagaagggcgagcgcagcatcagcccctgcaaaattgcactgctgcctcctggctcacatgttgccccatccttactttagcctcaaaggcaaggagacccaatattatttgagtacttggatttgatcctgagtgactttctgagaaagcagtgtatcatctgccctaagatcaccacatatatgacaaggtttttggatgagttgagatttctagacattgaaaccctcatgatgaacgtcatcccgggtagcaggggctaagcctttcatcacctgctacaacaagctggacattaacttgtatttgagaattgctccaggactctaccttcagatgctggttagtagcattgactggatttatgaaattggatgccagttaaggaataagagaatgtatttgatttgccaccctatatggtctgtgcagactgtcatgatctcattgaaatccaagaaaagattatgtcagggatgaagcacatcacaggtggttacaaggtcacccaccatccagatggctcagaaagccaaacctatgggttgacttctcctcacccttctggagaatcagtgtggtagaagagcttgaaaaagtgctgggtgtgacgctgccagaaactaacctctttggaactgaagaaactcaaaaaattattggtgatatctatgtaacaaaagcttttgaaagtcttctacctcagaacatattcaggcgccttgataaacttgtcaaggagttcctgaaagtgacttacatcagtcccacatttatctgttatcacctgcagataatgagctctttgaccaaatgatctctctaagagggtctcactgagcactttgagctatttgtcatgaagatagctgaatgtttccatgcagcaacagcagcagctgttgacaaacaagacaaggccagcaaagatgatgaggccacattcatagatgaaagcttccatgcaaccctggaatatgggcttccgcccacagctggttggagcgtgacaatcaaatgtgttaccatgtttctcacagactcccacaacatcaaggaaatatttctgactcctggcatgaaacttgaagaaagagaatgtagcagccactaatacaatggaaagcgcaacattgacacgtctatctagaaaattttaattgtctaagttgtgtgactcagatatctttgcatttctgcaaaagatcaaggtctactctaattcttaattaaattaagaattcctttttattacttgttagcaaataaatggcttgtctctaacagaaaaaatttagaattttcggaaatattttcaaatacttcttatatatacatatatttttttccactggtagaatttttctttagtaaaagtaaataatgctgatccaagtttatgtttcactcagcatcgtttctcaaacactcttctttacttatatatagctaccctatagctaagctatattttattgtatgatgcatttactcttttcagagtttggccatataagttatttctaaatattgctattaggaaaacacatatgcatgcatttcttctagattatcatctaagagtggcttctccagagagagacgactgaattaaaggttatcaacaagttccaattccagataagatgaagaaatcacattccacactgcctctcccactgagtgtagctccaaaacatggatagaatgcatgtagcagctatttgasgaccctaaaaagtaaatcgcagtgtattgcagaataagactacaattagatgtatgatatgatacaactggctgtgagtttatcattttttcctccagtcttccagacatcacttgacctgaatctaatggacatttataggattctcaacaatagcaaagtacactttccttccacatatggaaaattcctcaaggtagactatatcctgtgtcttaaagcatacctcaataaaaagattgaactcacataaagtatgttttctgaccataatggaattaaagtaaaaattactaacagaaaaataactggaaacttccctaagtactcggaaattaagtcacacatgtataaataatctgtgagtcaaagagaaaattttaaggggagtaagaaagtattttgagctgaacaaaaatgaatatgtaacataaaatctgtgggatgcagctaaaaaagcagtgtttcaagggaaatttatagcattaaatgctcacatgggaaaagaaagrcggtctcaaattgtttatgtaagcttccactttaataaactagaaaaaaagaaaaaaataaaccaaaaggaaattgaaaaagcagaaatcaaagaaatttaaaacaaaaataatagacaaaattaataagctgatgaaactcaaacaagactgacaggaataaaaacaaacaaacaaaaacaagaaaaaggacctatgttggaaatggaagagaggggacatcactacagaaactgtagatgttaaatgtataataagaaaatactttgaacaactctgcatatataaatttgcatgagatttgaacttggatgaaatgagcctattcttcaataccacaagccaccaaaacatacacaagrtgaaagagatacctgccaattcaattcttaatttaaaaccttctgaaaaagtaatgttcaggtacagatggtttcactggtagaattttaccaaacatttcaaaaagaacaccaattctatacaactcttccagaacatagaagagggaacacttcttagtttgtcttaggccagcattaccctgatgtcaaaaccagacaaatactgaaaacaaaaaccaccctacgtaacaatatctctcatgaatctagacataaaaatcctcaacaaaatattagcaaacggtgcagcaatatatttttaaaagagtaataatacaccatgaccaagtgagtttttctggggcacacatgactggctcaatatttaaaaataattatgtaatccaccatataaacaaaagagaacatccacataatcatgtcaattgatgcaacaaacaaatctggcaaaatttaacatccatttatgattttataaaaaacctatcagcagaatatgaataggagggaattttatgaacataataaagttcatctacaaagagtctacagttgatattatacttaaaggtgaaaactgaaggttttctccctgagactggaacaacacaagaatgtccattcccaacactcctaattcaacattatactggaagtcctagctctaaggaaggccttcagtaagtcaagaaaaagaaataaagttatcactatttgaagatgacatgatcatgcatatagaaaatcctaaagaatgtgaaggggaaaaaagcttgttttagtcccttctcacgctgctgtgaagaactacccgagactgggtaatttataaaggaaaaaaggtttaattgactcagttctacatgtctaaggagacctcagtaaacttacaatcatggcagaaaaggaagcaaacgtgctcttcttcacatggctgtaggagggagaagaatgagagccgagcaaaaggggaatcctcttaaaaaaaatcagatctcatgagaacatactcccacgagaacagcatggaggaaccaccctcacgattcagttacctcccacttggtccctctcactacacatggggattatgggaactacaattcaagatgagatttgggtggggacaragccaaaccatatcaatgctcctaaaatttgcaaatgagtgtaacaaggtcacagaatacaaggtcagcacatgtgttaatcacatttttatgtaatagcaatgcacagttatttgtaagccaaaaatttttaaatgccatttacaattgcttcaaagaaaattatatacttatatgtaaagctaataaaacatatacaggatctttatcccaaaatctacaaaattccaatgaaagtatttaaacagacctaaataaatagagacacatacagtgttcatggattgaaagactcaacatattaagatatcaattttcggccgggcgcggtggctcatgcctgtaatcccagcactttgggagaccgaggtgggtggatcacctaaggtcgggagttcgagaccagcctggccaacatggtgaaaccccgtctctactaaaaaaatacaaaaattagctgggcgtggtggtgtgcgcctgtaatcccagctactcgggaggctgaggcaggagaatcacttgaacctgggaggtgaaggttgcagtgagccaagatcaagccattgcactccagcctgggcaacaagagcgaaactctgtctccaaaaaaaaaaaaacaaaagaaaagaaagaattgtctttttcaacaaattatattagtctcagtctgtttgtgcttctataacaaaatagatcagactgggtaaattataaacagaataaggttattgctcacagttatggaggctgggaagtcctccaagatcaagaaaccagcagatatggggcctgatgagggcctggtctctgcttccaagacggtgcctcatggctgtatcctcacctgacagaaggcagaagcacagaagggacaaacactgtgtgaagcctcttttataaggacattaatcctattcacaagggcagagccttcatggcctaatcacctcctaaagatctcacccttaatactattacattgtcgattaaattttaacatatgtatggggggcatgttgagaccatagcagtgttggaacaattatatatttatatgcaaaaaaatgaacctgacctaaacttcacaattatacaaaaattaacacaatatagataatagatccaaacataaaatacaaaactataaaacttttaggagaaaatacaacaaaatttatgacatggagctaggcaaaaattcttagacattgacaccaaaagaatgattaataaaagaaaaaagtcataaattggactttatcaaaattaaaaccttttgcacttcagaaataaacactgttaagaggatgaaaayacaagctacaaactaagagaaaatatttgcaaatcacatatccaacaaaggaatcatattcggaatatataaagaaatcttaacagatcagaagaagaaaataaacacycagttaaacaaaagaccttaacagccaactcgccaaagaggatatatggatagaaaataaacatgtgagaagatactcaacattattagctcttacagaaatgcagataaaaaccacaataagaacgactatatactcatagagtaaaaaacactgacacagaacagcgctggttaagacacggagaaagcagaactttgatacactgctcgtgggaatgcaaaatggcacggccactttgaaaaggaatttgacagtttcttataaagttatataaggttaccacaggactcggcaatcccatttctgggcatttaccctagagaaatgaaaacttatttccacataaaatcctgtacataaatgtctatagcaactctagtctttttttttttttttaatttttattttttgagacagagtcttcccgttgcccaggctggggtgcaatggcacaatctcggctcactacaacctcctcctctcaggttcaagtgattctcctgcctcagcctcccaagtagctgggattacaggtgtgtgccaccatggcaggctaattcttgtacttttagtagagatggggtttcaccatgttggccaggctggtctcgaactcctgacctcaagtgatccacccgcctcagcctcccaaagtgctgggattataggcgtgaggcaccacgcctggccagcaactctattcttaattgccaaaagctggaagtaagataaatgtcttttgctgggtgtacccatacaatataacagttgtcagcaacaacaagtaagaaagtattgatacaacttgcatgaatttcaaaggctttgtattgaatgaaaagctagtttcacaaggtcctataataaacactttcatttacatgacatgctcaataggttgttatcattgtgataaagaatagattagtggtgggacagggtttgccaagggttggcaggtgggggagatggcatggggtatttgggggggaaggatggacctgtactgcatcctgatgatgctggtggctacagaagtctctccatgtgttgaaattcatagaagtgtacaccaaaacattggttttgctgtgtgagaattttaaaagtaaaaaagtaagaagatagtgtatttgcttcctagggcaaccataacaaagcactacaaacgccttaaaataacagggatttattgtcgcagctttggagacaagtctgaaattagggtgtcagcagtgttggttccttctggaggctctgggagagtctctgtcccaggctctctgctcgcttccaggagcacccggcaatcatgggcatccttgggctgcggacgcgtcgctcctgtctctgctttcatcttcgcatggccttctctctctgtgcctctgtgtgactttttctgtctcttataaggactttctcctttatttagggcccacactgacccagcatgatctcwtctacagccttggcttagttaacatctgcaaagacccgatttccaattaaggttctattctgaggctgcaggtggacctgaattagcagggagggcactattcaaccaactgtagagagttaaaaaacaataagcctgtggacattttttagcgtaatctaggctcttgatgacctgttttaaactaatcagcaatgaatatttttcagctaacgtaatsactattgacaagcacgtgacccttgtctgaatgttaactcaggcatagcaactaaaaaccatccattgaccagctcgggagtagcaaacagagcaagccattcttggtgcaacctgtttctaggtaattaacttgaaaatattttcaatattcaacaaagatggttcatttaagatgactgaagccacatcttcacagatgcagaagatctgaatagctttcctctttagattgaatagttctagaacaattcattcctaaaagtgacttccattggggaaaatatcctattcagcttgagtcacttaattatggttgttattggtataaaatgtctctgttttccctaatatatttttaaatytcttttttccttttagaatgaattctggaataaatacaaaggtcagtattttttctgttttaaccttcagtgagaggggttcatcaggatatttgaattttgaaaatagttcctgaatttcctttctgcttttgttctmattttactcatttaagactttttccctcagggtgtttccataatagttattgtaaaagagtttttagagtaattttatactaatcctagttttgttattgagttagagatatatatttaaatcagttcattctcatttgaggataccaaattccatgataacttttcttaaataaaagtgtattcggtaaaagcaaaaaacagagtctgaaagattagattcccgactaaggtaaccaccttgatttaatgcttaatagcatctgaagtggcctcagtcatgactacctggtaacagtattcacatttctcaaaatgacaactgggcctatctctaaatgagattgtgtaaatcctccaagaaatgggaagccccgtgttagtgtttgccttctccttttgccccaggatgatttggaaagaggaaccctaacctcctctcccgtcaaggcccagcccagaaatgagcatcaggctctcacctttcctccatccttccagttggtccctgtggtcacctctgactgtaaacacactgcaaaacaccggcaaaaatcaaaaagctgggccggtgatccacctagataaaggcatcacgtacacatggccacaaaagggggtggatcaaataaagtccaaagagggggagttgtttacagagaaaccggaagactcttccagttatctgaacggcagggccaaggttagcacagcaaaactgtttccatgatgccggaaacagcttgcagactccagtttcgaaatcctctctttgcagatggcgaccagtgtgagaccagtccttgccagaaccagggcaaatgtaaagacggcctcggggmatacacctgcacctgtttagaaggattcgaagrcaaaaactrtgaattatgtaggttcctctgcttggtataccttcagatcagatgcccctgaagagtggcaggtgggcggggraagaagtgaaaacgcctaatgaaacaatcttaagtcatttctgatttacaaagtctgggctctattatacctattatactgtgccactatagcaatagaaaaaaaagccccaatatgtcccccaaacgattcggtttgggggcatgatgagagagacacagtcacttctctgctcctccgagagagactgtagaacattgatgaagcgtgtgatccattcatgtgtaaacaggagtggactctctgttttccttggggccaagtgcattgccctgttattcctgctccttgtgaccctgtgcagtgattctaaatcacctcttatttatgtgtatggatgcaggtgtcaatatttgtgaatatttgtgattggccaattataaaaatttgatacatttaattagttctacgtggaaaaatcactaagtgctttctctaatgtggtgattaagttttaaataaaaagttaggctactgttagatcaatttccctaaggaaaaagatttgcatttcttttaaagtacttaattgatcatctttttttttttttttttttgagatggagtctcgctctgtggcccaggctagagtgcagtggcacgatctcagctcaccgcaagctccgcctgccaggttcacgccattctcctgcctcagcctcccaagtagctgggactataggccccggccaccagtcccggctaattttttttttttttaattttttagtggagacggggtttcaccgtgttagccaggatggtctcgatctcctgacctggtgatccgcccgcttcgacctcccaaagtgctgggattacaggcgtgaggcacagcgccggcctaattgatcatctttagactgtgttcttagattggattacttttgagttttccctgatgagaatatcaattacgcatcattccattccaagtccgcagtcgcctccctggaacaccatttggtaacttatgaggcataaccctgttcaggctcccagggctattatgcacattttctaaaatttcaggcatgttgatctttgcactgtgattactttttcatcaaaagccacacagagggatgtggagtgaccgtaatgtgagtgctgctggggcagggggtaccggccatcccggaggtgtgaggggcaggtacctggagcctggcttctggctacaccgggcactgcaccatgagctccccgtgacccgtgaggttgcccttcaaggcaagtgtacctgtcgcctggctctggccctttgctcaacccaatggccgctttgtggctgacaggcaagtggatgtagctggcacccttgggccagcccagcctccatttctccagctgtccccagagccracgtgcctctcctttgcagtcacacggaagctctgcagcctggacaayggggactgtgaccagttctgccacraggaacagaactctgtggtgtrctcctrcgcccgcrggtacaccctggctgacaacggcaaggcctgcattcccacaggtaggaggcacgttgggccacagccacccgctgccgctgggccgggccagggaggacaagcccgtgccagggggtggggacacaggcatgttctgggcgggcctggcaggtaacagtgacaccaagaggacaggactgagccctgggctccgggcccaggtggttcaaacatgaagaccatgaggtttggaaacagacccattatttctgtaagccagatctgctgtttaacctcagcttccccatctgacaratgggaccaacactattgcctgactgcttgggtgatccctggagcactttgcaygatgcctggcccaccgcaggccctcagtctgcattgggactgtggggggatccagtgcaagggctcaaagcaccagggcaggcaaagggcagagctggcccgaggaactggagctaaggtgcggrgctgggataggagtcaggggacgctcaggctctgagctccttttaccaggaccagtgttcattgaacrtagtttttcttttccttgatgaatgtggacaacaggcggccagagggcagtgagcacaggacaggcaggggactgggcagggtggggacgagcctccctgtcctgaccccgtgggcattgcctacgctgggcttgcctggctgccggcacttccacacggccagcacacatgaggccctcgaaggcggggcctaggcgtcacagctgcaccttgcacagcaaccccactcccactcatagctggcccgacccgcagcgttggcctcacccgggggcatattcgaagggcagagttccaggcccgccttttcaagagcctggtgacccagctcaccttccggcttcaggtgcggctcagcccccagaccgtgttctgcccccggctaccatgactgtcccctccagacacaggttactcccgagtgttctgtcactcttcctttcatatccttcttaccgaaaacaatttacttccaaagatgagtgatcacgaaaagaccgggttccatatgcatccttcaagcgctgcttcaattatgtgcctgaaacatctcagcaagtgaaagacactgtggctgaccttgctactggcaatgacattcaagcttaagctggttaaaaaatattttaactgaagtcatttcttgacatacacacgaatattttttaattctagaaacaatcacaaatccatttaaaaccaagtgtgggccgggtgcagtagctcatgcctgtaatcccagcattttgggaggccaaggcgggcggatcatgaggtcaggagatcgagaccatcctggcyaacacagtgaaaccccgtctctagtaaaaataccaaaaaaaaaaaaattagctgggcgtggtggtgcacgcctgtagtcccagctgctcaggaggctgaggcaagagaatggcgtgaacctggaaggcggagcttgcactgagcactgagccgagattgcgccactgcgctccagcctgggcaacagaatgagactctgtctcaaaaaaaaaaaaaaaaaaaaaatcaaaaggcaaatgtgatgtgtgaaaataaaattacataatctactttgtagtgcaaaaagttcaggctgggcaaggtggctcacgcctgtaatcccagcactttgggaagccaaggtgggtggatcacctgaggtcaggagttcaagaccagcctggccaacatggtgaaaccctgtctctataaaaaaaaaatacaaaaacttagctgggcgtggtggcgcacgcctgtaatcccagctactcgggaggctgaggcaggagaatcgcctgaacccaggaggtggaggttgcaatgagccaagatcatgccattgcactccagcctgggagacaagagagaaactccatctcaaaaaaaaaaaaaagttcagttccaaataatggatgaactcagaacttggaagggtggtgactgcacacatggacagagctgaggcacggcggggtggargcccctgcggctggcagattcaccggagcctcctcagactgcgcaggagcacagcaagtaaacagctaagctgtgcccatctgaccccagacacgtgtggccacagagaagccccttgccatccattcccccctcctctcctctcctgctcccccacacccctgccttcctccaacatgtttcagccattctcttggccttggtgccctaattggccgttatacaaaaggaagcttcctaacatctcggcgtggcctctctgggagctgtgctattccagacgctctcctgtgcctccagttgtttgcgtgcgccattccttctgcctgaaaacttttttttcttcaatgtttcattaggaaaagttttccaacacacagcacactggaaagaattttgcagggagtcgcacacgcccagcacttgggttctcctgttggcatcctccggccagrtgcattcatcccatttcgcccggcccgtttgtctctgtccatccgtcaagctttcttgacttcttggtgcattttcaggcaaaccgcagacgccaacrctcccctcgctgcctgggttgctgcctggcgtccattgttcacaggcggtcacctgaggggaggccaacgctcggacagctgcgctcacctgcagatccgacccctgccgacgacgtggggcctcgccctgcaagcccgctgcccctccgggtgcccctgcgctctgcctcccggctctctgactcttctccctcagggtgagctgtgyaggctatggggagcctctctctgtgctgaaggccccggccgtcctctttctttcagggccctacccctgtgggaaacagaccctggaacgcaggaagaggtcagtggcccaggccaccagcagcagcrgggaggcccctgacagcatcacatggaagccatatgatgcagccgacctggaccccaccgagaaccccttcgacctgcttgacttcaaccagacgcagcctgagaggggcgacaacaacctcaccaggatcgtgggaggccaggaatgcaaggacrrggagtgtccctggcaggtaacagtaggatgtyccctcgggcctgctggagagaccacctgtcccgctgtgcacctcggggaggccagcctgacacttggaatagcaatccgggaaggaactgttccgaactaggacagaggggctccgccacccaagcctgcctgcctgtcccctccctccgggcagccaaggaggctgtgagctccacagggaagtggccggggctgagggagaggctgggcccaggcaacgcccccytcagccccttcccactgggcatttccatggctgcccgtggcatgcccaggacgatgctgtcctgtgaaacagaagagagggagaaggcgcagccacacgctcaagtgtcctcaaacctcccctacaccaggagacaaggctaaagccagrgagccacccacactgcaggggcatcagcgggcaggaggacggtgccgggtgggcaaggcctccatctgctcttctgtttgacgggaggcagaaagagttggtgtcctcgcttcatttctaattttggaatttttttacccaaacacctaaatcctatggaggtagatagtaccttagagaaaaacacatctacttattttcaaaggtaaaaaagaaaatcactctttgaggcttttttgttaagagacagtaccttgctctgttgcccaggctggagtgcagtgtcgcgatctcggctcactgcaacctccacctcctgggttcaagcgattctcatgcctcagactcccaagtagctggaattacgggcgcccgctacttacgcctggctaatttttttttttttttgagacggagtctcactctgtcgcccaggctggagtgcagtggcgcgatctcggctcactgcaacctccacctcccaggttcatgtcattctcctgcttcagcctcccgagtagctgggactacaggcgcctgccaccacgcccagctaattttttttgtatttttagtagagacrgggtttcaccgtgttagccaggatggtctccatctcctgacctggtgatctgcccacctcagcctcccaaagtgctgggattacaggcgtgagmcaatgtgcccggccatgcctggctaatttttttatttttaatagagacaggaatttcaccatgttggccaggctggtctcaaactccaggcctcatgtgatccaccctcctcagccacccaaagtgctggagttacaggtgtgagccactataccaggtcctaatctttgattgttgatttggactaatgctgccagattaaacaaataaaagcacaatactttcaattaaatttcaatttcacataaactagaaatacattaaacaaaagcacaatactttcaattaaatttcaatttcacataaactagaaatactttcagtgtaagtatgttccaagtatcgcatgaagcatacatatgcgaaaaattatttgctgtttatctgattcaagtcaaactaggtgtattagtcagttttcacactgctgacacatacatacccgagactgggtaatttataaagaaaaagaggttgaatgractcacagttccacgtggctggggaggcctcaccgtcacggtggaaggcgcaaggcacgtcttacatggcggcagcaagacagagaatgagagaacaagcaaaaggggtttccccttagaaaaccatcagctcttgtgagacttattcacttccaccagaacagcatggggaaaccgccctcacgattcagttacctcccaccaggtccctcccacaacacacgggaaatatgggagctacagtttgagatgagatttgggtggggacacagccaaaccttgttgctgggcatcctgtattttctctggcaatcctcacttggacttgaattttcagcgcccaaaaccagaatgtcctctcctacaagcaagaatctcagagctgccagcgcccccatgaattcccccaggtcttcccccaccccagaccgtgtggcgggtgagcctctgtctaactataaagagccaagcgagagagggatgcactgaggtggctctgcaatgcatgtttgttgagggccttctgtgtgtcaggcactgagccgggtgctgtgtaggtgggatatgaaaccatgaagcctctctgtgaccaatacacagaaatctcaacctagttagggagctgagaccgaaatcctcccagtcccaggcactgtgtggytggggcaagaacctcgatgcaggagaccccaccgaggatgagcaggaaaagcctcttgtggggctgaggagctggacttggagctgcaggcggggttttggaggggktcctgggctgggggaccagggtggggcgccctrgagggctcactggaggggccctcgcccagcctgttgaggtttgcgattcttgtttcctggttcgagtcttggcaagtgggcctcatctgcatctttaggaagaatggttggtgttcgtgtcttagaaagcctgactttccctcatgtaagctggatgatgagttgacaaattatgcaaaaaagaggcaaaaacatgaccccttttctagccatgaatgttttaagaaatgttttaagactcggtattgtcagtagtttcattggtctgtacatgtgcccagccactatcacaggacgggaaactccccagagaaaagaaaaccaaaatatgcccgggctccaaacttgcaagtccagctccctagggacagcatgtggcacccctgtcagtgcttgctcccctgggaccgtgttccaagtcctggcrggtaggagacccttcacaggagctgccacagggacccccaggaagtcacctgggatggaggtgtccgtgcaccatgggggacaggctcacactgctgaaccgtcgggacaccaggcaggcacaccggttgaggcagatgatgtttctgcacagactggcgtctcctggtcccaggtagaaatcctgccacagagacgggaaaggctgctcccacagggagcatcttttccaaagcatggacagatgtgtcgtgtgcatgagactttagagagctctgtgatggagttggtagaaagaagagatgactccctatatcagtgagtgtgtggcacaggcagagaaaagagacagacaaggaactgtccttgggtggatggcaggagaccgaagaggacagcttggcatggggagggccrggcagtgccacctgaagagctggcttctcagtcaggcaacacctgtccacctggccagccacactgagcctgtcacgtctgtcacaggccctgctcatcaatgaggaaaacgagggtttctgtggtggaacyattctgagcgagttctacatcctaacggcagcccactgtctctaccaagccaagagattyaagrtgagggtasgtaagtgaccaacagcccccagggccgtggtgrggggcaccgtcactgtctgcttttcagaaaccactaaagctgatggaatttgttggsaacactggttgaaatcctgaaatcctatttgtaggggttaggggcatttcacagaggaagaagatgaggaagcagaggaaggggaagagtggggaggaggacggggaggggaggcgaaccagcccagcccttctcccactgrgtgtccaggtctcgggtctccgagtctctgggtcccgggtctctgggtctgcatgtccagctaatgttctgtgtctcagtgtcttttattgggagccttccagacctccctttctctttaacatactctgaacaccaagcacctctgtctcttctatttttatttgtgggattgtttcattaacatctgtctttgtccactagaccctagagctgctcagtacaaacccaacacaagctacaaatgcaagcaatatatgtaaactgatatttttctaacattaaatgttctattatacattttaaaatataaaaaaacaggctgggtgtggtggctcatgcctgtaatcccagcactttgggaggctgaggcgggcagatcacctgaggtcaggagtttgagatcagcctggccagcatggcgaaaccccatctctactaaaaaatacaaaaattagccgggcatggtggcacgggcctgtaatcccagctacttgggaagctgaggcaggagaaccacttgaacccgggaggtggaggttgcagtgagctgagattgtgccattgcactccagcccgggcaacagagcaaaactctgtctcaaaaaaaaaaaaaawatatatatatatatatatgtatatatatatgtgtatatatatatacatatatatacacacacacacacacaatttccataatatatcttatttaactcaacatattgaaaatattactttttccatgtgtaatcatgttaaaggtgtaataacacattccgcacattttctttcatgctaagtctctattttacgttcatggcacaactattttacactctcagccagcggccacaccgcacaacctgggtctgggatgccaaaagccttcggtcctgggacgcctcgttggtgcccacgactggcacagacgatgcacccgccaaaggacacaggagtggcggccgtctaaagaaccaaacgtgtgagacaggaccagtggttccctgggcagcaaggctgacaggcacttttatttgctgctttgcacttccctctatttttcaaattttcaaaagtgatcacgtgccatttttaatttaaaaaaatatatataacttccttaaaaagcaacggatgtgcgagagcatgtccctggctgagctgagcacagtcccactcgtctgtcccaggggaccggaacacggagcaggaggagggcggtgaggcggtgcacraggtggaggtggtcatcaagcacaaccggttcacaaaggagacctatgacttcracatcgccgtgctcyggctcaagacccccatcaccttccgcatgaacrtggcgcctgcctgcctcyccgagygtgactgggccragtccacgctgatgacgcagaagayggggattgtgagcrgcttcgggygcacccacgagaagggccggcagyccaccaggctcaagatgctggaggtgycctacgtggaccgcaacagctgcaagctgtccagcagcttcatcatcacccagaacatgttcygtgccrgctacgacaccaagcaggaggatgcctgccagggggacagcrgggrcccgcasgtcacccgcttcaaggayacctacttcgtgacaggcatcgtcagctggggagagggctgtrccsgtaaggggaastacgggatctacaccaaggtcaccgccttcctcaagyggatcgacaggtccatgaaaaccaggggcttgcccaaggccaagagccatgccccggaggtcataacgtcctctccattaaagtgagatcccactcaaggcctggtttgtctctcgattgccgccttgccctggcttctcccgccctgttgaggtgggaaggtgaagtgtctgtctggaacaccagcttccgcccttcccagctaggctggggattcctccagggaatattctagtctgtgggggcaggatggaggctccagggatgatactgtgccatgactgccatgggcattcctttccccagataccttcctgcatctgggtcacgcccagaggcagatgggagcctgtgcaggccccgtggcgtcgggaggggcccacacgttggsgcagcctccccaagaccccccacttggcctggtctctcttgttcctcttgggaattggacacctccccggtgactgcctatgacccgcagactccctgggagggaaacgtccagaaagcttctcattggggcggacattttacattaacttaaacaaccaggtgctcttcaactgcacggtgccaggccccaccccagctcaggcttgtgtggtgggggccacaggcatcccccgggcaggtgacctgctcaccaggcagcgacctgacctggcacagttggcccccaccgtggccacccttagaaccccctgtgggctttagcatgcctgcatccaggccacagcctggccactgaaatcagtctctggagtgaagctggccaggagcttctggaagcttctggagctcctcaggtgctgagtggtggtggcgtggcaggcggggcttcggggggctcctcctctcctagggtccagatgtttagtccttgccctgctgcaatccggcactgtccctaggcctcaagttaactggccatgaaaatcaaatgaactttcggtaaacagaaaagattccggacaaggcctgccgtgtgtctcccaaacgtctcctgcagtttgcgtcttgtgtaatgtccctaagcaaagttcaacagttctagtacaaaaactccccaaaaaagtcatgagctgggcaaaaccgttcgtaaacagatgttgcgaagtcagggaaaatcaaagtggacaggtgttcgacctcccagaaacggtctgaggaggggccggtctcccagggtgggcgggagggcattcctggcctgcccgctctgaggccttctccgtggagctggctgtcgggctcctcgccggcccttcctggagaaaaggcttctgcctcggagctagcctgctgttgggctgcgtttcctaggcagccacgtggtccccagggccccagaggtaaaccctggacttggattcccgtttctggaaatcaaaggttgagtggggtccagagagaactctgggaaaataattacaattgaaaccccccatcgccatcactgtctgcaccctggttcctgccgcactgggtgtctggtgcccgtgcccgtctcaggatagaaaggaaactggaggctgcagagagaaggacctgatgggtcgtagctcagcatctgccgaagccccatctagaaataggttctcgtcctgggaggtgtgggagggagcctcgggagggagacagcaggaggagaggccccagtcctggacacgcgctgggggttgaagtctcggctctgcaggctcctgtgctgcgtggcagggattttctctctgcctaaatatcgtcttcataagtaaaggcaagtgggctaaacctatgtcatctccgtgttaactcagaatagtctaggcctgggccaggggacactttgtgatctgagacccccagaattccctgagggaggcccagctctgtttcgggaaataactgaagcggctgtttgtgcgaggtgagaccctgaggaccgagagcagcaggaggtcatggtggggagcaaaaacgggaaaagtgattccgcctgagactgagggagagagaacccaggtgagaccctgaggactgtgagcagcaggaggtcacggtggggagtaaagatgggaaaagtgattccgcctgagagtgagggagagagaacagaggtgagaccctgaggaccgagagcagcaggaggtcacggtggggagtaaagatgggaaaagtgattccgcctgagagtgagggagagagaacagaggtgagaccctgaggaccgagagcagcaggaggtcacggtggggagtaaagatgggaaaagtgattccgcctgagagtgagggagagagaacagaggtgagaccctgaggaccgagagcagcaggaggtcacggtggggagcgaaggtgggagaagtgattccgcctgagagtgagggagagagaacctgcagcagccccatcgcctcccccagtgacacctcccctccccctgagcaggaaggggagctttggggcgtccacctctggaggacgaaggtgagagcgggtgtcgggggcctggtggggcagggaggcccttgtgggtgctgggagaccagcctgtgtgggtccagagctgcgcttggatggggagatgggcctgccgtctgggaacacgcagcccaggctgtgaggaagaggaagcaggaatgagagcttcagccaggacagctggtggacggcagacctcggccccaccatcactgtcatggagccatctcagcagggctgggggttaagctcccgtttagaaggaccccactccacagccacggggtagccactgatgtgggcaagcgcccgccatgaagaccccaccttggtggaagggcactgagaaactggacaccctcgagactcagaggatcacctcagaactggcctgttaactatgccaggaaagcatgcctttagcgtggcaaaacctggggacccagcctcctcctgagccgaaggcagggggctgccaaaacactgtctaagcagagcccgatcctgagtcaggcaagtccagatggaggaaaccatagactcttaaaaaacgtcagcgtcagcaaagaccagaaacagccagtgactctgcagtcagtgagaccagaggagtctgcaggctgccaggagagcgagggagactgctgggggttcccgtcagacagcgctcagcgggggcgaggggagagggagagaggcagagccagagagacaaaaagaaagagagacagagacagagagaaagagagagacagagacagagagaaagagagagacagagacagagagaaagagagagacagagacagagagaaagagagagacagagacaaagagaaagagagagacagagaaagagaaacagaggggagggagtaagtccaggtaaaaaacaaacaaaaaaattgagaatagaacaagagagaaacagagacatggagacacagagaaagacacagtgagacacaggagacagagacagagagagatgctgagagacagacagggagagggagagagagaggagacaccaagacacaaagagggcggagagacagacacagaaagagggagacagcggggctggatggacgtgtggccgggccagtggggaggagagacgagtccgcagacagcgttcagaggccgcgctgcctgggtgctgagccgtcccggggttcacggtcgcagtttgtccttacaaaacgcccagccgccccgacctgtggtgcttagggaggacctacctggctgtgccggtctgagaaggggccagtgaggcccggtgcgggtacgggcgggtgcagatgcagccaggaggacgggcgggagcgggggcctgtcccacacgggggcctcggcagcaccggcatggctggaggccagtacggccaggtgtggcgggagggagcgccgtctggcttgggtcgtccatcctgacaggacgctgcaagggcaggagccccgcgccccgtgtcctgcgcccccgctcgaggacaagccccagccgccggtctccgctgggttccgacaggccttgctgggaggccttgctgggagctgggggtcgaggctcacagactgcgctgaccccagcaggcacagctgggtccagggactcgggaactcgcagcctgacgcgggccggacccccggggtgggtgctgagggcctcggatgccctccctggctggacgttgtggctgtgctgatactgagcggtaaccctaggaaggagagtcccctgggctcagctacccgggacaaggtcaacagggacaccggccccagttccaggagaaaaacaagcacggccagcggcgagtgtgggcgacagcagctcagggagaagcagattatcaacagcgaattcactcagggtcagccaactgtacgcttaaaaaaagattcctgcggtaaactgtatgtctattttaccacaataaaaaacttattgtttttaattaccaatgacttctaaaaaatgtttttaaaacccagatcacaaatcctgaacatagggcctgaaaggcgaattcagccaccacggaggactcccgcacggtggagccgggacgcagggactccatgctgcgcggagggcaggggcacgtgacgcagggcgtgggggaggcggggcgtggaggaggcggggcgcggggggcggggcgtgggggaggcggggcgtgggggcggggcgtggggggcggggcgtgggggagggcaggggcacgtgacgcagggcgtgggggaggcggggcgcgggggaggcggggcgcgggggaggaggggcgtgggggggcgggccgtgggggaggaggggcgtgggggggcgggccgtgggggaggaggggcgtggggggcggggcgtcggggagggcaggggcacgtgacgcagggcgcgggggaggcggggcgcgggggaggcggggcgcgggggaggcggggcgcgggggaggcggggcgcgggggaggcggggcgcgggggaggcggggcgcgggggaggaggaggaagggttctgagtggacgcggggactccatgccacgcggagggcagccgctcatgaggcggggtgtgggggaggaggaggaagggttctggagtggcttttctactccagaagtctccccgatcctgaaagaaaatctagacaggtggaaaaaagagaaacatgtccagatagtgtcttccacattaatggtctcccaagctctgaggaagcccaatgagttgaacagtttctcataagcttgcgggtccctgtcagtgcttctgagatgctaaaaacgccaggctgtgggctgcgtcaccatgtgtctcctctttaatttcttcaggagctccaggtgataagctgccacctccatccacaatgtggacatcagaggatgcagcatgctgtggtttgaatgtgtccctatagtgcacgtgttggaaacttaatcccaaggcaacagtgttgagaggtgggacctttaagacgcattcattgtcagagcccacgtgaatgaattgataccactattgtaggagtgggttcgttattttggaataaaaggatgagtttggcccccttcctctctcccctttctctctctctctctctctctctctctctcacgcgcatccaccttccaccatgggatgacgcagcaagaaggccctcgccagatgggggcccctggacctttgatgtcccagcctccagaactgtaagaaataaatttctgttctttataaattacccagtctcagatatcctgttacagcaccacaaagtggactagaccacactctactctgtgaatctaagacgcaccattattgatgaacctgaaagaaagagcatatacccaaattagctgtgggtcagctcagcctggaggcaagagggggaagctcagataatctaaaccacaggccagccaggaaccagctttgcaatacatttacactattcacatgggctcccaaaactcacacaaaaaaatgtatttaaagggattgcaaagtggcagtgcccccagggggcaacataaagcacaacccctttcaggaagaactcggccttgtccaggctgacattagaacattggctgtagggaacaggccaattcagagatgttgaaatctaaaacataggtcccagagttgattgaacaggtatttaaatagggactgcggcaagatctaagtattcaatgaccaggttctccataggctgctcatttcaggttccacacaaagttgtggggtcagttgatttaagctggggacccccacagaggacaccccaacatctgaaggacacgacaaagaccccaaaggaaggaagattctcctcaggtatacagaaggaaagtaaaccagtcaatggaaaaagtgtcccaatgttggttggtttgtttttcagaacagaagagggtgacagaagaacgattattcatatgagagatgaggaagatgagc

SEQ ID NO: 8911 - DNA, 54946 bp, Homo sapiens
gttatttttcccttcccttcatacatttatgtccagtacctgtggaccctccttgtgaactcttctctaatttctcacagaccaggaagggtttggaatataactggggctcagctatcaagggcctaagcataataaagtaaatgttcagttttacattttaaactcattttactaagaagaggaattcacatgcctatagatgtaaaggtatgaacaacaggtgactttggtttaccctggaatatctgggaatgctaatagcctcaataacggctcaagagacttgtgaaagatacaatttaggagaatctaatgcatttcttctctcaaggctctcttcttcccccattttcccactggccacccatgcaggtagaagtaatgagtaatgctctcaaacactcttttcatattacaaatgtactcaagaacctgcagggactcctgttgtttgtgagctcaacaatgtgccacatctggccacaagctcttcacctcttctttttcagtccatccacctaagttctagttacacttctcctcagccaaacccagatgctagctctctcacactcaagcttgtgctgccttcaatgtgtgacaacatactaatctggaatggttttctacttccctctgtcaatgcatgtcctctgacctttcctcaaccaaaataaatgaaacccaacaacaccaaacttcactcttcacttaggaaagttcatgactgactaaggtactgtctatagtctcatgcaacttaccttgcatttgccccatcaaaatcctctctgcaccaccattccatccagtggccctgggtggctgatcatcatggaatccattgcacccttgtcctctgctccaggctgggtttggccaatgggaggcactggcaggaggtcagagggtggtcatgtacctgcctctccacgtggggcttctggagcagctgtgcttctccttctgggagcacctcttctcagctggcctgcctcatgcatctgcaatccctcagacacccgtctgtgagaatatcttggattgttttattcacggttgtgctttctcctgttgcagtgaggactgggtatttcatgttctttctgagtccacccagagctaattggaatcaccatggtgtctacgctgtataaatgccaaatgggaaaggggatctattgtcccttgagatttttctagtttggatcaaatcagtttctacaacagagattaatgggggtgaagtaaagtcaggacttactttcctagagactttggacaattttgaggggcaaagcttcctgagtttgtgatttttaatatgtgagttaaaattttaagccattgaaaaacatataagcaaatattctaagaagataatatgtattctaagaagaatgaaccagaattctaagtctctaatgcaacaatagactaaatatctttacattcccatttacttggaaggactctgttttagttaagactaagctacctgggaaataaaaagaggacattggggctgatattctcacaaatgaaaggaacacaaagaacaaaacgggttctatatccacacatacttccacttctctgagtaagtgacttgatgtcagagaatctcacaccagattataacaataagacttttaaatgttcaggatgtttatgtttaaagcattagactgataagaaatctgatctatttcttgtatgactagatgtagtcactgcagtggaaaccaacatacgaaagagcaggcggcacattttcatcctgacccctcagatcactcacaataaggagtttgcctacgagcaggaggttgccctgcactgtgccctcatccagaacgacgccaaggtgatacttattgagatggaggctctgagcgagctggacatgctgcaggctgaggcgcttcaggactccctccagcatcttatgaaagtacaggggaccatcaagtggagggaggaccacattgccaataaaaggtccctgaattctaaattctggaagcacgtgaggtaccaaatgcctgtgccaagcaaaattcccagaaaggcctctagtttgactcccttggctgcccagaagcaatagtgcctgctgtgatgtgcaaaggcatctgagtttgaagctttcctgacttctcctagctggcttatgcccctgcactgaagtgtgaggagcaggaatattaaagggattcaggcctcaggtttcatctggtaactttccttccatttccctgcttctgggtggatgcaaaatggccagaaatttttctcctcaatcctccaccatcctccagccaccattttcttcccttttcccttttgcttgcctgtcttcactgtggtgtgggatgttttcactactcttttttcctctctctctgtcttgctttgtttctcctcattcttgtcaataatctgaatagcaaactaatcattcgagagtagattttcacgtcacttgaagaacattctgattccctcaggcagaatgtcagttgtaaatcttgttcccaacatgccagattttctttattttctatatatatataatattttatatataatattatatataatattttatatataattttatatataaaatattatatataatattatatataatattttctatataaaatgtgtatataattatatataattatataaaatataatatagaatatctaataatgtataatatataacatataaaataatattatttaatatataatattttatatataatatttttatatataatataatatatattttatatataattattaattatataattaatatataatatatattttatacataattattaattatatataattaatatataatatatcttatacataattatcaattatatataattaatatataatatatattttatacataattattaattatatataattaatatataatatatcttatacataatatatataaatatattatatataatatatattatatataatattatatataatatatattatatatataaaatttatatataatattatatataatattatatattttatatacaatatgatatataatataatttatatattatatatatttatatataattattatataaattatataaatataaattatatatttatatataattattatataaatcattatataattattataattataatatataatataatataatattatatataatatatagtattctatataaataatataacatatattttatatagaatattatatataatataatatatattttatatagaatattatatataatataatatatattttatatagaatattttatatatataatattatatatatgtatttgagacagagtctcctatgaacatacttgtggacttatgattttattttgacacttaagagtggtcatagggtaggtgcatatttaactttcagagaaacttatacattgtttcgcaaactaattgtactactttacattcccaccagttgtgtatgagagctctgctgcttcattgcctcaccaataattggtgttgtcaagtttctttatattttaacaattttcacaggtgttagatgaagatcaccatggtcttaacttgaagttccccgactcatgatgatgagcccttttcatgttttcattggccattcgtatatattttttagtgaaggcaaaatattttgccttatttaaattgtatttctttttatattgttgatgtgtaggaattatttatgtattgtggatgcaagttctttgccagatagatgtaaagtgagaatatttccagggttatctattcatttttaagtgatgtctttgtttagtagacatttttaattttggtgatgtccaattaatcaatgtgtcccaaatggctatttttttttgtgtcctagctaagaatttttttttttgcctgtccaagagcatgatttatttatttattttttgcctgttcaagggtcttctctgtatttttatgaaatatttacggttctagcttttatgtttaggtccatggtctattgtgaattgatacttgtatatagaacaaggcaaggacaaagttcttttttctgctgctgcttcttctgtagaggtacccagctgttccagcaatgtttgtgaaagactgttttttccccactgaattgacatggtgctttgttaaaaaaatcaattgactagatatgtgtggatctattagtctactttctattttgtatgtttgtatgtttctgtgaatatcacattgccataattactattgccttattataaatcctcaagtcagtataagtctctcaactttgttcatctttgtcaagattgcccagacaggccgggcaggtggctcacccctgtaatttcaacactttgggaggctgaaatgggtggatcacctgaggtcgagagttcaaaaccagcctgaccaacacggagaaaccctgtctctactaaaaatacaaaagtagccaggcgtgatagtgcatgcctgtaatcccagctactcgggcggctgaggcaggagaatcgcttgaacccgggaggcggaggttgcagtgagccgagatcgcgtcattgcactcactccagcctgggcaagaagagcaaaactccgtctctgtccggacaatcctagattatttgcattttcatatgaattttagaaacagcttcttaatttctttgaaaaattttcctgggatttggattgaattgtattaaatatatagattctgtaatatatagagtctaaaaatatacagtgtggagaatagatgtcttaagtcttccaatccgtaaacgtggtatatccctttattacttagatgtttcatctctgttagcaatattttgtagttttcacaggagatatctcatatattatccaatgaatttatactttggtattttgatttttaaatgctatggtaaatggcatttttaacaaacttcacttttcaagtttccatctctaatatatagaattgctatttatttttatattccatgatcttgataaacttaatatttccagtagtttttttttttgtagatttcaaaagttggtctacatataattatgctctctgttaaaaccagtagttttaattctttcttctcaatctttatgctttctaattttatttttatttcttcacttgttgcaaagcagttgtcccaggtgggagccaaaatccttatctcattactaatcttaggaaaaagtaaaatgtttcactattatgaggtcacctgtaggtttcttatagatgttctttatcagattaagaaagatcatttctactctcggttttctgatcgttattaattcagaaagggtgttgaattttgccagatgcttttatttgcatttattgagataattacatatttttatttattatgtggtgaattatctaaattgggtaaaaagaattaaaatcattgtccaattgaacattttgcctgtcggctatgggtttcccttttccttttgttaaataacagttctgccacaaaataaaaatctagaaacacacattcccctttggcctccttaaaaaaaattaaaacttcaacaattgcacccctctctattacttccctatagtgaactcccatccttctgggaaagcaaaaagcctggggcgcatttgtgtacttgagacgcggagcccctctcaccttcggcatcccccggggacccctcttccaccctcagccctcccctcctcttcctctgaagagccgggcggccgctgcggccagcggtcctccctcctggcatcctctgctgtgaaccgcggcctgcagggtgcttgcgagcggcccgggcgcgcccccttccggccccgcaggtcacccggctacagcccgggttttcccgggacccgcgccgcgcggctgggcaggaagcgccagacgcctggggcccacgccgtccgcgggaaaagggcaaggcgctgggttttccagcagcaacctttggaccccgcgatccagtagctccggtaactccacgcggggcgtctgggtggaggagccggtcctggagcacggctgcgaggagcacccggaccggagggtccccagaccgggacctccgagtcagggaggattctacgccagggagcgccccagactgagagcgccccagaccgctacactcccggacccggagcttcgcccgaccgcgggcagtgcccacctgcagcctccaccggccggggttagcagccaggagctgccagacgcctgacattcttctttctgttcctactttttttccttcttcttctttttttttttttttgtagccctctctgggtgccttatctctttaatcacacctctctttcactttccacggtagtcaggaggcggagatcgctgcttctcacctactttctgaacttggcctccgcagtcgcgacctggcgtgaaggaggagctgccgcccccgccccagcctcggggacgcctctctgaaggtaagggtgggctccgctgccacccgcatcccctccccaccccccagaggaagggaagaccaccatccggggagggattctcaaaacaagatcaattaagagagagagagagatagtgtgtgtgtgaatacgtgtgaataattgatgagacagcatcctgtctttctctgaaagtatagttttagaaattaagacatccccaattattttctggagaggtgagaacgactgaaataaatgataacaatagttgtcattttttaagtgcttactgtgtgcctgacactgtagaaaatttttagatatcttattttcacttaatcctcctaagggccacatgaaataggaactattattatgctttaataaaagggaggaggaattccgtcatttacccaagagtatccagctactaagtagtagatcccagatccacacctacagtttttctgattccagagcctttgtcttttttctgcccagccttgggaagttaaaatgcccagcaccttgcatcgcagttatcagacaaattaatgaggtgtcaattgcagccagatacagagatccaagattattgtattcatttcactgacttcccttgcttcattctcaagaccctttgcaaatactgattttgtgtcatacacagtgctgctattgggagcacacctctcaacctcagggccttggatgggctaggaggggtaaatttggggaattgggtttgtgcaggttctggggacagtgttttccctctccctgcacaaatatacatccaaaggctgagaactaaggctaaggcctaggaatgtggattgaaaaggcagggtctaaatcccagcacttgggaggctgaggtgggcggatcatgaggtcaggagatcgagaccatcctggctaacatggtgaaaccccgtctctactaaaaatacagaaaattagccaggcatggtggcatgcatctgtaatcccagctactcgggaggctgaggcaggagaatcccttgaacctgggaggcagaggttgcagtgagcrgagattgtgccactgcactccagcctgggcgacagagtgagactctatctcaaaaaaaaaaaagaaaaaaaagaaaaggcagggtccctgccttcagggacctcaccagagagtgggagctagtccaggagtgatggaaacacctgcagagtgatggagacgggcttggacataggcatgtgccatttggggctgttgcagttggagagcttccttgagaaggcaaataytgagccaagttgaaaggactctagggacctggcatctgggataagtggggagggtggcccaggtagcacaggcataggcagatttggggggaagcataaggctaacaacagacacttgtgtgacaaggactatgaggtggcattgattttcttggccttacagatgagaagccagattccacacaaattattttgtttgttagagtttaagcgtgtgtgtgtgtgtgtatgttatgccccamgatcattttctcctctttgcatttggttgttttatcatctcacaggctgagtaaaacgactatgcatggaacactgtagaagaaaaattatattaaaaaaaaactggtgttatgattttcatccaggcattttgtctcaggagttgctcgattgtatgtgttgctaatgagtgatttatattgaggcatctacattgattcatgtgtgtccttgtgaatagctgtaatctgaggctggccatttcacttcctcaaatctcaggttcctcattagaaagagctttgaaatggctctttccctgtacattatgtgtttctgtgaattacttttagagaaaggtcagtttctcagggtgggacccataaacaagggcaactgggcagagccagggrttcaggtgactgtttggaccctctggaagggctttttactgtgctgccttgggagacagagtggtcagcttggaactgaccttaagcctaggtcacccaatttttgaaggaaacttttttttttcatttagagaaaacttcatgcctttgggtgattaggtaagtttgtgactattcgttatgtgtgtgtacacacacgtacgtacatatgtacatgcacaaatatttaatatgtcttagacacaccaaatatatgcatttaagatgtattaaatgtactttcctgagaatacaaataagtgccctacgtcggcggctctcttcctgactgtatgttagagtcacctgcggagttctgaggactcaagatgcccagtctgtcctccagaccactgggtggagcccgggcatcattatttttttccaaacttgggtgagagctggtggcctagacttcacattagttgctaaaacatactttccaagatatcatgcgttaaaaagcatttcaaaagtagattgtgcagatgtgccaatggatcagatgatcacctagattcaaaattatgtakattttatggatgtaattcattcaataattcagcaaataacaaagaaacaagcagacataaagtgaaaatatgacagttagtgataagtgctatgaatagaaaaactaaacatgggagggtagaggaacattggtgtgtgtgagcatgtgtgtgtgtgtgcgtgtgtgtgcatgtgcatgtttgcatttggaaaagcatgctgtgctagacttgcagtagagtgctcagggaggacctgtacattataagctagtgtcagcaaaccgtaggggaaatacaggattatttaattaacaatagagaagtaattagtaggtatttgaggaaagtaagtttagttactccctatcttcatgtcaatcaagaaaattaattgttggtggatgaaaaaagttaaatataaaaacaaaacaaaacaatactgagccataaaaatgaagaaactatgtaagcatctatttgaccaccaacaggaaaggatattctacacttaaaagcaatgaaaacatctcaaagcaaaagaatgatcggtttgactacatcaatataaaatttgtcatatattagcataacaaaagagagaaagtaaacaacaagttagacaaacatctgagaactggacaaaagacataaagagatggttcataaacatgaaaataaaatggctgataataagtgattaatatttgcctcatttatacccaaagaaatgcaaattcagaaaacaatgagataccatttttccattttggctgtctaattacattttaaaagtaaagctgctcagtgtgcttctgggtgtggtcgatagatgctgtcttgtgctattgagtgagagaatatgaatattgcaacacttctggaatgcagtttgtcagcatgcatctgtcaggtttcaatgtagtcttcaactcaatcactgtactgccatcgagtaacatccaggaaataataagaaatgtagacaaataataatagctaacatttaagcggtattaccattcaccagacacttgcaatagtaactcatttaactttcacatcagttccaggagatggtattattatccccttctatagataagaaaattgaggcacagaacaggcaagtcagttgcccacagtcggttagctggttgaaggtagaatggagattcaaatccacccaggctgccacctgagcccatcctgcaaaaaaactgagccatcctggcttacctgtgaagatggtcatgtgattatctcataatacatctggtaaatgataatatatccacatgaagtaatattaggtggcaattagaatggttttaacaaagagttttgtgacacaggaaaaatgctcattatgtaatattaggtggaaatgcaggatatgcaatcttttaaacatcttttattttttgagaaggagtcttgctctgtcacctaggctggagtgcagtgatgagatctcggctcactgcaagctccgcctcccggattcacaccattctcctgcctcatcctccttagtagctgggactacaggtgcctgccaacgtgcctggctaattttttgtatttttagtagagacggggtttcaccatgttagtcaggatggtctcagtctcctgacctcatgatccgcccatctcggcctcccaaagtgctgggattacaggcatgagccactgtgcccggccaaacatcttaattatgtgacaacatttataaaaagtacaagaaaacatgttaaaatattatacatgttgagattattttcttctttcagtcttcattttgtaaatctcctacattgagtgtaaattgctttggaaatcagaaaaactttaaaaagaaagaaacttaagagttayggaaaagcaaaaatattgatgttaaacataacaattaaaaacccttaaaattcttacatgtgagacatttaatatttatattcttctatgcctattttattaatacttgctagagtatctgttacatttatcagaatatctctttttctggaaatgaattcattatttaatataaccttaatctgttaaattcacacataaaacttaagtacattaaaaattttacatacacacatccacatttgcagaatggtgtgcaaataccagctaatttttgtatactgagatcttaatatgtttcatattgaaactcagagttaacttgtcagtttgctgagccrtctcctgataactttgtctcttggtagatattgaatattttttttaaagtggtgctttttataaggttacatcagtcttaatcagagtgacataaaggaaataacattttttattctatccaagataaaagaataggcagagttaataataaaatgtgtgtggaggtagtgggggaggtttcaaaccatagacccagtctaatttgattatgcacagttggtactttccattcatacttgtttctttggcctttacattattgattattatctcttggaaattccaccaaatatttggtgatttttccataaggatgtatgtgaatggtttggcagcttagccattaagctttatcctggattcaggcattgacaactctgtttttaggatggaagatgagtagttgttggtgagaggggcattattctgagctgagaagctgccatgcactcaggaagtctccataagccttagatggtttaatcactcaataattccagaaacaggccttcttatcatctccattttggtaatgaccaaataggctctaagacttgctcaagttttgcacagcttgtcaggactcaaactggagtggcagcccaggtttgtgtgtttctgaaaccagactctgccatcaggctgtgctccctgcactcaggatggtaaacaagggatatggtgttgtttatgcagtatttagactctgaatggtctccactgtgggggatccttcctccactgggctcaaagttgtaatcagaactccgaatgctaggttgcagtaggatcaaagttcaatgcagatcttagttccactgggacacagtcaatgtaaaggaggggtctggagtgtaggagrctgtcacttcatctctccatttccctaaagtaaactcatatgggcagccacagacacaygcgaacacatgcatacacacctatgcctcagtgacacatgttagtgagtgctggccatgtgctaggcatcgtgctggattttagtgatacagtgaagagcaaaatagacttagtgcctagaattatgaaagaattatgaaacctacgttctgaaggaggaagatggagttttaaaaattcaaccctaaatgaagatctcattacaattcaggaatgttttgatgtgaaaacacacacacacactctgttacatgggcagaactgccatacatagctcagcatgtcacagattgtttattcatagaatggtaatatttgtagcagtactattgttctgaactttggccttggaagcaggatttagtagaccaggcctgaaattcttcagactctgttgtatcagagaaataaattattagggatttcttccagaagaaaaacttcattgccttgaaattttattaattttatatggctgaaagttctragaattggttactatattaaggattataaaaatcttctaggttgtttttttaaaaatctgtgtgccagaagatttttaaacyttcataagataggmacacttttgtttgaaagctttggctgaatctgttttattctgttttccagagaagccatttgaagcagaatccaaaccatgaattgtagagaattaccsttgaccctttgggtgcttatatctgtaagcactgcaggtaagtgattatacatactctcaaacatatttcatgagtaattgaggaagaatgtcaaagtttttttttttatgtggtggctactgaagatgctgaatttattcagaaaagaaaagattctgcagtctgagttcatgtagtgagagcagagtgaaaaacttgcatcttgaaataaattacatttgtctgaggtgaaaatttatttcatgttatttgaaactgaggaggtggcagccatctttattattgggttttaggaagtttgaaacacactttctccttcctgagagggaggcaaagattcatctcattatttaggtaataatgagaaaagtaaacgacaaatatattagacagcttaaaaaaattagagtgagacagaatatacaaaaaagagactggctagaccaaggagctcaagtaggcttcatagtagatgtcaaatrccaattttaatttattagcagtgattgcctagagttttttttttttatttgagaaggattctgagacttcattctttagcgttccatgattgaatagcaaggcattccttaggctttgggggagaaagtgggagcacaaatattaatttgccttgatctattatctaggagagggaaacacatgggctcatttccctactttgataattactgctgaagagatagctgaattaagcttttggtactttcaaataacacaggtccaatctcagggtatatttacttacgtgaatccatttattattgagatccctgcaatggaaccctacccagatgataaaagaatgaggtagatcttcatttttttatatgtaatgatctgtcaaacaagtgagtggaaaagcaaggtacaggaaaatgtgtcatgagttccatgtcctgtggacatacactaatagccttactcctcattataatgagagcatgtttcaggcacagaaacagccatgcagccagttgtgcaaagttgccaagctcccagctgcctgccctgaagagcacttttcatgaatgtttcactctagggagacatgacaatgttctacatgtaggattcactgaacctagttgagtttaaatgacaaaatgctatgattgtccaaactcaagacagtttcaaacacagactttattccaaagggcattggttgttggcactgctgggttcttatactgtgtttatggaacaataggagtgcctattttggcacttggaactccacaaaccttgaattccacttatttatcccatcaaggaccatttccaacaagcattatggtaatcaacaaagcctctaatggtaaaccatgattagatatccaaagcttctagctgcctgaggaggggggtggtgtggastttcaattatcaacctcccacctctggagagtgtgtaattcacattaagtttcttcaaatggtaatacttccagagagcacatgtccatccaaacacagtcatatgtgtttatagaagctttttaagacaagcgaaaacctgaaaacctagaaataagccaatatccaacagacatttgtttaataaaccaaatccccaacatgcatccttttataaaatggataaattgcgaaatggtaacacgattagatactacattacaatgagaaaagaacacatcactgctacagcatgaatgcatttataacaatcatgtcaaaataacccagacataaaggagcacatattgtatagcctatgcattttattatattaactctaaaacaggaaaataaatgaactgttaatgactcaccagggttttgcatgtcaattgaagctgacacccacatatacacatgtatcacaccttctatgttgaagtattagtataaaatagagattgtattgcaaccagaaaacatgaagttggtgctccttaactcttgtgttttgtggtagattcgacatccatgttttcaaagaatgtgtattagtccattctcatgctgctaataaaggcatacttgagactgggtaatttataaaggaaagagactttattgattcacagttctgtatggctggggaggcctcaggaagcttacaatcatagtggaaggggaagaaaacatatccttcttcacatggtggcatcaaggagaaggctgagcaaaaaggggaaaagccccttataaaaacatcagatcttatgagaactcactcactatcaggagcacagcatgagggtaatcacccccatgattaaattaccttccaccaggtccctcctatgacacatggggcttatgggaactacaattcaagatgatttgggttggggtatagccaaatcatatcattccacccctggcctctcccaaatctcatgctctcacatttcaaaacacaatcatgcccttctaacagtcccccaaagtcttcactcattccagcattaactctaaaatccaagtccaaagtctcatctgagacaaggmaggtcccttcctatgagtcagtaaattcaagagcaatttagttacttcctagatacaatgggagtacaggcattgagtaaatacaccccttccaaatgggagaaattgactaaaacaaaggggctactggccccatgcaagttctaaatttaatagggcagtcattaaaccttaaagttccaaaatagtctccttcaactccatgtctcatatccaggtcacgctgctgcaagaggtaggatcccatggccttgggcagctrtgctcctgtggctttgcmgggtacatctttcttcctggtttctttcatgggctggtgttgagtttctgggctttttcaagtgcatggtgcaagctgtcagtgaatctatcatcctggggcctggaggatggtggctttcttctcttaactccactagctgtactccagtggggactctgtatgggagccccaacaccacatttcccttccacactaccctagcaaagattctacatgagggttccacccctgcagcaaacttttgcctggacatccagcatttccatacatcctctgaaacctaggcgtaggttccyaaacctcaattcttgacttttgtgcacctgcagcctcaacaccatgtggaaggtgccaaggtttggggcttgcaccctctgaagccacagcctgacctggtatcttggcctgttttagcaatggctggaggggtaggatgcagggcaccaaatccctaggctgcacacagaaagggaccctgggcccatcccaggaaatcattttttcctcttaggcctctgggcctgtgatgggagggtctctcatgaagatctctgacataccctagaggcatttttccccttgtcttggcaattaacatttgagtcctcatttcttatgcaaatttctgcaaccagctttaattccatgccccccattcccacgaacatggatttttctctcctaccacattctcaagctgtgaattttccaaactcttatgctctgtcacctcttgaatgatttgctctttagaaatttcttcttccagataatcgtctctcaagttcaaagttccatagatctctaggacaagggcaaaatgcaactaatctctttgctaaacataacaagattcacttttgctccagctccccaaaagttcctcatctccatctgagaccacctcagcctggactttattgtccataacattatcagcattttggtyaaagccatttaacaagtctttaggaagttccaaacttttccatattttcttatcttcttcaaactgttccaactgttccaaactgccctccaaactgttccaacctctgcctgtatgcagttccaaagtcacttccacattttgtgtatctttacagtagcaccccacttctggtaccaatttactttattagtccattctcacactgctaataaaggcatacctgagaccaggtaatatataaaggagaaagatttaatggactcagttctgcagggctggggaggcctcaggaaacttacaaaagggggaaaagccccttacaaaaccatcagatctcatgagaactcactcactatcatgagaacagmatgagggtgactgcccccatgattaaattcaagatgaggtttggatggggacacagccaaaccatatcagaatacttctatcacatcacttcctctttatgttgtggttaacaattttgagttaaaaccagactgctgctttgagaaacaaaccctgactatagagaaggcattctgtccatgtcctaagggaaatgtttcgttcagtttaaatactctcattctcaaaatgtggtaaaagtgcacccgagagtcactggagggtagattatgagaaagacccattaatgctgaacttgaagtaccacaagtgccgaaagaggggaacgagcacctaycctgggtagatgatggtcagatatatttccaaagccagagaatctgggtcaattgagaaagagggaaagtgacagatatgcaaatttggattgatattatattaatgaattcttgattatccacatggtgacctacagtaataataaatgtacacacactgtaagttacataggcacacttttaaccatccccacacttaccagggaatgttagataggcagggtgaatgcaaggtgagtgagatttctgatggtgcagaggaagaacgccaaggttgctagatttcttgttttcttttctactgagactcctcagcagggtatattttgaggtaggtatggcagcaccgtgacttctgtggctttccctatgaagaagttgtaatgtgtaatattttcttctaagaggtgacacaattatcagtcttctagctatggttggttaagttctgataccttcctgttggggagaaactgtcagaagttgtgttttcatctatgttctgaaagtgccttatcctttctagtgttggaaagattgacgcaaaaataaagaacccacaggaaattgacaccgagatttctcaggactttcttgctaaccttgcttcttcacctaatgcattaggagaccaaaaaaagttaccttgtcattttggtttttgtttttatttattttactttactaatcttytgaagaatcttgtacttcacgtccccacattactgtggttgaaggggaacctttctatctgaaacattgctcgtgttcacttgcacatgagattgaaacaaccaccaaaagctggtacaaaagcagtggatcacaggaacatgtggagctgaacccaaggagttcctcgagaattgctttgcatgattgtgttttggagttttggccagttgagttgaatgacacaggatcttactttttccaaatgaagtgagtaaccctttcttttcaaaatgtatttcacagccctcttgtcctttgttcagcaactcaaatatgcagtaatctgaaaggtcagataatcascacatccttttctttcctactcttcctatgacatgaaatacattctwtgttatggaacaraataagtttatctctctctgcttattttcttagtgaccttaatgaaaggagattactttgataggatttccttttaggggatccttaccaatgacaagtgacgattgcatgaaagtcagttttaaaattcagctgctcctgttgtctacatgcccccagtcaaatgaaatcagcagctcggacttcacgataatattaatgtgttgcgaatggggcagtgtcagcttcctgggtggcatccctggtggggagcagggatggggttgatgcagaaacaccctagtccagtctgcaggggctcactgggagccaggtggcagtgctagtggaggaagtgtgtgtctggcagccaatcgcaacccacagctggcggcagtgagagagggcaacacggaagggctttgcattttactcatgaggtggccctagattgtgccagaatactcgaaattgggttgcataacttccatgaaatgagcacagccaactgaaagcatcacccacacttaccgaacatgtttctttttagatgtacctacctacatatgtaggtagttttatagagacttgagactgacctgtaagaaatagctcagggccagctgaaggtgatggtgtgtagatttcatatgtagcagatttcttttagaagcacttctagagtgagtcctgatcattatcaaccatgctgttgagagcagagtgagctaccactgtgaaaccttggtagcacttctgtrgttttgcaccaaatcaggtcatttttgtttgtttttatacataggaactcccaggcatcagaaaaaaattaaataactcttttgataaaaatcagtacatctttagatgaccttttaagagtgataattacagaaatgggtcacaactgggatttttcataacaagctaaggaagaatgaatactcacaaatggggtaaaggaaaaagaacaacaaacaccgccccccccaccacaaacttccaactcctgattgaatgaaggcacaatttaaaggaataaagtattctggacaggcctgagagagcacgttgagaggaacagccaggcatctatgatcatcacttggagataacagaagcaaatggcattggccatctttctgataygggtagtagagaatacagcctggcttaggaagcaacaatggaagcaagagattgaggcaggatgtcagagagaggtgtggagagacagggtagcagataggagatgctaagaaaaatgaggtgtcccagagtggataytggagactgatcactatgagagtaaagtgwtgaggagagaagcagctttgacaatggccttgaaaataaatgggattctacatggaagcaggttgttttagacacccaggagcatagaagatacagacatattcaaatatagcataattagtaagcagtatttactgcagatgtgtgtgtatacacatatgtgttctaacttargtgtgtaaccctttgyagtttgatgtgggatctrtcagtgaacagactttacacctgaaaatttcccrttagaacagtaattctttaatttttaggagtacattgctaataatcaaatgccactgaggactgataatttaatcctgcagtgaaaatcactttatcccaccaaattttaagaacgaaatcaactaagaaggaaggggatacaaaagggatarttttcaatgatagagatgaagaaatgaaggtagagggaaatgtacacacagaaatctaataaaccaatcctaggctgacaggcagcaagttcagcytggtgagcagcctcagaagtgggggctggtgtttatcccctggtgtctgtggacaaaaatgagtggttttcataaccaggatgggctgggcctgcagcaggaaagtgtggtcacagctttgggtcagttggcctcagtgttaacccyagccttggagctcctggatggcaggtgcagtgtgttgttgattgtttcagtgttcccagagcagtgtcctgcacatggagtgtcatcagtcctctagcatttgttgagtgttaggaattgaggattacagaggtagagaacaatgtagtctgaaaaaatggggatattcatgtaccctattccttttaagcaacaagtcatagagatccagaaatctctatctctccaattcattgaggtcaaagttggggagacattacgaaaacacacttgagaagaaggtgctgccaatgggatcctgaatccatttcaagagccaggtagctctatcatgtcccatggccatggacccactgcctataactgtgacaacagcctgccacattctccagtcacggccaatcttttataaattcatgcccaaggtgaaggggccagattcattggattgtgaaagtgtagaattgtgcagagcacttctggcctctggggccaaatagatgtgcatttgtatcctggccccatcttgtagcaagtgtgtggcctgagtgagttgtttaacctgtctgagatttagcattctcatctgagcctraggaaaatagtcatctcccttgcatgtacatagtctaatacctggaactcagtaagtgttagtcttttcttccttctatcctattgtagacctaaaggggaactggaagagcctaaggtgggcacaaatgtgtcaggcatagaggatracttaaaaacacgcatctgctgtatttagcaaataaatctatacatcacaggtgcagtggaagcaaacatgaaatttgaaacattttctctttaaaawcttcatttaaaaaatactgtattgttttccaattccagatcaccttttttttgttgttgttgttgttktttttttgagatggaatttcgctcttgttacccaggctggagtgcaatggcgcgatctccactcactgcaacctccgcctcctgcctcagcttcccgagtagctgggattaccgtacccagctaatttttgtagttttagtagagacggagtttcaccacattggccaggcyggtctcaaactcctgacctcaggtgatccacctgccttggcctcccaaagtgctgggattacaggtgtgagccactgcacctggcctagtgatagtcctgatcactaatttctgatcaggagtaacaacaactataaaatctattcacactcacttttggtcagtaaggcatttaaagagctaattcaattacactgagggcagcaactccagactttggtttattcaacagtaaaagaaggggattggaagaagttgccttgagaaacaaaacctaatatatatatacacacatttagaaaacaacatcaggagtttatagaccttttgaaaccaaagccaccctcccatcctgggccaagactctctgaacttatccatcagtgaagatcactgacattgtaaagatttgcttttctgacatccataatatattgtctgcagtaggatatgtgcgtgtgtgcgtgtgcatgtgtgtgtctctgtgtgtagactgcttaggttttcatttattaccccctgctcccatgacagtttttaaagttcttgctcttctgaatcaagcggaggcagagcagggtttgcacatcaatgaatcaatctctttaataaaaataaaggaaaatattgtaactggttactaaagggaagatgggtgatatttgcaaagtttctgtagcattataaaatacctttacacttttattccatagaaattatactcagaaatggaaattaaatgtcatcagaagaaataaacacagctgtttcactgaaagacaagtaactagtaaaattgtggaagttaaaaaattttttcagataayctgtgaaaacagttactatcaaacactggtcaacagcacatcattgtataaggtaatgcttttataatattttaactttaagacttgatggaaaagataaaattcccaaatgaggggctgagagctaccattctggtctcataacaaataagctgcctgatcccacatggctcacttgccctgtttgagccaagtatcctcactggcttgttgtcaagagctgatacatagtattaaaatatgttccacagtagtttccctggatttggtgttcaataaatgatcacagtttcttctcccacactcttccttcattttccttctctttcgataagttagtttttaggaatgctagtttaaggatttccattttctcctgtcacatgtacttaacatgtaaaactcaattgtatatgtttttctgaatatattagttcattttataaaattggaaatggtaatgcttttataatattttaactttaaaactgaaaaatgaagaaagcaaaaatcactcataaatccatcacagacttttttttttctgtgaagcatctgctttttaaaagtggtatattttatttttttatgttttttcctctaagaattacgttgtgactatcccttcacatctttaaatgatcttctaaacatgggctttcagtttttatgtgcctggtttcatctaactaacccccttgtttcgtctaactaatcccattgttattggacatttgtgaattgcctatttttcactattatttaaaggctaaaatgaataccatttccacaaatccttgggtgtttatatgatttgtccttcaaccaaatccctaaatgtagaattactggatcagaggctgtgagcatgtttttatgtctttttcctcacactatcaaacttgtctccagggagctctgccaattttaccccacacttgaaaaaagaatcccaattttttgtcacctccacaacacagggaaataatrgtcccagaatgtttaaaatttgatatgaaaaatttctaaaactcctagtggttttttcacttttcttagtaataaattaaacttttgtatatatttattgcatcttactgcaatcaggcaattttgtgggttgcctgtttatttttttctgttttcttcagttggtataccttttacctgttgaattttaaaagctcttatacaccatggaatactatycagccataaaaaagcatgagttcatgtcttttgtagggacatggatgaagctggaaaccatcattctcagaaaactaacacaggaatagaaaaccaaacactgcatgttctcactcataagtgggaggtgaacaatgagaacacatggacacagggaggggaacatcacacaccggggcctgttgtgtggggtgggagggtaggggatgtatagcattaggagaaatacctaatgtagatgacaaattgatgggttcagcaaaccaccatggcacgtgtatacctatgtaacaaacctgcacattctccacatataccccagaacttaaagtataataaaaaaaaaagctcttttagaccacgctataggaattatatatacacatacatagcgtgtgtgagtgtagtgtgtgtatgcataaaaaacatacgcactcccatccacacacatacgcaacacaaattgtgtagttcaggggtccccaatccccatgccactccccctcactaacattaccacctcctgtgagatccgcagctgcattagactctcacaggagtaagaaccctattgtgaactgtgcatgcgaggaatctatgttgcatgctccttatgagaatctaatgcctgatgatctgtcactgtctcccatcacccccagataggaccacctatttgcaggaaaacaagctcagggctccactgattctacattatggtgagttgtataattatctcattatatattacagtgtaataacaatagaaataaagtgcacaataaatgtaatgcgcctgaatcatccccaaaccaaccattccccgctcaacccctgcccaccctggtccatggaaaagttgtcattcatgaaatcagtctctgtgtcaaaacggttggggacagctgatgtastttatatggaataacaaatctgaataatatgactctgtcgtggaaactttaaagacctataagagagtggtctgaacagaacttgggaaatctgaagcgagtgatgataatatccttgaaatttttgtttgtgccttatkcttgaacactgtttacttgtgatttccaaagacagctcttatctgaaatgttttctaaacactcgaatcagtcctgagttgactttattctatttcccatcaatgtacaaatgtgttacagtatatgtaaattagtgaggcttggtgtgctgagttttaagaaattccgttcgggtgcagtggctcacacctgtaatcccagcactttgtgaggctgaggtgggcggattattaggtcaggtgatcgagaccatgctggctaatatgatgaaaccccgtctctactaaaaatacaaaaaattagctgggtgtggtggcacatgcctgtagtcccaactgctcgggaggctgaggaaggagaatcacttgaacccgggaggcagaggttgcagcgagccgagactgggccactgcactccagcctaggggagagagcgatactccgtctcaaaaaaaaaaaaatgaaattccaaagtgcagctatttaaattatgagcattggtgcaccaaggatatttagctaaacaattgaccacagggctaagtattctaagcctgttgactgatcatgacttcacccgagagcaaggaggctaattcagtagataattgattggaaaggaaaatgaagagtctctgatcttttctatagcttgaaaaaattagtttggctttataaaattttgacttatacataaataatttactgacgtgaggtacacatgtgggtgcttcacgggcacattctatgcacaatgggtctagccccagtggctgccagctctgagggagaagtctgtgggcagtaggttctccttgcttggtgtttgcagaaacagtgtccaatggtcaaggatggccattcagcccccagacatcccatgtggtccctgcatggctctgggacctacctctgggtgtcagatgtgctggattgaagaaagtggctttattacaattagtattaattcctgtgacatgtatggaaatgtgtgtgagagagagagagatgtttgagtgtacctatggatttgaatattgctgatgcatttctaatcagctcgctggcttctgatggagggtgtcaaaggtgtgggtggtctgctagctactcattctctgagtaattctccacccatcccactatccaccccttggatgcatagtccagaatacacaaaattggactgaacatgtatgaaatagagttgtgactcaagcaagggtttttgaagtagtgttctctctctctctctgtctctcgctgtttctctctctctgcatgtgtgtraaagagagagatgaaagaatattgatgaaagcagctacagtgctcatattgccccatgctctacttcccagcatatattaataatgataatcatgccaacagcaatgggatcgcatttaattgtttcagtaaaagtagtaccaagtaactgggacatatgtccaggaattgctactttccattcttttttcctttttctctaaagatctttaactcaaaaatttggatcactgtaatatcaatttggcttttacttaaagtattttaacttgttttattaaaaacagaactgtaaaaagctactactggagaacaataaaaacccaacgataaagaagaacgccgagtttgaagatcaggggtattactcctgcrtgcatttccttcatcataatggaaaactatttaatatcaccaaaaccttcaatataacaatagtggaaggtaagggaaatcttagaattgggaagaaacagacgtattttagtaaaatggaattttttcattcttcaaaactgtgtaggaattgagagtccacttagttggggttgtgaccacaccactagttcaaatatgatggtcaaaatcttcattcyggtgctcctctacttggctaaataaacctttctttttggcaggaaatgaaaatctgtatgaataaacctcacatgagtcagctctctcttatatatgaaatttgagtaaattgtggaatcttttgttgttkaatttacattttcactttacaagtatttagtgaagatatctatactcaataaactgtacttagcacaaggaggcagggaagcaaggaagtatgagatgaagtgagcactgtactattctcaagggatttgattctaatcaggagaggcaataagctacataaaggtgtatgaaacagcatcatctgtgaggctgcaagagtgcagggggaggttggaggaaggacagatgcaggaggctccatttgacctgggtcttggagggggagcctcatgaaacagtgacctgctgggggaagggatctccactgggagagtgtaaggaacactgatgtgctggtgggaggggagggatgmtggacccaggctgtgtgtgatggaggaacagaatcctgggacattaaaggtatttaattaaacctcacccagtgaagatattcatcataaggcacagccaatgattgatcatccagtcccttcttgggaactatcaaggaaatgaccaaatcacacagcagtgtagtccagattttaatatctgattgttgaagtcttttttttccattgagtccaaatatcccttctcgtagcttccaaccactgattttgatttgccttcaagaatttcacagattaaatctggctccttcttaaaatgacagctcctttcgtgatttgaagacaggttgcttatccagtctggatttttttccccatcatcctgagaaactggaaactgtaacacttgtgtgggtggcttgttcaacaaaatctgtgggctcacatttgctacagcctttgctttagcaacatctttcttcttcactacaaccatatagctatatacacccacatgttgccacagtaacaaattatcccaagtttagtgtcttcggtaaaatcaaggttttgccagaattgctttacttctggaggctgtaggggaaaatgcgtttcttttatttttttatttattttatatttttgagatggagtcttgctctgttgcctaggctgcagtgcagtggcgcagccttggggctcactgcaagctccgcctcctgggttcacaccattctcctgcctcagcctcccgagtagctgggactacaggcacccgccaccactcccggctaatttttatattttttttagtagagacggggtttcaccgtgttagccaggatggtctcgatctcctgacctcgtgatccccctgccttggtctcccaaagtactgggattacaggcataagccactgcaccaggctggaaaatgtgtttctttgcctttgctttctccagcttctagagaccacttgcatttcttggcttgtgccacttcatttcagagccaaacacatttgcttccctcacctcatctcctttttgactctgacctttctgtctccctctgatgaggaccttgagacagcattgtgcccacctagataatccagggtgatccccctatctcaagatccttaatttaatcacacctagaggttccttttgccatgtaacatatygtattcacaggaactcaggagtaggatgtgggaaacttcagggtctattattctgcctgccacagcccagaacctgggaaacccataactgaattttaaactcaaaaacttaaattctgtgtataatcatctaccctaaactctccaactttactttcctacatctatttttaatctcatataaatctctgttactttgatactttcagaacctacaccctctttcccaccatctttgctttctgcccatcagcagctctttccttccttctttgatgaagctgtaggaatatccattattaaaagggtgcttgttatgggccagggatagtgccaagtactggagttgaatcatgtcatataatcctcacaacagctctrtgagactgtggccttgggtgagttaatttccttagttcctctctgcctcagattcctcatcatgaaatgggacagtaatggttcatccctcgtagggttggctgacaatgactgagtgagtgtgtgtacagctctagratggctctagggacagtaagagttctgctgtaatgaccatctcccactgctaggttcccaaacctcacctgcagcacaagctattcttctcccataattgtccatcttatttttcttgtcttcttggagaatgtcaactgagtctctcaggactccactcaaatgtcrctcctccttcatgcccccatggcctcttgtttgtatttctgattgctgtcagaattgcaatacatgtgtgtctctgtcaataacttgaaaggtttctggaaaggtttgcactgacttctgttcctcatctttgcatcttggatacctacaattggcacttggcacataaaggtgctcattacatgcctgttgtgtgcatcactgagacagaaacaactcctttgatgccacatacaacaagaagtctagacacttcaccatcctggctatttttctttggatttggcaaagtttgccacgagtctacagaaattagagcttggagttggggaagacagccaggaggtgttctgacctgtgttgaggacagagaggttctgagctcgtgccttctccatgttgtgtctttattacagtccccttgccttcacagatggagatctctcagctgctacatagtgactgctgtagtggtggaaaggtgtgatacctctcctccccatcctaagggtcatggcaatgttcccataacaaaagacagattaacaaggggcaagcaagttttatgtgacatgggagccttcagaaatgaagaccctggggccgggtgtggtggctcatgctggtaatcctagcactttgggaggccgaggcggatggatcacctgaggccaggagttcgggacaggcctggccaacatggcaaaaccccatctctactaaaaacagaaaaattagctgggcttggtggtgggcacctgtaatcccagctacttgggagactgaggcagggagaattgcttgaacccaggagatggaggttgcagtgagccgaggttgtgccattgcactccagcccaggtgacagagcaagactcggtctcaaaaaaaaaaaaaaaaaaaaaaggaaagaaatgaataccctaagactcagggaaacccgtttttttctttttaaatgcttaggttctagaagcatggacagccatgtagaaatgtgattggacaaaagggtatgacctaatgctaatggactgagtggggaaacccagcaagacctgtccagattcttcttggcctctctgttatatttccttttcctgggtagagggcagagggtcttaagacttactgtcagaccaaagaaggccaaagaatttatagccaactcctagacagaaaggcaggagaaggttagagtcatgcttctaggttctatggcttactttggggaaaaggattctagtttttatgatctgcctttgggaagagggagtctggtttctgtgacttgctttggggagaatggaggcatgaagcaggagggtcagagagatcttgctttttgaggctgctttgaggccttccaatgtcgttgagtttaaagtactcagcctgccaaaacaccatactttgggactgtttttggagcccaggagttccattgccttcagcttgtgctcgtgaatcacagtcacctgaattcctactgggcatctgccactttcctggtcttatgctctggctgatcgggtggcgtctcctcctactgctgacaacctctatgccattttgactctgatagcctcctaggtaggctggccatgtcaagggcatgcactaagatgttgtcttccttccatgacctacatgggactgcacccttcactttacaccagttgtgcaaactcagggctgatctggatttccaatgatataatttgagtgttagtagacagcatcctttgctgaagatgtacttcacactgccccttctcaagtctyccatgtaagtttctgggggaaaaaatggatccagagaaaggtagtcagtagcagttttccccctcayaccgaaattgcctcctgccctttgtctttgaattcaagccggtgttgcttcttactgtcagacctgagagttagttctttccctggatacatctcagctcctcctgcctgtttgccaacattccaggcttgcccagagactccaaatcccaggataacccagacctgactctgaactccggagtccactgtgctggtttcattctcctgttcttgctcacatatctgcccactgcattctcaactgctcactctggcactgcactttctgagagggctcagggaggtgtgggagctgcaggwgcactcctgagtctcactgtactccactcaaccaggcattctgcttgctgagcacctgcaagtcccagaagggatgttctggacattgcttgggaatgcctccaaagcagtggggctactagcagggaacagtcctggtcatgaggaaagttaccaatgaggatatcagggctaacaataacttgactatgcaccagttcaaatctatgaccgcagctgctcttagggtttgcagttgccagctgccttaagcaagagcctgttgggtgatgacttacttcccaagcatcaccagatggggactgagggggcagaatttatgtgcagtacttccagtcggggtcagaagccactcaggagcagaagtagaacttggcctacaggcatgaacttaacagcagggccagggccaaggtgaggttcctggggcacaatattgaagggacactgctctcagcatcctgcaagggaacggtgggcacatagagtgagggatttgcttttctcaacctgtcttggccctgcaacctgtaaatccatcactgkycagctgaggaggacagatggagagaatcgagacagggcagaaaggctcttcccagtgattttgcatggtttgactcttgcacgtttgatcatctgagagtcaggctgcagtggatgggcatcttcctctgccttttagttgaattgagcagaagctgcagatmtgagtgagagaaaaccagatacaaggtgctttcaacatctgtgacctttagttaatgcaaataggactcaagtgaacgtaaaccagtaactattggaatctttgttacatgaaatgagcatattatcatagatgcttgtcataaagaagctcaaggcaacactaatacatttgtcttttcttttgtcacttctagatcgcagtaatatagttccggttcttcttggaccaaagcttaaccatgttgcagtggaattaggtatatttcaatatacatatattctgcatttataagtaggggacataatagagccttccaagcgtaaatatgattcattattgaatgacactggatacacatttcatatttactgaataacattacaaaactaagaraagagtgccattttttgaatgttgccacttttaacctgacttaaaagtggcaacattttaaagttcaagagacagtggaactgcctgtggtctgtagactaaggtttttgttgtgctgtgtgtggcttgtctttaactctctctatggtcatttctaaatatgaaaatttaggccgggcatggtggctcacgcctgtaatcccagcactttgggaggccgaggcaggtgaatcacttgaggtcaggagtttgagaccaacctgaccagcacggtgaaaccccatctctactaaaaatacaaaaattagccaggcatggtggcatgcacctgtagtcccagctactcaggagactgaggcaggagaatctcttgaacccaggaggcaaggttgtaatgagctgaaatcacaccactgcactccagcctgggcaacggagcaagactctatctcaaaaataataataataataacaataataaatttaaaaattccgtgagagcactctggagagatgagtcaaactaattttgtggtgtgaatgtttgattaattgattcactttgaatcaattgactgaattgattgtatatttggagtttgtctagataagtcttatgaatcaacatgtccaattgagtaatttctttcaaaagagaaaggaaagaaagaaaggaagaaattcacatatgctamatatgctaagccaggtatcatgctaggtcattgaaatatattgttgaattaaatcctccaagcaacactgaggcatgtattctcattttatgaattaaataattgaagtgcaaaaaggctaagtaacttgtctaaagttaaatcactaaaaagtggcaagtctctgtttggggactttgcttccaaagtccccaccttataaccacagttggggtcacagtggtttatatgaccacatgggcccagtgcagctgggtcctatgccatttgtacatgaggtttacctgctttatatttttatttatttctgtctttgtctttcttatttttttcttctactcagtggggcttaacttgtatcttttgttctagtttgttgacctgaagagttagataattaattttaattatcctctggtagtatatacattcaaactccaagtttccctgtaaacactactttagctgtttctcatattttcattctattcagtttaaaccattacttaaaatttcccttatgatttctttttccaacaaaaaaaattggtatttcttaatttccaaatatttggtgaactttctagttcttgtctcttattcatgtccagtttagattcattatagtccaagattatacacagtgtcatttcaaccttttggaatttgtagtgacttacttaaggcccacagtatggtatatcttgctgaatgttccaagtgcatttgaaacaaaggtatattctataggtttttgttttattattctttaaatgtctatttggttaagttcattaatggtgttgttcaaaaaatttatatcctgactaatcttttatctgcttgttccatgtgttgctgaaagagatgtgaatatctccagctattatggtcaatgtgtctctatctcctttagttctgtcaatttttgtcttacatagtttggagctatcttatatgcatacacggatttatgctcgttgaattaacacttttatcattatgaaatatctctctttatctatcataacacttcctctctcaatgtgtagctctgtcatatgaaataatcacacaagttttcttttgcttggaattggcatatttgtctttttttaaacatccctttactactaacatttttttttgttctatacataagtgtctctcataaactgcatgtatttgggtcttttttgaaatatggtcagtatggtgtttagtccatctgtatatttaaaattactgttacagttgctatatcatatatgcatgatatacaaatattcaatttattctttttaaaataaattacactttgttgaaaatgaccatatttccatccacttgtttatcttttcctctattttctttcaaacagttacagtttttaatctgctaaattcagcatctgtaggtctgcttctattagctgtcttttctattgattatggtgcacattttctgtgtctttgtatgtctcttaactttttattgttgttgatctttatgtatcaaacaattaaagtgaatacagtttgtgttattttttcttacaagtaggtagcctgagagttgagtatctcagttgactcagaattgagttggggtggctgggatgtaggtatgttcactccaatctgtcttcatctctgatagctggtgagggagggggtgctgcagtcatgtgtttgatgcaggcctcttctctaatgagacttgctctcctgattaccatgagactgcaagtgatatcatacagcctttacatccttttacgctgtccgagcgcttagcagtaattctgcaagcctgtgcagctgccgagagcttcactggattttcttgtttctatgagactctttctgttaattacaaaccaaagcaaattctkccatggaatgaaatggccacctatcttagctcaccctagaaaggatccttcttaagtacgcttgtagttcaaaaatttctctttattttctctgtactttgatgtctttaatgtttgcttaatttaatttttttgtgatttatccatttggtttatctagaagtctcagtgagagtattgtcctgatgctacgaaaagaaagtacactgatcactctaagttttaatagttgattaaaaaataaatgtttaaaaagaagccaaatcatgttttgatgatgacttgtaattgctacctatttcttctgctttatatattttgttttatttaaagcaaggcatatttattctctttctgggatggagcaccacgttttgctttaggttaacatacattgattatattgttttgaaacttttaagaaacctgagtttcaaaaatcagaactttagttgccaacttttaccaggaaaaaacgtaaggctcaactgctctgctttgctgaatgaagaggatgtaatttattggatgttyggggaagaaaatggatcggatcctratatacatgaagagaaagaaatgagaattatgtatgtatgtgtaatatatatgtcatgatatataccatataacaatcatatatattatatataacatcatattaaaaacactgggtggctgatgtgtattttgggctagtttaaattataattataatggacatattttrtaattatagtggccataccctaggtggacgcattatgcagaaatgtattgccaagatctaagctggaaaagaaggtccatgagaaggccattgagggtatttagcatcaccttataaagtagcacttggtcagtcaggatccgatggggatggggattttacttagcttcttagaaaagggcagttgcctaggccaagcttttttttattttgaaaaatttgttaagttgtttatttttctaatgggccaaaaaggctccaaatggcatgcatattgatagttaaataagcctatattcttccattaaggaatggtcaaacttataaaaagaatcagtctaaacatatagtcacctaagcttttctgaatgactttgggtcatactgtaagtattcattattatactgatacactactcagggtctagtgagtgctgagcctaagttgtctaccacctttgctgcacttgttgagttttttcttctgctttttacacattttttggtaccttctttgttaccatgcttgcagctctacattcttgctgacacttgtctacaagctctttacaccacaaagtctggcttcttgcccgggagcaggcatgtggttcatgcccactacatgttgaattcatttgaaatttgtggatctcctgccatcatatctcatcctcagccactggcctccatttgagttttgtatttctccctttggataatctctttctaatttttagaggggtagaaaaccacagtgaatttcttagaaatgcagcttaagctacaaaagcagrgaggtctttctttatagttgggtgcacacacctttgatatcatctgttttgtcctctcaatggcctcctgtgttttacttctggatttcattggttttagatggttgttatttctggatgggtgacttaggaaaagaattacattccaaaatgtacttgaggcagttggaggctacagtggggctctgtgtcccgggtcctagatatccctgttgctaggaatgtgggcacatggggcccatgtctggctgtgttgactggtgtagctatcagagcctgtcattggtgggggaagtggatgtcataagtgtttacctggcatcaaccacaggacaacttgaatcctttaaggaagagaaaaagaacgtgctgccagtggctttctcaagtcattttctgacactcatggaacaacttaactggcacttctcatgtgcctcggggtgcttgagaacagtgttatgttttttaatgctgaacacattaaaccagtttgttggattccatggacaaatgtaatacgaatctgcatctatgctaaacaacttacagccttgtcataattagtgggaaccactctgtggaaagaaccccaagttgttaggaagagagaagtagagaaaaataattgagagagaatattttctyatattttcaacttagcatcatgatcttccagccatttaaacttcaggtaattgacagcaccattcccaaatggcctcaggagggctgtttctgtcagttctgatgctccacggaggaggggacgtttattgtagtccatgctttaagagtactggccagaaagggaagaaataatgcaggcaacatcacagctgccttcaagcattttaaacatgtgaattmccctctcaagggtaacgaacagagcctactgctaaattattttgccctyttacaggactccagaaggcaaatggcatgcttcaaaagtattgagaattgaaaatattggtgaaagcaatctaaatgttttatataattgcactgtggccagcacgggaggcacagacaccaaaagcttcatcttggtgagaaaaggtgagaaagatttatttttggaagttttgaaacttagctcattgctactgagagacatttcaaagatggccactttctcattttccacaccagaacccagctcctgagaggggaaatcagtcacctcatgtcacaggcattcagtggggcccctctgtctcatgatgccaagcagagaatgaaaacagaactcattcacctgctctcacagtcatattccatcccatgtggaaatcggggggcctgagrcttggagatacagatgctgagagtgaggctcatggggaggccatcaggacaacccctgcacccagcactgcacccagagcagccagaggggagtttgcagatctgcgtggggtgaggccagtgcaaacttggtgtgactgctgctccagcctgcctcagcagggtaccaggctcagggtccttgtgtgtgctcattcattcattgcctcctgaacttggcaagcaggccattgatagccctgatctstgggmtcttaaagtttttcagtgctcacctgatggagggccccagggtcgccatccctttcctccaccaaagtagcacagcccagggccttcagcccagtagctgctcagaaatggctgtgactggagccagaaagctgtgatttccakttgtcactactcattcactgttcattcccaggctccaccatcaactccctggatatgtagagaaaggtcaagatctgcaagagagagagaaagggagagagacagagactaacacacccagagacagatggagacggagagagacagacacagagagaggagaaagagagatacatgagatggagggacagagacaaacagacaactctagagagatgaagacagaaagagaaagagaaagagagacagagacacagagagacagagaaatgagagagacagggagagacacagagacagaggaacagagaaagagggagatagagaggcagagacatgaagggatgcaaatacagagagatgagagtgaaacagacagagagacagagtaagggagagatacacacagacacacacaaacatgcagagacagccacacacacagactgggccttggctttgtgagaaacggaaggagtgggacaggaagagcacaaaggctggaaaccccctccagctgggctatcctggtgcccaggggcagctcccccagcacacatgttttagagccgcctctctaccatatgcactcataacaacagctcacatcccatacatgttaattacatgacaggatctgggtgaagttcctgccatgatctcatccagtcttaacgacaagctttatagaggtgaagaaacttgcccagggtcacacggcaggtgaaggtattgaaactcagacccgattaaatctggaatctgtgttcttaccttctgcagggcttgtcgcctgtggtcttccacccctgtgtgattgcctgtgctgtggtccactcacttgtgagggagyggggctcaaatctttgttggaccatcacctggccaggctttcctggggcctgctcaccaccggatcacctctcctttcttagaacagggcaggactgtcctattcctgccctagacgcttctggccagtcaattctcctgctgctgctctcacaaatgtaggtttagaaattggggctcacaacccaccatcaccccgtgccaatgtgtgcgtgcgtgtttttgcaaatgtgtgacacagttatgactatgcagtcctttccaaggtacaggagccccagaccctgagtctgctcagagttcactattaaacaacattagctgcttgcctgaatcctaaagatagtagaaagatatggaaagataatttttaaaaattgcaccaagatggcaaaagttttaagcacgtttatgctcattgacctagagatgcccccaccattacaatctattttaagaaagaattagaaatatggataaatgtatatgcctttttgtatatgtatatacatatatgcatgtatatatacacatatttgcaaatgtatatgcatatacatacaaggttacacatttatataaatattatacatgtatacacttatacatataaaatgtactgcaactttatgtctacttactaaaaattgcaatcaatctaaatattaggatattatgaattataattttaatgacctactgaaatgctcataatataatattcagaaataatgagtgattaccatataatctcagttaactaaaaagtttaagagacaaaaagaaaacccagaaggaaatattctatcatgttaacacagccttcaccacattgtgatttgttgttaaaaattactttattctttttattcctctgtattatctcagattgtccataataaacataaacggaatcaatctagaaaatgtatttttttccaaatgatacttttatacaaagaatttgctaaaattccaagagctgtgtgctgtattaactactttttgtgtaatatttcatttaatcttccccaaaggagcagccttgtaagtgaagcagttagtatcttcattttacagatgaaggtaccaaggtttaagggcattcacgatttttcctacaatacaaaataattgatggagcccagctgcaaacccagacaaatgtcaatccagtgctctctctcttctctcaaaactatgcacctcaacccacttgctaatatttctgtgagtccctatgtgtttcagcctagtatctcttcaccccagaaatctgatttccacgggtacggatagaatacattactgtgtaatgttttcacttcagttctctaaatatccgtgtacacatttttattctttaaaaatctgagtagaaatatcactactccagactaaaggcaggaatgtggagtcactcagtggaatgtgtcagcacgtgggttggcaactactgcattagtgttagcagtaaaaatggacaagcaygtgatgatggacaacactggtaagatttcttgattattttcttttcctttttccctttcttttctagcagacatggctgatatcccaggccacgtcttcacaagaggaatgatcatagctgttttgatcttggtggcagtagtgtgcctagtgactgtgtgtgtcatttatagagttgacttggttctattttatagacatttaacgagaagagatgaaacattaacaggtaacacatataatgctggaatttcttaccttatgttctcattaagaaatcagataaataggcattaatcttcatcttattgtgatgatattgtagaattaatctgtgggagaggttttctatgggaaatattgttctgcctgtaccatccattatgaatgttgtctatgtcttcttttcttgtgcttacttatgtgttgcccaaaattgttctgattgtctcgtgtatgtatgtcatagcttcctaaatgccctgggagatgctcgggcccaggaactgtatatctgggtgtctttgtgcatgcatcacttaggtatctttatagtacatacactcaataaagttgctttaagttagattgaattgtcctatcgctcattatttcaacctggcaaaggaggcttacataatggacgtgtaagaacccccagctggccgggcgcggtggctcacgcctgtaatcccagcactttgagagtccgagacgggcagatcacgaggtcaggagatcgagaccatcctggctaacagagtgaaacccygtctctactaaaaatacaaaaaattagccgggcgtggtggtaggcgcctgtagtcccagctactcgggaggctgaggcaggagaatggcgtgtgaactcgggaggcggagcttgcagtgagtcgggatcgcgccgctgcgctccagcctgggcgacaaagcaagactccgtctcaaaaaaaaaaaaaaaaragagagaaaaagaaccccgagctggaagccaaatgatctggaatcatgtctcctagacctgccagtttttatctgctactatgtcgacccgctggctctatgcctcagtttccttatacttaaaggtgaccagaagtcctcaagtttccagataattactaatttaaaggaagtcagtctaattcattgcacttgattttgttttgcatgtrtgtgtttgcaggaaaaaaaccttcacagagttcaaaacccaaaatgtctatgaaattatacttcagtagccccccttccagcctggtcctggatctatgattcccacccctcattgatagcacatctgaccaaatatcaatacagattcttattacacacctccttttaaaaagaacaaatcctggcttaatatgcgcactcttttcaactttgctctcttataccttagacacacttgcatgttactttataaagcagtccatcattttttagggccgcacagtattttatttgtgcagagctaccactgtttatttagtctccttttgatggacatttggcttgtttccaatcttttgttattataaaaatgctgcaatggacagctttatacattcatcgtttcatatgtatgcagtaggtctgaaagaaaaattctccaaaatggagtttctagaatacaagaaggagacacagccattattttgctagatactgtcaattcaccctccctactgccttcaaaagatgacagcaaattttttcccataaccttacccacaaccatttggagttgtgccaatctgataggtgaaaagttgtatttaagtgacattttaatttgcatttcccttactatgcaagagaaccagcaacttttcatttgcataaggctcagctgtatttcctttctcaacacacccattcatatcttttgcctattgttccatggggcaatggctttattttgcgtatttatttctaggagctatttatattttagggaggttagcttattatctataatatgaaatgcaaatattcccaggctgtaatttgtcttttgactttgcttgtagtggtgtgctatataaaagattttttgaaaaacatactcaaatgtatcttttatggtttctggatttgggatcataagcaaaacagccttcttaacctcaagttatacaaaaattatattagttcctctgagatttttataggtttagttttcacatttagaactttaaattgaacaacataaaattagcaaggttagtgaatttagctttgagcctgcatgtgcacgtgtgagtttgctatggggagagatgatgctgtaacaaacggggaaatctgtatttgatattttctgaatggtctctgtttgcataggccagtgtttgtcttcaaataaacattgactagctcctctctttctgactttctggagctaagatttcttttttccttctccagttgtgtttgacatgatttgcggtaattttttcaattcacacttcttaactgtcaatatggcagtgcagagacatttagagacatgctctaaatcacttccattaaattatggtccatgaacaaatgcagtccacgaaaaggacagaaatggagatataagtatgaagataaaaacttttatcacaatttaatactgctgcaatatctaagaaagtgttcagtattggtttctgaaggattggaaatgaaactaatcaataaacaacaacaaaaaaaggcaaatttaaattaaaacatggtcattcaccaagcatagtttgaggaacatttgtttaacttactccttgaagtcccaaatatccacttgaattataatttcctttataattttcctttatgtttgaatatagagaataaaaacattaccattagttttcaaattcctttttttgaatactttactctgtcaattstcaagtcccctaaaccttttaaaacctgaatttaaaatatattgtaataaaattagcrtatttatattaaaagaattgcttaaaataaggaatttgaaagcaattaatagttgaaaagctaatttttcataggtaagagcaaasctatattgtatgtaatataaacccatatttgatgaaatygtcttcccagtttgttgcaatccattacatcataagaaaattatgccctttaaaaaagtgtgctcatttaattgtcttacatgttgatgcctgttttgtcactgacacagtgacaaccctagtgraagcactagctcttacttaactagtagatagttatatttgatagcagtttaagaaaagtttgagggggaacctacttactgattgataactggttttatttttaccaacatttcatacctttgatatttatgtaagcctgaaatttttaccaacatttttcatctttcaatgcatgcaattctgcaaagcaattgctttaaatcaacaataggttctaacccaaattgctgracagaatgctgtaagtagaactgaagaagattttgccagaagcagaaagtgttgtttggtgaccatgagtgctatggaggatgccaggctgggctgttaagcataaatgatgtggcaccataagagacatagatctagaatggttttatcctattagattttaataggggttgcagttatatgtagcctcaaactcagtagcaaattcattaatcccaacaatatgccatgcataaatcttacccatctgccatcatctgccatcaaaacaattgtcatgggataaaggtagaccattccccactactttccttctttctctacagatcccaattagcatccattgcattttttaggacctgactcaaaatttcctcctttcagaaagcatgtccatcgggatcactctttattctctggccaggttattttgtctgtgagttttgttattctttttttgttatgctatttttcttctgctaatgtgttgtctgtaacyttttccaagttgttgcatgcatctgctttgcttttaaaaatagattggatgaagctagaagagagagtggtatcatgttttaattacccaattaggagcatggtctttgttatttaggagacattttcaccttcttrggggtctttctgagcatagaaattgtgatggtggtagaattaaatgatatgagtaaamcagggtgagattttctttccactcctggaatgaggacacctttgggctcttggccttctaaggaacttaaagacttaagttcctttagtgcccagatctatggctcatatatctctgtattcttctgtggtgtcaagcagtgggatcttaaagtagatgcttaaaaacacattggctaattggttgcttggttagcatgggaggtttaaatataaacaactttatatataatttgttttttcaatgattctatactcattacttacgacattcacttaagtttgtacttaaataaaattttatttacacatgaattaaaagagycaatcttacctcctagatggaaaaacatatgatgcttttgtgtcttacctaaaagaatgccgacctgaaaatggagaggagcacacctttgctgtggagattttgcccagggtgttggagaaacattttgggtataagttatgcatatttgaaagggatgtagtgcctggargaggtaagagggaatgccagatagaaaaatattcaagatagtttctttttaaaaaatgaatgagctagcccccagagagctatcccattttccttaaaaacaaatgaataaggtcctttaagcaagaaataaccacgtaagtcaacaatcrayagtgagaaaacaaactaatgagcttccaatagtctcttctcttgggctctgttctttgtgcttcacggttctctgaaactttggggaaagggagagggcatttccttttcagaaccgggcccagagctggcgttatcatgaagcctttatttagaaatgacccacggtgagaatatctgtaccacagcagcagttcctaatttaacatgtgatgtgtggactagttaatcctcactagtaactcttactagaaataaacacgggttaattattactagaaaatgcatgggtttttattgtgttgatattggtgaygaaatttaagtagaaaataggaaaattgaaaagggaaaaataacaggaaagcggtgatccccatcagatcatagctatgaaattcaatgttttttttattaatataggaatacaaatggccatagtgcctatattaaagcaaattactgttaaatttttctttttaatgagtaacatttttagattttctctgaagtctttagaacaaacatttaaaatctggtgtcaaattattctggatactgatgcttaaaaaaaaaaaacaaatgtttgattattaccatcattcatgtattaatctaatatttattggatactattcctgtgccaagttgtgaactgggcatcaaagatataacagtgagaaagaaatagttacattcccccccatattacaaagtagaaaggaaaatattgctaacttacactactgtttagtaataaacaacttgtcaaaaaaatatgccagattatcagatgcatacattgtagtatttttggatagcagttctttgcatctaagaaggcatattgttacttaggaagcatttattctgggccatacatcaattttactatatttccgttattttctaggggcctttcttgaaaacagatttattcttaattcataaataaaaataatgtttgaatattcagctgtaattaggtttggttaaacctctatttgagaacagtgagaggtctagaacaggggttggcagtttaccagccacgggttccatcacacctgcaacccttattgaaacacagccacgcacattggtttacctgtcgcctgcgtctgcatctgagctacaacaacagaactgagtagttgtgacaaagacagtgtgacctgcaaagcctaacatatttactatctggccctttgcagaaaaagtttgccaacccctggtctaaaataatggatggttttgttttgttgtgcctttttgtcttttaatctttaaattctgattttagcatgctcttttctgcttgaggagaagcaggatagtataatagttagaaaaatgtattccacttgggtttagattctgattctgccatttactagctgtgtgactctgggcaggttacttaaccactctgtgctccggcttccttgtttgttaaatggaggtgataacagtatcttctctgtagcgtattatgatgattaaatgagttaatatacaaaaaacatttaaaataaggtatggtaaataataagtgctaagtaggtgttcattattattgttacctagagattttttaataagcatataaaattaagaacaaatggtttgtcttaaagaaaaacttattagtgaggttaggagttartataaaataagactgtgcaaaatgacttttatctcatgttccccctttcagttatcttaaattaataggggttatcttgcattttcagctgttgttgatgaaatccactcactgatagagaaaagccgaagactaatcattgtcctaagtaaaagttatatgtctaatgaggtcaggtatgaacttgaaagtggactccatgaagcattggtggaaagaaaaattaaaataatcttaattgaatttacacctgttactgacttcacattcttgccccaatcactaaagcttttgaaatctcacagagttctgaagtggaaggccgataaatctctttcttataactcaaggttctggaagaaccttctttacttaatgcctgcaaaaacagtcaagccaggtagagacgaaccggaagtcttgcctgttctttccgagtcttaatcttcagaaacagtgaacgccaaaaagaactcaagatattctggggactgagcatatgaacytgttcataacaaaggctgtgactmgaaataattaactttgtcaaaatcctgctcacaatttgaagatgaaacttgtcattaggttggcgggaatgagactaaagattgcgctgtgggctgtggtcacgtgctcccagaagacctggaattcaaaagaaatggagctattctttttctccctctttcataactggatgcagctgctcatactcaatcccatattcagcaagtgtgaagctggacgtgatgcaaaataaccgatgccctacaaaaagggcgcatctttaagagttttaatgccagtgcttaattcgaatgaggggattttaagtgtctgaagasgcattttctagggaccagtgggtgactgagtaactgaaatgctgctttcactccctaacaccatggatctggttgtgcataggatgtgggaggaggggctggcagggccgccttcagaggctgcagggcctcagcctcaggatgcatttaatgtatcctggccacagttgcagccaacggttcttgaaagctcggtaaggccctgcaacgcmsagcctgcttatgtggatctatttatgggaacttcttaaaaggaccccagaatagctctttatctttcacaagagacacaaattctaattgagttaattatctgggcctttcactttggatgctctgaaacatttgttgattttgtgtgaatgtttatatcaaaatgtttgccaggttgtattagccattgaatagcaaaaaactgatagttacttgcttgttttttaaaaattacatattaaaaatgcccttggcataaggcagcatggtgtggcagttaagagatgggctgtgcagcccatcctgagctccagtcctgagtttgctacttacttctgkggcctctggaaccttatccaacctcttggtgcttcagtttcctcatctgtgaaattagaatttataataattgcacctacctcccaggggtaactaaatgaataaatataataaagtacttacagtggttcctgacacagactcagcactccgtcagtgttgccatgactatttttattatcattattaatgattacttagatcaattatttagcagtggactaatggaagctacagagcagggaagggaagcagatctagggaggaaggcagttttgatttgaggaggtttgcacatgtagagaagcatactggagaagcatatccagagggcgaaagatatctctccattgtgcatctgcctcttttgacgttggaagacacatgtcttacyccccaaagggagcccagcactgggagccttcttgatgatctcaaaaataatagctattcaagaaaatcaccaagtgactgtgaaaccgtcagttcggaaggctggttagaacatgtgggagcaacatgaatgttctacaaaagtttaaagcagagattgtttcaaatgggtgtagtagatattactgaaaaccaaaaaagagtgagattgtcagtgtaagaatgtgatttaatgtttgtagtgcttacaattttgtgtaccaactggatgactaaaaagagtaaaataayttaattaatagctcatattttatgtgtgaaaacatgttagtgaacatatataatcaaaatagatttcattgctattgcatagtctctaatacatagaatgattttgcttttctcttttattatacttgctttaaaatacttgaaatatattttgcattaaatgcatttcaagttaaatgtcttaaatgtatacattagatgtgtgttttaaaatgcataaaacacgttgaaatacattaatgaaccattagtctaatgcctttatttttgaaatatcatgacgtctttttcacttactttaagattccaattcctcgttcttaacatagactcctacctgttttaatagaatatgggccattcaaaatgaattcatgcacctctctctttttaaatgtcaaattgccttgcacctaccttcttgtttcacaccttccatccaggagcaaactaattctcttctgtttctcacaagccactcaatactaaacacagggacttatacatggtaagtcttcatatgtcagttaattaatgggcatattttaaaattctggtttaaacattccccaaccaggaccaacaaataacttttcaggtataaaacagctttcttttccatggttcagatgcccttaaactgtgaagtctattttagagaatcagcacaactacctttctagggcacgtgaagaaacacctcttacatgtctgtcatgtcctagaagcatttactcattagagctatatcttctcaaagcagtgagaagccttaggccccacgtattccaaacccaggaacttgaggcatggtaagtccagggacttggtcacagttgcacacgagcggtctgaccaggttggcacaggatggcgtacggcctcctcttggagatgagcatcttggaggctgcaggcacttttctggggccgacaatttaggctaagagggcctagggcaggggcctgcggaggggaagcgggctgtctaggactggctctgaggaggaaaagagagtgagagggatgctcaggattccttataagccattaaaaacaaataggcattcaagttcagtgcagggtgaaagagcacaattgatggagcacatccgcccactgtggcctctgctgagatacagagagttagaacctccggcatctgctaggagcccccggcctgtgttgaggcaaatgactcgccagttgggtttgctggggctctcagcgaggagcagaaaggagacagttgtccaaagagaggacattagcaaaatcagtgccccaaaccaagttgaatcatagctgtaaatactcagaggaattaacctgtcaccttggtctgaagttcagctgtgagggaggggacccagggttagcagaagccatctgagcagaagctgctctgagcagtgtgaccttaagcaatgcaaggatcttcaaagagtgaccaagccacagacctaacaggaaactcatgggcaggacacagggccctccagccccacctgcgtgccatgctgatagtgatcacagtccaggctgggagcttaagaccaacacccagatttctgtgtgagacttttgaaaatttttatctccttctggcatataactcgcgggtgcacagacacaccgggagaacaccatacctcatttacgtgattgctacaatttgatgtgtgtgtttaataattaatagtgaacatgttaactgactttcaaatagtggcttgggagtcttggggttcctcagaggtgactcagggaccatcctggatggtggaatggaaaattggagaacatgggagctgggctcctggatcttccctttcacctcactgctcccaccccctccacataccacaactagagccacactgcttttatccatattgtatgttgaggactcacataacattttatttaacagaacagaatacttccgaggaggtcatggtttagatacaatgaatataattctttctagccagtttaaacagaaatcattacagaattatttggagagatgaagaaacggactctaggctcctcttccagggatgtcttccaaagtcatatgaaaaacctaggctgccaaatagagctgttgatcttgccacaaccagaaagaaatctgtgcaaccaggaagctcttgctgcagctgccagctccagaaacagataggctgaagtctaagttgactgagagccatctaatatggaattgttgattgagaaggccaattgtgcacctaactgagactgccaggagcagcagctttgagtggcagtcttaacaggaggtgaggcggggcactgccattcaaacattggtagaaatggcactgcaggcgccaccttctgatctaagccttttgctttagatgttctccaagtgaacactattaagatgagagatgagacaatagcagagcacagaggtcagtaagtcaatgccttaggcctagagttttttctccagaagaacatttggctctggttacttgcacgtgggcctgacgagaaaccatcttggtcatagggtgaccttggaaagaaacagactaaggccacttatattgggttttataccacttataaccagacttaatatggacaaatataaactccaaaacatgccttagaaacaatgccctctataacgaaactgactttagaataattatctcaaacggcctgtgaaaatgaatgaatgaatgaatggctttttagaaatatgtgtagtaaaagaattagctttaaaactttcaagattctgttacattgtttatttctactcagtgatcatgtgcactgtgtacagaatgaaattaaaagatgaatgaaggtgttactaagatatgatccataactggcttgcattttttaacaaatatacatgaaattaagcatttatatgagagctgtcctcttggaagtaagcatgtaagcagatcacacactttctataatgattttcttgaatcaaaccacttttaaaattcatctttagaaactcacaaaccaaggcacaaaatagccaatacccttacattttcattctttagtcatgtgtttttgaaattaccaaagtcacttgagctaaggctgatgagtaatggtgataaccaagttgatttttttaaaaatcaaaaggaagttgtgatgttaaagttacatttgttttctgcagtgagttgcaaaccagttactgacttttcaagttgtttctcttgattttcagtgttatcatattattacattcaaattgtgaaacttagaaaaagtatggccaagagggaattcaagttcatattaagcaaagagagaaaaagagagcacttggctgctttaactttacattttaaaatgtttattatgaaacatttgaaacatatggagaagtagaaggaaatatgcaacaaatattcatatatctacaatccagactcaaagattgttaacattttcccatatttaatttattcctgtctttttttcatactggatgtttttgttgtaggtttgttgcatcatgatgacattactcttgaatacttccgcatgcatctccagtaaatagatgcttatcttcaaaatcacgattgccaacatttaacaaaattaacaatcattttctaacactaaaattgtctattttgggccatcttcaggtggattcctaagttcttttgactccactgtagtatttttgatcatttcctaattttgttgttgtgattttctgatatgggaaggtgttccaggcttgttcttttcttagtcccggacaaagccatttctctaaggagccatggttcctttcagtgagaaattgttttcggagaccacaatttgggtctaacagttgcacactcttaactgagttcatcaatgtttctaggctttctgagtagatataataaggaaatacatatacatccataaaatgaattataaattaatactgaaaatccaatttaaatttaggaccgcaggttttacttagcttcatcaactttacattggaatcactgccacacagaaaattccagttcccagtggcatcaacataattgttaatttgctttatccctcaatgtacatatatccaaaaggcatatattgcagaagaattataataccaacacatcctttaatattttgtttcctaaaaatagttgaaaacatttttgtactattttatcccttgagaatatttcactagaatatagagtcatcattgtattctaaagttatttgaaattattcctcttattgtggttttgtcagttaaacatatttatttgttttgttctgatttttaggaattgatttttaaaattttattttgttttataatagggcaaaacatttttcaaaatgatgttggtttatccttctatatttttatataagtaaatattcatgcatatttatttcttgtcacctctcacagataaatagtagagataaatagtagatattatatacaatttctccccttgattttaccacttgataatatattctagagatcactccataattgtacatggaactatttctgataaatactttttttatacagatacatggtataccattgtgtggctgtactatagtttattcaatcagtcccaaatatttccagtcttctgctcttagaatttatgttacaaagaagtcttatgcatgcatatttcatgctttttccttagaatatttttgggatattagacataggattgctgggtcagagggtaatacatatgtaattttgctccatattgcctaattcatcttcataggggttgtaacattttgtattcttatcatcaatgtcttggagtgcttgtgccttagctttggcccatttctctacagagattttgatctctttcattatcattgtgggaaggtttttacgtggtagacatattaagactttgtgatgtaaattgcaattgttttccagttttttttctttgcttttagattttaaaagaattaatccattctttcaatacagatatggacacatttttcactttaaatcttcaatccatttggaatttactatggtgtttagtctgagaaatggatccattgcattgttttcatatgtctgtgtatttatcacaacacctcttcttaaaaagttcatttttttacccactaacataagatgcccatttaatgtctattcaatttccatatcctattagacctagttctggaccatctattctgttccattggtcaatgtgttttaaattgacacataatgattgtacatatttgtggggtacactgtatgttttgatacatgtgtacattattaaaactgaaatcagggtatttagcatatccatcacttcatacatttattgtctttgtgatcaggacatttaaaaccctctgttctagctatttttaaatctataataccatcttgttaaccataggcaccctatgtgcaatgaaacaccaaaatttacccctcctaactgtacttttgtacctataggccaatttctccctatccttctgcttcctagcctctggtaaccactatcctaactctctacttctatgtgttcaacttctttagattccatgtatgagtgagataatgcagtatttatctttcggtgcctggcttatttcacttaacataatgtcctccaggtttatacatgtggcaaatgacaggatttctttttgttaattggataaatagtattttattgtgtatacatactccatttcctttatgcattcattcactgatagacacttaggttgattccatatcttggctattgcaaatagtgttgcaataaacatgagagtgcagatatctctttaacatactgatttcattttgttggggggatatatactcagcagtgggatttctgaattatatggtagttctgttttttaattatttaaggaatcttaatactattttccataatggctgtactaatttacattcctaccaacagtatataagagtttccctttctccctgtttgtaccagcatttgttatttttttatctttttgataattgccattttaattgaggtgagtttttatctctttgtagttttgacctgcattttcctaataattagtgatattgaacatttttttcatatacctgttgaccatttgtatgttatcttttgagacatagctatccagatattttctcca

SEQ ID NO: 8912 - DNA, 12607 bp, Homo sapiens
gaattgaattaagaaaagaatttccatgagagatatgcatttacaattttgtagatttaatctttgcatagacttttttgttgcagatactgaaaaggaatccataaaaatacatagatccctttactagccacttttaatttacggatgaggaatattcagttcacagactggctagcgctttttagctttctttagcgtttgaagcagggcttctaagtcacatgaaagactagactagttattggcatttaaattttttggctcctacttgtatgtattatttattaaacaagtagttattgcactacctttatgtatgcagcactgttttagacaaaatagaattgtgacatattccttgctcatggtcttgtttcaaagacaatacctacaactgaaagaattaaataatagagccaggcaatatctgattgaggaaaagcatgcagtaaaagttcagagaagaagatacacgtgcagaactggaatggtcagtagttgcttcatgagatggttgcactgagctgaacccttaagtaaggatgtggatacatgagaaggaagaagctggaaattttaaacatgaggagcttcatggggaaagaatttcaagctatcaaaagatatcaaagattgaggaatttggacttggtctgggaggtattggggatcttgaagatttgggggtagggaagtgatatgacaaaagctgtgtttggaaggcacaagtgaaacagagttgggtttttttgtttgtttgtttgtttgtttttttcagacagggtctcactctgttgctcaggctggagtgcagtggtaccatcttggctcactgcaacctcaacctcccaggctggagtgatcctcccacctcagcctcccaattagctgggactataggcatacaacaccatgcctagctaatttttgtatttttttttaatagaggtggaatctcgctatgttggccagcctggtcttgaactcctgagctcaagccatcctcccacctcagcctcccaaagtgttgagattatgggcgtgagccactgtgcccagctaaaagagagattttgatagcttatatgatttgatgactgaataaaaaataaagaggatgaaaaaagtgaaaaatgaatttttggctgataaatagagaaatggaggtattaaaagaaattgggaagagagactctgtttcaggaggaagagggattagcttgatttttggatttgatgaagatgtgaagttaggtgaccagacctcgattcagattttagaatcagactctttgatttggtgtcattaacattgattgaagaatgttttgaaagctgaggtattaagaaacaacacaaaggtggagtttaaaagaggaagttgagcgtttggagagagtgccatgccaaaggaggggacttttaagaaaaggaagacaacacttagtacttctgtgtacccagccttgtaggaataactttacctgtgtaatcttattttattctcacagtaccatgtaaagtatgaattatcattgtccctatttgacaggtgaattaagtgaagtttattgtggttaaataacttgcctgaatgtcgtgctgctggtgcaaggttaatctggatttaaactgagatctgtctgtctaacccccaagcccacatatttttttaattgaaatgctgcaaaatggtaatgaaaggtcaagaagaataaaaaaaaaaagagtaaggccattagaatgttcaaggagaagatcattgtttaagattataaaagcgtagtggtaggaatatttcagcatttagaaggtaatagtaaattaatggaggaagtgaccctagaccattgctaatttgggcagcgagtaggacagttctcttctgaggcagctgagtcaagtacagcagagaagagtgctcatcagtggagaaggtgggaatagtgttggagaggtctcagaataaacattaagtaatcccagcactttgagaggctaaagcgtgtgaatcacctgaagtcaggagttcaagagcagcctggccaacatggtgaaatcccgtttccactaaaaatacaaaaattagccacgtgtgttggcactcacctgtaatccccgttacttgggaggctgaggcaggaaaatctcttgaacccaggaggtggaggttgtagtgaaccgagatcgtgccactgcactccaggctgggcaacagagcaagactctgtctcaaaagaaaaaaaaaagaatagacattaaaaagacacagacgatgtgagaaaaaagactgttcccaccaagtttagaagaaaggataatgaggttgatgtgcctgctgtgccggggggataagagaaaggtgtcaggcaagaatagatgtataaaagcactagttacaactatactttgaaagtcatattttacctggaagaaatctcaaaaaacaaagactacatggcagttaagtgacccaaatcaagtcactttccctcttcaggcctcagttttcccatatgttagacaggttaaattaggtgagacaaactgatcttttaggaccattctataatactgtgcttaactttctaagcattctggaatggagcagccttgatcttttcacagatacgtcaaccatatagctttatttataaaacgaacatgttgagataactaaaattagagttaatatcttcataggtacaaagaaacttttagaacttaagtccacaagtcagaatttctggatgaattcctttttcctcttattaaaaattgttaagatgtctgattagactagttgtaaattcccttgaaagcaaggatgatatcctgctctctactgtgtcctcagcatcaaggacagtgcctaacacagaacaactaccaatgaatatttatgaaatgaatgaaagtttgaattgcaaaattaaatgccaccaataaagaggctttgtgagcgagcgtggtggctcaagcctgtaattccagcactttgggaggctgaggcgggcggatcacttgagctcaggaggtcaagaccagcctggccaatatggtgagaccccgtctctactaaaaatacaaaacattgtctgggcgcagtggctcacacctgtaatcccaacactgggaggctgaggtgggcagatcgcctgaggtcaggagttcaagaccagcctggccaacatggtaaaaccccgtctctactaaagatacaaaaattagccaggtgtggtggcaggcacctataatcctagctacttgggaggctgaggcaggagaatcacttcaacccaagaggcggaggttgcagtgagccaagatcacgccgttgcactctagcctgggcgacaagagcgagactttgtctctaaataaataaataaataaaagtataaaaaacgagccagtgtcgtggtgtgcacctgtagtcccagatactcgggaggctgaggcaggagaatcgcttgaacccaggaggtggaggttgcagtgagccgagattgcaccactgcactccagcctgggggacagagcaagactctgtctcaaaaaaaaataaataaataaataaaggcttagtatagaactcttcccagtcttttttctccactttgattttttttttttttctcaatctcttccatgacaattcagggacacattaattgtgcaaaaggcagtcacttgtctgtattgtctatttttatatcacttaaattggtttttcatttggttgctatgttgacattttatgaaaagggaactaaacttgtgaattgactgacagtggaaatcataggattttcaaaaataagttttgtagttacttaaaaattagtattccagttttcggtcgttcattagtttaaatgttaccaataatattttctttataaaaagaaattatgttttatattgtagaggaaaaatgatttagaaaaacagaaatctatttctgaacaaatttagtgatgctgatgtaagaaaaagaaaaccacaagaagtcatcccaaatttagtaatgcttcctatcttaaacacatgatttcacttgtcttctggctagctaaaggttacaaaatgtcaccataataccttttacttccttatgagttcttgctactccaccccctacccccaaatatggtagatcgagttgtaaaaaccctgaagtatgacaatatagtttattgcacttatagttagaattattctgccaagatgagctgagaaatggaggaaatggatttaaatttacagcagtccagtgatacacaatatgcgttttccagaccactgaaacagcaagccaacttttaactttaatacttcatacagtggaaaagttacagctgtaataaaatcaacagatacatctctggttaatgttctcaaatgagaaaattgactgcaagaacatttgtccaaatacatgtttttatatattttatgctactttccagaatattaacagttttacatagcgctgttttggaagtcactcattgttttcatctttctgattaagaaatagggccaaagttgtacattgcactagtagtagacttttaaagatgtctttgtctctttttcagtactaagcttcaagttcatagattatccttgatctttcctttccctaggtagagatttagagtatttgtttatgtgagatatatataaaaaaaaaggagattttaacaaatgactgtttgattcttgggtagaaactaatactgatcaagaccaaccaagtattcagacaagatcgggcgtgttcagggtggtacggccatagacgacaaccaagtattcaaacattgagtgttcagtggaggctgtacagatatcctgggttttgattcaagatagtgagatagccatcctatgagaatgtgaacttgaaataagattttgattacttttttttcctcctttaaaggtttgttcaattttaactattttttttcaaaatctgcattatcacagtatattttaaaagaatgactaatttactgtgatatatttgggagttaccttgaaagagattatcttgtaatttaaaataccagaggtagagtgaagagtcaggtggtaaaagagaaggagactggatgtttgtacccggtttgcttcttcccctttgttctgctgctggttttattttagctgttctgtttgcctcaccgcaggcagcgtcaccactccggttccaatcttctggacgtagagttttcaaaccatctataaattagcagtctaagtggaactttggcaaatgaggttgccaacaagcattttctttatatttagataatttgagctcatggcctctgggcatttggtaagaagtccagtaaagagaagcctaaagaacagaatctttattatgagtagtcgcctttttccactcagcagtttgattccaagcaccctgagaaaaactagagacatagtctagttggcaggttttttgaagagaatgagaagcccaaaccaaaagataatgaagaccacagcagagaactaccgaggcagctggcgcagatgcttttttggcactgttgagaaaggcttcagacccacagtctgaagagatggagaacccctcctccaggagcaaggaataagaatgacaattgttctgtaggacagttgacttagattcaggaaagttcttcagaaaatatattcagatcacaaaaaaggtgttaaaatcccaggatttttcagccaaggatggcacttgcttctttcagcatcactcatcaagttgaaatttatgagtgtcctttgttatcacaaacaaagcaagcaaactgaacaaatgagaatgcttctttagtatytacatagcactttaaaagctctgttttctttacaaaatgtgtgtatggaaaggtaaaatgggaataaatagtattaaattctgttcttagaacctactgtatagtgattgaacagctaaacagaacgaaaaagcatgcacatcttacagatacagagatcatgactttggtagatgagactaacatgtatgaaggtgtaggaagaakgtttatttttcagtccaaggaagcaattcacaatcaactgttagagaagcagcaaatagcgaagaaaaaattaaagaactagaacagaaaaagtcctacctggagcggrgcgttaaggaagctgagaacaacatccgggagatgctgatggcacgaagggcccagtagggagcctctctgggaagctcttcctcctgcccctctcattcctggtgggggcagaggagtctctgcagggaaacagcttctcctctgccctgatggatgctttatttggatggcctggcaacgtcacattttctgcatcaccctgagccccatttgcttcccagccctggagtttttaccctggctttgcctgccacctctgcccaggacactcttccctcttggggtgtgtgatgaactcccaggagaggaaagatgggagccagggcaagataggaagctctgcctgagctttccactaggcacrccagccagaccaataaaaagcatctgtcccactctgctaagcctgcttttcttgagcagagggtgagagaggcagtggccatctccacctcagctcctgctccctctgcatcagagcccttcctttcttgggggatgggctcttgccctcttctcttttcccttcctgtatctttgactaacgcctcagctttcaggcctacatgtagcagacagaagaggaagaaagaacagacgttcacagctgaatctcagtgaacagaatagcagtccctggatggcagtctgcctaaagattcctttccctgccttctcccatacattccaaaaggaagttcaacagtcagcagcacctccaagactgtctccttttggccaatatcataagatggacgccgtaatcctgaggcctcctagaggctgagggggcaatggtgtgctccagctggctcatcccagcccaggtgggccaattattcaattttcaagaattttgttgcaagccagttgttaaacacagccattataattatgtaaatttgcaaattatgttaaaaacaaggacaataaatactcaaaatgcaaaaaaaaaaaaaaaaacctactgcatagtgtaatagtgctctcacttttctctccttgattctgatgtcaatcactcattgtcacctccactagagggggataaaaaggataataggaaatcagaatattttgatttgtagttcaactgttgatcaattatctttgagacttttaacattcatgactaaggaggattaataattaacatgagctgtagaattaaggtttgtatggcatgataagtataaaccagttttgggaccgctataattctaaaaaagcaggtagactagatgattagttgtacacttattactgctaattcttgattgtagaacaaattttcctatgaaaaccatgttgtgtattttatatctctattagttcgttaaaagtttagcagttttagatgtcgaaccagtaaaaaacaagttgcccattctatcatttttttttattgtggtaaaatatatttaagataaaatttacgattttaaccatcttaagtgtacattggtacagtggcattggttacgttcacaatgttgtacaactgtcatccctatctatttccaaagctttttcatcacccaaacagctctatacccactaaacaacaactccacatcacccactccccagccctggttatctctgttctactttctgtctctatgaattcggatattccagttgtttcatataagtggactcatataatatttgtcctttttgtatggcttatttcatttagcacagtgtcttcaaggtgcatccatgttgtagcatgtatcagaatgccattcctttttatggctgagtaatattcccttgcatggatatataccacattgtgtttctccattcatctactgatggatacttgggttgtttttgccttttgctattgcagataatgcttcagtaaacattggtgttcaagtatctgttttagtccccacttttagttcttttgggtatatacccaggagtgaaatgctgggtcacatggtaattctgttttgctttttaagcaactgccaaactgcttttcacagctgctataccattctgcattcccactgcaatatatatgggttctaatatctctacattgctacaacacctttttttaaaaaaaaaaaaaaaaaaaaagctgtcctattaggtgtcaagtgttatctcattgtggttttgatttgcattttcctaatggctgctgatgttaagcatcttttcatgtgcttattggtcatttgtatgggttctttggagaaatgtgtattcaagacttttgtccatttttaaattgggttgtttgccttttgcctttctattcttctctcacttttaaattgattttctcccatatttctccacaaagtcaaaaagatgatttcatttgaacacagataaatgctgtcagccttccattgccatatacattgaattaaggtcaaatgctttttgtgctgttgctaaaatcacttgagaatctgtctctcttcaactgaaagaattgttctggatgcgttgatgctgtggaattccttgtactctctcccaaatctcatttaacaagctcacatttagggtgtgattcactgtgaagtattccagaaaataaaatccattttctcagaatgatgagaaattttacaccttgaagagaccatctcttttccaaactgagatccacagattcttggagatccacaaatatattcttgggctctgagagttttagaattttaaaataatctgtttttatatcaataatctaaaaggtcattagaaagcccacatttcacaatacaaggacattttcctggaatgagactgttttcttacattagtaagatggaagtgacttgcctaagataacacagcaagttaaaaccaacactaaaactcatctttggaagcttttctcagtgttctttgttactagtgtggagatcttgcaatgattctgtcttcattaagtctacaggtagtggggaaagcagaaaaagaacaagtattaactaaaatgatgagtgctgtaagggagagaaatggcagtatgagttgtgtagaatgagagcagttgcataggatgagttaagttactgtgagagtttgaggaggtggtttttatgccgatagttgaagagtgaattggagttaccttaagggggttgtgagaagaaccatgttacagatggaggaaatgagatgtgaaggctgtgatgtgggaaacagcttagtttactccctgatttaaatggagaaaaggaatccagtgaggcttcagagagaagcaagaactaggttattcagggtttaagacaatcaaaagtcaaaatagagtttaaacaggggagtgacataacctgatttgcatcatgctggctgtagtatgcagaattgattggagaggcaaggatggcagacaggacgccaggtgggaagctatggaaaggtgcatatggaagaagagagtgtctttggattccagttggtaagtggaagagactgaagcatgtggctgaatgtaaatgtttaataagtagaattaaaaggacatggcgattggtttgatggggatgtctgggccttcaattatgactccctgtttttggcaatgatcagctgggagattggtggcagcatttactaagacagggctcattgaaggaggaccagttttagggaatagaggatgaatggagtttttaacctgttgagtttcagttgcctgtgagatatttcaatggagttaccaaatagatatttctatgtagtgtcaaggttcagactagaggactgaggcagagatataaatttggtcttaatatatccatagtgcttgaaactatatgtgtggagatagttatatactaatggttgtcaaattaagcattttttccaattcctttcccagaatctagtcatgtgaaatgatgaggaactggaatgtacagtgtatacattgttcttggcaaaactaaatttaaatttctgcttaacctaatcaaccaaaaagccctttttatttctgcctgtgtaaaatctttcttcaacatattaagccatttttctgtcttggtaaatatgatagggtgaaataaaatttaaattgaatttagatagccctgaattgatgattcaagaacttttagaatcttagttttatttttgagtagcaaataacattatactgtagatataaaaaatgttgaagattatcccaggaagtgctctggaagctgcttttaaaaataaataacttttaaactgccttttctcccttagcatttgcccatttgttctaaaggtagaagaacaactttcagtgtgttaagggtttttaatagttaatcacagttatatggcatttgtttttgtttaatatgtggatttttatgtaatgccacccagaggcctaggtatatcagtacattcctcagcattattaatgtcatccaaatagattgtctttgattactgatcactgactccatatatagggcagtgatttcaaaattattctactaccattgcaagtagacatgtatacagtaaagaaccatccaaaggccaggagcagtgactcaggcctatagtcccagcactttgggagaccaaggtgggaggatcgtttgagcccaggagttcaagactagcctgggaaacatagtgagaccccatctctacaaaaaattttaaaaattggctgggcatggtgggatgcatacttgtagtcccagctacttgggaggctgagggaggatcgcttgagcccgggaggtccaggctccagtgagccatgttcacaccactgcactccaacctaggcaacagagtgagatcctgtctctaaaaataaaaattctgaaaagttacatctaaattaggtttgagtaaatgaagtcatgagccaactgcataggtgatctttctagtggtagcaataccaaagtgggccttgtaaaaacaaacaaacaaacaaacaaaaacacccttttaaatgtagttcagggagaaggaagctagtatttcaacttactgtatgccaagcacttctaagtgctttacattattctctttaatattatttcttatattcatcaccacaatcctcatttacaactgaggaaacagaaggaggttaaatagctttgcccaaagttacaccactggcatgtggtaatgtagggcttccagcttgagtatatctaattttatagccatcattctttctctttccatctctgtatctctctgggagtcaggagacctatattcctgtgtttttgttgttgtcgttttgagacagagtctcactctgttgctcaggctggagtgcagtggtgccatcgtggctcactgcaacctcaacctaccgggctcgagtgatcctcagctgtgccatctcgctatggaaccttggctaagccacgttctgagctatggtaaagcacagtaataggttcacattcactctcccccatcatgcttatgccccctacctcgtctagaaggctccacacttcctttctgtgtgctcgttcattcagtcgtcagtcatttcgtcagttagtcagacaacagactttgttcatacgacattagtgactgaggttctgttgagtgacgcagataggaaataacctagctgcatggttgctgtctttcaaaaggccgtactcttaggatccacatacaggcccccatcttctgtgaagccattgtccccagccatcccattttgacgagtttttttgagtccctgtgaaactttggcttttttacatttatctggcagttaactaggtgctgctttgtgacagttcttctattattggatgcaattcttaattcaaatcatgtatcattacttaacttttcacctctttgcagcttctttctcccagaagattacaagttccttaagagcaggcttatacttctttgtataatatttcccacagtgtctcttaaatagcaaagttttttgacctgatttactaaaaaaaagtttgttgacttggcttaaattttattttcttttctttttttctttttttttttctttgagacagagtcttgctctgtgaccctggctggagtgcagtggtacgattttggctcactgcaacctctgcctcccgggttcaaacaattctcgtgcctcagtctcccaagtagccaggattacaggtgcccaccaccatgcccaaccaatttttatatttttagtagagatgggttttcgccatgttgtccaggctggtctcgaactcctgacctcaagtggtccaccctcctcggcctcccaaagtgttgggattacaggtgtggaagccaccgtgcctggctgacttgggttaaatttttaagtttagagtttactccctggttgaatgatttgggccaagttacatagcttctgtgaacctcctcagttttcaacaaaatgggaataattcctactt

SEQ ID NO: 8913 - DNA, 41399 bp, Homo sapiens
  misc_feature (1)...(41399): n = A,T,C or G, or insertion/deletion polymorphism (see Tables 1-2)
tggtgaacccttgtctctacaaaaattagccaggcatgatggtgggtgcctgtaatcccacctacttgggaggcgaggtgggaaaatcgcttgaatccgggtggcagaggttgcagtgagccgagatcacgccattgcactccagcctgggcgacagagtaagactccgtctcaaaaaaaaaaaaaaaacccaaacccacacaagatcaacctacctcttgctgcccagcttaaactagatgacaaaagaaagatttccatacaaagactggcagcttcccatctatacctcctggctgcaaaaactactaaaaaaggtacttcaacaacaagaaaataaacgtataagaaacaagcaaaaggaaccatgaggcaaaccaaacattactccccacctcccccttttttttttgagacagggtctggccttgtcgcccgggctggagtgcagtggtgctatcaccactcactgcagcctcgacctcccaggctccatccttctgcctcagcctcctgagtagcagggaccacaggtgtgcgctgctatgactggctaatttctttttttttttggtagagatggggttttactatgttgcccaggtgagtctccaactcctgggctcaagtgatctgtccaccttggcctcccacaggctgagattacaggtgtgagtcactgcatcttgccagtaaatagatatatgtatttttaaaaaggtacaatggccaggtgtggtagctcatgcctgtaatcccagcgctttgggagttcaaggcggggcggatcacctgaggttgggagtttgagaccagcttgaccaacatggagaaaccccatctctactaaaaatataaaattagctgggcgtggtggcgcatgcctgtaatcccagctactcgggaggctgagacaggagagaattgcttgaacccaggaagcaaagtttgcggtgagattgtgccatcgtactccggcctgggcaacaagagcaaaactccgtctcaaaaaaaaaaaaaaaaaagtaaaacgaatcctacaagactatgacactatgacagggaaactagaaaggggccttcagagggtattccaacactagttgtagctatttaaccttgttattttactaaaagatcagataacttccaagtcagcgagggaaaacgggaggacagagcggaagctggcaggaagagtgatgccaagacaagccaacttacaaactgcccctcgtcgatgcctatgacagccacgcccagggcctcctgggccacgtctcggagcaggcaggcgggcagtgcctccatggtgttcctgggaagagaaagccagagcgtgagcagggccagggaggccagaagccacaatgcaggggccagggaatggcactgtcgtgaccacctgctacctgcaaagcaggctcagtgttcacccagccgggctttgagaagttagcacctatgggaaaggccctcgtccagaaaaccagttatttatttattttttatgaaacagagtcttgctctgtcacccaggctggagtgcagtggcgccatctcggctccctgcaatctctacctcccaattctcaagggtctcaagcgattctcccacctcagccacaagagtagctgggactactggcacacaccatcacacccagctaatttttgtatttttagcagacatggggtttcaccatgttggccaggctggtctcagactcctaacttttaagtgatccacccgccttagcctcccagaggaaaaccagttatttatacaagccacttcacttgatgctttggattagaaattagtaatgtccagtacaaagctcaatgagactaaaaactcttccactgttcaggagctgggggcagactaggccaacttcatcaggtaccagggcccatgataccattaggggccagccaaatgtttccttttaaaattcagaagaatgaataactagaactgggcctgggttatatttgtctttatattaattatgttgcaaaacataaatttttaaaatcctgtattctggccagacacagcagctcatgcccgtaatctttggggaggccaagacgggaggatcacttgaactcaggagttcgagaccagcctgggtaacacagcgagacactgtgtgaaaaaaatgtaaaaattaactgggtgtggtggtgtgcgcctgtagtcccacctgctcagggggctgaggtgggacgatcacttgagcccaagggtttggggtcacgtaacagtaagctatgattgagccactgcactccagcctgggtgacagagagagaccctgtcccaaaaacaaacaacaaacaaacaaaaaaacatactttacaactattgtttcgttattaccttgctataatcctacttcgagttctggaaagaatgtgtgaaacagtattttgggcattttaaattccctcttccctccctaaacagagaaagacaaagtgagggcaggtgggaggccagctgtggcccctgcaagggcagcctctcgagccatcaatgctgctggcccagccttggcctctgtggcccgtgttagagatgacttgtgacacacgggcagaactcatatttaatcccggatctgactgactccagaagttgtacttccaacagctggaacgaagtgacctcctctgctttccctgtccccaccaggtgtaacaccaccctgtgccgtggacatcgcatcttaggaatgaggaagcaaatttggaaaagtaaatgacctacatcagacagcatggtcacgaagtgcggttaaattcccacatgcaactccaagccccaagcaccctccactccaccagcatctggcttcaggagcccctcagctcccaccgaaggccacacgccgggtggatctgttctctgcacagccatagcaactctcggatacagctcccagccagggctctgaggctgaagccctataatgtgtggcacagcatggctttgccactgggtgcccaggtggacaagtccagaggaccaagcaaagcgtctcaggctcagaaacatcaggcccacatctgctgccaaggaagtgaatttaactcccaaactgaggttgcaggcggaaatgtccagcgagctcaaacagctacacataaaacagggaagcgtgaaggctgccaggtgacgggggagccagccaacaacggacaactaaaaaattaaacaaaaatcaacgtgcaggccaaaccaaaccagtctgcagcctgtgtgaagctgaaaccctacggcagagtttctgaacactggcaggctcctgacatttggggccagctcgttcttgcatgggggccgtcctctgcaccataggacccttagcagcagtgtccctgatttctacacattaaagcccaaaagcatcccctcccccctccagttgcaacaactagaaatgtcttcaaacattgtcaaatggaccctggcggcaaaatcaccctcagtggagaaccactggctccagcccagggagtggagagtgtgcgctaccttgccaagcaccttggaaagtgtgctgatttgaatcattcaatgttcaaatgattaaccatccccattaaagagagtcctaacagtgtgtcctgtgccttgtgattttccactggacaggactgcagggggcagggactgaccggtcatgtgtgcagaagctgctgctgtagcgagtgtctttggcatacttgatcaccaggcacttgtactgagcaatctggaagcgacggacgcgtctcatcaactctgtgctgcaagaggagagagggtcaggtgaggtccacggcgggaggagtgggagaaggagacccctccccaacaagcctggctcctcattgtccctagtggtatgcagactgagcccaccacagccagaaaagagcagggcagagcaggcagggtataatatccctacaaagagggttggaagtcagaattctctatggggaagaggtccaggaatggtactcaggtggtcccaggaagtgtgggaggagtaaccttctccaagatgtagtggggaaggcagaagcaaaggctacatgtagagggaacctgcgactgcattccaaagtaacctcatcccagagttgttcccagagttcagagtttttctttctttctttttggggtggagtctcgctctgttgcctaggttagagtgcagtggagcgatctcagctcactgcaacccctgccttccgggttcaagagattctcctgcctcaacctcccgagtagctgggattacaggaggctgccaccatgcccagataatttttggttttttttttcagtagagatggggttttaccacgttgaccagggtggtctcaaactcctaacctcaagtgatcaacgcacctcagccttccaaagcgctgggattaaaggcgtgggccaccacacctggcatacagcttttctaaattaatttcagaaagtctttgtgtgcagcgtcaaaagcacttgcttctgggtccaagaagtccaactctgagccacatcttcctgagcaaggggtttgagctgaagtgatccccagggccataaaagaatgttggggcagggcatggtggctaacatctgtaatcccagcactttgggatgctgaagtaggaggattgcttgagaccaggagttcaagaccagcttgggcaacatagcaagaccccagctctataaaaataaaataaaattagctgggtggaggcgggggggtgcacgcctgtagtcccagctacttgggaggctgaggtgagagaattgcttgagcccaggagtttgagaccagcctgggcaacatagcaagatcctacctctagaagaacaaaaacaaaacaaaaagaatggtgcgtgggtagtttactcaagaaactcactagccccacccgggtcagggaatggttctatcacctcaggagagcagaggctccacggcttcagactccttggtttagaaagcgactacgtttccttggccttagaaggaaacagccacattgaataggggtgtacaaaaaggcctggcctacaggggacacaactggttgccaccttctcagaggacttggtggggaagacagctaagctgtaagcagctgtcaccagctccaggagggagtggcgtccacacaggacgaggggcttggcctgggcagaagagggcagagacttcctcctggactgaattcaagggaggagcaccccaggcgggagctgtaggaggctgtgctggtccttctaggggaagggaaggggagggaagggaaggggagggaaggggaggggaggggaggggaggggaggggaggggaggggagggacaaggggtccccggagaagaggaaggagctccaccccagccccgcgaagccattacctttttcctgagaacatcggcccgagaatcacctaggagagaaggtgaggtcatttgagggcccgccctgcgcggatgcctggacacaggctatcaccacgaccacctcatccccagccacgcgcagggctggcccccgcacctggatctgcccccgggtcttgctgggggagccaggcagcacagtgggcaggttaatgcagctcattgcgcctccgggaagttcacgaacccgagtactctccaaggccgtcccgcagtaagcccctggttcccgcgccgaccgctttaaaccacggcgtgctggccaatcacgagccggccccgccgccatggggccaatcagcgcccggccgctgacctggcgggagatttggccgcagcccgccccctcgtgggaggaatccgggacgtgcgcccagggactgggagggcctggaaatcagggcgatggacgtggctgatcggggtggggcctggtctgagccccgcctcggtccgcccaccaagtttaaaggggcggagcgaggcggggctctggccatataaacagagggacgcacgcccatgcggctgtagacgccatgatggatgtgtctggtgtgggtttcccaagcaaggttccttggaagaagatgtctgcagaggtaggtggattgcagggagggactaaggggctggggcggagttagctcatttattagwttggaattccaagaaggaagcttagaagccgtctagagcactcctgtgggcatgcagagcgcctagtgcgtgccaggtccccagtgcttgagcaccatggtgtattttaccttctcctaaggatttttgttaacctggttttcaggataaagaaaattgaagtcctgactatgctaataatatccgtagaccctgccaggcgtggcggctcacacctgtaatcctagcacttttggcggatcacgaggtcaggagttcgagaccagcctggccaacatggtgaaaccccgtttctactaaaaatacaaaaattagccgggcgtggtgatgtacctctgtaatcccagctactggggaggctgagacaggagaatcgcttgaacccaggaggtggaggttgcagtgagccgagatcatgccatttgtactccagcctggaaggctgggcgatagaccaagacttagtctcaaaaaaaaaaaaaaaaaaaaaaaaaaaaatccatagacccgcaggaggttaggggacaaagttctggaccttgatctgaggttacacaatgtttttgggtctgtgcttatgtggcacaggctgaaggattcagaacagctggtatttacattggggttgtgaaggttagaaacatacaggccgggtgcggtggctcaaaaaaaaaaagaaagaaagaaaagaaacccattgtataatcatgatcataaataatagcaacaaagatggtggtagtgatcacagagtgtgccaggtgtggctgtaaggatcctacaggtaataacctttccaggtacagattggacagatccaaggacctctgacaaagagctccttcactgggaggaagaagcaacccacactgactggcttgctttattttactcgcatgctttatctcttttaaccttgtgatttggatacatgccttctttttttgagacacagtctcgctcagtcacccaggctggagtgcagtggcatgatctcggctcactgcaacctctacctcccgggttcaagtgattctcctgcctcagcctcccgagtggctgggattacaggcacactgtagctggtactacatgcctggctaattttttttttttttcttttgagacagagtctcgctctatcgcccaggctggagtgcagtggcgcgatctgggctcactgcaacctcttcttccagggttcacgccattctccggcctcagcctcctgagtagctgggactacatgcgcccgcaaccatgcccggctaatttttttgtatttttagtagagatggggtttcactgtgttagccaggatggtctccaactcctgacctcatgatccgccccccttggcctcccaaagtgctgggtttacaggcatgagccactgcgcctggccaatttttgtatttttaatagagatggggtttcgccatgttggacagactggtcttgaactcctggcctcaagtgatccacccgcctcggcctcccaaagtgctgagattacaggtgtgagccactgtgccgggcctggatagataccttctaccagtcaggaaactgaatctcagagactaagtaacttgttgaggataaaacagtaagtaagtgagggaggtcagatggcatttgacctcaggccttgccatgaggctgccctgacttcccatttctcatgatggttttgagccctttcttcaaaatctggttccttgttacttttttttttttttttttttgagatggagtctcgctgttgtcacccaggctagagtgcaatggtgggatctcagctcgctgcaacctccacctcccgagttccagcgattctcctgcctcagcctcccgagtagctgagattacgggcgcccgccaccatgcccagctaatttttgtatttttagtagagacggagtttcaccatgttggccaggatggtctcgaactcctgacctcaggtgattcacccgcctcagcctcccaaagtgctgggattacaggtgtgagccaccacgcccagtgttttgtttttttttttttgaaacagggttttgctctctcaggctggagtgcaatggcgcaatcttggctcactacaatctctgcttcctgggctcaagcgattctcctgccttagcctcccgaatagctaggactacaggtgtccaccaccatgcccggttgatttttcatatttttcgtagagatagtgtttcgccatattgcccagactggtctggaactcctggactcaagtgatctgcctatcttggcctcccaaagtgctgggattacaggcgagagccaccgtgtccagcattttctgttggtttttttttttttttttttgagatggggtctcactctgtcgcccaggctggagtgcagtagcatgatcccggctcactgcaacctctgcctccctggttcaagctattctcctgcttcagcctcctgagtagctgggattacaggcgcgcgtcaccatgcctggttaatttttgtatttttagtagaaatggggtttcatcatgttggtcaggctgatcttgaactcctgacctcgtgatcccgcctccgcctcccaaagtgctgggattacaggygtgagccaccgcgcccagcctctgtttttttttttctttttttaattctccaaactgcctcagaatggttccttgttactttctgcataaagtgtgaaggtgttagcccgacattcaccgcccctcctcctccagcccagcctcccagcctcacctctgtgtgtcagccatagggcctgccagcatttgcaaactgacctttcattccttcctcctcacctctgtgcctttgactgtgcagtgacctcctgtggtcagaatcgcaccctctcagcgcagatcagctcctccttttttaatttttttgaggtagagtcttgctctgtcgctaggctggagtgcagtggtgcgatctcggctcactgcaacctccacctcccaggcttaagcaattctcctgcctcagcctcccaagtagctgggattacaggtgcacaccaccacgctcggctagtttttgttttcagtagagatggggttttgccatgttggccaggctggtctcaaacttctgacttcaagtgatccacctgcctcaggctcccaaagtgctaggattacaggcgtgagccaccgggccacctggcctcccctggtcgtaactgctgtgggagtggtgcccatgatggcattaactgaattcgtttgggggacctcatctccccttaaggctgccagctggctaaaggcacagcggtcgctggtatacctctagaccatggatctgagggcatcttggagaccctgggatactggggcgagggcttctaaggcagagaggagcagccgggcatgggcgagggggaggggcacactctgttgagaaggaaagtcttacggagcctcatgtttgtgccctgcaggagctggagaatcagtactgtcccagccgatgggttgtccgactgggagcagaggaagccttgaggacctactcacagataggaattgaaggtactagtgtgacctctccgtggccgcattgggtgtccttaagcatgtggcagtgattcagaatgctgggggttgggggggctgtgctgcaccacctgggcctcgaggggcatttcccaaacaccaggcactttataaacctccctgctcaggggcaggtgcccaggaccccttgctgcagggactactggaggcaggagaggtccgggggaggtccacggctcagtcgaccatgcctggcctttcttgctcagccatccatacccaggcccgtaaggctgcgggctgtggttggcatagggaggtgaagtgaacagaggaacgttccccatccgctgctgaatgtggaatgcggtcactattcctaaaaagcaatactttgggaggccgaggcaggtatatcacttgaggccaggagttcaagaccagcctggccaacatggcaaaaccctatctctacaaaaaaatacaaaaattagctggacacctgtaattccagctactcgggaacctgaggcatgagaattgcttcaacctgggaggcagaggttgcagtgagctgagattacatcattgcatgccagcctgggtaacagtgagaccctgtctcaaaaaaaaaaaaaagcaatgaagcctcttttttttttgagactgagtcttgctctgttgcccaggctggagtgcagtggcgcgatctcagctcactgcaacctctgcttcccgggttcaagcgattctcctgactcagcttcctgagtagctgggactataggcgcacctctccacacccagctgatttttgtatttttagtagagatggggccaccatgttggccaggatggtctccatctcttgacctcgtgatctggctgcctcggcctcccaaagtgctgggattacaggcatgagccatcgtgcctggccgccttttctttctttcttttttttgtttttgagacagagtttcgctcttgttgcccaggctggagtgcaatggcatgatctcgactcaccgctaacttcgcctcctgagttcaagtgcttctcctgcctcagcttcctgagtagctgggattacaggcatgcgccaccacgccctgctaagtgttttgtatttttttttttttttagtagagatatggtttctccatgttggtcaggctggtcttgaactcctgacctcaggtgattcgccctcctcggcctcccaaagtgctaggattacaggtgtgagccaccatggctggactttttttttttttttttttttgagacggagttttgctcttgctgcccaggctggagtgcaaaggtgcaatctcggctcactgcaacctccacctcccaggttcaagcgattcttctgcctcagcctcctgagtagctgggattacaggcctgtgccaccaagcccagctaattttgtatttttagtagagatggggtttctccatgttggttaggctggtctcaaactcccgacctcaggtcatccacctgcctcggcctcccaaagtgctgggattacaggtatgagccaccgtgcctggactttcaccttttctttctttaaagaaatctggacttgggaacctgtaaactagtgaagtmttaaggtccatttccatctctaccctgtatctgcaaagtgctgtaccacgatctgaacacctggtaatgcatccgtgctgggatggggagcaggccccgaggaggaagtgtaggtgaggacgcagccaaccatgcttggcaaattagctctgttgcagcaggctcaacacagcctttcagaggcagatgcctgggctcctgggcttggtggttttctaagcggagagaacccaggaggaggaacagacttgttagaagtgtattccagcaattccaccatcctcctgtctcaatagattgggggggagctgtttcctgggctcttcatgttccttgctgtgctcagctctgatccaaattcatctctatttgctcgataaatacatgagtgtggtgaaacatacaagagctgtaagcagccaggcgtggtggctcatgcctgtaatcccagcactttgggaggccgaggcgggcggatcatgaggtcaggagatcgagaccatcctggctaacacggtgaaaccccatctctactaaaaatataaaaaattagccaggcatggtggcgggcgcctctagtcccagctactcaggaggctgaggcaggagaatggtgtgaacctgggaggtggagcttgcagtgagccgggatcgcgccactgcactccagcctgggcgacagagcgagactctgtctcaaaaaaaaaaaaaaaaaaaaaaaaaaaagctgtaagcaaacctatttgcctgtcttaattgtcttgagtgataaaaagagctgaccctattgagaaagaatgtcagatgtaaaaagcacgcactattgaaacttcaagtcatatgaatgaaagaaaattaaaaggaaaggattaaaaaggaaaaaaaaaaaagaggccaggaactgtcacacacgcctgtaatsccagtactgtgggaggtcaaagcacgaggatcctttgaggccaggagtttgagaccagcctgggcaacatagcaataacctgcctctacaaaaaatttaaaggccaggcgtggcagctcacgcatgtaatcccagcactttgcggggctgaggtgggcagatcacaaggtcaggagattgagaccatccyggctaacacggtgaaaccctgtctctactaaaaatacaaaaaattagctgggcgtggtgcgggcacctgtagtcccatctactctggagactgaggcaggagaatggcttgaacccagaaggtggagcttgcagtgagctgagatcatgccactgcactccagcctgggcgacagagcgagactccatctcaaaaaaaaaaaaaaaaatttaaaaattagcagggtgccgtagtgtgcacctgcagttccacctacttgagaggctgaagtgggaggattactgctgccttggagttcaaggctgcatatttctttatgtattgggttttttttttttttctttgagacaaggcctcgctttgtcacccaggctggagtgcagtggcgtgattttggctcattgcaacctctgcctcctgggttcaagccattcttgtgtctcacattcttgtgtttcagcctcccgagtagctggaatttacaggcgcgtgccaccacgccagctaattttgtatttttagtagaggcggggtttcaccatgttcgccaggttggtctgggactcctggcctcragtgatctgctcgcctcccaaagtgctgggattataggcgtgagccacactttgccttctttgcaccagggagaattatattttttctcattttttatttgtattcgtccttacaatgccagcctgttaacttgcaatgagggatgttcgcttttaatgagtagacagcctcatccccatcaaggcctggccgccctcatctgggctcagggagaacaaagtctaactgctgtgtgagtatggtcagggcgcaggaggctggcagagagggggtttaagaaccatttcctttaccactagcttttaaattagttttactgtgaccttcagtaaaaatacttttttttttttaagacggagttttgctcttgttgtccaggcttggagtgcaatggcgcaatctcggctcaccgcaacctccgcctcccaggttcaagcgattctcctgcctcagcctcctgagtatctgggattacaggcatgtgccaccacgcctggctgattttttatttttagtagagacggggtttctccatgttggtcaggctggtctcaaactcccgacctcaggtgatccacctgcctcagcctaccaaagtgctgggattacaggcgtgagccaccgtacccggcccaaaaaaatacattttacagtcagcaaaatgctgtatatattttttatccagatacaaaagttcaaattctgtatgatttcatttaaatgaggtccctagagaagtcaaattaataaagacaagaaatggaatggtggttggtaggggcaaggggagggaggaatggggagtgagtgtttaaaggggacagtttctttctttttttttttcttttgagacagggagagtctcactctgttgcccaggctggagggcagtggtgctatgtcatctcactgcaacctccacctcctgggttcaagcagttcttgtgcctcagctkcccgaatagctgggattgcagatgtgcaccaccacgcccggctaatttttgtgtttttagtagagacagggtttcgccatgttggccaggctggtctcaaactcctggcctcaggtgatccgcctgcctcgacctcccaaagtgctgggactacaggcatgagttgccgcgtgcagccctgcagtcctgttttttttttttttkgggcggagtttcactcttgttacccaggctggagtgcaatggcgcgatctcagctcaccgcaacctctgcctcctgggttcaagcagttctcctgccttggcctcccaagtagctgggattacaggcrtgcgccaccacgtccagctaattttgtatttttagtagagatggggtttctccatgttggtcaggctggtctggaactcccgacctcaggtcatctgcccgcctcccaaagtgctgggattacaggcaagagccaccacgcccggccttgcagtcctgtttttaataccatgcacagcattataaattattattattattattatttttgtttttgagacggagtcttgctctgtcacccaggctggagtgcagtggcaagatcttggctcactgcaagctccgcctcccrggttcacgccattctcctgcctcagccacccaagtagctggtactacaggcgcccaccaccatgcccasctaattttttgaatagagacggggtttcaccgtgttagccaggatggtagcattagaaattatttctaacccaggctgggctccatggctcatccctgtaatcccagcactttgggaggccaaggcggtgggaatcacttgaggtcaagagttcacggccagcctggccaacatagtgaaaccccatctctactaaaaacacaaaaagtagccaggcatggtggcgtgcgcctataatctcagctacttgagaggccaaggcaagagaattgcttgaactcaggaggcagaggttgcaatgagcaaagattgcaccactgcactctagcctgggtgacaaagcgagaccttgtctcagaaaaaaaagaaaagaaattatttctacccagccaggcacagaggctcacgcctgtaatcccagcactttgggaggccagaggggggcagatcacttgaggtcaggagttggagaccagcctggccaacacgacaaaacaccttctctactgaaaatacaaaaatgagccaggcatagtggcacatgcctgtaatcccagccaccggggaggctgaagtgggagaatagcttgaacccaggttggggaggttgcagtgagtcgagaccacgccattgcactccagcctgggcaacaaagaatgaaactccatctgaaaaaaaaaacccagaaattatttctaacccaaaacaattgaaaacaggtactcaaacaagcatttttacacgcgtgttcgtagcaccatttccacatagcctgagttgtaaataatagcaatgaagcttttgctttaatgagaaaggaagtttgccataaggtttgttctggggtgtcttgctgaagccctcctgtgttcttgccctggggttcagggactggagggccctctgtggggggcatgagtcacttcattctctgtctctgcaccccagctgtcctctcctagagagaggcaatttctctttcccgaggttagtagagttttttaatatctgagagaggcttatgcatgataatgaacacctatagctgcttggttttaatggccattccacttagaacataaattccatgatgtttttcttaatcgtagcacaactttaatctagtccatttataggcttgagaactcctgtgtgaattaaatcacgaccttctgatgaagccactccgatgagcctgtgaggcacattgtcttcacactgtgctggggcagggttgttggcaaacccccatggatggcagccggcaatggcctcacagtgacaaatgcgtctgccttttgacccagaattctacccctgagagtgcgtcctacagatgcttgcaagtggtatggtaatggatgtacaaagctattcacagcaggggtgtttgtggtagcatggcctgggagacagcccagatggctttcagcaaaggattggtggcaggtctgcagccctggggcttatcagacaccaaccctgctggcaccttgatcttggacttccagtttgcagaactgtgagaaaataaaatttccattaagtttycccagtctggtattttgttatagccgcccaggctgactcagacaggagcccaggatggatgtgagcgtgttataaccagctcacgcttgtggctgtagggagtccgggtagaagctggaagagcctagaggggtggctgctgccttccagggaacaggtcaaagggtatccaaccagagtggtctcagtgcagatggggaggagactctagacccaggacaagcagtggagggggcatccaaggatttcctgatgatcagatgtggtttgagaaagagagggggccggtggcgcatgcctgtaatcccagactttgggaaaccaaagcaggaggacgcttgagcccaggagttcgaaaccagctggcaacatgcaagacctggtctctacaaaaaaattaaaaattagctgggtgtggtggtgcttgggaggctaaggtgggaggatcacttgagccctggagttcgagaacagcctgggcaacatggcgaaaccctgtccctacaaaaaatacaaaagttagccaggcgtggtggcacacgcctatagtcttagctactctggtggcagaggtgggaagcttgtttgaacctaggaggttaaggctgcagtaagccgagattgcaccactacactccagcctgtgtgacagagtgaaaccgtgtctcaaaaataaaaagtgaattcaggagttccagaccagcctggccaacaccgtgaaaacccatctttactaaaaatacaaaaattcgcctgggccagatgcactggctcgcacctgtaatcccagcactttgggaggccaaggcggggatatcactcaaggtcaggagttcgagaccaacctggccaatatggtgaaaccccatctctactacaaatacaaaaaaaaaaaaaattagccatgcatggtggtgcgtgcctgtaatcccagttacttgggaggctgcggcaggagaatcgcttgaacccaggaagcagaggttgcagatcacttgaacccaggaaacagaggttggagtgagcggagattgcgccgttgcactccagcctgggtgacaagagcaaagctctgtctcaaaaaaaaaaaaaaaaaaaattagacaggtgtggtggcgcacacctgtaatcccagctgctcagaaggaggagacaggagaatcacttgaaccccagaggcggaggttgcagtgagccaagattgcaccagtgggctccagcttgggcgacagagcgagcctctgtctcaaaaaaacaaaacaaaacaaaacaaaaccaaaaccacacaaggcttttcagtgaaatgctcactcctcttccctttcgtgtgcccagttcccctggcccccgtcaaggtggccactgttcttcatatggatatagactccccctccctttcatccaaatggccccgtagtacacacagttccaccctgccagtttcacttagtatttcttggagatgtttcctcatctgtacgtagatagcttctcgtcagtacgtcagtacgyagggagccctgcaggggcaagtggttggtaacgtgggtgctggcaaaacaggttttgcaacctcactggcgttstgcaaaggcagcttcctgcctggattggcccatgggcaacttccctttgatttccctcagctttaatccatccagctgaagtggagacagcccggtttatggttctgcattctggcatagacgcaattcgtacaagctctcagccccatgctttttcttcctctgccgtgtttacccttctggagttgcagaatgaatcacccacccgagggaagcacggttgtttttttttttcttttctttttttttgagacagtcttgctctattgcccaggctggagtgcagtggtgcaatctcggctcgctgcaacctctgcttcctggttcaagcaattctccttcctcagcctcctgagtagctgggagtacaggtgtgcgccaccacgcctggctaatttttgtatttttagtagagatggggtttcaccatattggccagggtggtctcgaatgcctgaccttgtggtccacccgcctcggcctcccaaagtgctgggattgcaggtgtgcgccgccscgcccggccaggcttttttytctctaggcctgctgtggycaccaaggctggggaccagggggcctccagggacagggatcccaagttgcacgttaatacacggagccctttctgagatgcaggttctacagggaactggattccacctcttttggggagatcaacccagcagcccaaggatcccctgatggtgcctgagcacagctgtgagaagggggtatctggatccttggggtgacaggatgggagaggtggagcatgggcctgcaggctggcccccagaggccttaggtctctgctgactagctagaattctgaaaactgtgttatgtaagacgtttagcatctgcagtgccaaataaaggtgacccccacaacgacataaaaaaaaaaaaagatatgtccaaatcctaaccctgggaacctatgaaaatcctaaccctgggaacctatgaaggtatttccttatttggtgtgttttgttttggtttggtttggtttggtttgtttgatacagagtcttgctctgtcgcccaggctggagtgcagtggtgtgatctcagctcactgcaacctctgcctccgggttcaagcgattgtcctgcctcagcctcccaagtagctgggattacaggcacgcgccaccacgcccagataatttttgtatttttagtagagacagggttttaccatgttggccgggatggtctcaactcctgacctcaagtgatctgcccgcctcagcctccctgtaaccagctgggattgcaggttcccggttggtatttccttatttggaaagaccatctttgtaggtgttattagctaaagtcaagtcattctgggttagggtgggccmtaaatgccattgactgctatcctgctaagagacagaagagggagggacacacagggaggggaccacgtgaagacggaggcagagacgggaagaggcagaggtgactggagtgacgtagccccaggccttggaacgcctggagccaccaggagctgcaggaggcaaaagaggcattggcagagtgtggcagtgtccacaccttaatttcagacttctggcctttagaactgtgagagaatcacgttctactgctgtgagacactcaatttgcagtactttgttacagctgccctggtaaacaaatgcaatatttattttcagcaaagcagggagttcctgcaaagatgactagaccaggttccttctcccaagagcgcagtgtcctagctgtgaatactaggagtgcgttgctgcggtgggaggggaggcagggtttactgactgatcattcccagtggtctggatgctctctttctttctttcctttctttcgagacagaatctcgctctgtcacccaagcttgagtgaccagaagctggagaaggcaggaaggaccctccctaggaaccctgcccacatttgacttgagacttccgttctccagccgctgtgagacacagccctgcaaggagtgcccagcttgtggcagtttggttgcggcagccctggaggaggagtcccccagggaaagtggaatctctcttgcagtccaccatccacatcccccgactcaccttccgctctgccagtatcctccgtgaaagaacaggaagaaaggcaaggctgcaaaaccaagcacagggcgtgtgagcgaggcccgccctgctgagctctgccactggacccccaagccccgggacccccagccccttcaccgacaaccttcagacgactcgtcggggaagtaaatgtccactttctccccttcgccgtctccataggggacatgcagcaggctcttcctggtggcccgggcccttgtggtggctgtctcagaaatggacaagtcgctgtcagcacaagctcaggtggtagaaatttttcttttcttttttttgagacgaagtctcactctgtnnnnnnnnnnnnnnnnnnnnnnnnnnnnnnnnnnnnnnnnnnnnnnnnnnnnnnnnnnnnnnnnnnnnnnnnnnnnnnnnnnnnnnnnnnnnnnnnnnnnnnnnnnnnnnnnnnnnnnnnnnnnnnnnnnnnnnnnnnnnnnnnnnnnnnnnnnnnnnnnnnnnnnnnnnnnnnnnnnnnnnnnnnnnnnnactgcacccagcctggcagtcctctttcgatgggaggtgctcagagctgaagctcaacacgccaacttaagggagctttcagctggaatgtttctacctgagctgaaatagaaattgccgccacctggctgggcacagtggctcatgcctgtaatcccagcactttgggaggccaaggtgggtggatcacgaggtcaggagttcaagaccagcctggccaacaaccctgtctctactaaaaaatatatatatatatataaaaattagctgggcatagtggcgtgcacctgtagtcccagctacttgggaggctgaggcaggagaatcgcttgaaccggggaggtggagattgcagtgagccgagatcgcgccactgcactccagcttgggcaacagagtgagacttcgtctcaaaaaaaagaaaagaaaaatttctaccacctgagcttgtgctgacagcgacttgtccatttctgagacagccaccacaagggcccgggccaccaggaagagcctgctgcatgtcccctatggagacggcgaaggggagaaagtggacatttacttccccgacgagtcgtctgaaggttgtcggtgaaggggctgggggtcccggggcttgggggtccagtggcagagctcagcagggcgggcctygctcacacgccctgtgcttggttttgcagccttgcctttcttcctgttctttcacggaggatactggcagagcggaaggtgagtcgggggatgtggatggtggactgcaagagagattccactttccctgggggactcctcctccagggctgccgcaaccaaactgccacaagctgggcactccttgcagggctgtgtctcacagcgctggagaacggaagtctcaagtcaaatgtgggcagggttcctagggagggtccttcctgccttctccagcttctggtggccttagacagcccttagcttgtgtctgcatagctccagcctctgcctccattcacatgtgatcctggtgttcctgggtctcaaatcttcctctctctttttttttttttttttttttttttgagacagagtctcactctaacccagactggaacgcagtggtgcgacctcagctcactgcaacttctgcctcccgggctcaagcaattcttctgcctcagcctcccaagtagctgggattacaggtgcacgccaccacacccagctaatttttgtatttttagtagagacagggttttaccatgttggccaggctggtcttgaactcctgagctcaagtgatcctcctgccttgacctctcaaagttctgggattacaggcgtgagccaccacaccagcctccttttttttttttttttttttataaggtcatagtcacaggttctggggttaggatttggacatatcttttggggggacacagttcaacccactacacccagtgagaagcatgttcagcctcctcttgaatcaagggaaaagccagagtgaccaaccactgtcccagtttgcttgggactgaggaggggtttcccaggacatggggttttcagtactttaggaaaaaaaaatgagagtcccaggtaaaatgggacagttggtcactgtaagctaagcagtgggtatttgggaatttgggatcttggcagacactgctgttccctagggtcttcctacagagttgccttcaagcatgttcatgttaatagcttacatttaatggccaggtacggtggctcacgcctgtaatcccaacactttggaagggcaaggcggacggatcacttgaggtcaggagttcgagaccagcctggccaacgtggtgaaaccctgtctctactaaaaatacaaaaattagctggacgtggtggtgtgtgcctgtaatcccagctactcgggaggctaatgcaggagaatcgcttgaacccaggaggcggaggttgcagtgagctaagatcatgccactgcactccacccagggtgacagagcgagactctgtctcaaaaaaaaaaaaaaaaaaagcttacatttattgcacacaaaactctctacactgctagtctttaattctcaaaaacagttccctgagagagggaacataattgcctctattttacagatgacaaaaccaggcttagaagttacacaaattgccttgcacagtggctcacacctataatcccacacattgggaggctgaggcaggaggattgagttagaaaccagcctggtcaacatagcaagacccycatctctacaaaagaaaagataaatttgctgggcatagtggtgcacacctatactcctgcttgggaggctgaggcaggaggatcgcttgagcccaggaggtcgaggctacagtgatccatgatcgcaccattgcactccagcctgggcgacagagcgaggccctatcgcttagaaaacaaaaagttacatgaagttcccccaaggtcccgtagctagcatgtgatgtgkcagggagagagcctgtccgcttcactctctcacatgggaccagaaaggggtgatgctgtgcgtggacaggacatctggcaagtggtgtgtccaggacacaggaagcagcgtagtggccaagctgcctccagctgtcacatctgtgtgtctctgcagtaaggatgagtctgccttcatggtccacccgctgacggcacagggagtggccgtggtaatagtggcttacggcatcgcccccaaaggtaataggagtggttgctgcaggtccgagggccggtgggctttaggaggaagtgcatccctgacccagctcatgctctctgtgcaggcaccctggaccacatggtagaccaggtgacccgcagcgttgcgtttgtccagaagcggtatccaagcaacaagtgggtgttgccagtagattttcttcctgttggacctcagtgggtgggaggacagtgcaatcagtacctaggatacagccaagctgcccctctggcctgtggagcagaaagcaaattgggactcttcgaagggggcctgatgttgtggggaaactgcgtgcaaatccagctctctgctctgacccctcccaggggaatttrcctgtgtggacactcagccggggcccacctggctgccatgatgctcctggccgactggaccaagcatggggtcacgcccaacctcagaggtttccatgggagctacagcctggctgggcaaccttcatctccccatgagccttggggtttgggccaactgcttgaaatcctcccggccatgagtggcttgaccgcagggcttcgagccctctgagcaaggccttctctgcctcctctgtgccccttcccctggtcctgcccctctggcggtgggggtgggctggccctgccttgctccgcctggagcctggccctgtgacaattctgtaccttcacaggctttttcctggtgagtggggtctttgacctggagcccatcgtgtatacttcacagaacgttgctctccagctgaccctgtgagttacttggccaccacctcccctggctcaccaggagcctggctcctctctgtcctgacccctgtccactccccaccccagggaggacgctcagaggaatagcccccagctgaaggtggcccaggcacagccggtggaccccacctgccgtgtgctggtggtcgtgggccagttcgactcccccgaattccaccgacagtcctgggagttttaccaggtactcccagtgcaggtttgtggccagaggtcgagggtcatgtgggctcattattttcctctttcttttacccaagtggacaagaccctccatcatttatttaacacgtactgagtgaaccctgacctgtgccaggcatggccccatgtcctgccccacctcccctcccactgctcaggcccctcttcccatgtctcccctgcccagaccctgtgtcaaggagagtggaaagcctcatttgaagagctccacgatgtggaccactttgaaattgttgagaatctgacccagaaggacaacgtgctcacccaggtggggcctcatccctggcagccctttcatggtagacagcacaggtcctgtcgcagccccttagatgtgcaaaccaggagttcaagaccagcctggccaacatggagaaactccgtgtctactaaaaatacaaaacaaattagccagatgtgatggtacgtgcctgtaatcccagctactcaggaggctgaggcatgagaattgctttaacccaggaggcagagattgcagtgagccaagattgcaccactgcactccggcctgagcgacagagtataagactctgtctcaaaaaaaaaaagacctgagaacctaggaaagaaagaacctaagaaagaccatcttgtttctttctttttttttttctttagagacagggtctcctctcttgcacccaggctggagtatagtggcaaaatcttagctctctgctgcctcctgggctcaagtggttatcctgccccagcctcttgagtagctgggactacaaaggcgtgccactgtgccctgctaattattcaatgtttttgtagagatggggtctctctatgttccccaggctggtcgtcgtcgtcttccttcttcttcctccttcctccttcatcttctttcttctcctcctccccctacccccccttcttcttcttcttccttcatctcagcatattatacctctaaccagactgtcttcaactcctgagttcaagtgatcttcccacctcagcctcccgaagggttggggttgcagacgtgagccactgcatccagccctgtctcatttccttaatcaaattcctgcaaagagctgctctgattctggggcttttgtgtcttctcttcctgttccagattatcttgaaaacaatcttccagtagttctgacgatacttggagcctggtccacgtgcatcccaccttgggaagcctctccaaagagctttcggagctgacactgacagcttcagtttcccccagcacccaggagagccttgctgtgtctgtctgcccggcaagagtccattctcactgctgggacactcatgaaaatctccacgtcctccctcttcccagcctggatggagctccagggctggggaacgtccgcaagtcaatgctcagagatgcccggagctgcctcttagactcgtctggcccatctacctgctgacagagcatgacaaagatgacgctcaaaagtaatgccattacttcttttttttttttttttttttttttttttgagaaggagtcttactctgtcacccaggctggagtgcaggggcgtgatcttggctcactgcaacctccacctcccggggtcaagctattctccttcttcagcctcctgagcctttgggactgggggcgcctgccatcatgcctggctaatttttgtttttttaggggagacgggggttcaacctattggccaggctggtctcaaactcctaaccttgtgattcgcccgccttggcctcccaaagtgctgggattccaggcgtgagccactgcgcccggccagaatggcattatatttaaatagttcataaagaagcacaaaagaatattatttcataacatgtaaaaattatataaaacgtaaatttccatgttgataaataaagttgtattggaacacggccctgctcgttcatttacgtattgtctagggcagctttcaagctgcagggtggagctgagtggtggtgacagtgacctcctggcccgtagtgcctgaagcatttcctatctggcccttttcaggaaaagtttgcggacccctgggtaagggcttccccaagccagctaccctctgccttctgcttcagtctcctgtctgctctgtcctccatctccctgacatttgggtctgtccctgaatgccccggggtctcagcgttggggccaacaccttgaccttgacaggacaatgctacccacatgtaggacaagcttcctctgcacccgagagtggtgtgcatgtcccaagaagccagctatatccatccaccacccaccccaccacaccgcctctttctctcacaccgaatagcattcaagaatttccactgtgggctgggcgcaggggctagtgcctgtaatcccagcactttaggaggccgaggtgggcgaatcacctgaggtcaggagttcaagaccagcctggccaacatggcaaaaccctgtctctactaaaaatacaaaaattagccaggcgtggtggctggcgcctgtaatcctagatacgtgggaggctgagttaggagaatctcttgaatccgggaggcagaggttgcagtgagctgagattgtgcccctgcactccagcctgggtgacaaagccagactccatctcaaagaaaaaaaaaaaaattccactgtatgtgtgcagcaaaccatcatgacacacatttacctgtgtaacaaacctgcacatcctacacatataccctggaacttaaagtaaaagttgggggggggggtaaaaaagaatttccaccgtgacattattgagtatagcaaaaaaaaaaaaaacaagaaacagcctagtgttcattagggaataaacgcattcaagcagcatcaaaccctgcagccattacaaagagatctatgttgaccatgtggaatatctccaagagccacagtagcctcccttatctgtaggattcactccaagaccctctgaaaccatggataatactgaaccctatatacactatgttttttcttgtatatacatacctacgataaagtttaatttataaattggcaaagggtatataaatattccttctaagagattaacaataactaataaagtagaacgattaaaacaatatactrtgatcaaagttatgtgaagccaggtgctgtggctcaygcctgtaatcccagcactttgggaggctgagacaggtggatcacctgaggtcaggagttggagaccagcctggccaacatgacaaaaccccgtctctactaaagataaaaaaaattagccgggcatggtgacacatgcctgtaatcccagctacttgggaggctgaggcaggagaatcgcttgaacctgggaggcggaggttgcagtgagctaagatcacaccattgcactccagcctgggcaacaagagtgaaactctgtctcaaaacaaaacaaaacaaaacnnnnnnnnnnnnnnnnnnnnnnnnnnnnnnnnnnnnnnnnnnnnnnnnnnnnnnnnnnnnnnnnnnnnnnnnnnnnnnnnnnnnnnnnnnnnnnnnnnnnnnnnnnnnnnnnnnnnnnnnnnnnnnnnnnnnnnnnnnnnnnnacttcatctcaaaaaaaaaaaaagaaaaaagaagtccagaaacccgcggagacactatcacactatcccccccaggctggtagtgcagtggcccaatcatggctcactgcagcctcgacctcccaggatcaagtgatccttccacctcagcctcccgagtagctggaagtataggtgcacgcccgactgattttttttttttttttttagacggagtctcactcttgttgctctggctggagtgcaatggcaggatctcggctcactgcaacctctgcctcttagattcaagcgattctcgtgcctcagcctcccgagtagctgggattacaggtgcccaccaccatgcccggataattttttgtatttttaatagagacagggtttcaccatattggtcaggctggtctcaaactcctgacctcaggtgatccacctgcctcagcctcccaaactgctgggattacaggcgtgagccaccgggcatggcctttcctggctaattttttaaatttttgatagagatggggtctcagtgttgcccaggctgatcttgaactcctagattcaagtgatcctccctccttggtctcccaaagtgctgagattacaggcgtgagccaccgccccgggctggaaaatacttttttaaacgagggcaatgtgaatctgaaatgccatttgaggaaagatctgttcgcctgacatcctgtttgagcctgggtggacaggacagcacctgccagcatcgggaagcactgcagatgggaagaggcttggtcactctccaaaggtggcaggagttggagggggtgagctgaaggtaaggagaaaggaggtggggacccaggagacaggggctgcgcagcgggctcggggctgacacccccacggatacagttcactggggctcaaacataaaaggaacccaactattgtgggaggaaaagactcttctgcctttctgccttttctttttttctttttctttctttctttttttttttttttttttgagacagagtcttgctctatcgcccaggctggagtgcagtggcgtgatctcggctcactgcaagctctgcctcccgggatcacgccattctcctgcctcaacctcccgagcagctgggactacaggcgcctgccaccacacccggctatttttttgtattttttagtagagatggggtttcaccatgttagccaggacggtctcgatctcctgaccttgtgatccgcccgcctcggcctcccaaagtgctgggattacaggcgtgagccaccgcgcctggctcttttttctttctttttttttttccgagacagagtttcactcttgttgcccaggctggagtgcagtggcgcgatcttggctcactgcaacctccacctccagggttcaagcgattctcctgcctcagcctcctgagtagctgggactgcaggcgcgcaccaccacgcctggctaatttttgtatttttagtagagacagggtttcaccatattggccaggctggtctcgaactcctgaccttgtgatctgcccacctcagcctcccaaagtcctgggattacaggcgtgagccaccgtgcccagcctgacccctctgccctttcaaaaactatgttcgttctctcacagccttctcttgtcatattaagtccacaccgcaggcctaatttgtccagtgaatgctatgcaaatatttcatgcacctgctgatcgcaggaatgatatgtacttggtacgcactgatcgtacctcggggtgggagaagagagggcaaggaagcaaagaatagccccctcctttcctggtgcaccttcagatgtgccgatggggcccaggctcgctgcagatggcccccttcccagagacaggggaggatcstccacccactccccagcctccaggaccatcctgactcctgccttcaggcactcaagttatgcgtctagayatgcggatatattcaagctgggcacagcacagcagccccaccccaggcagcttgaaatcagagctggggtccaaagggaccacacccygagggactgtgtgggggtcggggcacacaggccactgcttcccccygtctttctcagccattcctgaagtcagcctcactctgcttctcagggatttcaaatgtgcagagactctggcacttttgtagaagccccttctggtcctaacttacacctggatgctgtggggctgcagctgctgctcgggctcgggaggatgctgggggcccggtgcccatgagcttttgaagctcctggaactcggttttgagggtgttcaggtccaggtggacacctgggctgtccttgtccatgcatttgatgacattgtgtgcagaagtgaaaaggagttaggccgggcatgctggcttatgcctgtaatcccagcactttgggaggctgaggcgggtggatcacgaggtcaggagttcaataccagcctggccaagatggtgaaaccccgtctctactaaaaatacaaaaaaattagccgggcatggtggcgggcgcatgtaatcccagctactgggggggctgaggcagagaattgctggaacccaggagatggaggttgcagtgagccaagattgtgccactgcactgcactccagcctggcgacagagcaagactctgtctcaaaaaaaaaaaaaaaaagtgaaaaggagttgttcctttcctccctcctgagggcaggcaactgctgcggttgccagtggaggtggtgcgtccttggtctgtgcctgggggccaccccagcagaggccatggtggtgccagggcccggttagcgagccaatcagcaggacccaggggcgacctgccaaagtcaactggatttgataactgcagcgaagttaagtttcctgattttgatgattgtgttgtggttgtgtaagagaatgaagtatttcggggtagtatggtaatgccttcaacttacaaacggttcaggtaaaccacccatatacatacatatacatgcatgtgatatatacacatacagggatgtgtgtgtgttcacatatatgaggggagagagactaggggagagaaagtaggttggggagagggagagagaaaggaaaacaggagacagcgagagagcggggagtagagagagggaaggggtaagagagggagaggaggagagaaagggaggaagaagcagagagtgaatgttaaaggaaataggcaaaacataaacagaaaatctgggtgaagggtatatgagtattctttgtactattcttgcaattatcttttatttaaattgacatcgggccgggcgcagtggctcacatctgtaatcccagcactttgggaggccgaggcaggcagatcacttgaggtcaggagtttgagaccagcctggcaaacatggtgaaaccccrtctctactaaaaatacaaaaattagcctggtgtggtggtgcatgcctttaatctcagctactcgggaggctgaggcaggagaatcgcttgaacccgtggyggggaggaggttgcagtgagctgagatcatgccactgcactccagcctgggcgatagagcgagactcagtttcaaataaataaataaacatcaaaataaaaagttactgtattaaagaatgrgggcggggtgggaggggtggggagaggttgcaaaaataaataaataaataaataaaccccaaaatgaaaaagacagtggaggcaccaggcctgcgtggggctggagggctaataaggccaggcctcttatctctggccatagaaccagagaagtgagtggatgtgatgcccagctccagaagtgactccagaacaccctgttccaaagcagaggacacactgattttttttttaataggctgcaggacttactgttggtgggacgccctgctttgcgaagggaaaggaggagtttgccctgagcacaggcccccaccctccactgggctttccccagctcccttgtcttcttatcacggtagtggcccagtccctggcccctgactccagaaggtggccctcctggaaacccaggtcgtgcagtcaacgatgtactcgccgggacagcgatgtctgctgcactccatccctcccctgttcatttgtccttcatgcccgtctggagtagatgctttttgcagaggtggcaccctgtaaagctctcctgtctgactttttttttttttttagactgagttttgctcttgttgcctaggctggagtgcaatggcacaatctcagctcactgcaccctctgcctcccgggttcaagcgattctcctgcctcagcctcccgagtagttgggattacaggcatgcaccaccacgcccagctaatttttgtatttttagtagagacaaggtttcaccgtgatggccaggctggtcttgaactccaggactcaagtgatgctcctgcctaggcctctcaaagtgttgggattacaggcgtgagccactgcacccggcctgcacgcgttctttgaaagcagtcgagggggcgctaggtgtgggcagggacgagctggcgcggcgtcgctgggtgcaccgcgaccacgggcagagccacgcggcgggaggactacaactcccggcacaccccgcgccgccccgcctctactcccagaaggccgcggggggtggaccgcctaagagggcgtgcgctcccgacatgccccgcggcgcgccattaaccgccagatttgaatcgcsggacccgttggcagaggtggcggcggcggcatgggtgccccgacgttgccccctgcctggcagccctttctcaaggaccaccgcatctctacattcaagaactggcccttcttggagggctgcgcctgcaccccggagcgggtgagactgcccggcctcctggggtcccccacgcccgccttgccctgtccctagcgaggccactgtgactgggcctcgggggtacaagccgccctcccctccccgtcctgtccccagcgaggccactgtggctgggccccttgggtccaggccggcctcccctccctgctttgtccccatcgaggcctttgtggctgggcctcggggttccgggctgccacgtccactcacgagctgtgctgtcccttgcagatggccgaggctggcttcatccactgccccactgagaacgagccagacttggcccagtgtttcttctgcttcaaggagctggaaggctgggagccagatgacgaccccatgtaagtcttctctggccagcctcgatgggctttgttttgaactgagttgtcaaaagatttgagttgcaaagacacttagtatgggagggttgctttccaccctcattgcttcttaaacagctgttgtgaacggatacctctctatatgctggtgccttggtgatgcttacaacctaattaaatctcatttgaccaaaatgccttggggtggacgtaagatgcctgatgcctttcatgttcaacagaatacatcagcagaccctgttgttgtgaactcccaggaaygtccaagtgctttttttgagattttttaaaaaacagtttaattgaaatataacctacacagcacaaaaattaccctttgaaagtgtgcacttcacactttcggaggctgaggcgggcggatcacctgaggtcaggagttcaagacctgcctggccaacttggcgaaaccccgtctctactaaaaatacaaaaattagccgggcatggtagcgcacgcccgtaatcccagctactcgggaggctaaggcaggagaatcgcttgaacctgggaggcggaggttgcagtgagccgagattgtgccaatgcactccagcctcggcgacagagcgagactccgtcataaaaataaaaaattgaaaaaaaaaaaagaaagaaagcatatacttcagtgttgttctggatttttttcttcaagatgcctagttaatgacaatgaaattctgtactcggatggtatctgtctttccacactgtaatgccatattcttttctcacctttttttctgtcggattcagttgcttccacagctttaatttttttcccctggagaatcaccccagttgtttttctttttggccagaagagagtagctgttttttttcttagtatgtttgctatggtggttatactgcatccccgtaatcactgggaaaagatcagtggtattcttcttgaaaatgaataagtgttatgatattttcagattagagttacaactggctgtctttttggactttgtgtggccatgttttcattgtaatgcagttctggtaacggtgatagtcagttatacagggagactcccctagcagaaaatgagagtgtgagctagggggtcccttggggaacccggggcaataatgcccttctctgcccttaatccttacagtgggccgggcacggtggcttacgcctgtaataccagcactttgggaggccgaggcgggcggatcacgaggtcaggagatcgagaccatcttggctaatacggtgaaaccccgtctccactaaaaatacaaaaaattagccgggcgtggtggtgggcgcctgtagtcccagctactcgggaggctgaggcaggagaatggcgtgaacccaggaggcrgagcttgcagtgagccgagattgcaccactgcactccagcctgggcgacagaatgagactccgtctcaaaaaaaaaaaraaaagaaaaaaatctttacagtggattacataacaattccagtgaaatgaaattacttcaaacagttccttgagaatgttggagggatttgacatgtaattcctttggacatataccatgtaacacttttccaactaattgctaaggaagtccagataaaatagatacattagccacacagatgtggggggagatgtccacagggagagagaaggtgctaagaggtgccatatgggaatgtggcttgggcaaagcactgatgccatcaacttcagacttgacgtcttactcctgaggcagagcagggtgtgcctgtggagggcgtggggaggtggcccgtggggagtggactgccgctttaatcccttcagctgcctttccgctgttgttttgatttttctagagaggaacataaaaagcattcgtccggttgcgctttcctttctgtcaagaagcagtttgaagaattaacccttggtgaatttttgaaactggacagagaaagagccaagaacaaaattgtatgtattgggaataagaactgctcaaaccctgttcaatgtctttagcactaaactacctagtccctcaaagggactctgtgttttcctcaggaagcattttttttttttttctgagatagagtttcactcttgttgcccaggctggagtgcaatggtgcaatcttggctcactgcaacctctgcctctcgggttcaagtgattctcctgcctcagcctcccaagtaactgggattacagggaagtgccaccacacccagctaatttttgtatttttagtagagatggggtttcaccacattgcccaggctggtcttgaactcctgacctcgtgattcgcccaccttggcctcccaaagtgctgggattacaggcgtgaaccaccacgcctggcttttttttttttgttctgagacacagtttcactctgttacccaggctggagtggggtggcctgatctcggatcactgcaacctccgcctcctgggctcaagtgatttgcctgcttcagcctcccaagtagccgagattacaggcatgtgccaccacacccaggtaatttttgtatttttggtagagacgaggtttcaccatgttggccaggctggtcttgaactcctgacctcaggtgatccacccgcctcagcctcccaaagtgctgagattataggtgtgagccaccacacctggcctcaggaagtatttttatttttaaatttatttatttatttgagatggagtcttgctctgtcgcccaggctagagtgcagcgacgggatctcggctcactgcaagctccgccccccaggttcaagccattctcctgcctcagcctcccgagtagctgggactacaggcgcccgccaccacacccggctaatttttttgtatttttagtagagacgggttttcaccgtgttagccaggagggtctcgatctcctgacctcgtgatctgcctgcctcggcctcccaaagtgctgggattacaggtgtgagccaccacacccggctatttttatttttttgagacagggactcactctgtcacctgggctgcagtgcagtggtacaccatagctcactgcagcctcgaactcctgagctcaagtgatcctcccacctcatcctcccaagtaattgggactacaggcgcaccccaccatgcccaccttatttatttatttatttatttatttatttattttcatagagatgagggttccctgtgttgtccaggctggtcttgaactcctgagctcaagggatccttttgcctgggcctcccaaagtgctgagattacaggcatgagccaccgtgcccagctaggaatcatttttaaagcccctaggatgtctgtgtgattttaaagctcctggagtgtggccggtataagtatataccggtataagtaaatcccacattttgtgtcagtatttactagaaacttagtcatttatctgaagttgaaatgtaactgggctttatttatttatttatttatttatttatttttaatttttttttttgagacgagtctcactttgtcacccaggctggagtgcagtggcacgatctcggctcactgcaacctctgcctcccggggtcaagcgattctcctgccttagcctcccgagtagctgggactacaggcacgcaccaccatgcctggctaatttttgtatttttagtagacggggtttcaccatgctggccaagctggtctcaaactcctgaccttgtgatctgcccgctttagcctcccagagtgctgggattacaggcatgagccaccatgcgtggtctttttaaaattttttgattttttttttttttgagacagagccttgctctgtcgcccaggctggagtgcagtggcacgatctcagctcactacaagctccgcctcccgggttcacgccattcttctgcctcagcctcctgagtagctgggactacaggtgcccaccaccacgcctggctaattttttttggtatttttattagagacaaggtttcatcatgttggccaggctggtctcaaactcctgacctcaagtgatctgcctgcctcggcctcccaaagcgctgagattacaggtgtgatctactgcaccaggcctgggcgtcatatattcttatttgctaagtctggcagccccacacagaataagtactgggggattccatatccttgtagcaaagccctgggtggagagtcaggagatgttgtagttctgtctctgccacttgcagactttgagtttaagccagtcgtgctcatgctttccttgctaaatagaggttagaccccctatcccatggtttctcaggttgcttttcagcttgaaaattgtattcctttgtagagatcagcgtaaaataattctgtccttatatgtggctttattttaatttgagacagagtgtcactcagtcgcccaggctggagtgtggtggtgcgatcttggctcactgcgacctccacctcccaggttcaagcgattctcgtgcctcaggctcccaagtagctgagattataggtgtgtgccaccaggcccagctaacttttgtatttttagtagagacagggttttgccatgttggctaagctggtctcgaactcctggcctcaagtgatctgcccgccttggcatcccaaagtgctgggattacaggtgtgaaccaccacacctggcctcaatatagtggcttttaagtgctaaggactgagattgtgttttgtcaggaagaggccagttgtgggtgaagcatgctgtgagagagcttgtcacctggttgaggttgtgggagctgcagcgtgggaactggaaagtgggctggggatcatctttttccaggtcaggggtcagccagcttttctgcagcgtgccatagaccatctcttagccctcgtgggtcagagtctctgttgcatattgtcttttgttgtttttcacaaccttttagaaacataaaaagcattcttagcccgtgggctggacaaaaaaaggccatgacgggctgtatggatttggcccagcaggcccttgcttgccaagccctgttttagacaaggagcagcttgtgtgcctggaaccatcatgggcacaggggaggagcagagtggatgtggaggtgtgagctggaaaccaggtcccagagcgctgagaaagacagagggtttttgcccttgcaaatagagcaactgaaatctgacaccatccagttccagaaagccctgaagtgctggtggacgctgcggggtgctccgctctagggttacagggatgaagatgcagtctggtagggggagtccactcacctgttggaagatgtgattaagaaaagtagactttcagggccgggcatggtggctcacgcctgtaatcccagcactttgggaggccgaggcgggtggatcacgaggtcaggagatcgagaccatcctggctaacatggtgaaaccccgtctttactaaaaatacaaaaaattagctgggcgtggtggcgggcgcctgtagtcccagctactcgggaggctgaggcaggagaatggcgtgaacctgggaggtggagcttgcagtgagccgagatcgcgccactgcactccagcctgggcgacagagcgagactccgtctcaaaaaaaaaaaaaaaagtaggctttcatgatgtgtgagctgaaggcgcagtaggcagaagtagaggcctcagtccctgcaggagacctctcggtctctatctcctgatagtcagacccagccacactggaaagaggggagacattacagcctgcaagaaaagtagggagatttaaaaactgcttggcttttattttgaactgttttttttgtttgtttgttttccccaattcagaatacagaatacttttatggatttgtttttattactttaattttgaaacaatataatcttttttttgttgtttttttgagacggggtcttactctgtcacccaggctgagtgcagtggtgtgatcttggctcacctcagcctcgaccccctgggctcaaatgattctcccacctcagcttcccaagtagctgggaccacaggtgcgtgtgttgcgctatacaaatcctgaagacaaggatgctgttgctggtgatgctggggattcccaagatcccagatttgatggcaggatgcccctgtctgctgccttgccagggtgccaggagggcgctgctgtggaagctgaggcccggccatccagggcgatgcattgggcgctgattcttgttcctgctgctgcctcggtgcttagcttttgaaacaatgaaataaattagaaccagtgtgaaaatcgatcaggaaataaatttaatgtggaaataaactgaacaacttagttcttcataagagtttacttggtaaatacttgtgatgaggacaaaacgaagcactagaaggagaggcgagttgtagacctgggtggcaggagtgttttgtttgttttctttggcagggtcttgctctgttgctcaggctggagtacagtggcgcaatcacagctcactatagcctcgacctcctggactcaagcaatcctcctgcctcagcctcccagtagctgggactacaggcgcatgccaccatgcctggctaattttaaatttttttttttctcttttttgagatggaatctcactctgtcgcccaggctggagtgcagtggcgtgatctcggctgacggcaagctccgcctcccaggttcactccattcgcctgcctcagcctcccaagtagctgggactacaggcgctgggattacaaacccaaacccaaagtgctgggattacaggcgtgagccaccgcacccggcctgttttgtctttcaatagcaagagttgtgtttgcttcgcccctacctttagtggaaaaatgtataaaatggagatattgacctccacattggggtggttaaattatagcatgtatgcaaaggagcttcgctaatttaaggcttttttgaaagagaagaaactgaataatccatgtgtgtatatatattttaaaagccatggtcatctttccatatcagtaaagctgaggctccctgggactgcagagttgtccatcacagtccattataagtgcgctgctgggccaggtgcagtggcttgtgcctgaatcccagcactttgggaggccaaggcaggaggattcattgagcccaggagttttgaggcgagcctgggcaatgtggccagacctcatctcttcaaaaaatacacaaaaaattagccaggcatggtggcacgtgcctgtagtctcagctactcaggaggctgaggtgggaggatcactttgagccttgcaggtcaaagctgcagtaagccatgatcttgccactgcattccagcctggatgacagagcgagaccctgtctctaaaaaaaaaaaaaccaaacggtgcactgttttcttttttcttatcaatttattatttttaaattaaattttcttttaataatttataaattataaatttatattaaaaaatgacaaatttttattacttatacatgaggtaaaacttaggatatataaagtacatattgaaaagtaattttttggctggcacagtggctcacacctgtaatcccagcactttgggaggccgtggcgggcagatcacatgagatcatgagttcgagaccaacctgaccaacatggagagaccccatctctactaaaaatacaaaattagccggggtggtggcgcatgcctgtaatcccagctactcgggaggctgaggcaggagaatctcttgaacccgggaggcagaggttgcggtgagccaagatcgtgcctttgcacaccagccaaggcaacaagagcgaaagtccgtctcaaaaaaaaagtaattttttttaagttaacctctgtcagcaaacaaatttaacccaataaaggtctttgttttttaatgtagtagaggagttagggtttataaaaaatatggtagggaagggggtccctggatttgctaatgtgattgtcatttgccccttaggagagagctctgttagcagaatgaaaaaattggaagccagattcagggagggactggaagcaaaagaatttctgttcgaggaagagcctgatgtttgccagggtctgtttaactggacatgaagaggaaggctctggactttcctccaggagtttcaggagaaaggtagggcagtggttaagagcagagctctgcctagactagctggggtgcctagactagctggggtgcccagactagctggggtgcctagactagctgggtactttgagtggctccttcagcctggacctcggtttcctcacctgtatagtagagatatgggagcacccagcgcag

SEQ ID NO: 8914 - DNA, 13623 bp, Homo sapiens
ctacaccactgcactccagcttgggtgacagagtgagaccctgtctccaaaaaaacaaaaagaaaaagaaaaaaagatggaaaaagacatgaaaaaacaacaacagaaatacccacacatcatcaatgaggagggaagcatcttgaggcagcaaagcgggagtgctagtagagaggcagatagggcgttggacctgaggcattaaggaaagtcaggatttggagcttacaagtctctcattggagatgggatggggttggaatgaatgtctgagcaaacacaaagcatttccttccctaatgactccccaccagtctaaagaatcccacattaggtcgagcacggtggctcacgcctgtaatcccagcactttgggaggccaaggcgggtggatcacgaggtcaggagatcgagaccatcttggctaacatggtgaaaccccgtctctactaaaaatacaaaaaaattagccgggcgtcatggtgggcgcctgtagtcccagctactcgggaggctgaggcaggagaatggtgtgaacccgggaggcagaacttgcagtgagcctagatcgcgccactgcactccagcctgggggacaaaacgagactctgtctcaaaaaaaaaaaaaaaaattcccacgttagagttggggaaatgggcagtcctggtggaagttagggaacagatctgggacacgttatagccagctggactacaggaggccataagctcaattcttccttgactctgaaaccttccactggtcctaatgcctagtaattccaggcctttcccagttgtgccaggcttggaggtgaacacatctatgtgccaagaaggaaaggtatgccaagcaggggcttaagtcatccttatcctcagtctgtctatgagtggtatgtacccctgttccccttgcaagatctgctgggcttaggtctcctggctgtgagttccccatacctgggcataaatgtagtgagcctgagctcccaaataaggttgggggctccagagaggtggagagccctgtgtctgggaagtgtgcccacccagcaggtctgaccaggaagatacactgctagggttatggaaaaagactatgtgtcaaggtctcttgattctccatctaggcagagaatcatctttaattaatgggaaactggaaggcaaattacttggacctgaaattactttttgtttattgaaccactgtgttgtaaatcacatctctctgaaggcaagagaaatcagggagttacaaaatgtttaggagaactaaacaggactccctgttttgctaactaatcagattgagacaggctctctggtaaatctacaaatttgatgttgttcaaccataagcagtaaatttcctatgctggattttcctgacaatgaatgtaaaaggaaaaggagtctttttgacaaaatattttattgttcatctaaactgaaaaacttctctatttttcaaaattgctatacatgtttaaagatgtagatatttgaatagcctaactggtacagaaggtttaatgatgattcctaagacatacctataaattacttgaaattgaaacgaaatttaagaagaattattggaattttccccttctcaaatgagttcttagtttcataaatactatacaagtccataagagatttggggttttgagatgtcttttttttttttttttttcagacggagtttcactgttgttgcctaggctggagtgcaatggcgtgacctcagctcactacaacctccacctcccaggttcaagcgattttcctgcctcagcctcccaagtagctgggattacagggacctgccacaacgccaagctaatgttttgtatttttagtagagatggggttcaccatgttggccaggcttgtctggaactcctgacctcaggtgatccacccgcctataatttattactcccttttgcaaatgtttgaaaaggaataaagtgcaatatttttaaacagaatgcagagttctgttgtcctttggcaataccagtttcagactctgagagtggctcttgctgttgccgacagtgggctgatgaccaaatcccaacatgcccccgctgcgagtccttcataacctgattcagtcatcacttagaggccagcaggcttcagggaggcgtgagcctcagccaacaacctataggggaagagacgcagaactcaatgcagacaggtttggattctggtgcctagagaatgcaacttggaaactctgagccaggagaaaagggttctctctccatgagagagtgtgggctttgtgagaagcgacacacagcaaacacaattaagagtccacccctcagcggggcgcaggggctcacgcctgtaatcccagcactttgggaggccgaggcgggtggatcacgaggtcaggagatcaagaccatcctggctaacacagtgaaaccctgtctctactaaaaatacaaaaaaattagccgggcgtggtggcgggcgcctgtggtcccagctactcgggaggctgaggcaggagaatggtgtgaacccgggaggtggagcttgcagtgagccgagatcgcgccactgcactccagcctgggcgacagagcgagactccatctcaaaaaaaaaaagaaaaagaaaaagaaaaagagtccgcccctgaattaaatagttggtccttttgtgttcctggtgattcacttgctaagtggaagaaacaggagggaatcttttctcctgccctcctggtaatccatagcccatggcctggctttacttctgtaaagtggcaggagaccttttgacagctgagccatttcttattttatttattttaataagagatggtaggaatgagcaatgatattagtacctggggactgttgttcttaaggagaaacaatcttagaatgattagtgataccccttgctttctcttttctttcattatactttttgtacacatatttttcccatttatttattggaatcttactgatttattataagtataagctttatgtctacacatgtataatcatttttccccaagtataagtctctttttcatggaggcacagcctagacctggttagccgccatctcccctcattgtatgcccaatatctattgtagtatctgctgcatagaaggcactcgatgcgtgaatggataatgactgatgatgaatcaataaatgaatggacatgtcattgtaaaaaattctaaaaatctagaataacacaagctgttggcactacctagaaacacagatgtaaaacttcctaggttgtgtttcaccatgggaacatgtctttgaacaaaaatgggatcatattctattgcactctttcccttaagagatacttctccaggtcattaagtgctcttccacaatatcagtatatggcagaggcaaggtcataccaggtctgtctgaaaccagggcttggctcttaacttgcagccatactgcctccaagtctaggtggctgggttttaggatctgtaatgggaactcagtgtcacaacctctactgggaaggtattctggtgttgcataacaggactttctgttagagataaccatggcaaaatggaatagagacaaagttcaggtttctgctgccaggagctgagattgctgtgaccaatggcattctcccaaaccaaataatccaacctggaattaccataaaccactcctcatcttttcaaggggtgtccaagttcccagaaaagaacatttgttaagggatggaggcaaggaggtggagaagaaagagcactggccaaggtatcatgagtgtcctgggttctggtccttgaataagccatttatcttctctgcagcttctccatctgataggagtttggaggcagagttttttcttaatgagcaaaagacagtcgtgcctaggagatgtggtgtacatgttagaaagaagggactggctgtgactctataaaagatgaattcatacaaaaacaaattaccctttcccagggagaaagtttggatccagtaattagagatctcaaaaagtagaagacctgccctgtgaggcctgtggcctccaagtttgaatgctgtgtgtcagctttaaaaactagtttcttgctgataaatgtttcatattaagcatgtgttgagagtactccttgcctaccttcactagccactgtttccttcccctcctcccttgtcccttcattctctccagaactttctgctaacttccattctcttcaggacttcagcatggttgggagaagatcagaaaggcatcctcactgtttttattttagtccacttgacctttggggagtagttccactggctcataagtatcagccccccatagcacagcaccccacactgagcccggaagcaataaagaatcccaatctgctgtcactaaccagcacgctcaactgccatgccctttactcttctcatctccctgctttcacgtcacatcaactaatttctctatgagtcagcctcaactctcccaacactctgcccacccttcttctactaccttccagtgagctcctcgaaagaagggtctgcggtgaggatgcccctttatctctgcctatttccttcccattacaaaaacttgaaacctgcctttcccatgttgatttcactttattctcatctttacccatggggtatgcctcctgcaattcctcctagacaatagaatgagaaagaggggtcctcgtcctctttgctttccatgaccatttctccattcttcacctctgtgatgtgtcctctttgaagtccctgataaattcattaccaccttctctccagtcttactaatgttatctgcacaagtgatttccaaacaggaagattttcaaacactgattcctgaagatcacccccaactcgctgaactgagaccaagacctccaagattatggcttaggaatctgcattttttttttttttttgagacaagagtctcgctctgttgccaggctagactgcaatggtggaatcatagctcattgtaacctcaaactcctgggctcaagtgatcttcctgcctcagcctcccaagtagtgaggacaacaggagtgtgccaccatgcccagctaattgttaattttttgtagaaatggagtctcactatgttgctcgggctggtctcaaactcctgaccttaacccatcctccgcctccgcccccaaaagtgttgggattacaggtgtgagccaccgtgcccagcctagaaatacccactagaagcttctgtgtagacaatctgcttagtgatgtttggagacaaagtacctctttattgtattcattgacaaaactctccagtcctctcccatcttcatggaaaattttcacagttcatttacggccctctttccaacacattcactgccaatactcttattgacaataactgtattgttgaaccttccagtatcctgcattcccggatcaaggccccctcaaagccctgatatgcaaatatctgggaaaagaatgttccagaggaaaggaacagctaatccgaggcccctagggtaagatgtgcctgggggtttggagaccagtgtggccagagcaaaatgagcaggaggagagaattggatgatgaggtacgagaggaaggagttaggacagtttgagtaaagtttgaaaaccattataagggctttgacttcaactatgagtggaagtggaatcctccggagagttttgaatggagagtgatagaagttgtcttgtgttgtaacagtctggctgctatactgaaaagagactagttggcggcaaagggggaaatgtggaagccagttaagaagccatcataacccagaaggtgatgcctaataacatctctctgggagcagcggagagatgataagggtttgccttctgaatatgttttttgacaattaatgtaaacatttcaagtaggctgagattttattgcatattaacaatgtccatgttcactcgcggcagccgcccccttctgcgcrgtcatgccgagccagcacctgggcctggaactgggccgcagcccccagcttcacccaccacctccctaccatggacccctgcaaagtgaacgagcttcgggcctttgtgaaaatgtgtaagcaggatccgagcgttctgcacaccgaggaaatgcgcttcctgagagagtgggtggagagcatgggaggtaaagtaccacctgctactcagaaggctaaatcagaagaaaataccaaggaagaaaaacctgatagtaagaaggtggaggaagacttaaaggcagacgaaccatcaactgaggaaagtgatctagaaattgataaagaaggtgtgattgaaccagacactgatgctcctcaagaaatgggagatgaaaatgtggagataacggaggagatgatggatcaggcaaatgataaaaaagtggctgctattgaagtcctaaatgatggtgaactccagaaagccattgasttattcacagatgccatcaagctgaatcctcgcttggccattttgtatgcmaagagggccagtgtcttcgtcaaattacagaagccaaatgctgccatccaagactgtgacagagccattgaaataaatcctgattcagctcagccttacaagtggcgggggaaagcacacagacttctaggccactgggaagaagcagcccatgatcttgcctttgcctgtaaattggattatgatgaagatgctagtgcaatgctgaaagaagttcaacctagggcacagaaaattgcagaacattggagaaagtatgagcgaaaacatgaagagcgagagatcaaagaaagaatagaacgagttaagaaggctcaaraagagcaggagagagcccagagggaggaagaagccagacgacagtcaggagctcactatggcccttttccaggtggctttcctgggggaatgcctggtaattttcccggaggaatgcctggaatgggaggggacatgcctggaatggccggaatgcctggactcaatgaaattcttagtgatccagaggctcttgcagccatgcaggatccagaagttatggtggccttccaggatgtggctcagaacccagcaaatatgtcaaaataccagagcaacccaaaggttatgaatctcatcagtaaattgtcagccaaatttggaggtcaagcataatgcccttctgataaataaagccctgctgaaggaaaagcaacctagatcaccttatggatgtcgcaataatacaaaccaacgtacctctgaccttctcatcaagagagctggggtgctttgaagataatccctacccctctcccccaaatgcagctgaagcattttacagtggtttgccattagggtattcattcagataatgttttcctactaggaattacaaactttaaacactttttaaatcttcaaatatttaaaacaaatttaaagggtctgttaattcttatatttttctttactaatcattgtggatttttccttaaattattgggcagggaatatacttatttatggaagattactgctctaatttgagtgaaataaaagttattagtgcgaggcaaacataaaaaaaaaaagtccatgttcatctctaaatgacatcattgttccaaagcttttccattcttcttaaccttccacctgtcaatctataggagatgacttctcctacttcactcatgcattgactccttcaatcaataaaagtgactaagaacctgctacaggtgaggtgctgtgtttggtgttaaagtgacaacagttatctgtcaataagcctgacaaggttcctatccctgtgttttgtgcactctgggtcaaactcagaaatgcaaacaggtggagagcgatgagttctatgactggtaaagaaaagggcctgctggtttccctcaggatctctgtccttcatctcaaaatgcatcttccttgttatcgttcctctccttcctgtctcagaggaagacctgctcctgctacactctgggcaaccttgtccccgtggccctgtggccccttggttgttgaagtctatgttatgccctatcttttaccctcagtcactctctctgttaacattctccctgtgccctgtaaccctccctcatctttaaataaatcctcctcctttgaccttcgcatgtattcagtcatgcaactcaacaagcatttattgcacagtgatattcaatttgccacttgctaaaagtctgaaccttggcagctgaatgtgatcagaaaaaaagcacgactgctatgactagtctcactttaaattcatggtcgttgaccaagagctaccatacaatccactacctttctcaagttcagtcacattcttcctttcctagatgtctgctttctacttctcttctcttctgaaacttcccacaactcctcgttcattctcttctcagttgacaactttgcttcctatttcactgaaaaatagaagcaatcagatatgaacttctggctgggcatggtagctcatgcctataatctcagcactttgggaggccaaggcaggaggactgcaggttaggaatttgagaccagcctgggcaacatggtgaaactcccactgtactaaaaattttaaaaattactcaaacatattggcaaacaactgcagtcccagctacttgggaggttgagatgcaaggatcacttaaacctgggaggctgaggctgcagtgagccatgattgcaccactgcactccagctcaggcaacagagcaagaccctgtcttgagaggagaggagaagagaggaggggagaggagggcaggggaggggaggggaggggaagggagaggggaggggagaggggaggagagaggggaggggaggggaggggaggggaggggaggagaggaggatcaggtgaggagtatgccaaggagtgtttttaagacttactgttttctctttcccaacaagattgtcatttcctttaaaaagtagttatcctgaggcctatattcatagcattctgaaagaaagaaaagaaaagaggaaagaaagagagaggaaggaaggaaggagaaagagagaggaaggaaggagaaagagagaggaaggaagggaggaagagaagaagggaggaagaaaagaaggaaggaaggagggagggagggaagggagggagggaaagaggaagaaaggagggaaagaaggaaggaagagagagaggaaggaaggaggaagagagaagaaggaaggaggaagacagagagggagtaaggaaggaaggaaggagaaagagagaggaaggaagaaatgaaggaaggaaggaaagaaagaaaaaataaaagagtgaaaacggactggagaagaagaaaccacagttgctgctatatccaccagcctctctgcatgtcctggcctcagccctgctgggctctggtactgaccacttccttccttcctaatttcctaattgactaggccagctgagcagggcttttctgtgctgaggaggtaaatctctggatatctagactgaggggtggaaggagccttccagggcacacatgagacatggcaggggtaggctgctagttttattttgttttcttttagacacagggtcttgctctgttaaccaggctggagtgcagtggcgtgattatagctcactgcagccttgacctcctgggtctcccacaatccttccgcttcagcctcttgagtagctgggactgcaggtgcacactaccacacccggtccatttatttttatatttcgtagagacaagatcttacagttttgcacagagtgatcttaaactcttgaccccaagtgatcctcctgccttggcctccaaaagcattgggattataggagtgagccactgtgctggacctagtctgtcagctttgaagctttagatatgaactcagagggacttcatttcagaggcatctgccatgtggcccagcagagcccatcctgaggaaatgactggtagagtcaggagctggcttcaaagctgccctcacttcacaccttccagcagcccaggtgccgccatcacggggctcccactctcaactccgcagcctcagccccctcaatgctgaggagcagagctggtctcctgccctgacagctgccaggcacatcttgttccctcaggttgcacaactgggataaatgacccgggatgaagaaaccactggcatccaggaacttgtcttagaccgttttgtaggggaaatgacctgcagggactttccccagggaccacatccagcttttcttccctcccaagaaaccagcagggaaggctcagtataaatagcagccaccgctccctggcaggcagggacccgcagctcagctacagcacagatcaggtgaggagcacaccaaggagtgatttttaaaacttactctgttttctctttcccaacaagattatcatttcctttaaaaaaaatagttatcctggggcatacagccataccattctgaaggtgtcttatctcctctgatctagagaggtaagcagggtcgggcctggtagtacttggatgggagaacacctgggaataccaggtgctaaaggctttaagaataaaaaataatgatcctgctttgtgtttatcccatgttgagttctgtgcggggcagagggaacacacggtaaatgcgttatggggaattataggctacttgagggagtgacagtctggtggtaactcctgccttcctccatcagtgccacattggcatcctcttatgcagtcaggcttcagggctgatgggttcagaaccgagggcttctggctctgagtgaggtcctgctgcaaggtttcctagatgagccactgagactctaataagatccagtggaaataaccaggctctcgtcggaatataagtcccaagggaagctgtgccagtcttgtgggcgactgcctgacttctcctttcatttcagcaccatgaagcttctcacgggcctggttttctgctccttggtcctgagtgtcagcagccgaagcttcttttcgttccttggcgaggcttttgatggtaaggcttcagaaggtttgcaggatttctgaagagaaacatcgccctggacctgataaactggggaaaatgatgctttcggaaggctgcttttgaaccacagagttgctagtgtctgcgttgctgaggcctgccaggaactagggtttgctgggttgcctgtctcgagtctttcagagctgctgggaatatcccctttccccgtagtgcagcttctcaggatgtgttaagtggatggatcacatttcagaagccgctgcaaggtgtatcaaaaacacatctcctgagccgtaagggacggggcatccagtaacaacgcacacggggtatttttgggcttccttaagatttgagccgctgccttaggttgtgctgcccaatgtgcctggggagctgctaaacagattagagagtcgaggattgttgtcagttactcagagaaagaacaatcatcctttccaggagcacctgagctgtttgttttgcgtagaagatgcaaaataaggcctgcaatgggtataaaatgtccctcagcataaatcgcataggagtatgactaaggctgttgactcttctgtcttctttctccttcctccttcgatttcctagttggataatgtacagggctctttagcctcgctctgtcaggggctcccttcctggtttgttctgtttccattcttccttctccagccttcttgacaagagctgggaactaacgtgcctcaagcccccacaaggaccacagcattttctcatttagtttcagaatgactctgtgacgcaatcttcctctcttggaaggtgagaaagctgatcttggaaggtgagaaagctgagacttagagcagctgaagccaatgcccagggacttactgccagtcagcaggtggcagggcagaggtttgagcccggctgtgcttgaggtcagggctcttgccaggtagacgcatcactgaccacctcctagaggttgatggttatgaatctcaggcacaccttggcatcacctgaaatacccatgccttcaactccccagcagagtctgcagaaactggcctggggtgtggcctgggcactgggactttcagtttctctctgggtgattagaaagtgcagccaaggctcacgcctgtaattccagcactttgggaggccaaggtggatgaatcacttgaggtcatgagttccggagcagcctggccaacatggtgaaaccccgtctctactaaaaatactaaaatgtagccaggcgtggtggcaggcacctgtaatcccagctactcaggaggctgaagcacgagaatcacttgaacccgagaagcagaggttgcagtgactagagatcgcaccagtgtcctccaacctgggtgacagagcgagactccatctaaaaaaaatgaaaaagaaagtgcagccaaggcagagcaccactgccctattgcttcctcaagcaacccacagcatcagtacagcctactaagaaagtatttagggacttttatgctcctaacagtcactggaactcacgtcacaatgacgtgtattccatttgcaagaatatatactttaggtcggggtgcggtggctcacgcctgtaatcccagcactttgggaggccaaggcagggggatcacgaggtcaggagttcgagaccagcctgaccaacatggtgaaatccccgtctctactaaaaatacaaaaattagccaggcgtgatggcgcatgcctgtaatctcagctactcaggaggctgaggcagaagaatctcttgaacctgggaggtggaggttgcgatgagctgagatagcaccactgcactccagcctgggcgacagaactttagtagtcagggcagaagtactctgtgtctgccacctttctcagcatcagtattccatgtcactacctcattcatacacactcctggatcttatcataggcagcttcattctatagcagtggctcttcaccagggcacttgaagaagccaactaggataaaggaatgtgcttctcaacccatggtatccaaggctgctatgatcacaggctgaaagcttgaagtcagtggaagatttgtccttcctcattcccctctaaggtgttgttggagtctttatgttctcctgatgtcccttctgcctttcctttcctttccaggggctcgggacatgtggagagcctactctgacatgagagaagccaattacatcggctcagacaaatacttccatgctcgggggaactatgatgctgccaaaaggggacctgggggtgcctgggctgcagaagtgatcaggtaactggagctcctgggacgttagggctgggtgagcagagcttgcctgccttggacagtcaggagggagacgagctccttgtggagaagttagaggctgcggcccctcctcctcttgccctctctctgcctctgtgctcagtgtgaggtctgagtggatggtaggagtgagtgattcctcatcctccctctctgggtgctgttcatccagcctaggggtg

SEQ ID NO: 8915 - DNA, 23421 bp, Homo sapiens
tattgaaacattaagggacagaagaagagtagagtgcatataccacttggacttgcctaattaaaaaacacattttttttagaaatgaggtcttgctgtgttacccaggctggtctcaaactcctggcctcaagcgatcctcccgccttggcctcttggtctgattttttgtgtgcctagatagacatatttggatacatacttgatccaccagggatctcacaggggacaggaggttcccagagaatgaggctccagccttcccagttttccagcagtgtcctcctgccagccctccctcaagtcccaatcttgaatgaccccagcccactctgtccacagggccgaggggggctgggctccatctttgtctgggcctcggggaacgggggccgggaacatgacagctgcaactgcgacggctacaccaacagtatctacacgctgtccatcagcagcgccacgcagtttggcaacgtgccgtggtacagcgaggcctgctcgtccacactggccacgacctacagcagtggcaaccagaatgagaagcagatcgtgagtcttacctgggggtgggggctggggagatggggctgctggctggctctgtccagcaccctcttttggaggctgtctgcctccacccccatgtggctgggtgatagtggctcaggcatcatgcaacatgaactctggggctctgtaggttcttggaggccatggagccatctctgaagactttgaaaagcctagactctctctaaaaacatactttgttcttattcatctccaccctctagttgaacccccttattcctttggaaaatgaggcccaggaggggctcgtcattagcatgtccacggcaagttagcaaggcagcagctgggacctggggttcttggccctggctccccataccatctgtggtgcccagggcctgtatgcagagggagggtaggcaggtggctcctctagccccctccacccatcacaggccccaatatgattctcttcctggcaggtgacgactgacttgcggcagaagtgcacggagtctcacacgggcacctcagcctctgcccccttagcagccggcatcattgctctcaccctggaggccaagtaagtgggtgggggccagcggcaaccctgtccctaccagcactctctgtagggcagcccttagggcagctggagagctgctcccaaaaaagactgatccccagcctctcccttccttctttgcagtaagaacctcacatggcgggacatgcaacacctggtggtacagacctcgaagccagcccacctcaatgccaacgactgggccaccaatggtgtgggccggaaaggtgagggcaggctggcccggcaggctggatgtggagttaggtagaaggcactctgtgcctgacagctgaccctaccttccctgtccccacagtgagccactcatatggctacgggcttttggacgcaggcgccatggtggccctggcccagaattggaccacagtggccccccagcggaagtgcatcatcgacatcctcaccgagcccaagtgagggctggacccaggctgggagggggccagtgggacctgagagtcgcagggggtgcccgctggtccctctgggccaggctgaccatcatggtgctctcctgcacagagacatcgggaaacggctcgaggtgcggaagaccgtgaccgcgtgcctgggcgagcccaaccacatcactcggctggagcacgctcaggcgcggctcaccctgtcctataatcgccgtggcgacctggccatccacctggtcagccccatgggcacccgctccaccctgctggcagccaggtgcttgctctgtccctgcccgccctgcccagcgccgccgcctctcacagcccgcgtgcttgcctttgctcgctcacacggcccagggggcactgagtgctactcagtggggcactcttggcattttgggagggacaattttgtcctgtgggactgtcccatgttgcaggaatccctggcttgcaaccatttaatgtcagtagtgtgccccaccttgtgcggtgcctgtgtacctttctagaatcccccagttgagcacgtctggctcactgagaaacagccaagccagcaggcacttctggccccatggggttggtctgcgtgggggaagggtgtgtggcccatgtgctgtgggttagatgtccctggcttggggtcccgcagaggcctcagggctgtgtgcactcccctccccaggccacatgactactccgcagatgggtttaatgactgggccttcatgacaactcattcctgggatgaggatccctctggcgagtgggtcctagagattgaaaacaccagcgaagccaacaactatggtactgggggcacttgaggggtaggggtacgaggtggagggctggcaggatctcgagcactgggtgtggtgccagcactgtcttaactcttgcctcctccccgctctggaacagggacgctgaccaagttcaccctcgtactctatggcaccgcccctgaggggctgcccgtacctccagaaagcagtggctgcaagaccctcacgtccagtcaggcctgtgtgggtcagtagtgggtgctgttgggctttgggggcctgagtctgggggtaaggcgggtgcctgtcctgaagcccagctctaacagaaaaaagtctcaagagacctagggcccctggggctcttgggatgaccacagtcctggggctggaggatcctggggatgtggtgacttggcttggggctgctgtggtcctggggctacagtctgtttagctgacacacacttgccctctctcccacgccggcagtgtgcgaggaaggcttctccctgcaccagaagagctgtgtccagcactgccctccaggcttcgccccccaagtcctcgatacgcactatagcaccgagaatgacgtggagaccatccgggccagcgtctgcgccccctgccacgcctcatgtgccacatgccaggggccggccctgacagactgcctcagctgccccagccacgcctccttggaccctgtggagcagacttgctcccggcaaagccagagcagccgagagtccccgccacagcagcagccacctcggctgcccccggaggtggaggcggggcaacggctgcgggcagggctgctgccctcacacctgcctgaggtggtggccggcctcagctgcgccttcatcgtgctggtcttcgtcactgtcttcctggtcctgcagctgcgctctggctttagttttcggggggtgaaggtgtacaccatggaccgtggcctcatctcctacaaggggctgccccctgaagcctggcaggaggagtgcccgtctgactcagaagaggacgagggccggggcgagaggaccgcctttatcaaagaccagagcgccctctgatgagcccactgcccaccccctcaagccaatcccctccttgggcactttttaattcaccaaagtatttttttatcttgggactgggtttggaccccagctgggaggcaagaggggtggagactgcttcccatcctaccctcgggcccacctggccacctgaggtgggcccaggaccagctggggcgtggggagggccgtaccccaccctcagcaccccttccatgtggagaaaggagtgaaacctttagggcagcttgccccggccccggccccagccagagttcctgcggagtgaagaggggcagcccttgcttgttgggattcctgacccaggccgcagctcttgcccttccctgtccctctaaagcaataatggtcccatccaggcagtcgggggctggcctaggagatatctgagggaggaggccacctctccaagggcttctgcaccctccaccctgtcccccagctctggtgagtcttggcggcagcagccatcataggaagggaccaaggcaaggcaggtgcctccaggtgtgcacgtggcatgtggcctgtggcctgtgtcccatgacccacccctgtgctccgtgcctccaccaccactggccaccaggctggcgcagccaaggccgaagctctggctgaaccctgtgctggtgtcctgaccaccctcccctctcttgcacccgcctctcccgtcagggcccaagtccctgttttctgagcccgggctgcctgggctgttggcactcacagacctggagcccctgggtgggtggtggggaggggcgctggcccagccggcctctctggcctcccacccgatgctgctttcccctgtggggatctcaggggctgtttgaggatatattttcactttgtgattatttcactttagatgctgatgatttgtttttgtatttttaatgggggtagcagctggactacccacgttctcacacccaccgtccgccctgctcctccctggctgccctggccctgaggtgtgggggctgcagcatgttgctgaggagtgaggaatagttgagccccaagtcctgaagaggcgggccagccaggcgggctcaaggaaagggggtcccagtgggaggggcaggctgacatctgtgtttcaagtggggctcgccatgccgggggttcataggtcactggctctccaagtgccagaggtgggcaggtggtggcactgagcccccccaacactgtgccctggtggagaaagcactgacctgtcatgcccccctcaaacctcctcttctgacgtgccttttgcacccctcccattaggacaatcagtcccctcccatctgggagtccccttttcttttctaccctagccattcctggtacccagccatctgcccaggggtgccccctcctctcccatccccctgccctcgtggccagcccggctggttttgtaagatactgggttggtgcacagtgatttttttcttgtaatttaaacaggcccagcattgctggttctatttaatggacatgagataatgttagaggttttaaagtgattaaacgtgcagactatgcaaaccaggcccagtctccagtgtggtaccgttgctcctgcatcgcagctgaggatagggggccagttaggcctacacagtggcctgcctgcctggatgtgggcccaagtcagaaggccaaagtcctccaaggggcgggaggatgcgccagcccctagtggaggagctggtgcccctggggtggggctggtgacccctggtcctcaggagctgagcactaaactcccaaagtcctggtttccagcagtgtgaagaactgggcctattgtgtcttcctgggctgaagtgatctggtcgccacaggctatagggctgaggcctaaggtggagggaggcctgactgaatcaagatgacttcttgtggggagcctgagtcccaaatggaaaactccacgcctgtccgctccccaacccctgccccttgatttccccaggtctcccttgggacaggaagcccctgcctgggggtaggaggatggggacaaaaccactaggatctgtatccgagaagcagtctctgttcgggatatttacttggaaattttattcaaatggaagctggcgcctgagcctctccttagggaattccgtgaggtggggagggctgggaccagggttccctctttctcttctgcggtggccctggcctggtgctaggactgcgcgcctcccctcagtacccgcggacaccctgggcttccctgggcccagcatctgcctggggcctcgccctgggctccccctcctgacccccaccttgcgccccttcccggtgttcccggggcgctgccgggccctggggcctgcggggcgcgggcggctcttggctgggccattctttcccggccccctcctcccttccgtttccgtggccgtgcggccggctagaggctgcggcccagcgcggagcaggggggctggcaggcgtcgggacggtcgggccggtcccgcccgccccttcccctccacaggcccgccccggggcctgggccaactgaaaccgcgggaggaggaagcgcggaatcaggaactggccggggtccgcaccgggcctgagtcggtccgaggccgtcccaggagcagctgcccgtgcgggtacctctagccccggggcctggaggagcggtgggagctgggggcgcggcaggcaggggcagagcaggcgttccgagggccagagacccacccaggtsggggtaggggccgcggaagggcggggatggccgcaggggcagggctcaggctgtgggcgcctgaggcttcagctggggcaggcttggcctgtcgaggacctgggcaagggtgtccctgtaaggggtggtgggtggaagggcctggggagggaggctccaggttggctcctgttcccgaacgtgcggaggagaccctgacgctaaggaagcaatgagggccagtccccaggccaggctgctgctgggtacccatggctgcgtgtgagcgaggcaggaccccacctcctccccgtctgcagtccatcctgaccctacagtccccagyctcctcgtcccatgcctccgtctccagctgctgccttgcctccagggatggccccttttctgtccccagaacagcactatgggcttctcttcygagctgtgcagcccccagggccacggggtcctgcagmaaatgcaggaggccgagcttcgtctactggagggcatgagaaagtggatggcccagcgggtcaagagtgacagggagtatgcaggactgcttcaccacatgtccctgcaggacagtgggggccagagccgggccatcagccctgacagccccatcagtcaggtgggtctctatgggactctggtgggtgctggcgtatctgccttctccttcctctcctgggggccctctggggcagtggctggagatctggcaggccaakgcttgggagccattgtgcccccctccctgcctcccccatctgtgctrtatagtcctgggctgagatcaccagccaaactgagggcctgagccgcttgctgcggcagcacgcagaggatctgaactcagggcccctgagcaagctgagcctgctcatccgggaacggcagcagcttcgcaagacctacagcgagcagtggcagcagctgcagcaggagctcaccaaggtgagcgggcagcactggggcttcggtcatttctgtctaaattttgagcctcgaaggggttgttttgcacaagaggccctggattcactggggaagtgtaagtccctgaccgcaggcctggcttgctctaaccttgatgyagcttcctctcttccttcccctacgttgagctggcttgcagcaaggcctctctgtgctttttctgtgcctgggcaaagtgctgggartgtaaggatgagtgaccggtcacgtgcctgggagaagctcagaatcggtactcgcctccacactgtgccatctggctctgggttctgagagtcagggagaggaatgagggtcagtctgtttgccttcgacctakgcagcctcctctcagggcccgagactgggcagcagcatggccccccgaaggtcgaggaytcgggccgtgaagtcagcctgcctaggtttgaatcccacccagctcctcmgtctagaggctgtgtgatttggaactatttatctgggagcctagtgcccccattcagtgtgctggtcaccctccctgcaccacaccccttcctcaagtgcagagcccagccttgccatggacccacagcggcccctggtggccaccctggccccattcctcgccccaaaagatcatctgattcaagggtgggcccatttttataaagttttgctggaacacagctatgcccytttgttttcatattgtctgtgactacaatgacagagttgagtaattgtgacagaggctctatggcctacaagcstaaaatatttatttactatctggccctttaagaaaaagactgatctagtcgaggaatctagctcagttacagatggggaaactgaggttgggcgcttgcccaacatatcccagcacataaacaggagaactgggacgagaacactgatctcgggctgtcatctattcctactgccaagaacataatttgcaggacccagtgcaaagtgaaattgtgggggtctttgttaaaagattgctaggaatttccaggtggcaataatggagaatgaaaccaagcacagggcccttctacatgtggagccccgtgtgactgcacaggccgtgcacacctgcaactggccctgcctgccaccaggctaccactgtcagtccaaggagggaccrttgtagcctgtagtctacctctttgcctccccaaggggtctgtcttyaacaggctctctgatctttgactctcacgtcagcagccagctttcccagaagtctccaggtgctccttgcctgacgacaggacctttccagggcttcaccccaggcaagaatcttccacaactggggacctgctgccccacactggcctctcctctctccctagacccacagccaggacattgagaagctgaagagccagtaccgagctctggcacgggacagtgcccaagccaagcgcaagtaccaggaggccagcaaaggttcgtggcttcccttgctggcagggagggaatccgaagccagtgctgacctgtccttggrtacccagagagtgggggctgcctgggcctccatgctgtcatctataccccttgccccscttctggcagacaaggaccgtgacaaggcyaaggacaagtatgtgcgcagcctgtggaagctctttgctcaccacaaccgctatgtgctgggcgtgcgggctgcgcagctacaccaccagcaccaccaccagctcctgctgcccggcctgctgcggtcactgcaggacctgcacgaggagatggcttgcatcctgtaagcccgcagccccrtcccctggcccccacccttgagcagccctmagcccagccatcaggcccagaggcaggwcccagaaaatccattgctgggaaggtgctggccatgtaaccacatgagaacgggacctgggccaaggattggaaacaggcaacttacctctgaattacactattccagggtctcattattccagggttttattacattcattgagcactgttctgggctctggattataccagagaacgatggtagacaaaaacatctgtcctcagggatctttcgtgttagtggagtgagratgtgaggagcactaagagccatggagaaaaataaagcaagagaagtggatcgggacctgggagcacggaggcaagggaggaggtgacagttgtccatagagtgatctgggaaagcctcttgagaggtgacattcaaagaggcccctgagaggggtacgggagtgaatcatggggctatttggagaaagaccattccagaaaggaggacagcaattacacaggccttgaggtaggagagtaccagggactaatagccaggaaccagtggtgcctctgagagtgagggagggggagagtcatacacgaggctggaggaggcaggcgtcaagggctactgggtgatagaaggtctagcagggccatggtgaggactttggctctgggtgaacaagaatggcatgatctgacctctgtttttttgtttcattttgttttaactttttttgagtcagagtctcgctctgccgcccaggctagagtgcagtggcatgatctcggcttactgcaacctccgcctcccaggttcaagtgattcccctgcctcagcctcccgagtagctgraactacgggcatgcgccaccacacccagctaatttttgtatttttagtagagayggggtttcaccatgttgcccaggctagtctctaattcctgggctcaaagcgatttgcctgcctctgcctcccaaagtgccgggattacaggcatgagccaccatgcccagccctgacctctgttttaataaggccactctggctgctgtgctgcaaatagacttcagggagcaaggacagaagctgggaggccagagagcaggctcttgccataatccagatccaagcttttggccactaggacggggaggtagcaatggaggtgaggcgcggtcaggtcctggaaggtgaagccagtgggatttccctatggattggaagtggggcrtgaaatagaggagtcaggggtcactctggggatttggcctggagcagctggaagatggagtggctgttaaytyatgtagggaaggctgtgggaagaagaggtttaggagacaaggatagcagttcatttatttatttatktatttatttatttatttatttatttatttagagatgtagtctcattctttcgccaggctggagtgcagtggcgcgatcttggctcactgcaacctccacctcccaggctcaagcgattctcttgcctcagcctcccgagtagccaagtagctgggactacaggcatgtgccaccatgcctggctaatttttgtatttgctttttcagtagagatggggtttcaccacgttagccaggctggtctcgaactgacctcaggcaatccacccgcctcgacctcccagtgttggtattataggcgtgagccactgtgcctggcccactggatccttattacaactgccagtgtccctcttatatatatcaggaaatagaagattagggagaggttaaataatttgcctagagtggcatggctagctcgaagtgaggcaggggtcaaccccagccctgactccaaacccagggtcctaggcctgaactgcccagccttgcccagcctgaggctcccctgactggggatccygtctcgggggcaggaaggagatcctgcaggaatacctggagattagcagcctggtgcaggatgaggtggtggccattcaccgggagatggctgcagctgctgcccgcatccagcctgaggctgagtaccaaggcttcctgcgacagtatgggtaagccccgtccttgctcctgctgggcccaggkctgctggcctgtccactgacggggcgctgtcccccacaggtccgcacctgacgtcccaccctgtgtcacrttcgatgagtcactgcttgaggagggtgaacygctggagcctggggagctccagctgaacgagctgactgtggagagcgtgcagcacacgtgggtggtggctttgcacytgggctgcggcggggmtcccagcagaccacgagtktttatgtaggcagggctaggtcgtggagactgtccacacagagctgtcaccaggtggccgggcttgcttggctctacagggatgcactggacctgggttgagggggcaggagggctcggttctaatgctgcccttctcttgggtgcaggstgacytcagtgacagatgagctggctgtggccaccgagatggtgttcaggcggcaggagatggttacgcagctgcaacaggagctccggaatgaagaggagaacacccacccccgggagcggtgagtgggcccctgcctgcagcagcctcctgggcctccctccctcctacctaccctaactgctgctggctasccgccgcagaccgagcccttattctcatccaycctcccacccgcccctgcctgcagggtgcagctgctgggcaagaggcaagtgctgcaagaagcactgcaggggctgcaggtagcgctgtgcagccaggccaagctgcaggcccagcaggagttgctgcagaccaagctggagcacctgggccccggcgagcccccgcctgtgctgctcctgcaggatgaccgccactccacgtcgtcctcggtgagctgccccatccgcggccgctgcccgccaccggcctgcccacctggggctgcgctcctcattttcgccctccccctccctaagcctggccacccgctgacgtctgtccctggcctcaggagcaggagcgagaggggggaaggacacccacgctggagatccttaagagccacatctcaggaatcttccgccccaagttctcggtgagtggcgcccagcctgggcccccctactgttgtgtttcgagtttaatcactgggatstcctagagaggaggctctgcccaggctgcttgtattgggaagttcctctcttccctgggattccaggctgcagatgtccccagaccctgcccctgtgacccctccctttccatcgccccagtgtgctaaagggaccagcaacctcgactattccatggctctccctgcttcaggagcggttgggggcctgtggcctggaggaggaggcaccagcttggtttggggtcttcctgcctgggcttcccttcccagctctgcccagcgtgagcctgggccagtccartgcccactccaggggcctgtggatggctctgcatgccactccatggttgtaagggctgagggcatataggggggagagagagacccccggctgcccccacggcctcttcaayaaggtggttaagtgactcctcctcgatcctcccttgcccagctccctccaccgctgcagctcattccggaggtgcagaagcccctgcatgagcagctgtggtaccayggggccatcccgagggcagaggtggctgagctgctggtgcactctggggacttcctggtgcgggagagccagggcaagcaggagtacgtgctgtcggtgctgtgggatggtctgccccggcacttcatcatccagtccttggatgtgagtggggctgggacccgagccttccaggcctcactcttcccctcccttcccttccccaagggaaatggcctttcagggtagggggtagctgccaggtcttggatgcctccctagcagggctggctggaaggggccacagagaccaccctgtccctgcaacaaaatagaggcttaagtgtgagtcctcccctggtggggcagcaggatgtcatgtgccatcagatggcatcttttctggaggtctctctgcccctggtcctgggcaggccctttctcccctgctgctctccctttccccctcccagggctcacgccccctcagaatggaggctgctgaccccgggtcccctgccctgcagaacctgtaccgactggaaggggaaggctttcctagcattcctttgctcatcgaccacctactgagcacccagcagcccctcaccaagaagagtggtgttgtcctgcacagggctgtgcccaaggtgagcctgcacccagcctggcccatgccacctgtggcagggcttggggagtgtgggtcaggcccacccagcgtctgagcagaaagggctttccaggccctccgtctacatacaagatgcagagtgagtgaccctcagggccagccttgctctaggtttggaatgtcagggccactcctatgccatgggctgtacacaccaggttggtgcttacctggtcagggcacctgcctggaccccgtagtcatctcagtgtgctccccacrtggtcccacccctggtcacatatggaggcgccaaaaaatggaggacacagcccttctaagggcccagcaccccttttcttcagacttctgatcccctgtctcctctcttccccaggacaagtgggtgctgaaccatgaggacctggtgttgggtgagcagattggacgggtgagtgygcctctgctggcctccttgtcgctggcgacttctcctgagtcgcgcctgggccccctgccctaccacccagaracctccctgccccatctgattccccacttgtaccccgactccctgcccagcccccaccacacaccatcctccaggaaacgggacagtacctaccctgaaaactcccagcagacagctctgccagcaccctgacctcatcacccccacccaggccgcccccatcgagctcttgtgtgcacgcagggagacaccctgttactgtaagccataagatacctgtttagggaagaagtcactgtcctaaaaatcagaatgcttttcaaacccaagggagagtgatttttggatttccatgtcacttctctcaggaagggtggcacatcggaggcaactttccctgcctgccccatgtgctctctaggttccccagcgagggtcaaactcccagagagcctgggtgaggggtccgaacacgggggcccctcacccaggggtaggaagcagaatgggtaggaagcggagaagagaactgcgggactgggaaggccgtggtaggagcccaagaccgtttcaggggaactttggcgaagtgttcagcggacgcctgcgagccgacaacaccctggtggcrgtgaagtcttgtcgagagacgctcccacctgacctcaaggccaagtttctacaggaagcgaggtgggtgataaactaatgatcaccacrggtcccgcatacacagaggttacactgcatggcacagtgtgaagtgcttgaccaccgtggtggtgtttagtcctcgaggccccccattgcgggtagtacccccttatartgccgaagggtagaggctgccccaggtcacacgtccgggtctgctggccttggaggccaagctcttctcccatcatccctggggggccctggggaggcgggcctggccacgtagatcctgagcagcagtgccctccaggatcctgamgcagtacagccaccccaacatcgtgcgtctcattggtgtctgcacccagaagcagcccatctacatcgtcatggagcttgtgcagggtgagcgcggggcgctgagctccaggtagggcgcgcagcctggtcaggtggcagccttacctcaggaggctcagcaggggtcctccccacctgcagggggcgacttcctgaccttcctccgcacggagggggcccgcctgcgggtgaagactctgctgcagatggtgggggatgcagctgctggcatggagtacctggagagcaagtgctgcatccaccggtgagtgggcggtggccacgggccctgccaacacccccgaccagagtcaagaggtacctatacccctagggccccccgctggaccatcaggcrtcagctccagagggggagttggcctctstggtagacaggggtgcccagggccgggagcagcttttgtccttggctttcctagagtgttcagccagggctgggcaggcgactgttggccaaatgagcccctgccctgtctcacccagggacctggctgctcggaactgcctggtgacagagaagaatgtcctgaagatcagtgactttgggatgtcccgagaggaagcygatggggtctatgcagcctcagggggcctcagacaagyccccgtgaagtggaccgcacctgaggcccttaactacggtacctagtccctgtmtascctggactccatggccagaggccaggcctgggtcctgcyggctgcctcgccctggccccagggagggtgcactcaygctgcctcacctcctcgcctcctctgcaggccgctactcctccgaaagcgacgtgtggagctttggcatcttgctctgggagaccttcagcctgggggcctccccctatcccaacctcagcaatcagcagacacgggagtttgtggagaagggtaagcaccctgtgatgacagcagcctcaggctgcaccctcttccagatgctccagccggactcttctaactcccttaatgccaaccttcccaccaggcwgaataagaataacctggccagttgctcacgcctgtcatcccagcactttgggaggctgagctgggtggatcacttgagcccaggagttcaagatcagcttggacaacacagtgaaactccatctgtacaaaaaatacaaaaatagactgggcacggtggctcacacctgtaatcccagcactttgggaggccgaggcaggtggatcacctgtggtcaggagtttgagaccagccagaccaacatggtgaaaccccatctctactaaaaatacaaaaattagccaggcatggtggcacgtgcctgtaatcccagctacttgggaggctgaggtgggagaattgcttgaacccaggaggcggaggctgcagtgagccgagattgtgccactgcactccagcctgggcgacaagagtgaaactccatctcaaaaaaaaccaaaaaacaaaaaatacaaaaattagctgggtgtggtgacatgcgcctgtagtccctgctactcgggaggctgaggtgggaggatcactggagcccgggaggtggaggttgcagtgagctgagatcatgccactgcaccccaacctgggtgacagagagagagagagaccttgactcgaaaaagaaaaaaacctgggcgcagtggctcacgcctgtaatttcaacattttgggaggctgaggaaggtggatcacttgagtctaggagtttgacactagcctggccaacatggcaaaacctgtctctactaaaaatacaaaaaattagcgaggtgtagtggtgcaagcctgtaatcccagctacttgggaggctgaggcacaagaatcgcttgaacctgggaggtggaggttgcagtgagctgagatcacaccactgcattccagcgtgggtgacagagcaagactccatctcagaaaaagaaaaaaaaaaatagaatatccctgtagctactactgagtgagcacctggtctgtgctaggtcacatgttatttcatttgctcatcactacatgtgtggtagggattaatatgtccctttctcagatggaaaaacaggctggcagaggggacacagctagcacgtggtaggattaggatcagaagccaggcctctttgtcctttgggcccttggtggagaacagtgcatccttcagaacagtgcatcttaagcagctcctatggctcatggtatcccccagagtctgccgaggaccctcaaactccctcctcatgcctggtgtgctgtgcctctcctcacagggggccgtctgccctgcccagagctgtgtcctgatgccgtgttcaggctcatggagcagtgctgggcctatgagcctgggcagcggcccagcttcagcaccatctaccaggagctgcagagcatccgaaagcggcatcggtgaggctgggacccccttctcaagctggtggcctctgcaggcctaggtgcagctcctcagcggctccagctcatatgctgacagctcttcacagtcctggactcctgccaccagcatccacactgccggcaggatgcagcgccgtgtcctctctgtgtccctgctgctgccagggcttcctcttccgggcagaaacaataaaaccacttgtgcccactgaacactcctggcatgtgcactcctctggaaggcaggtctcagaaggcacaagtgccggtatggtggccttggggaaggaggaggacaggcagtatgcatggggcagagctgacatgatttagtagcagctggatgtgagacatgcggaaggcgggggagagatcaggatgatatacaggctatggccagatggcggtgtcatcccctgaaataggattataggaagaggatcagagcttcgaggaggatgttgagtttagagatgttgcattttattggagataaaagtgtgggtgaagccaggtgtggtggtagacacctgtagtcccaggtacttgggaggccaaggcatgtggattgcttgagcctagtttgagaccagcctgggcaacatggcaaaactccatctttacaaaaacaaaaaacaaaaaacaaaaaaccaagaaaattagccaggcgtggtggcacacacctatagtcccagctactcagaaggctgaggtaggaggatcaattgagcctcggaggtcgaggctgcagtgagctgtgatcacaccactgcattccagcctgggcaacaaagcgaggccctgtctcaaaaataagtaaataaaaataataaataattaatttaaaatgtagatgaataggtctggaagcccagatggagatgaaggctggcaatagatgtgtgaatcattggcttatgaatattagagagtagctgacactatggatgcgtataacactcgcataaaattcaggaggagatgagaagagagttccactcaaagaagactgatgtggctgatgaggaagaaaatgcttttgagggagttgtttctcaagatgaatttattgaggaataagatggcagactggggagccttcacctcctcccctaagtcccagtgaaacctaaaaagtcatctgaaatattaacatcaccaaaagcgaagtttgagaagataaggaagtatgaacataactaaaaaacaaagtgggaaacatttgtaatacagaacagggcaatgaaaaccttgaagtaaaatggccatccctcaagaaagttcaggaaatagttaacatcagctgggtgcagtggctcacacctataatcccagcactttggaaggctgaggcaggtggatcacctgaggtcaggagctcgagaccagtctggccaacatagtgaaactccgtctctgctaaaaatacaaaaaaaattagccaggcgtggtggtgtgcacctgtaatcccagctactctggaggctgagaagggagaattccttgaaccggggagatgaaggttggagtgagcagagaccgcgccattgcactccagcctgggcaacaagagcgaagaacaaaactatgtctcaaaaaaacaaaacacagcaaacaaaaatctattttgaaagagatgagagtgagccatataacttgtttaaacaaaaggaagttgtgttgtcgtgtaattaaatgaaaatactaggaagtgaaataatacctccaatggaaatggtagaaagcagaactgaaaaacttctgctaggtaggatatggtaggtctctgcacgccaccactcccattgcaaccgctagggaaaaaacagctaagatgaaaatgtctttttttttcttttttttttttttttgagatggagtctcgcgctgttgcacaggctggagtgcagtggcgcgatctcagttcactgcaacctctgcctctcgggttcaagcgattctcctgcctcagcctcctgagtagctgggattacaggcacgcatcactacgagcggctaatttttgtaattttagtagagacggggtttcaacatgttggtcaggctggtctcaaactcctgacctcaagtgacccgcccacctcggcctcccaaagtgttgggattacaggcatgagccaccacgcctggccgaaatgtcttatttttaaaaagaatgaagagtggtcacagaaataaagactgaatggactaaaatttcaaggagggaagagcccttccgagttgaactagtgataggcagctattttcttccctgaaacatttgcccatttgggacatgaggatcagacttggcccaagcagagagactctactggggaagagagaaaggaacagtttttggtagttgcaaggacttgctatggattaggacctagaggagcacaaaatgtagagtgttttccccatgggacatttgctgagttctgaggcagtgcaggagactgagaaggcaagtcccacagtcttgcagtgtttagagaggaggcctggagtgaacaaatagctggtctccccaacataaggtatttgccaggttttgcgcctgtgtgggttgggaagctaaagggctccctttaaatctctgaagagcagaactttaagatctgagagagacagagactgactaggctttcaatccaaaatccaagagggccattcctaaggaacaaggacaaccaggaggggattgaattttactgcaattccaacactgccccaacccagttcagtacgtaattgcatcgaagtgactagctcctgtagggaataacaagatttgaagcccctatccttcttttatacccaatatgtgacatacaattaaaaatcataaaccatgcaaaaaatggagaaatatgggtctaatacataaaagaaaaaataaataaaagcagacccacatgtgatccaggcattggaactggcaaagatttttaaataacttggttaatatgtcaaatagagaagaagatggacaaaaaagaagcaaatgtagagaatgtcaacagagttggaatctattaaaagaggatgaaaggaggctattgaactgaaaaatacccctgaaattacaaactcattggatggatttcataaacattgatagaagtaaaggataaaatcacaatcgaatttagaaattaagtcatatcagaaaacagaattagtgaacttaataggttaaaaggaggtacctaaactgaagtacagagaggaaaaaagagaatggaagctaagaaacatgggactatatgaataattcaagttacagaagaagtggagagagaaattaggtccagaacaactggaaaatgacccaaacgtatatacagcaataaaaacaaacaaacaaaacaccactaatatatgcaccgacattgatgaatgtcaaagacgtggttgggcacagtggctcatgcctgtaaccccagcactttgggaggccaaggtgggcaaatcacttgatgccaagagttgaccagcctggccaacatggtgaaaccccgtctctactaaaaatacaaaaattagatgggtgtggtggcacatgcctgtagtcccagctactcaggaggccaaggcatgagaatcacttgaacccaggaggcggaggttgcagtaaactgagatcgcaccactgcactccagcttgggtgacagcaagactgtctcaaaaaaaaaaaaaaaaagtcatactgagtaaagaagccagacatgaaaagagttcatacttatgattctattttatgaagttcaagaacaggcaaaactaagttacagagaagtcaaagcagtgcttatgtctggagggtcctgatggaaaggcgtgtgaagatggaggggaaaaggttcaccatggtgcccttacaaccatgtgtgtctctacatgggccacataggcaaggctggaccacagtctgacagccactatggtgtgcttagggactgcttggccacttaacacgggaacattttgggtagatgggaatgtcctgcattttgatctgggtggtgattatgcttgtgtatgtatttatcaaaacccatcaagctgtacacttaagatttgtgccacacagtgtaaactgtacctaaatttttaaaaaagaaccaccagacaacaaacaagaattcttgaaaattgagattatcaggctgggcgcggtggctcatgcctgtaatcccagcactttgggaggctgaggtgggcagatcacctgaggttgggagttcgagacgagcccaaccaacatggagaaaccctatccctactaaaaataccaaattagccaggcgtggtggcagatgcctgtaatcccagctactcaggaggctgaggcaagagaatcactcgaatccagaggcagaggttgtggtgagtggagatcacgccattgcactccagcctgggcaacaagagcagaactccctctcaaaacgaaggaaaaaagaagattatcaccaaaatgaggctgagcacggtggctcacgcctgtaatcccaacactttgggaggccgaggtgggcaaatcacctgaggtcaggagttcaagaccagcctggccaacatggtgaaaccccatctctactaaaaatacaaaaattagctgggcatggtggtgcgcgcttctaatcccagctactcgggaggctgaagcacaagaatcacttgaacctgggaagcagaggttgcagtgagctgagatcacgccaccactcttcagcctgagcgacagagtgagactttgtctcaaaaaaaaaaaaaaaaaaaaaaaaattaccaaaatggaaaattcaatagaagggctggaaaataaatctcccagaacacaaggcaaaatatgaaaagacaaagaggatgatgagcccagtctaggtctaacaccctaataacaggcattccagtgagtaaacaaacctggaaagctgttcctgatggtgataaaagaagtggcagtcgagtgcagtggcttatccctgtaatcacagcactttgggaagctgaggcaggaggatcaaggccaggagttcgaggctgcagtgaaccatgatcacaccactgcactccagcctgggtgacagacaagagcttgtcaaaaacaataaaaaaataaaaagagctgggcactatggctcatatctgtaatcctggaactttggaaggccaaagtggggggatcgcttgagcccaggagttggagaacagcctgggcaacacagtgagaccctcccacccaccacaaaaaataaaaaaattagggccgggcacagtgactcacgcctgtaatcccagcactttgggaggctgaggcaggtggatcacctgaggtcaggagttcgagaccagcctggacaacatggtaaaaccccgtctctactaaaaacacaaaattagccaggtatggtggcacgtgcctgtagtcccagctatttgggaggctgaggcaggagaatcgcttgaacctgggaggcggaggttgcagtgagccaagatcgcgccattgcactccagcctgggcaacaagaacgaaactccgtctcaaaaaataaaaataaaaaaattaaaaaataaaaaaattagctgggtgtagtggcacatacctgtaaggctcagctactcaggaggctgaagtgggaggatggcttgagtctggaaggtcaaagatgcagtgagctgagatggtgccactgcactccagcctgggaaacagtgagatattgtctcaaaaaaaagaaatggtcgttaaataagagagagcattgatcattctcagcaaactaacacaggaacagaaaaccaaacaccgcatgttctcactaataagtgggagttaacaatgaaaacacatggacacagagaggggaacatcacacaccggggcctgtcgggggttgggggcaaggtgagggagagcacctaatgtatgtggggcttaaaacctagatgatgggttgatgggtgcagcaaaccaccatggcacatgtatacctatgtaacaaatctgcatgttctgcacatgtatcccagaacttaaaggaaaatttttaaaaatgagatggcattatatatctcattaatcagctaaaacattgtttaagcaatatccagcagtttgttattgatggtgtaaactggtacagtcttttgggggagcgatagtgtcatcagtcatctctgtccttatcttttgcccgggtaacttcactgttgcaaattcatcataaaataacgtcttaatctgttcgggctgttaggacaaaat

SEQ ID NO: 8916 - DNA, 179370 bp, Homo sapiens
tcaggtgatccatctgcttcagcctcccaaagtgctgggattacaggtgtgagccactgcgcccagcctcttttaaatttaaaagctcagtattttggagagttattgaagagaaaaacagatataaaaatgtaattataaaactacatggctgggcacagtggctgacgcctgtaatcccagcactttgggaggctgatgtaggagtatcacttgagcccaggagttcaagaccagccagggcaacatagtgagacctcatgtctacaaataataaaattagccaggtgtggtggcgtgcacctgtagtcccagtgactggggaaggtgaggtgacacaggagggtcacttaagcccagaaggttaaggcggcactgaggcatgacggcaccactgcactccagccagagtaacagagcaagaccctgtttctttctttttcttttattatttttttttaagggaagggatcagatattgaggatggggggttcttgctaaactgacttggcaaagttcttgataaaactggatttcataaggaaggacacagatggacctaggagaaggttcacaagcctaactaaagtttggtcaagcaaatactcttggccaaagaaatcaaaacttggtaaagggggtgacataatcagatttgggggagaggggtaactctctaggagtggtagagagactgaactagaaggagcagaggcgatgtcaagagtttggataaaataagatgatggtctgtactaagggataacaagagttaaggcatcaacttggaaatgccttatgatatagaatgaactggatttggtgactccaaaactagagtcgaggaagggaaggagtcctcggtgacttaaaacccagaaaccagtgtctggtaatactatacatagtcataataggtctgtggcaaggggattatctgaggcagtgaggaagaaaaatataatgagtttctgtgatagacctgtgggtgtttagcctgcctcacttaaaagttggtgacatacagctatttcctggtccctgtgttgtgtcttggagtctggagcgatgaagacctctgtgctcttaggcaagtccttcctcttttctttattgttttggaattcttctggactcgatccagcaataatttcaacagttggtttgactattgaatagtttcaatagtttctgatgattggttgttagaatgaaaataaggccctttgataacacagaaattagaattggggacatgcgcctgggagataactgtcctgtcatttaactcactgttgtcatttaactttgagttttcttatactgtcacttcttgtgggatcaagaaaattatgttccaaagaaacgatgctgccatgttcttggagatcacttatacaccaaagttggatactacctatccaaaccttaacagtggtttgctttgtgaagaggcttaaatttccatctgtgatgcattttgaaatgagtgggtttgatgtcaacccactgaaagatatccctcaaaaaacaaaaggacaagagtcatcagctcccacacaaagtaaaaaatgtgaacctaattttagcagtgttaataaggagcaattatccatgaatcgctgcatcaataatgcctgtgttataacatcctctcctccttaaggtacaggaacaagtggtacatacttgtccgggaaccagtttcattaatactgttgtatctgcccaaaaatgagtagcaatatctgttaccagtttcactaccttttggagttttggataacctttctatactgtgatgtttatatattttaatgagttaattttaggtgaaattgtaattctaactttgcatgtgaaatcaagttcatatacaataaagcttgcctatataaaaaaaaggagttggtgacatagatgcagttgaagctgtcaaagcggatgtcagccagggaaggtgtagagaccctcacacgcctgtgttatctattcccacaaaaaaggagaaatgaaaccacaaaattttgcatatgatttcagggggatttgtggagttcctatctatgataaaggatccgtggatctcagttagaaatttctgggatggcacaagaagatccagggaagggtcttacaaatattcaatgagtgacagcaaagctgaaaaacttagtcatgtgccaaatagtgacacttgatcaataacatggcatatacagtggtcccatagattacaataccatatttttactgtattttttctgtttagatacacaaatacttcccattgttacagttttctacagtattcactacagtaataagctgtacatgtttgtagtccaggagcaacaggctataccatatagcccagagagtaagttatactatctaggtttgtgtaagtacattctacgatgttcacacaaagacaaactcatccaatgatgaatttctcggaatgtatccctatggttatgtgatgcatgactgtagagatacggaataacttgttgagtttttgcaacaaataagatgagttgtatccaccatgcttaactacagcacaagcaatttttcttttttgagacagggtctctctctgtcacccaggctggagtgcagtggtgagatcatggttccctgcagcctcaaccccccaacccaggctcaaagaatcctcccacctcagcctcctgagtagctaggaatacaagcccagccaattttctgtattttttgtagcgatggggtttcaccatgctcaaactctggactcaagcgatcagcccaccttggcatcccaaagtgctgggattacaggcataagccactgtgccctgccagtgcatgcagtttcttacaagtgtcaactctcttgccagttgttcatccatctgtcccatttattcaatagtaatactaatggtaggcactgcttaatgaatgactaccatgtgaaagccactctgcctggcattagggacacaaagattaagtccctcactatgacctcaaggagttttacagtccagttggaggatacttataagtaaacttaagtagcaatagtgaaatgtgtgtttgaagagatatctgcaatgggtgttaagtgagaaatgggaaagagcaccaaaaagcacctaggatttgcatcaagggggtttagggaaaacgtcttggagggaacaaataggctttgttctgaaggattaattggatttagcttggcaatgttccaatgtaataaatagcatagccgtctgttctgggacacaaaagtactgcagaatgacctgaatataaaggacaagaaatagagaaaggcagtgggtagaaatgagattggagaggtaagcagggctaggacactggatgcaagtcattccaaagacaggcaggtaacattgtgcgaggaagcctggtttaaaacagacagctttgtgagttttggaccgcaatgaattggggacctcataaccaatgaaaacaaattcaaatttaattagaagaaaaaaacatggtcaggcacagtggctcacacctgtaatcccagtgctttgggaggccaaggcaggaggatcgcttgggtccaggagttcataatcagcctgggcaatatagaagacccctgtctctataaaaaaaaaaaaaaaaaaaactgcctggcatggtggcatgtgcctacagtcctagctactcaggaggctgaggtgggaatattcattgagcctaggaggttgaggttatagtgaactatgattgcaccactgcaccccagcctgggcgatagagcaagactctgtctcaaaaagaaaagggctgggcgtggtggctcacgtctgtaatcccagcactttgggaggccgaggcaggcagatcactttaggtcaggagttcgagaccagccgggccaacatggcaaaaactaatctctactaaaaatataaaaatcagccaggcgtggtagtgcacacctatagtcccagttacttgggacgctgaggcaggagaatcgcttgaacccaggaagcagaggttgcagcgagccgagatcacaccagtgcactccaccctgggagacagagggagactctttctcaaaaaaaaaaaaaaaaaaaaaaaagaggaaaaaaggaaatccccattatgttaggcaaacaaaaacagccagtttgtgactggtggctaaatcaagaaggatcttacaagacattttaagtggtttggactttatatcaagagtcagagagtgccattacagaaatttaaatagtggagtacataaaagacaaactgatgacgttgtaaagactggattagaaggggataaaactgcggcctgggaaactggttaggtgacttaggcagtatgcaagatttgaaatgatagtggcctgaaacaagatagtggtagtgggtataaagaggaatttgatacattagagagatattatagagccagaagcaaaagcactcagtaatggattggaagtgtggggcaaaggagagaaaacaatcacgaaagtcattagctacaaaaaaatctttaaaatgtattgatttatctaggtgtggtgactcacacttgtaatcccagcactttgggaggccaagggaggggggcgggcagggattgcttgaggccaagagttcaagaccagcctgggcaacatagcaagcccctgtgtttaccaacaacaaaaaaattaagaaaattaaaaaaatgtattgacttctattggtttgccaaatgaagtttagtattaaatccaaaattgagtcagagcagtgtgaactgagacagccatcttcatcttctccctctttttttcagtttgttttgaaatttagttttatatacttaagacttaccttctggcaatttggaattaaatttctgagattgctgtaaattatttcctttctttgtttctcttcctctttcttacttccctattttactcttaatattttattgttttagttgaattctaaaacatcttatcagaacttagagtttttatttctccacccacagaaccatggagtctttaagtatcagaaatttgtctcctcgtcagaatcttctagatttccagaagtttccaagtcgctacatataaatgttgcagaaaaacgtgtaattctcatgtgcaagtaggcttttttcagcggatacatttagcattatagtcaattgttatttcgttgccttaaaagaagctgttttcattgtaaaggtgatgtgtttttaccatataattcaaatttgcataggtacttcatattttaaaaggtgactcacaggtatgtcactaataaaaacagtaacatttaaacgactgagaaggtaggggctctaaataaagtaaatgcgtcggcgagggtaggagcgggaagaggcaaaggggtgcgaaattcccatcccaagccccctcctccaaagaccgaatggcaacttagttgtgcgggaaggttcccccctatgcagggcagcccagtccaagccggcccgatccggggccgagtgagcagtggttcttgccgcaaccgccacgcagcctcgctgccgcccaagcgcggacacctggttcctgggtcccccgcgcggagccccggactcctcgccccttctccgaacaactttctccctgcttgaactgattctcgctgttggtagactgcacagtcacagtatccagccggacaggacctgctttgccgggactggaaacaactaccgcggcaaaagaggccgtttcgccatgggaagaacaagaactcccggcttgtccaggggcagcccctctctgcgctgcaggcgcctaccctcgccccagaggctctgcgccgcgggcgggcgagcccgggggttccgcgccctctcccgagcgcgccctccctcccggagcgcgcgcccgacggcctgccgcggccccggcgcccccgccccttcgggcgctccgtagccgtgacgtgcacgccgcagtgccggggactcggcggggcgccggccggcgggcggagaccgactcgggatctgtccgagcaggaagccagcctcagcccggccgctgtcgccgccctgtcctggtgcccgtccgcgtcgtcgccctcttcactggccctcatcacttctcaccgcgccctccagcttcacccgtacaggtagccccgccgccgcgcacctgccttcgctcccgcaccggtgagtgtcccagagacccactgcggggcgtcggcgccggggtctcgcgttccctggcccggccttgctcccgggcctcctcgagcagctccggggccgacgcttctgttcactgcccgaggacgcgggtgggagaagcaggtgatggatgggtgggccctgggcagcagtggggccggcggtggttctcgtttccaccgaaagacaatcagtctcctttcatgggttctcatcaccaaggtccctttgtgtttcttccctggctcccaggtagaagcagagcactcaggtgcctaactcggacttggacactccgtgatagttttattttctcttttgtaaacacgcttaaaattcagtgcaggrggagcgcagtttgctctgagatgtgaagatcaaatgataccattaatagtctaatcatgtaggagaccagatcgagactttctaaagccttattcttagtctccaggtggtccagtaccttgagtatgttaatttacggatatgctactgaacaagaactttttttgttaatttccaaaaactccctaaaacgattaaaatgcttaaactctgggattttaattttaagtaggacacartttgatggggttattgctagaacatccgtgtttaaaagtatttccatacagtttaaaaaattcattaccttttttttttttttttgagacggagccttggtctgtcgcccaggctggagtgcggtggtgcgatttcctctcactgcaccctccccctcgcgggttcaagcaattctctgccacagcctcccgagtagctgggattacaagcgcccaccaccacgcctggctaatttttttgtatttttagtagagacggggtttcaccatcttggccaggcaggtcttgaaatcctgacctcttgatccatccgcctcggtctcccaaagtgctgggattacaggcgtgagccacygcgcctggccaaatattctttacatcttacctggcataaagtgatgtggtggagggatgcttaaatcctgatttacaagtattagtgagaaatgaggagcactgccctaacttaatagacttaactgtacgggctaaataagcctcattttttttttttttttaatgctctggtggtatagatgcagtctatctaaataaagtcagaacttgagagttttaaaaattaacttttttttttttgagacagagcctcgctctgtcagctcactgcaacctccacctcccaggttcgaacgattgacctccctcagccgcccgagtggctgggactacagtaagggcgcgccactgcccagctaatttttgtatttttagcagagacggggattcgccatgttggccaggctggtctcgaactcctgacctcaggtkatccactcgcctcggcctcccaaagtgctaggattacaggcttgagcccccgcgcctggcctgaaaattaacattcttaagatttagctgaaacttatcttcacaccataaaacgtgaatcttgaacttggactggtagtggtcatggtacaaaggttggcggcaaaacagcatttctgtacaaattaactgaacttcctagatgtcttgggttgtggttttcaaactggagaatgtttagtgaaaaaattacctttgtgccttttttccttaattgtagaaaccgccacaaatgttacaaagtgggctatagccagagcttgaaaccatgctgccgttcaaaatagctcacagacttttatatatacagctcattttgagtattttacgttacgcaggaattgcatccactttggtaaacagaagtcattttagtcttatgtacatttgcccattatttttgtattttttgtgtgacatgctgtttatcattctctcatctttgtaagttacatttttgttttcagaaaccattgtaaatgtaacagaagtatgaatgacatttaaggaaagatcatgattaaaaactgtataatatataaaactatatatgatatacatatatattcttggttagtgcctagaaacrtgagcaagaaaaatgttatgaacaattacaatatttaatgtaaattaatgcaattaaatattgcattaaaaacaaaagatcgtaaatcataaccagtagggattatctgaaatggatttttccctgtttatgtttacgtggtcaagttttaaaataacagtggccaggaaatctgagagaggctgaaggctctgttctcatcctgttgtgactttgcctggagtctgtggtgtatcatgtagcccattgtttagacaactgggctgtatctgggttccaaaatgtagctttctttagaaagttttaaagactttgaccatgtgaggcttgaacaaatgcaaacatccaaacattgaaaaaaacccattttaactttctgttgatagttgagactccatttttgacatgtaaaataccagttttaagaagagtttactaacctctgtgtagtttcatttttatatattaaaatatctaaaaatattgggaagtgttataacttaaataaatctcagagtttatttattcttttttttttttttctctgagatggagtcttgccctgtcatccaggctgtgcagtggcacgatcttgggtcactgcaacctccgtctcctgggttcaagtgattctcctgcctcagcctcctgagtagctgagattacaggtgcccgccaccacacctggccaattttttattattattagagatggggtttcaccatgttggccaggctggtctcaaactcctgagctcaagtgatttgcctgccttggcctcccaaagtgctgggattgcagtttcatagagtttaattatgatacccataatgagatatttcataataatttgtgaactggccctttactagtataagattgttgcacatttattaggcatcttccataattggacagatcacagattgaggggcttgatctacaaaataattttctaggctaatggtcttgtccttttacagatgagggagtctagtctcaaagaattaaatgcttgctccagaagggcaaagtctggattcacacctgagtcatttgaccacgaagcccctgttttttccaccagaacagtttgccttggtttcagttcacttgktggactgtttaaaccggcaaaactggtattatgtcaaagaatgtaattcaaggtttgacaaaagcatccaggagtagatatgataggccgtgaatgtagttctggaacaaatttagaatcctgtgtttgtgtcttcattctcaagttgacagccttgaacactgatgctgctgctttctcatttctcgtatagttctaggacattatatgtattgtgcrtgtatgtatgctgttaaacatatgtatgtgtttaactttgataggtttgtgagaactagaattagattgtaatgttcctggttgggatagaactttaaaattttcctctaatgaaaaagataattatttatgcagtagctatcctttaaatattacataattaattctctaatcttgagaggggggactygtttttagattatgattaaattgtcacttagaaactattagtacaaatcttttctatggtctgtggaatatcccttgagccgcaatagacataaatgacaacagtgagcaaataagcccattttttctggtaacaaactaggaatcatgcatttcagcagtaggatgtagttgggtaaatgagcagaagcaaggtaggaaggctgagttgggtggctaccattacggatttttttcattatttgctttgaactattaggaattgtgcatctcaaggatattcatattcaactgtaaatacaaaaccaccacctaatataaattagtaatattactaatataaattggtaatagatctgtgacacacacatcaagaagtagagttaaataagcttaagttctcttttggaggcattatatctatatgcatgtatctatgatctatatatgtgtgtgtgtgtgtgtatatatatatatatatatatatatgttttttggagacagagtctcattcatgccacatgcagtggcatgatctcggcttactgcaacctccatctcccaggctcaagtgacactcccacctcagtctccggagtagctgggaccacaggtgtatgtcaccatgcctggctaacttttttgtgtttctggtggagaggggttttgccatgttgcccaggctggtcttgaactcctgagctcagatagtgtgctgcctcgggctcccaaagtactgggattacaggcatgagctaccgtgccttgccggcattatataatgttcagaggaaccaggatcttttcatttaaaatggttctgattttatttgacaaatttgagtggactagaatctttaaatattttgcaacgtctttctagttactgttttcaaaaattagcttatttttcttattgattagtgtaagaatgacataatggtttgagaaatgaccataagtccaccaaaagttttccctgtgagtactgaagcataaaaagtaaaacctaaagaagaaatctggcatctttagaaatcttgctggtgctaaagagagaggaaataattttttatacagaaggcatgtctcaagtgaaaccaaaacaccaaagcacattccttcagtgtatattcacatggggtaaatatgatgctgagtaatgtgcacaaaggaaactcttgacaaaaacacagtcatcttttgagtatgttaggtcatttgttatttcatttgaaaataacctggctggggcgtggtggctcacacctgtaatcacagcattttgggaggccaaggtgggtggatcacctgaggtcaggagttcagaccagcctgggcaatgtggtgaaaccccatctctactaaaaatacaaaaattagctgggtgtggtggtgggtgcctgtaatcccagctacttgggaggccaaggcatgagaatcacttgaacctggcaggtggaagttgcagtgcactgagattgggccactgcagtccagcctggacgattgagtgagactccgtctcaaaaaaaaaaaaaaaaaaaaaaaaaaaaagtaagccgctgactaacctttacaaggtaatatattttstgtggcagaattttttgatttctgatctatgtggatgaacatctttttcaacagatatttactgagggcccactgtgttttagatatgacaagtgtgaactgattcctccctgtgctggcatatctttggatccaggaaataggaagagttgcagagatatgaaaaaataaatagaaaccatccatttgaaatccaaagacatatacgtcaaaagctaataacttatatttggatggcattttattgctttaaaatatttttgtatgcatttggtccttaaaacaacttgatgaagtagatttagtaaatttattccttttctacaggtaaggaaatggagactcaaaaaattaaaaatactggctgcatgtggtggctcatgccggtaatcccagcactttgggaggctgaggttgggaggatcactttagcccaggagtttgagaacagcctgggcaacatggtgaaaccctttcacaaaaaatattatacaaaaattagctgggtgtggtggtgcacgcctatagtgctagctgtgtaggaggctgaggttggaggatctcctgagcccaagaggtcaaggctgcagtgagctgtgattgcaccactgcactccagtctgggtgacagagcaagatcccgtctctaaataaataaatacattacttaaaattaagtaacttgttcaaggtcaatgtgsctacttagaagcatcatctctgtgtagtcccaaagtagtaagtcctccactttccccctattgcttatgtatttaacctcacattatggcttcaagtcaggtggttcaggaagttctgaaaaattagggtcactaaaatggtgattattaaattgttacaggttattttttaatggaagatagaagatgagcatgatgcatcattatggaactactttaacattttaaatagattgctagactgaaattggtaattagcttttctagttggagaatttttaaagaacaattagttaaaaaaaggaaggagaaaaatgttctgggggaattttgaaaataacttttattactttgtgcattggtagtgatccgatagttacaactgtctttgtaaagactcactaaagaactgtgtgtgcgtctgtgttggttcctttatgtcttcatttatttaaaacgtactgtagtgtctaccacggaccaggcactattctaagttctagggatacagtgattaaattaagaccaagcccctgtactgacattttattgttgttttgaattaagttaattatagactcttcatactaggatgtaatcaacagggctgaccctaaagttgggaaataggcagttgtcaaaattgtgcaatttaaaggctactgcatgacttacttgctctggaatatttctgacctatctgtcgaagactcccagactattgggttatggcgctgttaccaacctgctttgataaatataagtatgttccatcatttatcacacttttagcaaagaaaactgagagaaaataaatgggaactagaattggacacggtgatgcttacctgtagtcctagctactcaggcggctgaggcaggaggaatgcttgagcccaggtgtttgaggccagcctaggcaacatagccagattctgtctcaaaaaaaaaaacaacaagcaagcaaaaaacaaatgggactaggactgatatgttggtgttgtaagagaagaggttagcaaagtataattttaatagcagctattgttttttctttttttttgagacggagtctcgctctgtcacccaggctggagtgcagtggtgcaatcttggctcactgcaacttccgcctctcgggttcaagcgattcccctgcctcagcctcctgagtagccgggattacaggtgctcacgaccatgcctggctaatttttgtatttgtagtagaggtggggtttcaccatgttggccaggctggtctcgaacttctgacttcaggtgatctgcccrccttcgcctcccaaactgctgagattacaggcatgagccactgtgcctggccaatagcagctattgtttattgagcttttactaccatgtcagatattatgccaagtgagtatttttgtatacattagctcaatcactgtgtcacctcagtggtgctggtgttatgaccttcattttacagattaggaaactgaggggcagagatgttaaatttgctcaagcttatttggtggtgctggaatttgggtctctgctagtactaagcaggtagtagatactaatgtggaaagagtacttatgtgtgttgtgtgtgttatatatatatatatatayacacmtatatatacacaccatatatagtgtgtatatatgtgtatatatgtatacacacatatatagtgtgtatatatgtatacacacatatatagtgtgtatatatgtatacacacatatatagtgtgtatatatgtgtatatatgtatacacacatatatagtgtgtatatatatgtatacgcaatatgtattgtgtatatatgtgtatatatgtatatacaagagtacttatgtgtgttgtgtgtgtgtatgtatatacacacatatatacacacatatattgtgtatatatgtatatagacatatatacatatacatatatagacatacatacatatgtgtgtgtatatatgtatatagacatatacacaatatatgtgtgtgtatgtatacacacacatatacatatagaacatatatacatatacatatagaacatcagaagtctgtgtgtgtgtgtgtatatatatgtatacacatatatatacacacacacacatagagacagacttctgatgttctgctaggatgtgtgacacatcacagaggtgggcgaccttggtgtgggagtgatgggtgtggggagtcaggatagcttgttgggtgaggggtgggaattggggttggaaggagatgggagggtattacttgcctaactacttggtcgtcaggcttaatcctctctctgacagccctggggttccagagttgcgtttaagcacagtgctttcttgtccagctcctgggtaagaggataggcagacctgaggcaatcctggttttgtcactcattaacttggtcaaattatttcatttctctaggcttcagttttctcatctataaaatggaagtaacaatattacctacctggtgtggttcttatgaggattgaattagataataatacatgtaaaacacagatcacactggctagcacatagtgtacattcattattattgttgttactgtgtttttttttgtcatgtttaatgtggaattttcatcgaaaagcaagaagagcaatatattagtgatttggttggaatcttgaagttggctttttttttttttttttttttttgagatggagtctcgttctgttgcccaggctggagtgcagtagcgcgatcttggctcaccacaccttctgcctcccaggttcaagcaattctcctgcctcagcttcccgagtagctgggactacaggcacgtgccaccatgcccagccaatttttgtatttttagtagacacggggtttcactatgttggcaagcttcccttttgatttatgtgcaaactggaattagagaactactagcttaaactttttctttatcttttggttagggagggcttcaacaagattaacgacaatttgcttgggttaaccaggcagtatgtggtagagggaagtgaaatatgttaccagaatctcttcattgacttttttttaaagcttatttggggcttatagcattgtatggagaagacaatgcagtgttaaatttygcacctaaattagattgtaatgactgtttcagctttttgtttgtttgtttgtttgagatggagtctcgctctgtcacccaggctggagtgcagtgttgccatctcagctcactgcaagctccgcctcctgggttcacgccattctcctgcctcagcctcccaagtagctgggactacaggctcccgccaccacgcccagctaatttttcttatttagtagagatggggtttcactgtgttagccaggatggtcttgctctcctgacctcgtgatctgcccgactcggcctcccagagtgttgggattacaggcgtgagccaccgcgcctggcctgtttcagctttttaactagcttcattcggaggtgattagttaatattagttaaaattgttaatttttaacgattatacaaatagtaaaaatgtataaatacatgtttgtatagatctttttttttttttgagatgtagtctcaccctgttgcccacgctggagtgcagtggcatgatctcagctcactgcaatctccccctcccaggttcaagcgattctaatgtctcagcctcctgagtagctgggatcacaggcatgtgccaccatgcccggctaatttttatatttttagtggagacggggtttcaccatgttggccaggctggtctcgaactcctgacctcagctgagccacccgcctcagtctcccaaagtgctgggattacaggagtgagccacagcgcccggccgtttctatagatccggtcatttctatagatcttaaaaactttcaaaaacttagatttctttagataatgtgctgttgaataatcagacttggcattgttagtcatatcaggcaaagccccaaaaggaaggagattttacccctggtggttcacatgaagaggctatttgcagaggttagagaacaaacaagtgtggtaaagcgctcagggattagaaacagtaagaaaytcttagttctccagaaattaccagagcagaaagctggcattgtagaggagggctagagggagctgcggttttgaagcaggaggggcgtgaagggaggttccctgatctctcttccctcttcctccgagtctccaccggtgacttactttactagaacccagctggggagcccaggtgattttttttttttttaaagctcattctcccagtgcaagagcagagaaagaattgaggatgtgaaggagcaaatggagattaactaggacattatttagaacctttggggatttgtagcatttccttggtacattttaaaaaaaacttgtagcattgtgatacatctgcaaaatacttgggactaattgttttatacatgctttcagaaatagtttaatcactttctcatttaactgaacaattattttaggaaattttgatgatccgtataacccaacaagaaacataatctaggtctgttaacacaaagcacttttgttaatatactgttatactttgctgaggttttctgaaattttcttcactaggcagtcctggtttaatggaatacatgtttctttcattaaaaatctttagtgactaaattaaaaatattttggcaataagtctttcgcttttctggaatttatacttgtattcacctggaattttttttgacagcaagagcactagaacatagtgttgatatggtaatagttcatagaagcaagactattgggaaatagttgttcgtccttcccaagtccttttgaggacacattaaatttctgtataaatctgttgcagtttgctgttatcttgcagttgctgatattttgctaatgccaattttacctagttaatcttagttctggcaaaaagtttgtgctctttattttggatagattccttaggggttactaaagaaaaggatttctcttcttaaagagatggtatgaaggattctagggatataagtaatactccccccaaaacaattagattatgacttatattttctttcttctcttgaggattccagggaaaaagaagtacaagatcttactcagattaagaagcagctagagagggccttgttcatgacctccagaaaaggaaaagccgtattgtgcagggttgagcagatgaataaacatctggctgagagaatttagcatacaaataaagtatacctctggatataaatgttataactgagttaaaaaaaaaacaaatatgtttcccagcttgtcttttttagagagtatggtgaaaatgagaaacaggtttggaatcaactgaataacacctgtggttggaaaccaaccatttagayattttctctgtaagtaggcttttttttttttaaaggagtgattttcaaacttttgtgggatcttctaaaaacatattgtttatttggatttgasactgatggaatcagtatcccgcaggagatatttgaggctcttagtttttccatgttgtattctttgaatttccttgatttgaggattgagttattccagagagaacttttctcttcttccttgttattttttttctaaaattagatgaaccagctgtgttttggtttstgggcatgatttgctgtctgttatccttttggtcttagtatctgggggaagaacaaagaacctgtgtgtgttttgaagaagaatgtattagtttctctgctcttcttgttcatcttggttgatctttaagatgagaagaacgaagaaaatactttatgtacttattattcttgtgtttgatatttcaaacaaaactgtggcttgtattggccactgagatgatggagaaaacaggtgaatgtaaagtgaaaaactagtcatcatgtattcaaatggctaattgaagaggtttatgttaaaggttttctttcaggtatgggaggagggaaaagaaggatggaaattgaatgagtttgaccatatgaccagctgtcacgacagatgttttagcaaccaggaaatatttatttcaatcagaatttaattttatattttatagggatgcattctactaataagccttttttttggaaggaaagtgaggataagttaggaatttataaaccaatttggtgattttagtaagtcattagtaaaaatggagatagcctggtggctgcatatactgatgctagtatgttagaaaatgggctgttagaacacacacacacacacacacacacacacacacacacasacacaytttttttttcctttttgccagatgtgcaactgtatacagagggctattatttattaaaggtgtgtttctggaactggcccagaatgtcatggactttagtcctgttttctaggattctgctatttggtatataacactgatataggttagtattttcagaacatgtggacaacagagtaggtcagcatgattgaacagtgaaaggtttatgtcagatgggttcggggtggcagtatattgtaatgatggattgaatgagtgatctaaaatcatcctagcacagtataattgtaacagttctttttttttttttttaagacagagtctcactctgtcgcccaggctggagtgcagtggygtgatctcggctcactacaagccccgcctgccaggttcacgccattctcctgcctcagcctcctgagtagctggaactacaggcgtcagccaccacgcccagctaattttgtgtttgtatttttagtagagacagagtgtcaccatgttagccaggatggtctcgatatcctgacctcatgatccgcctgcctcggcctcccatagtgctgggattacaggcatgagccactgtgcccccggccataattataacaattcttgagggccaattatatgccgtcactttgagtgttttgcagttattttctcatttaattctcacgttgaccctatgaggtgactattcttattattctattttatagctgagagagctgaggtctaagtaacttgagaaggtgatagatgtagtaaggagtagagtcaaaagatgcttccaggtggtctggctctagagtctttgctccacttagaattctaagcttgctttttctgtgtgctcttttaaacactcagagctttgaaaatcaaagagttaatcttttctgtttttatctccctacacaaacagtagtaaaatggtgacattcgtgcatctatgccccactctcaagtccagggaagacagttctgtgatacccacttcccttctgagccagactcaccctcagatttctgctctgcacagggctccagcctccgctgccagtggatgagagaggggaggcctcctagacccaaatctaagccattgtctgcagctcttgtcttttaaacctcttaacaactacctgttttagttatatacctgttataattacatacttaaygtatgtgccttaagcaaatgtattcctgtaaagttttatgtaaataatgaatttaagtgtaatttaattttttttttgtagagataggggtcttactgtgttgcccaggctggtattgaactcctggtctcaagtgatcctcctgccttgscctcccaaaatgctgagattataggcatgagccactgcatctgacctgtaattttttttttttttttttgagacggagtctcactctgttgcccaggctggagtgcagtggcatgatctcggctcactgcaacctccaccgtccgagatcaagcgattctcctgccttagcctcctgagtagctgggattacaggcacctgccacgcctggttaattcttgtattttcttagtagagacggggtttcaccatcttggccaggctggtcttgaactcctgacctcatgatccacccaccttggcctcccaaagtgctgggattacaggcgtgagccactgtgcccggcataatttttttattattctgggaaagcttccyatttaaagggtcccagtgataatttcttttgtaaagagaagaatctttgtataaaacaaatgattgtttcctagattatattaataaaatacrgatttttcacacattacttttgcataaacatagttctagctaaatacatatttgatataaacatgccaaaatgaaatttgatcttatattgtgcttcatattactaataaaaaaggattgaataatagttttttccttgaataaatgtcatttgttggatttgcactaaaatgtgcttttgtaggcttatctacagtaagaataatattcttttaggcagtaggttgaggttcaatatgtaacacaatagtatattattttgttataaaattcattaggtaaatgctagagttctacttaagtgccaaaatcagtattttatgattctgaaataaattatctgaaaataacaaagtttagagagataacttaaaaacttacagttgaaagacaaactagtctttgaaaaaaatatttttctgtaacaccaggtaaaatacttatttcctgtagttaatataatgctaatgaggtcttgatcccagattcattgtaatttgtgctgtgtccctaaacactcaacagtgactactctgtaactaattaatagatccagtggcctcatttagagcattattcttttccaacctcttcatctatttctttttttgttttttagagatagagtctcactctcatcctggctggactgcattcgtaccattatagatcatggcagcctcaaactcctgggctcaagtgatcctccacctcagcttcccaaagtgctgggattatggatgcgggccaccatgcctggtctctaaattcttactgtgtgattcaaaatcctttttgacctatcttgccccactttttcactatagcactcatcacacctgtgccattctccttcgctctagccccgttggcctcttccccaaacgtgtccccattctcctttctccttagtcttgttcaaacaaaccctttgtctggagtgcacttttctttagtcattcttacccatctttcactacctgcttgaattaaatctttgaaagtagccaccccaaatttactatttggaattacactggtattataatgtacatcaaaggttctgtgatgtatgtgtatcttctttcattcttgtctactctacctagattgtgaattactggagggtataaactgcctagcgaggggctttgtaaggttttttttgatcagtggatctcaggtctcaggactcttttacacacttaaaaattactgaagactgcgtattttgtttatgtggattatatctattgatattcactgtattagaaatktaaaaatgatttgatccaggccaggcactttgagaggctgaggcaggcagatcacttgaggccaggagttcaagacccgcctagccaacatggtaaaaccccgtctctactaaaaatacaaaaaattagccgggcgtggtggcaggcacctgtrgtcccagctactcgggaggctgaggcaggagaatggcgtgaatccaggaggtggagcttgcagtgagccgagatcatgccactgcgctccagcctgggcgacagagctagactccgtctcaaacaaaaaaaaaaaagagagagagacttgaaggtcagatagctaaccactggcagaactgaaagttaattcataagtctcttagtttggagttcatttttcctgtcaatattgtgcagttaaaaaatttagaggtaatttcacatataaggctatgactaaaaaaaaaagctttttttttttttttttttttttgagacagagtcttgctctgtcacccaggctggagtgcagtggtgcaatctcagctcactgcaacctccaccccctgggtccaagcgattctcgagcctcagcctcccaagtagctgggactacaggygcacactaccacgccmggctaatttttgtatttttagtagagatggggtttcaccatgttgaccagactggtcttgaattcctgacctcaagtgatctgcctgcctcagcctcccaaagtgttgggattacaggcatgagccactgcatctggccaaaaataaacatttctttttgtgctataatataataaaattctgtagggaagaaatttctgaactcttacccagtgctctagaatcaagtttcatctatttgtttcacctcttaaaaaaaaaattaccagaagtgatggyatgtgcatctagtcccacctactcaggaggctgaggtgggaggattgcttgaactcaggagtttgaggctgcagtgaactatgatcatgccactgcactgatacagcaagaacttcaaaaaaaagaaaaggctaggctcagtgatttatgccagtaatgcaacactttgggaggttgaggtgggaggatcatttgagcccaggagtttaagaccagtctggacaacatagcaaaacctctctactaagaataaaaaaaaggttagctgggcgtggtaggtgtgtgcctgtagttccagctattttggaggctgaagtgggaggattgcttgagcctgggagtttgagatggcagtgtgatataattgcaccactgaacttcagcctgggcaacagagtgagactccgtctcaaagaaaaaagcaggctgggcatggtggctcacacctgtaatcccagcacttttgaaggccgaggcgggcagatcacttgaggccaggagttcgagactatcctggccaacatggcgaaaccccgtctctactaagaatacaaaagttagctgggcggggtggcgggtgcctgtaatcccagctacgtgggaggctgaggcaggagaatcgcttgaacccaggaggtggaggttgcagtgagcagagaccacaccattgtgctccagcgtgggtaaaagaactagactctgtctcaaaaaaaagaaaaaaagaaaaaaactagtagacagtgtaacctacacatatgtgtgtgtgtgtatattttatatatatacatatacagatatatacacttaaaaattaatacagtattctaacataaaggaaagttattaaattattaattatagtaattacattaatatattgtttatttcagtttgtgaaggtgcaggcagtcctttactacaaggcagaataaagtagtcagatgctactaacatctacatgtagaataatcatgaatgcagcagctgtaaattagactaatatgcaagtattgtaattggtgactcaaatatctttattagcattgctctataatgtgatttttccagcatgatgaacaccttttggtaaagttccaaataaaggacagtcttctttcaatttatgtgttattgtatgctttttagtcagtgtgtgttaaagcaatgcaaaaatattttaaatatatgtacacatatattggattagattctgggcttacctatgttctcctctgaatttgctgttcattttaccttctatacatcattagtggcatcacaataatttgaaaatttgaaataaaaagttcttggcccatacccacaggagctggatcagtttgtagcatcctcacagacatttgtgctggctgcagtatttttatttttttgtgtcatcttcctcaattcattctttttttttttttgagatggagtcttgctctgtcgcccaggctggagtgcagtggcacaatcttggctcactgccacctctgcctcccaggttcaagtgattctcatgcctcagccacctgagtagatgagattacaggcgtgcaccaccacgcccagctaatattttgtatttttagtagagacgagttttaccatgttgactaggctggtctcgaactcctggcctcaagtgatctgcccatcttggcctcccagagtgttgggattacagccgtgagccactatgcctggccctcaatttattcttgagtgttgcattcctgtctttaagtgagacactgaagcttttacattctgaataataatacatataaataaataataagaatgaatataaaattaatgtttcatttaaagtgatgtaaatgagaaactataatagttataaatagtatatggttcataaatacacatgatttacaaattcctttttttttttttttttttgaggcagagtctcactgttgctcaggctggagtgtggtggcatgatctcagctcattgcagtctctgtcttccgggcttaagcgatcctcccaccccagcctytgagtaactgagactacaggtgcgcaccaccacacccggctaatttttgtatttttgtagtcaggcttttgccatgttgctcaggctggtctyttaacttctgagctcaagccatctgcttgccttggcctcccaaagtgctgggacttcaggtgtgagccattgcccctggccacaaattctattcttaagcaattaaattggtggaaatttcttgcatttaaaaaaaatgaatttactacagaaattatattttgcctcccaaaacactttcaccatttttaaaaataatgaaataaggtttgttgcccaggttggtcttaactccgggtatcaagtgattctcctgcctcagcctcctaagtagctgggattacatgttggaagagctgcccagtgtgtctgcaataataaaaaagaaactgaaacattttaccagtttgcatttgcccaggagctatggtgatctttgagtccttccaattttagtatatgtgctgccaaagtgagcacctctcagtgtttttatgggtgtatctattgcagaatgcataaataacttttttacctgtagttttagaatatttggatgttaataatctgatctattttgcacctgaatttaaatacaagattttaaaaaatttcacaaaagagttttcctccaagtgtaaataattcattttattttattttattttattttattttattttattttattttattttattttattttatgagatggagtcttgctctatcacccaggctggagtgcagtggtgtgatctcggctcactgcaacctccgcttcctgggctcatgtgattctcctgcctcagcctcccgagtagctgggactacaggcgcctgccactatggctggctaattttttgtatttttagtagagatggggtttcaccatgttggccaggttggtctcaaactcctgaccttaagtgatccaccagcctctgactcccaaagtgctgggattaccggtatgagccactgtgcctggccaataattcattttaataccttcaagggatagtgagtttgggaataagcaaagggagtagcaaattattgctgtaaaatatatgaactatatatgaactattttgccatagagaatgtattagtctggtttttgtgttgctgtaaaggaatgcctgagactgagtaatttataaagaaaagaggtttaattggcacagggttctgtaggatgtagaagcatggtaccagcatctgcttctggtgagggcctcaggaagcttactgtcatagtgaaaggcaaagggagagaggttgttgtcacatggtgagagtggcagcaagagaaaaaggagggaagtgccacactcttttaaacaaccagatttcttgtgaactcagagcgagcactcactcatttgtgggggtggcaccaagccattcatgagggatctgcctgcatgcctgaaacacctcccatcaggtcccatctctaacatcggaggccacatttcagcatgagatttggagggagcaaatgtccaaaccatatctttccaccaaatctcatgttcttttcacatcgtaaaatacaatcatcccttcccaaaagtccctcaaagtcttaactcattccagcaagaccaaagtcctaagtctcatctgagactcatctccttccacccatgagcctgtaaaatcaaaacaagttatttacttccaagatacagtgagggtacaggctttgggtaagcattcccattccagaagggaggaattggctaaaagaaaggggttacaggtccctgaaacccaacagggcagtcattaaatcttaaagctttaaaataatcccctttgactctgtgttccacatccagggcacactggtgcaagtcgtgggctcccaaggtctcgggcagctccactccctctgctgctctcaagaatagaattgagtaggctgggcgtggtggctcatgcctgtaatcccagcactttgggaggccgaggtgggtggatcacgaggtcaggagatcgagaccatcctggctaacacggtgaaacccgtctctactaaaaatacgaaaaattagctgggcatggtggcacatgcctgtaatcccagctacttgggaggctgaggcaggagaattgcttgaacctgggaggcagaggtttcagtgagctgagatcgtgccattgcactctggcctgggctacacggtgagactctgtctcaaagraaaaaaaaaaagaatagagttgagtgcctgtggcttttccaggttcaggatgcaaactgctagtggttctgtcattctcacttctggagggcagtggcccccttctcacagctccagtaggtggtgccctggtggggactctgtgggggctcagaccccacatttcccttcctcactaccctagtagatttctctgttagggcttctcttgcttcgtcttcttgcttctgctctcaccatgtaacaccacccactctccctttgcgttgcactatgattgtaagcttcatgaggccctttccagaagcagatgctgcagccctgcttatacagcctgcaggactgtgaagcaattgaaactcttttyttaaaagttatcctgtgtcaggtattccttcatagcaaggtaaaaacagaccaacacagagagattgttataaagatacaaagagaaattccgtaatgagatacctagttgaaaacagccagaagtaatgttctcatgttgtttattatatatagtatttgttgctctgtatgtggtattcaaacttctaaactaacctcctttaggtttgtttgtttgttttgagacagagtctcactctgttgcccaggctggagtgcagtggcatgatcttggcttattgcaacctccgcctcccgggttgaagcgattcttttgcctcagcctcctgagtagccgggattacaagcttgcaccaccatgcctggctaattttcgtatttttagtagacatggggcttcgccatgttaaatagtctggtcttgaactcccgacctcaggtgatccaccagccatggcctcccaaagtgctgggattacaggtgtgagccagtgcccttggcctcatttagttttataggcattttccaatgaccattgtttgtgtaattgaaagccagatgtcttttaactgatttatctttcctgattatttgatgtcacattggcaatttagttgaatcttgatggataacagtataaatattttgatgttgttgacgaggatagtattgatagcttaccccaagacacatgtgtaagctataagataacagcacttttttttttctttttttttttttcccccctgagatggtctcactttgttgcttaggctggagtgcagtgatgcaaacacagttcattgcagcctcgacctcctgggctcaagtgatcctcccgcctcagcccccaagtagctgggactagaggctcatgccaccgcgcctggctaatttttgtattttttgtagagacagggtttcatcatgttgtccaggcttgtctcaaactcctaagctcaagtgatctggccgccttggcctcccaaagtgctggaactacaggcgccagccactgcatccagcccagaaattttcttaataaaaaggattcttcaaagggttttttttagtggcctccactaaattgtgtgtatagctcccaggagtttaattaataaacaaaaggaaaagagtgaatatgtattttaactcaaggtacatttatctgtagttgttcctcatcaaaactgcagtaactgtatttagatattagatgctaaatgtatttctctctaaatagagtttagagagaaaaaatcagctacacaaagatagatcctaaacaattaagaatcctcccaaattttaaaagacagtatgatgaaatctttcccttactcctgtttgcagtataaatgagattgaggttgactttctgaataattatttacaggaaaacaatagaattcacatttgatactgtgagaagtcaaataatagaattctagggttgagatacctgtgctacagcttaaaccattaagtcccatatcttggagggtggcatttgtcagtactttttcaaagatccccaggtagttccaatctgcagttcaattacttatcttttttaaaaattaaatctttgtaagtaaaactttcttgtcaggtgttgaggaaactcttggtaaccagaatgttttaaaaatttagtttttgtgtactaatttttaaaatgtatggtatcttgtggaggagttaaaaaagtagaacactctctgggatagagacttaagaattatttaaaattattaaaatggtacacttgatacaaaatttgaaagtagaaattaattctgttgaaactaatactgttgagtctacttttctgtttctggcctaccgtatctaaaccactctaaacaggtcactcacttgttttatccttattttaatgagcttctgagatgaagtttctgtaacctctttttgtctcctgtttgtcacaaagattcttcatgtcttacctaaattgctttgtttacattctatgttcggagatrtaggtaggccatttgatcattgatgtgagtatacacactcatacactatcccccacccccgtcgcacagtttaaagccttctcattcgcatagataattttgtaagtctgaatagcctaatttagataaactttcttcrtagttcaattagaaaactctccattttgagtgcttggttaggttttaatataaaggaaacattttacattaggaatcattgttttactaaccttactgacaaaaagaaatagtgatgaggaaatgactaaaaccagttcagacagtattgagcatccagatactacaagggttgagaacagacgggactaagaacacatgtggagaagtcagctctgaaaagagttttggatcaccttcaggtataggtggatgaagttaccgatgtgttttcagttggagaggcagagtgttgaggaattttatacctattgtgttgtatttttctgtcaggtaggcattaagtcatcttgattttctgtaggatggagataatattggacccttcaatgaagtgctaaagttttgagatagtatttgaactgtgttggtgatctttataattttagtaaatatacttattattaaagcatattgttcaattatcttgttcaaataattggatttttaagtgtatttacttgactttttaggaaatgtttaaattgattctgtgaggtaggaaagtgactataggtttatctatatgtgtttctgatagtcaaaaaaagatgaagtaattgtcataattgtgacatagaatccattagaagtgaaataatatagttggtgcaaatactatgctagtgataaacatgagtggtgagaatgaaacagattcttcccaatttgaactttcatattctggtaggcaggctgtttacatgtgaggatatttttaacacttgattgaatttctccaaattttatataaaataatgagtatccaattatgatcagtagtaaataaaaagtggaatgtttgacttaacaytcaactctgcagctgaaccattgtggagaaactaaggttcggaatgacagccacacaagttagagaagattttaggaaactggaattgattaccttgaaagaaataagactaatgaggtgattcagacatgtttcaaatgcagaaggtagtgatcatgtatcaatcagtattttttggtgaaaacagtagaaggcttgatcttcagctgcatycagagggattttagactagtttgttagtttattcattgagagttgtttgcctgctatgtagaggcacaatgccaggattgagagatggatttgtgagcagtacagacacagtcccaccatcatcaagcttatgttgcagtagggagatggacattaaacaaccttttatcatatggttatgcttcagtggagaagttctgtgggtgctatgaaaccatattagagaggaaagatgtgagaaagagcagtgtaagatggtggcaaaacattaggatgggtgacggaatacctctgtgaactaatcaggcctctttaaaaattcacccttcccaaactacaaaatcaacttatttgttcattgtggaaaatccacaaaaccaaaatgaagtgaataagaatctttgatatttctattacatagagataatcactagttttttagaaggccttaaaaattaaatgcattttcatctttataaggtgactgggaaatttcatttctagacctggaatttatggttgttgtttctctgactaatgctgctgtatcaagaagagtaattatcataatgatactactgtaacaccttgctatagccccacttaataattgcttgatgaattatgtaaatgaatgttcattcatagtccaaagcaaatagttttttgagatgttaaatataacaggtaatataaatgcttttttacatartaaaatgtaatgaacttatttttacataataaaatggtatatatttttctaggtgaatgtaatttaacagcatgatagttaacatttttgtaccaaataggattaatgatttttattaattatagccctgtataaatttaaataattgatagacccataatccagtagtttgaataaagttatctttacttttgacatgttcttttcatgcatttctgtctttctaccactaaattgctgatattcatttactttccattggatcttttttgctaccattagagaatgaatgcaatttaatgttttatgtgaccatttagacctttaaatattgaaatacattaawgcaacatgggtgtttttacttttcatgtaacaattgtcttcttacctttaaaaaagtagcttcttaaataatagttaaaattttatggtatatttgttagagattttccttaaagaggaaaatcaaggaattgaagtcttccccttagctttaattttaatcccttccccccacttttatgaagtggtgcttaaaactgggggagtttattgagaaattattattattattattactatttttttttttgacggagtctcactctgtcacccaggctggagtgcaatggcacgatcttggctcactgcaacctcttgtctcccaggttcaagcgattctcctgcctcagcctcccgagtagctgggattgcaggcacatgccaccacacctggctaatttttgtatgtttagtagagatggggtttcaccatgttggctagggtggtgttgaactcctgacctcaggtgatctgcccgcctcagcctcccaaagtgttgggatttcaggtgtgagccaccacgtccggtgagaaattattttatgtatacaagattatcctttgatattatcatttatacattgtaaagaaggtgccgtttttgcagtgccagtagtcccaatagtacagtgagttctctccattaagtataatcctcccgggatttgggatttgtggttgccatgttgccactggtaaggttagagtcttcataatagccgagctgagcaaattcttccatagcaggcacagaagaaattgtgcaggtcacctctgggtcaagaacttatacagaagataatgctgccttggcttctggcactggggggttgggctggcccttgtctctggatgcttcaaatgagatgcattggcaactgtccaaattggaaataaacttctcaggttccaggcctcccttggctctgaggcctgtgtacgggagacagcagcatctggggtggatgcctgctttaccaaagatcagtctccaaccttgagggctgtgctgcttatctgttgacagttggggagcagattgccaaatacaggtcaggaggtgtatatgacctataaaagggtcttctccttttccagttaggctgctcagggcttcagctttattcagttgttcaattttattttgttattgtttaacaattctgatgtctagttaaagtttagtaatgcattggtttsagggaatatggtctgagtcacaaatccatagagctacyattatgcagggatggaaagtggctttttaatggagttgaccartctgttcctaatatgagtaattagtgatatttacaaggtagcttgaatcctgataggcagagcacactggtgtttttcgttttgttttcatggaatgtgtagcgtatcatttctttaagattttatcctactcatcttttaatactccattcaaaatggagttcctgtgtcctggtccttgtccttcactgctcccccgagcaccatttctaggactactttatgtcagtactataaatattgctgtacattgtggtgtacttgtctttctccttttgtaagttgtaaacgcttgattttattcttgtgtcttcagggcctagtacttttccctgttagaatagatgctccataaatgtctattcaataaataattttatcctgtgcactgtgaatatattgtcactttttaaatattgttttctccaaatataaattctaggccatcctatcaacataaaatttctcagaggtggtaagattgggctagtcaaggacttaatgagcaagggaacttataatactattttttaaaaaagaatattagcagcaatggttagaaagggttaaagccccataaatctttttgaataacatctgtttacattgtgttcattttaagttaatcagctaaaaagtgaatgcatccttttgccaaccagaaatcaaaataatacagcggttggcattcccctaggccaccacctggttgctcttccctatttagaaactaagcactactatcattttggtgtgtatatgtctgtcttttactattacttacatttttagtcttgtagaaacgtgcagtgtgtgtgtgtgtgtgtgtgtgtgtgtgtgtatgtgttttggtagagatggggtagtgctgtgtttcccaggctggtctcaaattcctggcctcaagcaatgctcccactttggcctcccaaagtgctgaaactataggtctgagccactgtgcctggccttgtatgtgttttttgtttatttgtttgtttttttaacatgaaagatcttgtackccataaaatgttttacaattctatttttttatgtaacaatagctcatgttggaagataaagattcaccttactttaaaaaattattgcatgactctctgtccagatacagcatagtttacgaaaccatttttttaatcgataggtattcagatggtttgtggtttttcctctcttaacagtgctttagcagatatccttggtgtgtactaagaaatactggttcagaggatttaccagtttatagtctcaaagtgagaacaactcaatgtggcaggtttttaattttcataactgtgatggatgagaaaagtatctcattgttaaatgtattaatatctttcttaagggtacatatcagaatttacgcttgtgtcttcagggcctagtactcccaagctcaagtgataaagatggatcactttatcaagtgataaaaatatggtttcctggcataattatttacacaaatgtggctggctgtttgaaacacagactttgggtttaaaagatttttttaaaaagttgagtttgtgatttctttctctttttttctttttcttttctttcttttttttttgaaacagggtctcactgtgtcacctgggctacagtgcagtggcgcaatttcagttcactgcaactttgacttcctgggctcagatgatcctggcacctcagtctccccagtagctgggactacaggtatgcgccaccacacccagctaatttatatatatatatwtttttttgtggagacaaggtttcgctgtgttgcccaggctggtctcaaacttttgggctcaatctgtctgccccctgtggcctcccaaagtgctagaattacaggcataaaccactgcacccagccaagtttgtgattttatatgaagaaacacttattccctgcccccaattcattttagtttagcttataatacaaagaaaaaagtattctttgttcttcagtttccagaatgaaattatttgaaggccaagaccgtgggagacagtttcaaacttgaaaaaacagtttaatacagcatagaatcaagacaccatattatattctgatttagagaaatggatattttgattgttaattacttataatggccaaggtataagacaccttacaaatattgtacaatatggtatttttttttaatttaaaaattgaaacagagtcttgctgtattgcccaagctgatcttaaactcctgggcttgagtgatcatcctgttacaccctcctgagtagctggattacagacgtacatcatcacacccaatgaatatagtatattgtcttctatattttatggtttcttaagaattttgcagtaagtcaacagttttgtttaattgctttatggtattttgtttatatatatgtcttgtattggcttagtgaatataagtaaaataaatagttctaaaaaatttctggccgggcacagtggctcacgcctgtaatcccagcactttgggaggccgaggcaggcggatcatgaggtcaggagattgagaccatcctggctaacatggtgaaaccccgtctctactaaaaaatacaaaaaaaattagccgggcgtgatggcgggcgcctgtagtcccagctactcaggcggctgaggcgggagaatggcttgaacccgggaggcggagcttgcattgagcccagttagtgccgctgcactccagcctgggtgacagagcgagactccgtctcaaaaaaaaaaaaaawttttttttctgcctttttctaatttcccgaagagaaaaaaaggcattgaaagtgaaccagaatataagctaattattctcctaattacttctgttgccatttgagtttgtttgctaatgaaattcttttttttctttttttaaatacttaaaaaaaaaatggaggccagctgcrgtggctcacgcctgtaatcccagtattttgagaggctgagacaggaggatcctttgagcccaggagttcagaccagtctgggcaacataaatcctatctctacaaaaaaacaaataaaaaaatcagctgggtatggtggygcatgcctgtagtcctagctgcttgggaggccgaaatgggaagattgcttaagcccaggaggttgaggctgcagtgaaccgtgatcccgccagtgcattctaggctgkatgacagagtgagactttgtctcaaaaaaaaaaaaaaaaaaaaaaaagagatagggtttggctacattgttcagtctggtctccagctcatgacctcaagtgatccttccatcttggcctcccaaagtgctgggattacaggcacatgccactgtgcctggtgtaaattcttaataaaaaacgaggccgggtgcagtgtctcacacctataatcctagcactttgggacgccgaggtggtcagattacctgaggtcaggagtttgagaacagcctggccaacatggtgaaacccagtctccattaaaaatgcaaaaattagccaggcrtggtggcaagtgcctgtggtcccaactacttgggaggctgaggcaggagaattgcttgaacccaggaggtggaagttgtagtgagccaagattgtgccactgcaytccagcctgggtgacagagtgagattccatctgaaaaaaaaaaaattcttaataaaaactgttgttttaaaaaaatgcattttgagacagcatatctgttttaattgactgagttgtctttcatttttgatactttattgtaatatgtcattttcactttaggaactatatattgtgttcattaaccttagtgttttctttttttaaattctttttctatggctgtttaaaaagaaaagtagaaagaaaaaggttttatgctttagtcatttcatgtggtaattattacagatctctcatttctcccttgcctgctattcgtttagtttacagtgctaaatgacttacctttttcttaaccagtttgttgctgtagcttgttacacttttcattcttgctgttatcccatctctagattcaagtttcctttttcttctttcccttttaagcctgtttttatgtgtccttattttcttgccctatatcttactgctgtatgtactgtctcttaagctgaaaacaaattctctctgtctggccaaggattctggattctgactgtcttcatggacctctttgaaatctacttgttgcaaaataattgggtaatgggggctggaggtctaggaaaaaaaattgggtagtggcaaagatcattgttaaatcagcacactttaaatatgtgatgtggccaggcgcagtggctcatgcctgtaatcccagcattttgggaggctgaggggggcggatcatctgaggtcaggagttcaagaccggcctcgccaacatggcaaaaccctgtctctactaaaaaatacaaaaattagctgggtgtggtggtgcrcacctgtaatcccagctacttgggaggctgaggcagaagaatcactgtaacccaggaggcggagattgcagtgagtcgagattgtgccacagcactccagcctgggtgacagagcgagactctatctcaaaaataaataaaataaaataaataaatatgtgatgtgaaaatgttacttgatattaatttttttgttctttatagagacaacataaggtatatgctggatttgaagttttgtgaagataaactaatactgatatacatctgttcctccagaaactttaatcttctctgaaactttgttacaggttttaactgaacatagagctatgtttagccatttgggttgaagagggcatttactactcatcccttcaatcaacaaatatttaataattccctctatatgatatactatgttagatactggctgcttatgaataagcagtatgtaatcctggaccttaaactctaaggagagattaaactttttttttttctttttttttgagatagagtcttgctctgtcacccaggctagagtgcagtggcttgatctcggctcactgcaacrtccgcctcccaggttcaagtgattctcctgccccagcctcccgagtagagtagctgggactataggtgcacaccaccacacctggctaatttttgtatttttagtagacacagggtttcaccatgttggccaggtcggtctcaaactcctgacctcaagtgatccgcccacctcagcctcccaaagtgctgggattacaggcataagccaccgtgcccagccgagattaaaatttaataacaaaattgggccttgggcatctaaaaggtcagtaaaattgattattttgagaataaagtagaaaacaaagcagagagagactaacactatgtaaagttaaaagtaggttcatagaaaggggtacctaatcctgagaagggttagagtgaatgacttcggggaggaggagagatttgcttaatttttgaagcagagagtagaaatgcaatacaggaagaataggggagaggtctttctggcaggagtacaaattgtgtgcatggaatggtgactcttcagtggcctttgtgcacagcagatatgctacgtatagaggatacccttggagaatttgacccattctgtaacagtgagagggatattttttgagttcctccatctccagcatggagttgacacgttgatctctgctggggataactcagctttccaggttttcaaggttgcatgtgtttcctccagtgtcatttggagaaactgtttctgttcaagataagataagacaaagggggctccgtgggtggctcatgcctgtaatcccagcacattgggaggctgaggcaggtggatcacgaggtcaggagttcagagaccagcctggctaatatggtgaaaccctgtctctactaaaaatagaaaaattagccgggtgtggtaggtacctgtagtcccagttattcgggcggctgaggcaggagaatcacttgaacctgggaggtggagcttgcagtgagccgagatcgcgccactgtactccagcctgagcgactgagcaagactccatctcaaaaaaaaaaaaaaaaaaaaaaaaagataaaggaatggggggagtggcgtgtcacctaaaccacgtgtggacagatgaggactggtgctggagttcagagtgaaactaattattctgagtaaccttactctaaatattatagtgaggtgagtcatataaagtatgggcaggaaattgagatgactttgggatgggttgctcagttctctggcttaatgaaaatttcaaaaaacatattttcctttgcattttgaatctgactttgtgctggggattttgtttgaatttaatgatagaccaaaatgcarttactgtacacattaccttaatgtgtgtcagtttaaaatagttttatattgtcatagattttgtggatttatcttggtttcttataccaagataaattcttaccttacactgtcttttactgtctcttacccttattatattcaagattcttattgctgctgcttccacataattttttaattctttttttttggaaggggcaggacagcatgaaagtattttttttgtcattctttatagctggttaaaaggaaaaatggaaagaaaaaggtttatacttgagtcatttcatatggtgattattacggatctctaatttcttccttgcctgctattcatttagttttcagtgctgaatgtcttaccattctcttaaccagtttgttgctctgcttgttacacttttcattcttgctctgttatcccatctctagattcaagtttcctttctcttctttctcttttccctttttagcctgtgtttatgtgtccttgttttcttgccctttatctattattgctgtgcatactatctcttaagctgaaaacaaattctctctgtctggccaaggattctgagtgtctttgtggatggacctctctgaaatttacttgttgcaaatttagtttttcacaaaagaacaagtgatagtccttgataatcctcagttagctagttagcttttttttttttttttttttgagaagacagggtcttgctttgtcacccaggctggagtgcagtggcatgatcgcagctcactgcagccttgatctcctaggctcaagtgatcctaccacctcagtctctggagtagctgggattacaggcatgcgccaccatgcccagctaatttttaatttttttttgtagagatggggtcttgctatgttgcccaagctggtcttgaactcctgggctcaagcgatcctcttcccttgccctcccaaaattctgggattacaggtattagccactgagcctggcctcccagatagatttttagtctttcctcagagtgcctctagttttctcctaaagttttagtttttctatcctttgggaaatagcctataggcacaaggtcttgttttgattttgaatgggaaatattgcctgggtcacatggttgggttcactgaaccggtaacccaacttgtggaaattaggacgtcgaagtagacttgttaagtggtgctttcagcatttctccctttttctcttccggtattttgatgatggctcacagggtagaggtctttattttaataatgacatattttccagaagggatagtttccatctctgagatgacatttgatatcttcttttttttttttttttgccatttaaaatatcccacttacctcagtaatgttgacacataccataattagtaagggcctcgggctgtgtctaaaaggtcaataacattgattattttgacaataaagtcaaggttcctttattaatgcctaggatccacctatcattttgatgatcatttagtgtttgcaggcattatgaaagagttggaaatttatcatctagaccacaacataattacatgacctttatttgtgaattttttaaggtgaggggagcaaaaaggctgtgtattaggaagaggtcagatttctgccttatggttgatgggatgaggaaagaagtttgagtatagttcttgtttatcagagtttgtcttaagtgggatcatggtggagggacttttttatttttatttattatttatttatttatgagacagagtcttgctctgttgcccaggctggagtgcggtggcgccatctccgctccctacaacctgtgcttcccgggttcaagttattctcctgcctcagcctcccgagtagctgggatcacaggcgcatgccaccatgcccggctaattttttgtatttttagtagagacggggtttcaccgtgttagccaggatggtctccatctcctgacatcgtgatccgcccgacttgggctcccaaagtgctgggattacaggtgtgagccaccgtgcccagccatgactttttatatgagtagccagagagatcctgaatgggggagactttatttgagggacttggaattgggagggaagtttgaaaaaaaaaataggattggacacagagaatggaagtgaagttgaaagccagaattaggagtgtaatagaatcaggctggggaaagccagctttccataggatatggcagtatggagaagagcaaagtgaaagggaagtttgcccggcgcggtggctcatgcctgtaatcccagcactttgggaggccgaggtgggcagatcactaggtcaggagatcgagaccatcctggctaacatggtgaaaccccgtctctactaaaaatacaaaaacaaaattagctgggtgtggtggcgggcgcctgtagtcccagttacttgggaggctgaggcaggagaatggcgtgaacccgggaggcggagcttgcagcgagccgaggtcgcaccactgcactccagcctgggcaacagagtgagactccgtctcaaaaaaaaaaaaaaaaaaaaaaaaaaagagggtggagctgaggaataaagtatcagctgaagattgcggggtgtagctttagtttgaaactttgttatagagaaactaaaagtgatttgtggtttaatttgttaatccttggaattggtggggggcagtgtaataatgtaaggagttactttataattccttatgcttttagtattcagtgcacactttcatttgttctccaaatatggatttatatagtgtttttaattaagtaaatgtaaattatcattttttcatctagtcatttattcaagggrtattttattgagcatcaactgtatgccaggctcttacaactcaggaaaagggagagagagggatgtatattaattgctgtctgttctattgctgggcaaacagaggaatgaatttagtataatgtacaagttacattggttttatatgtagcttttcccaggctaatctttggaagcacagagtagcaagctttctcctatttaaaaagaaagtcataagaatagctggaaattatcctgaaatgtattcttttggaggaagtagtatagtgtagtaattaagaacacaagttcttaatttgtcaaatttatacatcttttcctttgtgattaatgttgttttggatcctagttttttgttttgttttgttttttggtcttttcttttcttttttttttttttttgagactgggtattactgtgttgtccacaccagactgcagtggctattcacaggcgtgactgcagcctcgaaatcctgggctcaagcgatcgtcccgtggagctaggaatataggcacgtgctaccactgcctggcttttgcgttctgttaatttttttttttcctattgtaagatcatgaaggtaatcttctatacaaacttatagaagctttattgtttgcttttcacatatagatgtatgacccacctatgtataatttttgtatatgatgtgcagtaggactcaaattttattttttacccccaagtggatatccagttgtccccgtggcatttattgaaaagttcatctttccccattatctgcattgcttacttctgttgtaaattaaatcaagtaaatatttatatatttatttttaaaattaaaacaatttttttttgagatggagtcttgctctgttgcccaggctggagtgcagtggtgcgatcctggctcactgcaacctctgcctcccaggttcaagtgattctcctgcctcagcctcctgagtagctgggattacaggcacctgccaccacgcccagctaaattttttktgtgtgtgtgttttttagtagagacagggtttcaccatgttggccaggctggtctcaaactcctgacttaggtgatctgcccgccttggcttcccaaagtgctgggattacaagtgtgaactactgtgcccagcctatatatttatatatatataaatctttgctctttttccttggtctgtctgttcatgcactattaccacactgttttattgtggctttatagtaaatcttttcttcctgtctaggtcttcttgaagaatgtcttggctattcttggcctttgcatttctgcatacgttttagaataagcttgtcaagttcctggaagaaaatctgttgaaattttaattgggattgcattcaacctagagatcatgttggagagaactgacattttcagtagcattgagtcttctcacctaaggtcatagtgtgttgcttactttatttaggtctttgttaatttaataatgttttatagtttctttgtagtattcctatatattttttcttttcatttttattttgctcttaatttcatatttccagaagggctgcaagggctgtactgtacagtgaattcctgcataccctttacccagatttctcagatgaacaccttaccacattttctttatcattttctctttctctgtacatatacatacatatacacacgtcttgcacaactttttttctgaactttttgactgtaagttgacatgctgtccctttacccctaaacacttcagtgtgtatttcttgatagcagaatcattatctcatctgaccataggtaacagttatcactactatactttaaaatctgcagactgttttcggagttcacatgtctgaagcatgtcattcatagcaaagataagtcccagattctgcgctgcattcacttgttagtgctttagtctcacgtcatctggaatagttatttacctttctttgtgtttcacgaccttaaaatttttgaggagttcaggccatttattttgtaaagatgcctatgcaatgacatagcactacacacccactagaaaggctaaaattttttacacttatactactaaatgctagcaaggatgtcgaacaatgggaactctcatatgttgcttaccatactgctgggaatcctactcccaggtatttatccaagagcaatgtctacacaaagactcacatgtgaatatttgtagcagctttattaatagttaccccaaattggaaacaattccagtatccatcagcaaatcaacagataagcaaataaccccatgcagtgaaaaactactcagcagtaaatagaacccaactactgacagccacaacaacatgcatgaatctcacaagcattatgctaagtgaaagacaccagaactcaggaatacatgattccatatatatgaaattctagaacaggcaaaagtaatctccataataacagaaatcagataagtggtggccaggagctaagaaaggcaaatgaaattgactacaaagggggcatgagggaactttttgggggaatggaactattccatatatatatatatatgggggaatggaactattctctctctctctctctctctctctctctctctctctctcttttmtatmtatatatatatatatatatatgtatttttttttttttttgagacagtcttgctctgttgcccaggctggagtgcagtggcacaatcatggctcactgcagccttaacctcctgggatcaagtgatcctcccacttcagcttcccaagtagctgggactacaggtatgcaccaccatacccagctaatttttatgtcttttgtagagataggagtctcactatgttgcccaggattgtattgaactcctgggctcaagtaattctcctaccttggcctcccaaacttgtgggattacagtttgagccaccatgcccggcctattctgtatcttgaactgtactcctaagaagttgaattttactatatgtaaattatacctcaacaaatgtgactttaaaaaaatcattagaatttggcacattaacagtgcaaaagtttccagcctgggcaacatggtgaaaaaacacaaaagattagctaggtgtggtggtgggtgcttgtggtcccagctacttggaaggctgaggcataagaatcacttgaacctgggaggcggaagttgcagtgagccaagatcgtgccactgcactccagcctgggcaactgagcaagactcatctcaaaataaacaaaaagtcattccagaaccacgttctagcatcatctttccctgagcttcttctgcctcagcccaatctcctcccaccagtctttctcacctttattcccactgtgtcccccacacactcttccagcagatcctgaaaaaaacgatattgcttgtatttacttatgttctccccactaaactgaagcaccctgatggtggggatatccgattcatgtaatgtaataccagctaatttttgtatttttggtagagaaggtgtttcaccatgttggccaggctggtcttgaactctggacctcaagtggtcctcctgccttggactcccaaaatgttaagattacaggcatgaaccactgcctccggtccagaatgattttgtcagaagaagccatttgagctaaagcgtagagatgggataaacctggaatacttggaggaacttggagcagttgagaaggctggagagtgtggacctgaggaaggaggtgggagaagggaattaaggaattaaggtggaattaaggaattgaggaaagaaataagcgtttgtcatgctattaaacaaattttttgaaaagcaaaggcaacatgatattccttcatatgcaatgtaacttcttcacaaaacccaaaaatgaacattattcagtatgctgcaagtaggttttactgatgaaatgaaggaagatgctgagaggtctctagactcacttgctatttagatgtctagtttcaggttaccaacctcaaagtactttctgcctttcaaatttagatcttcaattcattacagtaccaggtttcattgaatctaaaatatcatgaattctaaggtacacarttaatattttatatactgctaagaaagaaaaaagtcactgccaattaagtaatgacacatcatcaaatgctaaatacatctcaattttaaacgtgttaatgtgtgaaaaagtgcctattggagatacatggtctttcatttaatcctcataacaggtttcatgtacatattattcactgtatgtcatagcttttcatggtaattcgtattgagtaatcaaacctgtggttgttcactcttcraatgctgaattataccgtattataatttagttaattaccttttattgttaaatatttatttccaagtttttttctttgttttgtttttcacctgcccctccctctccacctctttttttttgttaactgccgcttcggagaatataagcttttttaaaattaatttttatttataattgacacataattgtacatatttatggggtacaatgtgatgtttcagtgcttgtatatgtagtataatgatcaaagtatatttactgctttaaacgtgtcatttctttgtggtaacaacattcaaagtctcttttagctatcttgaaataaacactacattactatttgctgtattcaccctactgtgtaacaacaccagaatttattcttcctaactataactttgtacccattgaacaacctctcctggtcctccccctgtcctccaccctctttcattggtaagcactattctactctctacttttatgaaatcaatttttttagattccgtgtatgagtgagttcttacagtgtttgtctttctgtgcctggcttattttacttaatatattatcttctaggtccatctgtgttcctgcaaatgacaggatttcattcttttttgtggcggaatactatttacctgtagatgggcatttaggttgattctgagtcttgtataaataaacttttgattgttttcttaaggatagatgcctggaagtgaaaatactgggtcaaaaagtctaaactttcttatgactcttgatgtatatgcatatagtcatgttgcttttcaaaactactataccaatttaaattgtttacaatacttaaatgtgtaaattccatcttcattagcagagtatcacaataaatttgttttctaattctgtaggcagaaatagtatctctctcctttttttttttttttctttttgagatggagtcttgctctgtcacccaggctggagtgcagtggcacgatctcggctcactcactgcaacctccgcctcgtgggttcaagcaattctcttgcctctgcctcctgagtagctaggattacaggtgtgtgccatcacccctggcttatttttaratttttagtagagatgtttcaccatgttggccaggctggttttgaactcctgacctcgagtgatccgcctgcctcggcctcccaatgtgtttggattacaggcgtragccacttgcgcctggccagaaatagtatctcatttttcggaccatgtcaaaagaatgataacatctcattttagtatatattttttggattactgattagattgaacatttgatcacattaatttttgtaggagataattggtgtataagtttctggcattttcttgtgataataagtaaattataaatgaagaacagatgtaattatgcagatgtcatgacatttttaattgtgagatttattttttccctcatagtaatataatagctgtatatakagatattttttgagatggaatcttgctgtgtggcccagactggagtgcagtgggtcaatgtcggctcactgcaagctccgcctcccgagttcatgccattctcctgcctcaacctcccgagtagctggactacaggcgcctgccaccacgcctggctagttttttgtatttttagtagagatgggggtttcaccgtgttagccaggatggtcttgatctcctgacctcgtgatccacccaccttggcctcccaaagtgctgggattaaaggtgtgagccaccgtgcccggcctaatagctgtatttttaattgtaaagaataattgatgcagttagaaagttttggaatcctgtgaatttctaattttgatctgttgctcagttgttgatttttaaggtgagatttaatgttttaaagaattatgacttcaatatgtataatgtttgttgtctttttaatgctgggataaaattttaatgatttctaaccagtgtaaggctgtgaaacttgattatctgaaaattattaaaattataatagtatatcctaaaaatgtaataatatgtgctattccaagtggttaaaaaaatcgagacttaaatgataaaacaaagattctgctatattccttttgtcttaagtttattccattagtaaaaagtactcgatcaaggagactttgacttttttcaactgatgttaagaatgaaaaaagatatcttgattttatgtcataaggatgtgtttgaatacttgtgaagcagaagcattwggcatgaacagtttaaaattgttactatttatttgtgaacgttttaaaattgtttaacttgaacaatttaaaattggttacttctgagctacactaatcctagctattttaaactggctttcagcaatatatattacagtgcatacttgaatcatttttttggaacagaaaattggatgttaagtaatatttattaaaacgcagaatttttctgtggcaaaatatttctacagtgggctctgatagaaacagattttttaaagaaagtagaggggttggcacagttcagttgacagccagttgatggacaaagaggagccttgtcctagtgctctgttatgtggctatggatgagtcacttaaatttcctgcctgtttttgtttttggaaatgaaaacaataacactggttatggattgttcatattataaaaacagttaaattctgatgttctgccgaaaaattggttcatcagtcggttataattactgttgctacttggttctaagtttttaagttttagattaagatggatttcatggcttgatccagtccagcacattttaaatgatttcactttatagatattaattagttaccctggatgatgagaaggggttatcagtatcttgttaacaaaagaagctgttaaattattctcaagaatataaggtggactgtatacttattttttacaaagggaaaaaaggggaatttgtgccatggaaactaaagatcccatttatttttgtcattatgccaaaaaataacaacagtgttttctctctggcttatttagagtggtagagcttctttgacgtttcctatttctacctctgcttgtatcgagctgtagaactcttcatttagaatataacatttkcaaatattgaaaaattacttttttttttgtgggattgccactaggtggtgggtataatatgtgaggaatgatcagcagtaataatagttctgatagtttcgggtacctatatttttacattgttgtgctttttcattattgtgtatatttgaacatttctgtgaaacttagtttcttttcataattattttgtttattttctttagagacaggatctcgctctgttgcccaggccaatgtgtggtggtgtgatcatagctcactgcagccttgaactcctgggctcaggtgattcacctgtcttagcctctcaaatggttgggattacaggtatacaccaccatacccagctaaattttttttttttaatttttttgtagagacaagatctcgtcatgttgaccaggcttgtcttgaactcctggccccaagtgatcctcccacctcagtctcccaaagtgttgggattatatgcacgagtcactgtgcataatgattttaaaatttcagagatctcaaaagatgttactgtaccctgggattagtcctgtttccccttagggaaaatatttccaattttataatgaaagttagaatacaagtcagtgacaacataatccacttacctgaaatgcattttacagcaaacttttaaagattaagttacaattcttatataagacaattatattactaaggattgaggcttaaaaaatgattaaaatgggctgrgtgtggtggctcacgcttgtaatcccagcactttaggaggccaaggcgggtggatcacctgaggtcaggagttgagatcagcctggccaacatggtgaaaccttgtttctactaaaaatacaaaaattagccagacatggtggcgggcgcctgtaatcccagctacttgggaggctgaggcaggagaattgcttgaatccgggaggcagaggttgctgtgagccaagatcgtaccactaccctccagcctgggcgacagacactttctcaaaaaaaaagaaaaaaaaattaaaatgagaaatgtaaaattgtcagattaataaactttattaaacattcccaaggcaatgatgaaaataattaacagtgaattattctataaagatgtgtttccttgttaaacattggacttcttgataaacatggagaatgtctacgtacatttatatcttctttctcttctgaaacatcattagaatgatagtataggaattaaaaaaaattacatagttgggaacatccctaccaaaaagttagatgtgcccagttactctagaatgaagtcataggtctccatgtacttacatcgagctgctggttagctacttagtgactttctaaatatgaatggaaaacaagttgagaaaagcctttccatgagaaagaaaaaagcaatagaaggagaaaagcagccagaagtaatcagagacaatggagggaaagtaaaaatgtgactgtagaaataaaattttctgtggaagggttagaaagtcaagtggaggacattcccaagacggtggaataaagggataaatatataggtaatagaagagaaaagaggcaagagtaagagtggcaatcttatagaaggagaacattaaattatagacctcagaaggcaagaactgaataggaagacatctaaaaaatagaaagaatatcagaacattcctcattgtatgatttgtgcttccagactaaacatgttcttaatgtatgtagcacaatgaattcaagcaacacagagccatattatcatggaagtttagggcacccaggattaaggcaagatccttcaagctttcaagtaataggggtgaaataaaaaggggtacgaataatcaggaacctaaaaggcatagcagttctggatgctaaaatatatgttctcaaaatcttgaagaaaaatgactttcaacccagaactcaattatatgtgtgtgttcaatcagtaatttaagtatgaaggtagaacaaagaccctattgagcatgaaaggactcaaatacgtacctaggagcgagcagtgaagggaagccccagaataatagctggcagtagtttcagagagcagccaaacaagggaaggaggggtgggaggcactgttgttggttatataagcaaaaaaaataaaaaaaataaaaaaaaaaataaaatgtgctcttttatcacctaataagaaaattaatataaaatgcgtctttgtgaatcactgttaatattgaatggaccttgtgagaagattgtaattaatactacttcattgtgaacaactaaactgaagaaaaaaaggcttaagccttcaatgcaaagaaattcatccttcatgaagaattctcagtagttctaatggattctattccaggatggtaattcttgtgaagtgagaccaaattgtagctgagttgaattttaattgttgaataatcactgtgtaattaattccagagaatgactgagattatgaaatagtaactgagtacttgaactactctgaaactttagatttatctgaccttaatgcctacggacttaaagttgttagtgtaaagactcgagaatgaattttggtgtaggcggaaggcagcagctttaaaagaaatcatcctatgttggtggttaggagtcaaggcaaaatgcctgcagcaccgtagaggagagggtttttattgtgagatctactttaaaaaaaaccaaaagtttgcttacttttaactccggggaaactgaagctttttaacccataaataacattcctttgagatattgccatgctttatgagctgggaaggtgtatggagctttggatcatataatcagtatgatcgattatttttgtttatgaaaagttaactgtttgagtaactttttaagtgccttgacaaaaccattatggttttatcaggttttatagaggatctcagtaatgcataaattgtgtctgtctcaagtctttgtctgaaaattaaaaaatccaggcatactattccactgggagacattcccattataatgtttgatttattggctacttagcagaattttatagaaatctactttaaaagaaacctgactcccacctaaactttgccaactgtttggataaactttgtatttttatccatgttttgagaatctgttatattactgtatttctttaattttactaatccggcacatttgtgcaaaatgttaaattggagggcaagtgatgaatagatctgatttgagggtatttacattccaacagattggaacagtcagaaaaatctagttgctgagtaatagcattattaaaagatgattgctctactgaatttgctttttaatgggtttatgacacaaagtcccataagatctatggatactcaacaatctgtatacataaagaattaaatctctcataggtatgaagttttcttttaattttatttgaaatacccagtcagttattaaattacttaattccttgtttatgaattcactaattatttgctattatctggtgccctgcttttggtgcttttttcccrcatcatattagattattgcctaccattctgttctaccagagacctttctaatatggtcagtgacctttctaatatgcatatctaattaggtgaccctcagttgtctgtagaatagagttaaggctgtttacaccttggcatagatctgcctttatctgtcaggctttgtcttccaccatacttttttcccccttcttcctctcagtacaccctccagtcttactaagtaacatttatgtccagtatttcagcttttaatttcacatctttgagtttttttttgaaaattataatttcaccttttattttagatacaggggtacatgtacaggtttgttacatgggtatactgtgtgctactgaggtttagggtatagatgatttcatcactcaggtggtgaggacagtacccaataggtagttttttagccctttccccctccttctctgccccctctagtagtccccaatgtctatgactcccatcttttttttttttttttttaattgagacgaagtctcactatattgcccatgctggtcttgaactcctgaactcaagcagtcctcttgccttggcctctcagagtgctggaattacaggcatgagccaccacacctggcattggctcccatctttatgtccatgtgtactcagtgtttagttcccacttgtaagtgtgaacatattgtatttggttttctgttcctgtgttaatttcacttgggataatggcctccagctgcctccatgttgctgcaaagggcattatttcattctttttaatggctgcatagtattccatggtgtatgtgtactatattttctttatccagtccattgtttatggacaccgaggttgattccatgtctgttgtgaatagtgctgtgatgaacatacaagggcatgtgtcttttctttttctgtgtgtgtatttatttattyatttaattttatttttttgagacagagtcttgctctgtcacccaggctggagagcggtggcacaatgtcggctcacttcaacctccacttcctggggtcaagcgcttctcctgcgtcagcctcctgagtagccgggawtacaggcatgcaccaccatgcttggctaatttcatttgtatttttagtagagacggggtttcttcatgttggtcaggctgatctcgaactcccgacctcaagtgatccacccgccttggcctcccagagtgctgggattacaggcgtgagccactgcrtccagtgtgtgtatttatttttaagcaggcatattatgttcaaagaatgcatgtgtctttttggtagaacgatttattttcctttgggtatatacccagtcatgtaattgctgggtcagatggtagctctgttatatgtatttttttttagtttttatttttttttgagactaagtctcactctgttgcccaggttggagtgcagtggcatgatcttggctcagtgcaacctccaccttctgggctcaagccattctcctgccttagatacccgagtagctgggattacaggtgcctgccaccacgcctgtctaatttttggatttttagtagggacgaggtttcaccatgttagccaggctggtctcaaactcctgacctcaagtgatctgcctgcctcagctttccaaaatgctgggattataggtgtgagccactgtacctggctggtaactctgttttaagtttagaaatctccaaactgctttccatagtggttgaattaatttacattccaaccaacagtatataagcattctcttttctctgcaggcttgccagcctctgttgtttttttactttttattaaaagccatttaattaggtcccacttgtcagtttttgtttttgttgcagttgcttttggggacggagccaaaaattcttagccaaggccagtgtcaagaaaggtatttcctaggttttcttctagatttttatagtttgaggtcttatatttgaatctttataatccatcttgagttgatttttatatatggtgaaaggtaggggtccagtttcattcttctgcatatggctagccagttatcccagcaccatttattgaatagagagtccttttcctattgcttgtttttgttgactttgtcaaaaatcagatggttgtaggtgtggggctttatttctctgttctctattctgtcccattggtctgtctgtttttgtaccaataccatgctgttttggttactgtagccttccgtatagtttgaagtcgggtagtgtgaatatactgtgatctaataggcttttattcctgggatgtaagggtggttcaacatatgcaaatcaataaatgtgattcaccacattgacaaaattaaaagcaaaaatcattggatcatctcaatagaggcagaaaaagctttctgtaaaatccagcatcccttcataataaaaaccttcaacagactaggcatcaaaggaacataactgaaaataatgagttrtctatgataaacccatagccaacattggactgaacaggcaaaagctgaaactattctccttgagaacaggagcaagacaagaatgcttactcacaccactcttattctggaagtcctagccagagcagtcaggcaagagaataaataaaaggtattcaaataggaaaaaagaagtcaaactgtctatctttgctgatgatacattctatatgtggaaaaccctgaagtttctcccaaagactccaagaactgataaatgacttcagtaatgtttcaggacacaaaataaatgtgcaaaaataagtagtatttctaaacagcagtgacgttcaagctgaaagtcaaatcaagaacacaatcccgtttacaacagccacatagacaaaacgaaatacttaaaaatatagctaaccaaggaggtgaaagacctctacaaggagaaccacaaaacacttctgaaagaaatcagaaaaccaggcgcggtggctcatgtctgtaatcccagcactttgggaggccaaggcgggtggatcaccggaggtcaggagttccgagaccagcctggccaacatggtgaaaccccatctctactaaaaatacaaaaactagccaggtgtggtggcaggcccctgtaatcccagctactagggaggctgaggcaggagaattgcttgaacccaggaggtggaggttgcagtgattcgcgatcttgccattgccttccaccccggacgacaagagcaaaactctgtctaaaaaaaaaaaaaaaagtattttactttggtccttgatttatgtgacacacctaggttaaggaagaacaaacatgtttgtaggcaagagagtctcatttttgtaattcatcatcaacttttgaaatgttaaaattaatatttaaaaagtattagctctagcgagtcaataaggcaagcaaatatatagacttgtttgtaaagcaagaaaatatttactttctttttttccctttgaatttacttactacaaggtagggtttgtgtgtagcctagagtttgaaccttcatttcaaggaatgaaatgaaacaagatggctcttgtttcttgatttttgcctgttttttgagcctaagttagtgttctcaaatggggaaaagatgagaaggagagggtaggtgtagactaactttacccatgttacagtgctttgggatagaagcatagcactgcttctctgagtatttcctgcttccccccaggcatttgagtacctgggatattatcactttagttattccccttcccccaataattaattccaattcttttaatggcagtggtggtaactttaagactttaggagtttctaggatcttatttctatgtgtggtttagttttttatttagaaagaatgtgcttttcttttttgtttaggatgaaaaatactaattttttttctggtgctatgcctgacacatattgggaattcaataaatgtttgtagaatgcatttgtaataatttcacttcatggttcaacccccctccagactctactctccccaaacagtcccgtaataagagtgagcccttactttcacgaaagaaaattcaaaattggtatgcggctgaacaaaggtaagtgagtcaacataatcactcagaagcaccatacagtgtgtttcccaacacaattaagaggagacaggacctgggagctgccgagaagtacagaggcttccatctcaagggccttcagttacaagtggatgtccttaatgtattttcagtatttcacaaagcctgatggagggtttatatttgctatgattaagctgaagtaggctaaggtgtcagatttcttactggagtaatacccagcctgggtgacagagtgagaccckgtctcaaaaaaagaaaaagaaattgtcatttaataagaagaggatcactatgaacgaaacaaatttaaacggggagctaggaggtcagtttaggataygaaaagtttgagatggctgttgatttcctaagtagtgatattgaataggctatgtgctctagatgtctggagttaggagagaggtataagttggagatagaaaatggggcattactatttttttgagacagggtctcactccattacccaggctggagtgcagtggcacaatcttgactcactacaatctccatcccccaggttcaagcagttctcgtgtgtcagccacctgaatagccggaattacaggtgcatgccaccacacccggctaatttttgtatttttagtagagatgggatttccccatgttggccaggctggtcttgaactcctgagctcaagttatccacctgcctctgccttctgaagtgctggcattacaggtgtgtgagccaccgtgcctggccacatggggcgttattagcatattaataacattgatgccatgattagccatatggataatgtttaaagccgtaagactagatgtattactttgttttcacactttataaagaacttccctgagactgggtcatttataaaggaaagaggtttaattgactcacagttttgtatggctggggaggtgtcaggaaatttacaatcatggcagaaagtgaaggggaagcaagcaccttcttcacaaggtgcttcacagaaaagaggagggagaaagagaagagcggggagaggagggaaagagagggacgagaggagaggaggaggagggaggagaggagaggaggggtggttgttcttgcatggcttaagaaggaataggatctggtgggtgagtagcgactggttttagataggagtaagaataatttggacttagtaacagaatgaaaggaagactgtatgggcacagatgcagcttgatatgtagaggtggtggtgagagcttaatttttttttttatgagaaaacttgcatttgcattttcagagatagtttagtagaatactgtcttcaaagcatgttgtggagtggagttgaaagttaaagtggcccttggaaatctgaaaaaataatttgagggctgggcacagtggctcatgcctgtaatcccagcactttgggaggccaaggcgggtggatcacctgaggtcatgacctcaagaccagcctggccaacctggtgaaaccccgtctctactaaaaatacaaaaattagctgggtgtggtggcaggcgcctgtaatcccagctactcaggaggctgaggcaggagaatcacttgaacctggaaggtggaggttgcagtgagctgagatcacgccattgtactccagcctgggcgacagagcaagacttcatctcaaaaaaaaaaaaatgtgattctcatcttatagaatatctgaatatacttattgcataatttgtatgtcaattaagaaagaataatatattttataattgattcaagaaatgaaaaatttcagtgaaaatttccaattcttttgattgtctctctgattctcagggagtcatttaaatgcaatactaagcggaagacaaaattaactccctgtaaaaagcatgtttaccttttaaaaatatttctttggctgggcatggtggctcgtgcctgtaatcccagcattttgggaggccgaggtaggcggatcatctgaggtcaggagtttcagtccagcctggccaacatggtgaaatcctgtctctactaaaaatacaaaaattagctgggcgtggtagcgcgtgcctgtaatcccagctacttgggaggctgaatcaggagaattgcttgaacccgggaggtgaaggttgcagtgacccgagactgcgccactggactctagtctgggtgacagagcgagactcagtatcaaaaaaaaaaatttttttttttttttttttaatgagactgagtctcgctctgtcacccaggctggagtgtagtggcatgatcatgactcactagcctcaacatcccaggctgaagtgatccttccacttcagcctcccaccacgccagctgggaccacaggcatgcaccacttcacccagctagtttttgtattttttgtagagacagggatctcactttgttgcccaggctggtcttgaactcttgggctcaagcaatctctccagcttggcctctcaaagttctgggattacaggcatgagccactgcacctggtggaaaaatctcttaaacctagcacaaattacagaactaggtaacttctgggtgtatcattggataataaacaagattagtcacagcatatggaatatttaaatcacctgggatgaatatcttgctattatattctgatactttaatatctgtgaaagaaattttgactaggtaaactgggatgtttagtctcttaaaaatacagggctttttctgaaaaagtctactttttgtccatattattgtaataacgattgcatatattatatgaattatgtctaaatccaaatctgtcttgtgatggtaatttacgcaggtgtttatatttgaaatatagtttatgatttcttctctgaaaatctgtaagaaaatcatataatcagttctcacaattcagattgtattgtatttatagtaattttcctggtatcagttccaaatcacgtattttaaaatatttcatagtaagcttattaatgacatacttgcttttttttttatcccctttttttgttagcacatcaatcttaactataccagttaagttagtggtggtgttcactgttttaagaatcaagtgrtagcagacttagctttaagcattgattgctacattggagtttcctaggttatacttggaagtcactttgtgaaaaggtcatacatcaggaccagggccataatcaactagactttcagaaggggtgtcatagctggaatggacatttgtcttattttgagaaacagttgatctgcgtattttgtcatcagtatctcagcctaaagcagtgcctggtacttagcaggtgctcagtaaatattcattgaaaaaaaaatcaaaattacttcttaattaaattgtggtagttaatttttagatattgttaatgttcagatattttcttctttgtccygagtttggacttagtgatgggtcttttctttccattgttaataaaagtttattgctgataaaaccaagatattcacaataagttcagtacttatgttcaattaatactatatcatagcaataaaaaacccaaattttgtacaactagctgaagattaacttggatatattttctagggaggctttttctttttgttttttgtttttgatttgtgacacaggatcttgctctgtcacccaggctggagtacagtggcacgatcatggctcactgcagccttggccacctgagctgaagctattcttccgcctcagcctcttaagtagctgtgactgcaggtgtgtactgacatgcctgactaatgttcatgcttttggtggagacaaggtcccactatgttgcccagagtggctttgaactcttggactcaagtaatcctcctgccttgggccttttcaaggtaatttactgactaaagggaaccctgctgaaatgtttttgagaatgattcaattcctgaactttggttcgggaaccgaaatgcttgataaaagattgtgctaggtgcacacaaaacttactagccacagccaactgttaaccttgtgccccattttctcacagtatctggataccagggaagctaatagccttaggatacactgatagaggtgagaggagttgccggtttaaaacttgtatgccaaaggtgcacataacattgttttgagcagcaaggccagggcttggccagatgaaagagtaatctttttaaaggcaaacttgatagatctaccccaccccttcatactcccctccactggaatttaagatccctgagggcagggattttgccaattctgtttactcttctattctaactgattgttttcctattagctagaaggctccctgaggccagataccttgtctctttttgctcacctttatacccccaacacctggcagtatgtggtacatggtaggtggctaaataaataatagttaacagaataaatgactccgtaaggcagtcttggaaggattctgtttgccatatgctttctcctttttggtgtcttattctagcacttacagccaaaacccaaattacttttagttggtacttaatgtctaataccctaacatatatatacacatatatatgcgcatatatatatacacacacacacatatatatacatatatacacacatatataatatatacacatatatacatatatacacatatgtacacatatatacacatatatacacacacatatatatatacacacacacatatatatatatatatatatatatatatwtwttttttttttttttttttgagacagagtctcactctgtcaacccaggctggagtgcagtggcatgatcttagctcactgcaacctctgcctcgttggttcaagtgattctcgtgcctcagcctcccaagtagctgggattacaggtgcagctagaatgcctggctaatttttgtatttttaggagcaatggggtttcacygtgttagccaggctggtctcgaactcctgcctcggcctcccaaagtgttgggattacaggtgcgagccacagtgcccggccttaacctaactatatttctaaaagggtaacttttgaaaataatggtgacatggcaggcaacagctcatgttttgtgatatgaatctgcctattctgcctgtagtatttaatacatagatgttattggagttatcattggagatgcagataaaagagaatatagtggtgtatgtttttgttactcttgcctgcaataagtttgctccccagggagcctcctggtgatatacttttaaccttttgacacagaagaaatgaaaaattagtgtagtagctttgaaaagccacgattgccttctgtggattacatggtgcttctgtggattacttctacacattactatagtgtttgcattaaaaatacattatcaattgtcaattaagtactaaaagtaagataattttcagttgatgatggggaattatctctcttagaataactaagaatttccaagatttaaaatttccttaaccccaataattcttattatttttttcttttagtatttgtgcaaagtatatgtagttagaaagttagaatgtgtttaagacttctagtacaatagcactgggaattgagactgtcttaaaaatttcccttatagtgagtgagtatctttttaagtactcttcatatgcaaacatgtttagttagaatgaatattgaccacatggattttctgaaagatttttctgggaacagatattaacatatctgaaagaattttgtcatctttggtggggtgaataaatcagacttcattaatgaaggataatttgtatttaaatatttaggattccaaaaacaattaaatgaagacattaaaaaaagaggtttattctagtgaaaaccttgcactagatacaaagtaatacttaatttaagcctgggcaacatggcaaaacctcttctctactaaaaatacaaaaaaattagctggatgtggtggcacatgcttgtagttcccagccatttgtgaggctgaggcatgagaattgcttgaacctgggaggcagaggttgcagtgagctgagatcatgccactgcactccagcctgggcaacagagcaagactctgtctcaaaaaaaaaaaaaaattaatagaagggggaagtgagtgtccatggcttcttccaggcagaagtacatcatyatcacatagaataagacatgttcagattgttgggaacaagtgccccaaaatctggccataaactggcaccaaaactggccataaacaaaatctctgcagcactgtgacatgttcatgatggccataacgcccatgctggaaggttgtgggtttactggaatgagggcaaggaacacctggcccgcccagggcggaaaactgcttaaagacattcttaagccacaaacaatagcatgagtgagctgtgccttaaggacatgttcctgctgcagataactagccagacccacccctttatttaggcccatcctatacttttagttaatctaatgtctgtagaaacaatgctaatgactggcttgctgttaataaatacgtgggtaaatgtctgttcggggctctcagctctgaaggctgtgagacccttgatttcccacttcacacctctatatttctgtgtgtgtgtgtgtctttaattcctctagtgccactgggttagggtctcctgacagagctggtctcagcacagataaaaaactgaactgggccacagtcatttgggcagtgactgtctttgatgacagtgctcarcrtggctgtctcttggatcatattgttccaatctggactgggagtttgcctctgtatagagttctaggttagaattaattttcctccagaattttaaaaacattgttttatttacttactgctttgagtgttgttgaagccattgtgattaatgatccttagaaggacctgttcttttttcttcttttctcactaatctctctggaaatatgtagcacattttatttatttctggtgttctgaaatttgacagtggtgtctctgtgtgtctgttttctagtacaytgttgaggactccatggaaattttgactagactctagaaaatcatgtcttttggttctggtatattttctttggatatttcaaagccttcttcctctctctttggggagtgggcatgtggagggatttttttttcctggtattttgatgctggattatttttactagtctcatattcacattttattttcctttttatcttttccccctattttctattgttacaggaaaggggtcctgatccagaccccaagagagagggttcttggatctcacacaagaaagaatttcagacgartccataaagtgaaaggaagtttatttagaaagtaaaggaataaagaatagctcctccacagacagagcagccccaaaggctgctggctgcccatttttatgtttatttcttgattatactaccagagatctctcttgttgccatcttggttttgatgggttttagccagcttctttactgcagcccgttttatcagcagggtctttatgacctgtgtcttctgctgacctcctctctcatcctgtgacttagaatgccttaaatgtctacaaaccagtaggttttagccttattttacccacctcctattcaagatggagttgctctggttcacatgcctctgacgctcttccattttatcttaactctgaaaggttgcctcgtctttatcttctatagcttctagtgaatatttcatttctattattatgttgttaaagaaaaattattctaacacttgttaaaacagcaaggaatactttattcaaggactcttgtggtaggggtggtattagtctgctagaagtgtagactgctcaggctgccrtaataaaataccacaaacgttwgtattctgacacagaaatttagttttttcacagttttgtaacctggatatctgacgtcagtgtgtcaccgtggttgggttctgataagagcacttttcctggcttatagatggcagccttttctctgtgtgttcccttggcctttccatggtgcatgtactcggacagagatctatttctctctcttcctcttattatatggccaccaatcctatctgattagaaccctacccttctgacctcatttaatcttaattacctcctgaaagccctgtctccaaatacagagacattgagggttaaggcttaaacatatgaatttggggggaacaaaattcagtccatagcagtactttcagttcatatgaaggggtattgcagtaggtgggagagatgggcctcaactcctgaatatggcagagacagctggggattgtgaacccagaatatctaagacaggtctcaaccaatttagaaagtttattttgaaaccaatttagaaaggttaaggatgcacctgygactcagccacaggaggttctgaggacatgtacccaaggtggtcagggcacaacttggttttatatgttttaggtagacatgagacatcaattaatttctgtaagatgtacattagtttcatctggaaaggtgggtaaactcaaggcagggggaggggacttccaaatcataggtagataagagacaaactattgcattcttttgagtctctgattagcctttcacagaatacacaatttacaggtgagaggagggtagaggaawtaatcttatgccctagtctggcttagtgaaacaatatggcagaagaagcartgagatatgcgtttgtctcacatgagcctcagcgagatgactgagttctggctgtccttcatccacaaggaatttccatgtgggcaaattgtgagggaggcatgtaactttttaaaaaatgtttgtagctatcttgtttaggaataaaatgggaggcaggcctgcctgacatagtccccagcttgactttttccttggcttagtgatgttggggttccgagatttttttcctttcacaggatttacagccaaggaacagagcgagtggatcagtggatggaaaattattcatggagacatcaagggcatggaaagtcttgccatactgacttaacaggatttttgctgaaggcaggtcaaggacttagagtgttaatggaaaaagcaaactgtaaaatatttaaagaggtttattcagagccaatatgaacgactatggcccgatgracagtctcaagaagtcctgagaaagtgtgtgtgaggtggttgggttataatttggttttatacattttaggaaggcaggaattacaggcgaagacataatacgtggaaggtatatattgattctgtctctgcctgaaaactgggaaatctcgaagtggggggrtggyggaatggggagcttatgggtcataggtggattcaaagattttctgattggccgttgaaagagttaagctttgtctaaagactggaagtcagtagaaagaaatgctcgaggtaagataagggggatgtcagcccggcgtgctggctgaggcttgtaatcccagcactttgggaggccgagccaggtggatcacttgaggtcaggagttcaagaccagtctggctaacatgatgaaaccttgtctctgctaaaaaaaaaaaaaaaacaaaaaaaaaagcaaaaattagctgggcgttgtggcaggtgcctgtagtcctagctcctgtagaggctgaggcaggagaattgcttgaaccctggaggcggaggtttcagtgagcccagattgccccattgccctccagcttgggcaacaaagtgagactctgtctcaaaaaaaaaaaaaaaaaaagatccatagatgttgaggttcttgttatgtagagaagcttcataggtagcaggctacagagagaatgatggtaaatgtctcttttcagaccttaaaagatgtcagacttaggtaatctcgcccagatccatcctggaaatgcctggctgcattaattactatgaaattctctacagatgcaaatttcctccacaaaagacagctttgcagggccatttcaaaatatgtcaaagaaatatattgtggagtaaaatatttgattctcttcagggtctgatatctggcatgtgatgctgtaccagagtcaggttgaaatgtgtcttattgctgcaaagaatctgttttgtcagtcttatgatctctattttaatgttattatttgtcagttgtgcctaaattccaaaagggaggggggtataatgaggcatgtctgacctcccttcctgtcttggctgggaattcagtttttcaagttcctctgggtttcccccatccaagagggatccccattcagttggttaggggcttaggattttatttttggtttatgacatgaaaggtgggggatgggaactggatcaagtatcaggggtcggggagtctatctaaattgatttagcaggattcttgctaaaactgggctgtgcaggcctgtcaagagatagaacggagttaaggccaaggttgaggcctagcctagttgaggagaggcctcagaggagcctaattaaagttggttggtcaaggagagagtcttggccaggtgcagtggcttatgcctgtaatcccggttactcagaaggctgaggtgggaggattgcctgagcccaggagttcgaggctgcagtgacctatgattgtgccattgcactccagcctgggtgaaaaagtgagaccctatctcctaagcagttttgttttttttttggcatacccataattgtttttggtgtttctcattccagagtcttctccagagaacaggttctagacttctcttggtgcgggtggtggggattggggtaggggggcagtttttccatcaatatggagtttgtgtggttggtgtgaggaaatctctctcagaaaactttcacctagttttccttattttagatttcttttcacccttgttctggaaccttgtactgaatttcttgtatcttttgaggattctgtagtataatttgggttggttttcatattttcgaattcatgccttgaaattcagctctcttgtggttgctgttggttgcctctcaaccatttgctttccaaattagaaaatgcttctgttttctcctttttgcttctctccatcctcatgggctgatgtgtttgtaaagaatccctgtactgtagataaagggctttgatgaaggagcaatgttagctgtgtgtgtgcctttaaatttgttaccttaactgggaagtcatagttaacagttgaaaataggaaagtagttcgaagtttaatttgccattcttttttggactttgggagttttgctttgctgtgatttttcttttcttttttttcactgtcacaaattttacacacagtgatttcaggtaatttttcctaaatgatccctcctgtctattctgtaatttctgtttgtatttaaaattaccacaactattgtcttgaaactgactggtggcttcaaacaagggatatagtggggaaggaaaagagaaagggggaggggtatgcctagtatcttttgggtgccagtagaacagtgatctcagttttatgtcacttaatcctcacagcagttctgaaaggtaagtgatatcccaccatatggataaggacaaagataaaaatcgaagaggttaaataacttacttaagagcttgttagaaagtggtggagctgagtttcaagcctaggtttttttttctgttttttgttttttgtttttccagagacaaggtcttactctgtctcccaggctggagtgcagtggcacaatgatagcttactgcaactttgaactcctggattcaagtcatcctcctgcctcagcctcctgagtagccagaactacagggctatgccatcattcctggctaatgtttaaaatttttgatttttgtagaggtggagtcttgctgtgttgttcaggctggtcttgagctcctaggatcaagtgatcctcccacttcggcttctcaaagtgctttttttaaaaattaaattttttttgtgtgtgttgatacatagtaggtgtgtatattatggggtacatgagatattttgatacaggcgtacagtgtgccataatcacattggggtaaatgaagtacccagcaactcaaggatttattctttctttgtaccacaacgatccaagtatactattttagttatttttaaatgacagtaagttactattgactgtagtcaccctcttgtgctatcaagtactagattttattaattctaactatatttttgtacccattaaccatccctactccccaccccactaccttcccagcctcaggtatcattctactccctatcttcatgagttcaattgtttcagttttttttttagctcccacagatacgtgagaacatgtgaagttttcctttctttgtctgatgtgtttcatttaatgtaatgacctccagttccatccatgttgttgtaaatgacaggatctttctttttcatggctgaataatactccactgtatatatgcaccatgttgtctttatccattcttctgttcatgggcacttgggttgcttccagatcttggctactgagtatagtgctgcagtaaaaatgggagtgcagttatctcttcaatatactgattcctttctcttgagttcctagcagtgggattgctggatcatatggtcattatatttttagttttttaaggaacctgcaaactgttctccatagtagttatattaaatggttttacaattatagttttagaatattctgtgtacttactattaccagtgagttttgtaccttcagatgatttcttcttgttcattaagcccttttcttttggattgatgccacctgggaggcagggcctggaatcaagaaccttagaaatctatctgctgctgtattctgaagctgagctggcacccaagccacagatcaagttcttcccactcttttctcctctttcctcaagcaaagagtctctctgcatggccaccaccatcccaagcccatggcaagtacagcctggctactgccgatgttcactcaaggcccaagagttctccagtcagttcgtggtggatgctgccagtgctgaatctcctgctttagaacagtgggctcccctttggcccagggcacatccagaaatgccatccaagagtcaaggccggggatcagggaccccaggagcccgcttggtgctcgttaacccactctggctgagctggtacccaggctgccagacaaagtcccccttactcttccctttcctttccttattcagaggcagtctctccccatggccaccacagctgggaatgtgctgggtcatacctgaagccagcatagctctcagtctcacctgtgacccgtggtgagtattgcctggctaccactgctgactgttcaggccccaggggctctttagtcagcaggtgatgaattctgctgggactgggttcttccccccaaatcagtgagttatcttctgcctaggatgtgtttagaaatgcccaggagctagggcctggaatgggggcctcaggacctgccctgttctctattctactgggactgaattggttggtatccaggttgcaagacaaagtcccctttacccttccctcttcgcctctcaaacggagggaaggagtctttaatagagctktgagttgcactcctggccgcccagctggtgttctcactaggtcacatgctccccaaacccggtggctctgagcctatcatagcaccaggacttgcccagaaaatgcagtccttgtggtctagactgcttttcaagtttatttaggaccccagaacaatttagcctgcagtggggcttgctgagatgaactatttgcctctggctagggcttctgtaaatgctctgtttgtgatctctccctcccacaagcctgtagattctctcaccataccaccattgctgctgccaaggggtggggagagagagggtggtgctgagagttgaagactggttttgctcccctctccagtgcctctttctttgatgtgatgttaaaaccagggactggttttaactggtacattgctcacctgattttttgttcttatgaagatgctttttttgggtggatagttgttcaatttggtgttcctgaaggggaagtgattgctggagccttctattaagccatcttgctctgtctccttaccctaaagtgttttgattacaagtgtgagccaccgttcctggctgagcgtaggatttgaagatatttcaggatgagcacagtggctcacgcctgtaatcccagcactttgtatggttgaggcaggttgattgcttgagcccaggagttcgagacctgcctgggcaacacagtgagaccctgtatataaaaaaataaaaattacaaaaattacctgcatgcacctgatggtcccagctacttgggaggctgaaataggagaatgtcttgaacgtgggaggtcaaggttgcagtgagccatgattgcatcactgtgccactgcactatggcctgggtgatagaaagacccagtctcaaaaaaaaaaaaaaaagatatttcaattcttctaagtctacacctgcttttactcttccaaaactgtgtgaacaattcattcatttaccagtgaatattgagttgcttactgtgtgctgggccttagggacacagagaggagtagtccaagtcctgatgaaacagaaatgaaatgattagatttaccttttggtaggattaccagtgatatgtgtgaagtggcacgagtagaagcaggcagctgagttaattacagaagtcctggtaaaagatgatgttcatttgaactaagacggtagaggagatgcagagaaggagttggatttgtgatccctattggaggtaaagctgacaacattaaggaagtgatatgaatttggaaggagctcaagggattggggatgatttcgggtttgatttgaaggagtgctgttagtgccttcactgatactaaggaagagcaagctggagtggtagaccatggcaataataacataataattatgttacacctattagatacattcatgaagaggtgtccagtagacaagtaaacatctgggaactcagtggaggtttcggctagagcaacaactttgagcatcactcatacataaatggtatttaaagccatgggactagatatgattagggaaagagtatagatgtatgtgtggtaatataagtctgaagtagtggtattgattcacttctatgaagactcttcatctaatttgtcaacttggaattgtacataaacctgatagcgtttgctggatagggaaagcaactcactttgtagccactgcatagacgacatcaaccaacaagcaagttgcaaacatgccaatagttagctgcttttgaatgaactgtatgccaaacgtccttgactttcatgaaactacacctgagagcatccacatgaggatccacatttgagaatgccacacaaaaggaggattatggcacatgaatcagcttttctttttaaatatagataagtagtgaaaaaataagtgcctgtcaagatgacatctgggatcatttaccagatgatccattgttacattttagtctcatagcatccaggctcattaaaacaaaatattttgcatgtcacggattgttttggctactctttagagacagatatgaatgttaaatctcagaatgctaagtatgaaagaaaccatacaggggtaatggaaaaattaggttagaattcaccttaggcaaaaactgtaaacaatccaaatattcatcaacagagcaataggtgaacaactgtggtatagtcattcattggactagtacgcacwacaaggttaaatatgttgaaagcaaaaacagtttgttgaatgaaagaagacagacatgaaagaatacatactgtatgatgtcacttatatgaagttcaggaataggcagaaactaacagaacagtaggaatgcccatggggaatggttattgaccaaaaggagtcatgagacaactgttttgttttagaaacagggtcttgttctgtcacccagaatggattgcagtgatacagtcatagctcactgtagcctcaagcagtcctcctgcctcggcctctcaaagtgttggcattctaggcgtaagctaccactcatgaccttgattggagtgtttcataaatggctatatccatttgtccatattcgtcaacttgtatacttagatttgtacatttcactgtatgtcagttttacctcagtggaaaataagaaaacaacaaaaatggcatactgagtagttccgtgaggatgagcttcgggagcacatcagtccattctcagagagtgagggaaagtttcccagagataataatctctctttttatccttttacttccacagttgatttatttttttcaactcttagctacctccccacaataatatctattcctatgactatttaatttattgtgcaaatgcagaatactttagggagcaaaaaggagtgctggtataaattacactcaactggtaaaaactatcattgtttgcttctgttctagtcagagggttgtactctactgcagtcatacctgaaggaaggcagtagtagagcaggtgtacctgagggtggaacaacctctgcttggcctcatctaaaagtagataaagggggccgggcrcggtggctcacgcctgtaatcccagcactttgggaggccgaggcaggcggatcacgaggtcaggagatcgagaccatcctggctaacacggtgaaatcccatctctactaaaaatacaaaaaattagctgggtgtggtggcagatgcctgtaatcccagctactcgggaggctgaggcaggagaatggcgtgatcctgggaggcggagcttgcagtgagccrggattgtgccaccgcactccagcctgggtgagagagtgagattccgtctcaaaaaaaaaaaaaaraaagtarataaagggrgcagagttyagcaagaggcaagggaggaggtggggattttatgtggcatgggcagatgtgtttgttagttgggacttacatgtgaacttttgaaaaagatacattatttgttttatatatatttcaaaactgattcatgttgctgtatttgttcctttgaaacaggtgacagtggatagtggaaacaggagatcgtggatcctccttcaaaaatggaggatggaaagcccgtttgggcgccacaccctacagatggatttcagatgggcaatattgtggatattggccccgacagcttaacaattgaacccttgaatcagaaaggcaaggtgagtttctcagaaagatgttgaaatatgatttctttcaaaaataggtgttttttttcacaagagtaaggtctgtcttcttaatgaggtagatatttgggaaagcatatttctggtaagtgagtctgttttctcctgacttctttgattaaatcagaggtatgtgccctagggaaaaaatggtgccctatgataaaatcagatggaaatttagtgagcctttcattctttgtttttttcacatccctttgatcatccagttcttagcctttcattcttaagaactagctgtatgataaaatctaaacaataatgacattttaatttcttgtgccacattactaaagttattagtgtgtctgtgatcgacatgtcacaaagtaaaaatatgaaaagtgaatgtggagatrtcagattttgcttttttgccttagcttctattataaagtctttttttaaagttttttgttcacttaaaattattgctatcatttttgtaatagatgctttaattctgtacacatggtatttatttctttgcatgcttagacataaactagacagcattacaaaatgaaagtctgagggaaaagtgactaggagttgtgactcgtttacagagaaggcatcattgtaaatacctgtttcagtcttcatggagactgatacagtctgtttttgtggaacttcactccattctcagagagtgaggggaagttttccagaggaaataatctctttttattcttttggttccacaattggtttatttttcaactcttagctctcttagcacagtaatatcttattcccatgatagatgtccacaatttttagtttaataagtatgcctgttaaacagttcttctgactaaattaaattttgtaggtgtcatttctgtttactttagactgaaaatgttcatgaataatttatattctatgatacatggctaactaatgccatatgactaccatccttctgggaaccttagaaaaacaaggtggatctctcatgaggtcttttcacagagaaaactattctgttactgtaaayaacccagggactgaaatgcataatgtataatgtgccatgttagaggaggccagttaaagataccctcaggacaggaaagacaaagtgtttctggtttttcctcttattagcaggtacctatttgtacttaaaattcagtacatgtttaaaaaaaaaagctcagttactttacatatttgaaggcttttgatttttgtttaacatattttataagcacagtaaatcagaagaccaaaatgaaattgagagtgtatttcctaggtgtttatatatagttgttatgtatattttgttgtattcacaggtgacaaaacaattcagttcaattatagaagaaacttgatttaagtggatatactttttcatattttaaatattttaatatgctttacactcttattcaggtacatatgtagaaccaataaaaactgtttacattagggagtgatataaatttcatggatctgtagataattctgtgaactaaagtgtacgttttttccacaaagttttttttgaggattaacaagttctcagagattacctttaatcttaattttcctccctactttctgatcaggttcttaataaacatactgctgtaataaccagacagttaaaaagatccttaagagaagcaatcttttgcttagctcattcattgcctagagataatcagcttcaaaataattattaaggaattaagtacataaaggggtggactggtcatgcacacctttgtgcagtgtgtgcgcagtggaagtacagtggaagtgtagatgagggagtgaggaacatgtcttgatagcaatggcttttcaaggtttttgtttgtgacccatagtaaaatagatttcacattgcattagctatgtgtatttatgtgtgtgaatttataagaaataaattttacatttcaacaactgtgtgtgtagtgtttgtgtgtgtttacttataaatgaaacagttgatcaaaagaaacattcttagcacatgctatgcattttgataatttctaataacttttattcttttaaaaatgctgttttaggctagctgcagtggctcatgcctgtaatcctagaactttgggagtccaaggagggaggattgcttgagctcaggaatttgagactagcctgggygacatagtgagacctcatctctacaaaaaatttaaaaaattagctgggtgtggtggtacatgcctgttttagctactctggtggctgaagtgcacttaagccagcaggtcaaggctgcagtgagctgtgattgtgccactgcactctagcctgggtgacagagtgagatcctgtctcaaaaaaaaagaaagctattttaatccactaaattggtttcatattctgtatttgcagcagtggtaagaagccgctctgaagccttgtaggctgaagccctaaatttatggcatagaagggtctgcattttcttttccctgtctgctttgctggtcttctgttgtgtcaaccaagtctccccttcatactcttactcttgtgtgcctctttctccttctcttctgcaagtattaagtccttaccataccccaggtgatgttatgtgctttgtgtcattgctaacattgctcctgcctggagtgccactatccatacctgctctttattttatttatttatttttgagttggagttttgctattgtcgcccaggctggagtgcagtggcataatcttggctcactgcaacctctgcctcccgggtttgggcgattctcctgcctcagcctcccgagtagctgggattacaggtgcccaccaccatgtctggctaatttgttgtatttttagtagagatggggtttcatcatgttggccaggtttttctcaaactcctgacctcaggtgatccacctgcctggggctcccaaagtacagggactacaggtgtgagccaccgcacctggccaatctccatatccttttgcttagaaactrcttatttttcttttaagactctgattgaggtcaccttgtttatgaagtttttctacagatacccaatctctccctcccccccattcagtagaattgactgttgactactttttcctttgaggagtggtataaattcttagctttcctttactctttgttggagataattgtttactttgtctctccctccctactagactatgtaatcttctcaagtgcaggggctattttattctgtcattagagcttgatgctctgtatttgacttgtggtaggtgtttaatgctgagtgatcaagatatgtttttagcagaaaaaagcctccttcttctaagagaaaacaattaatgaaacattttaaggagagaggaagatggggtggtgataatttaaagaataaagaaggagggagagaaaacacctttcaggactccttactggccttttagcctgctcttaactttctcattccagcaactctttgtcattggcctcccctcatccccactcccctcatcatctaacttcttggaacctttttaatttgacatggctcctaccaggcagagctaaaccctgaagtctggggagcccgtaaccctcttgccatggctgtgaaagttgggcacatacatatatgacattagcagttatttctgaatgcattttcstatagaatcattattataaattgtggcttgttttatattaccattaatatacttaatgcacatgatgggttaattttgcttttgtggcctgtcctacaaacttctccacatttataacattaacaacatgtgtactgggttccaagtaattaacttccagagtttctatggcataacarttttctacattgggtgtgacttagaattgaggtagtcccagcagcrtggattttactcattatagttgtagctttacacacacacacacaaacacacacacacacmcccctataaatattattttaaaataattgaaccatttttccctgcagttttctttgatacaattagaaacttcagccacaagagtaattgtcattgtttgagaagtactgtatcagcttataaataactgtgagaatggcatggattaaaatttaattctctttggatgtcatttgagatcatttgttctctcttatgagatgttatcttaattctgcagtgttactctagcatttaagtgataaaataaatataagtattcatggatacttgtaattttacagacgaaatattttttggtattttttatatttctgacagatttttgtacaggagtttgtgtcaaatatattttactgaaacaatagctattaatataaccctctggttatctgattgaatgttatttttttctgtcttttttttttgagatggaatttttttctgtcttttttttttgagatggaatttcactcttgtcttccaggggtggagtgcaatggcatgatctcggctcactgcatcctccacctcctgggttcaagggattctcctgcctcagcctccccagtagctgggattacaggggtgctgcatcacgcctggctaatttttgtatttttagtagagacggagttctaccatgttggccaggctagtttcaaactcctgacctcggatgatccacccgcctcggcctcccaaagtgttgggattataggcatgagccactgtgcccggttactttttccttttttaaaacactgaaattgctgtatctaccacattaacattttatttaaaaaaatttgttaaatagcatatgtatgtaaatttaatattaatatacctctttttttgtccttctttaggtgttggagcctaggatacttacttactgatttttattgttgatttcatgtccacagtaatagtagataatatttttgagtaaagttattgttctgttttggggttaatgacttgttaaatagtattatctgtattatattttaataaagagcatattgttgccactattacagtgtatgcaaccaattaagcccttctattgttcttactatttaaaagccttgagtttaatgagcatttgttttgcttgttagacatttttggctctcataaaccaagtgtttcctgcagaagaggacagtaaaaaagatgtggaagataactgtaagtaccaagttaaaaattaactctcygcacagaaaaggagactgttcttttaaaaaaataaattagtggttatataactgatacactgtgcgggttcagaaacaatctagtcttttgacatgaatattcatgtgaatgaaggaactcragtcctccatgttgtctcacatttgcattttggtgaaagagtcttgagtgttcttttggtgttatttgagttgcataaatgtggggaatggtaattactgtaaggcttgaactaaaagtctcttgttaacagttttgaaagttattgaaccttatttagagtcaggtggtttttattgtagtatatgtggttcagtaatttggaagttgagtcagtaggagtcatttaacatcaccgtttgaagcaaacatgcatttaaaaaaattctatataattactaattgaaaaattaatttcagaacaattatattaaaacacagcattaatttgacttataacatctttgcatgtttgatgaaaaaagctcttctcgatggaacaggccaatgtttattcttacatttttaagattaagcagtawtcatttcatattgggggcagcagtgttaacaattatgtacacttgtcatggatttcattaaaggtacttgacactaacaactctccatttaacaaaaaaaggtagtgttaacaattatgtacagttgtcaaggtacctaatactaaaaactctccatttgagaagaaaaggtaagagaaaggaatagatgtgttattattgattttctctggaattcacatttgagtaagactataaaacccccatatgtagaatggtggcagcatagamtagtgggagtaatggggagccatggactgtaactgtagagttaggcaagcytaaattctgattctatgttrttaggaggctgtctgctcgtgggcatttcrtctctcttctgaaattctcatctgtagaatggaagtaatgtgtatgttgtatgattagagatgatataaagtgctttgcacagcatctaatgactcttaataaatggtagctgtttttattaggtgcaagagattgaggaaaaaaatgtagaattcccttcctttccaaaattgctggagagtttgtctgattaaataatacatttttgaatagcaatcagaataaaataataaggaatgagactgtaccatatctaaaatacaaatttttgtgctgttaaaacttgctagggtgtgcagaactgggaatcaatccttttcatttattaatgtgtatgtctctaaatgtgacaaatggttttgaatagtttttaatccatttcttaaattaatattttaaaacattctctctccatttgctttgtcttgctatgcttgtctaacttacaaatttttgcaacctcagtatttgctgcctctggcaggtggtttccttggtgatgccagatggcagcagtgttaatgtgtgggtgttaactattctcataagatagtagcccatccctactgaagacacttttctgaaaccacattattaacacaactttggttgttgagtttagaatgtagggtttccagctgcagtggttctgtcacttagtactttcatctgaggcatgccaccataccactgtcctctgctgaatgacacactgtaacacaaagctatagtggtagctttgtgttatacacttgcacacacacacacatgcacacacacacagggtctcacatgcatatttctaaaattcttttcttctttatattatggtaatgtgaagattaaatgattgatgcctgtagagagtgttctgaagtatgtgttgaaggttctactgaaacagaagtagtgccttaacagtgccttaacagtgtagcaacacttattacctacttttcggtctaaatttttttttttttttttgagacagtctcgctctgtcacccagactggagtgcagtggtgtgatctcagctcactgcaaccttcgcctcccgggttccagcaattcttctgcttcagccttctgagtagctgtgactacacgtgtgcaccaccatgtccagctaatttttgtatttttagtagagattgggttcactatgttggccaggttggtctcaaactcctgacctcagatgatctgcctgccttgggctcccaaagtgctgggattataggcgtaagccactgcaccgagctatagctctgagttttctatgtgaagggttttatatgtagaaattagtatgttaattttgctgtttgactgttgcttattgtcacaagaataggaaaattgggcgtgtgaagtcagtaattaaaaggaaaataatagcatttttccatgctgattttgagctaccatgactttcatggcacataatgttcttcgtgaattattgtctattagatgttgataataataaagtatagagtataaaattggaaagaaaccgggcgcagtggcccactcctgtaatcccagcactttgggaagctgagatgggtggatcacctgaggtcaggactttgagaccagcctggccaacatggtgaaaccctgtctctactaaaagtacaaaaattagttgagcatggtggtgggcgccggtaatcccaactactygggaggccgaggcaggagactcccttgaacccaggaggcggagattgcagtgagccgagatcacgctgttgcactacagcctgggtgacaagagtgaagctctgtctctaaataataaataaataaaattggaaagaattctaaaagttgcctcagtctctttttctgtaatggaatgacttctacaacaacatatatttagaattgattgacttctgtgttgaagttgtttgtgggttctttttttcttttagtgagccagagctgtaatgattaaacaggatcttaaatgctcagataactctctagtcagatatctaaatttaataatgaagtcatacctaatcttcattagaaacttttgtatatgttatatatttatttattaaaacagtgtttataaagaaactaattgtttattcaaatattttgttatatgtcttatgttaaattgtttcaaaattttaatattcttttgggtatagttaaatctgttaataattaggcataaaaggtaaacagtttacataaagagttgcatgtaaatagccaagccaagtaatcctaggactgactactaggaaaggacaggaggaaggaattatttggtagagcaggaagttatttgtgaggcccttgtggacatacctaggtcatacctttagggagatgtaggcagttgggacttagcatttcacattctggcaagacagggttgcaaatattttcctctccctctctctttttctgtgtcttcttgaaaatggaatggcctgtgtggcatgatttcagaggaataccctcctgtccaaattcttattgtcatcagcagatacttcatcagttaggaatttatttggtttaataaacacacatcyctgaaaaggtaggtggtgagtgtggaaggagtaaagataggagagcaagtagtaattcccatgtctgtgtaggcttatatgattagcgttcacaggggaagcgtactgtaggattacgagtttttacttagaggaagcagtgacaacatcatgcaaccaggtatttcagaggaaagtgagagagatggggagtggttcaacagagtgctttgggtaaagaaagaggaacgtgtagaccaggctccaggggacmaggatggaagattagggatatagaaaggtaggtgacctcatacccaaaccagatatattaatacctctgctgcctaaccctctctatatccttccttaattcaaaggaaagctgccattcagctgttaggagcctctacccacttcttactctcttttattctgccctaagtggcactagaaagcagtgaggtgactgaggcaggagaatcgcttgaacccaggaggtggaggttacagtgagctgagatcgtgccactgcactccagccttggcaacagagtgagattttgtctcaaaaaaagaaaaaaaaaagcagtgaggtgaaagtgaactggctgcattaaatgattatagatggatgggcagtctgtggaggtagttatggcaagaggctcttgtttgacaccattggttaggtgttgaatagtatgttagacatacatgcagtgtaggcacatgagcagtttcartgagggatcaaacaaatgaatcaggcagcatcttgcccccaaggatctgatttagtagacaaaaccagatatgtaaaattatcataataacactggcagtgtgtggtaagaaccataaagaaattgcaaagatagtagttgyagtggtggtggtgagaatgggtaagtgtcatttgtagggtaacctttgtactgaccttaaagagtaggtaggtttttgacacctagaaatgtagaggatattctacatggaagccgatagatgaatgatacctgcatctaataaatagttcagtctgtctatgagttagtattaaggtgaattgtggaaaattatatgaaaaggtcatgaatgtaggtttattaagagctctgatcagacatgaatttggatgttgatagagacccagtgatgattttatggggagagagatttgatgagggctctactttagttaatgtgctgagaagtctggattagagaggagagagactgaggcaataggtaaataagagrctaccatgatcacaaaagaggtaatgagaactaaactggtattggagcagtagaaatggaaagaaaggagataggttgagagattcagattatgctttgagtacctgccatgagctggcactgtgctgtactttcttacatggcataaagatttggaaactggtttagaataaggagggagagagaagatgattttagtgttgactaaggtttacaatttcagtgacagagaaaatggtggtgctaataacagaaacaaggtggttgagaagaggagtggtttttgtctactctagcaaggcatagaaatggagctcaggagattgaaggacttggagaatagattgggagtcagttctgacacttcagtagagcagatgtcacacaaacaagatttatctgttcaaactctcccattaattagcttcatattctcagttaagacatacataatttctctaggagtcttcattatgtcagttgtgaaggactccctgaatgatttgatggtctgttcccattctaaaattttatcttttgtgttttatctgtgaaattctgagtatcagattggattggtgtcatcactttgttgtgtcagaagtatattaaaatcagagctatctattgtagtacttttttccctcttgaattgtgctttttaatcaaccttcattaatgagtactcactaggtttactcttttagttgaaaattcattacttaaaaatatcactgtaacacacatgtaaactgaatcgcttttaaatcagcttctagggtttacatcagccagggttttaaaaaagatggagttaaatgtaacctaacaattgatttttaggatgagtcaaagtgattcagattaagatagtattgctttattttatttgttttcttcaattctctaatgacatataaattttatgtcttaggttcactaatgtatttaaatgaagccacactgctccataatatcaaagttcgatatagtaaagacagaatttatgtaagtattttacctgtagtgtaagtttttgtggagataattatttcatgtggtactctttgattttgtcacrcttgaaattgtctaacagaaaatcatgcttgatctgagcctcttgaatagagtgtgaggttagtgaggacaaagatttttttctaatttacaactcgaactctaggagttaaagcatgcctggtacacagaaagcacttaatcagtatttgtgggatgaaataatgaattcagagtgtcgtttaatatcttttggacttaaaaatgtccagtttgagtatttttaaaagcactgtaatggtttttggttttgatttttgacttctggtatgtctgtagatatgtttgattcactttccacattgtttggaagacaatgtaaggcagcctataaggaatgtatattgaaattaaaaatttgaatgaggaaaaaaatgtaaatcagaataggaggtagtatctgaggaaatactaagaacacaggaatgctgaccatagagcctaaatagttgctgaatttcattagaccgtaggtactctaccttgaaagtccagaatattcaaaaatgaaagaaaatgctttcagtgtaaatagtcaaggtttacaccaaatcattcagatggatacttaacctagtatgttttaattataattattctttgggcatgcatgagactttattccagtatcacctaactgtgtagtcctttggtgactggagataaattaccccactgtagttctcctgttataaagatggggctgttcattatttttgaacgaagaaaacacatggcttctttgacacttactagatcaaatgacagtcttaatctattatatcactatcartttgcctaattgtacttacttaattctgactaaattacatttagtctctgccatctgtccaagtagtgacagctgggagatagaacttatttattctattccaaaagagtatacttgccatcttctagttatatgtagttttaagacttttctccctgattttttcaaaatcaactaaataaagaacatatttaagtttaaatgtggctattcttgattagaaatatatttagaggcaaaatttactcaatcagctgactcatgttgagtatctaatatgtgctaaattccaaaattaaaagcaagcttaagttgctcattaaacatttaacccataaatgttctaggcaatggttaacatatattgtttggaagaaatctgggaccaaatgrtcacyacagagctaaatcaatccttggcattcagtgatagggatgggcccagaaggtgctacgagctgtattaaactccttagtagcagggtgaatacagtaggtaaggaatacaaatgactaaaacttagcggtaggagatttcataagtagagtcaacaggagaaggctgaatgagatagagctagagactcagatttctgtctgtggtgacttggtggtgatgccatgtccctgaggaagcacatggaaggataatattttctttgaggcagaggtaggtgggaagagataatcttgagtttggatatgccgaactaaaggtgcctatgggttggtaagatacaaatatttattaagaattggagaaatatgggtccctataaagatcagggaatactcagggaatatttaggactgatttgggagtcttagttatatagataattgaaattttttgtattttattttttctatgagctttgtttatctttaaatgaaaatagtaattggaatattttatgtttatgcttttcgtatttagacatatgtcgccaacattctgattgcagtgaatccatactttgacatacctaaaatatattcttcagaagcaataaagtcatatcaaggaaaatctcttgggacaagaccacctcatgtctttgcaattggtaagtgattttaaatgtattttaattcttgtctttctttatattgtacaaatttactcaatttttcttttggattaataaaagataccataaattgaatatatattttggagaaactgtatacctcttggatatatcaacattgttaggagcaagtrttttacacagggtgaggaagaatacttttgtagtcaactaatggggcaggcttaccatacatcattatctgtgttaaatgcctgtgtcctctaagagatgtctgcccaggtgaaagcaggatataataaaagctgacctaatggtacttttagactttttaataccatcagctccatcttaaaattgtcctccttcacaattttgaggttctggccttcatctcttacccagctcatcccttatgagtgtgttacttgggctagatttcagctgtaagagcagacttctgggcatcatcttgcatcaggggtttataaaattaaaggattaaaagtagtatatgcttcataccactggagaatctatgtgggaagacagtagtgtctctttgcctttctcagcctcttttattttgaagtcctccagctctgagtcatagaggttggaggttttagatcagaatgagcaattacccctcttcccaccaaatgcggaggtgttagctaaccctttgcattcagacataaagcagctaaatgacatgtattggaactagttcgtagtgcrtcctgtttctctttgggctttcccttcatgcttgtgttttggcctaaccagagttcacttccagatttggttgacctgtatgttgtctgctactaggtagagtgaatatggctgacataattactctaccagggcagcagcagatttacttttggcttgaagaagctatgacaggcatcgttgtgttgcagcctgcaaaacggtgccccatcccttagaacctgaatacgagcaaacatcactggagaaaagttacatgtttaaaatgtaaataaactagcttttatttttagctttttactgcgaaaaaacaagtgtttggaatgattctttaaaaatgtgtggaggatgggtgtggtggcttatgcstgtaatccaagcacttcggggagggcggatcgcttgagcctgggaagtcaagaccagcctgggcaaacatgcaaaatcttgtctctataaaaaaaatgaaaaaattagccgggcatgtgcttgcctatagtcccagctactctggaggcagtggtgggaagatcgcttgagctcaggagatcgaggctgcagtgaggtgaagtcrtgccactatacttcaacctgggtgacagagagataccctgtctcaaaaaaaaaaaaaaagaaaaaagcgctgctgataaattggacaaagggatgtgtgcgctcttgtatatggtttgcattctccccttagagtaaaagccgtttctgaagtcttcttggcacatgtctgaggtgagaaatagttgtcttatagagccaaattgtgatgacctagttttgaattaaagttgtcttaatttgagactgctttaacagcattaaattgctttcaacttgtctgtgtagtcttaacatttaatacagtttatagcctaaattgttggagtctaatgaagatagttaaaaaatatatatgtaaacagaggcaaatctaggaaatttaaagctgttaattttgcctagttgtaaaatgttgacaaattstaaatttaatagttgtattagaggaaaaaaccccacagatataatctaggaaatttaaagctgttaattttgcctaattgtaaaatgttgacaaattctaaatttaatagttgtattagagaaaaaaacccaagttgccattatgtatttttttttccagctgaatttttggttgcyagatttcttaattggaagctcattaattcttgcttttcactggggacttcattagttatgcatagtgaccatttttttaatccctctgcagatcagctctggaattaggaagagatgagccacagcccataatatcaagacattctgtcagaaacttaagagttgtttatttggatttcatattacttaacttttaggataataagatagaacatttaaagtaaatacttttaaaatgatttgaacacttttgaatgactttattttaaaatttcattaacattgaatagacatttatgatttctttaagagtaagtggtcctaaagtgaactttctattattaactttatatttaatatattgctcatcattaatgtcttattttgaccctagctgataaagcttttcgagacatgaaggtgctcaagatgagtcagtctatcattgtatctggagaatcaggagccggcaaaacagaaaatacaaaatttgttctaaggtgagtattcagctaacttgaagtatttgagtaggttgatcttttttttccccccttgagatagggtcttactgtgtcacccagggtggaatgcagtgtcaccaccacagctcactgtagccttgacctcctgggctcaagccactgttccacctcattctcccgaatggctgggactataggcacatgccaccatgccctgctaatcttttactttttttgtagagatgaagtcttactgtgttgcctaggctggtttcgaatttctgggctgggcttgagcaaccctcctgccttggcctcccaaaatgctgggattataggcatgaaccaccatgcttggcaamcaggttgacttttttctggtaaaaaaatacttaagtaaaagttgtcaaccatttctaagtgtatagcatagtagcattaagtatattcacgttgttgtgcagccaatctgtaccatctccagaactttcatcttggaaaactaaaacttgacccatgcaacaacaactccatttatccactcacctagcaaccaccattctactttccagtttttctgtgaatttaactactttagctatttctcatgtaagtgaaattacacagtatttgtctttctgtgactggcctattttatttaactcaacwtaagattcatccatgttgtagtatgtgtcagaatttccttccttttatttttattttttwgtattttggatcccatccttcctttttaaggctgaatactattttattgtagatctgtggtacattttgtttatccatgcatttgtcaatggacatttaggttacttccacctcttggctattgtcaatagtgctgttatgaacatgggtgtgcaaatatttctttgagaatttgaaaaggttgacttttaatacctttgcatacttcatgacatagtttggaatggtgggctctatcctttttaagatacagacatcttatatggaagctagtctatagattactgaaagccagctctgacatgttattcacacgaggatcttggaggatactggtactggttagacaaagggtgatctagaaatattccttaagaatctcacatttacgttctgtctatatttctgttgttagcatggttaaaaccattttttaccttaagcttacgataatttgcctccttatttctatttccctatagtctgcctcctaatgtgttctctttgctgccattaaattaaactctctgcattgtgttttttttgtttgtttgtttgtttggtttggtttgtttttttttgaaaacagggtcttgctctgttgcccagtcacccaggctgtagggcagtggtgcaatcatagctcactgcatcctcgacctcctggggccaagtgatcctcctacctcagcctcccaagtaactgggacccacaggcatgtgccaccatcctggctaattttttatttttttgtagagacagggttatgctatgttgtccaggctggtgtccagctcctggactcaagtgatgctcccactttgacctcctaaagtgctgggattacaggcatgagccaccatgcctggccttacactttgtttagaattatagcattttaaaaatggaaggaatcataacactcattgtagtatagttcttttaatttacatacccatgaggttagatctagtggttgaactactgctaggagcagcatactcaccagtgttactcccacagaattatagttcttagttgattgctgcatagtggtactatgaaagtttgctattcattatgtaaatatgtatgctgttcagagttatttatgtaaaatcaattgaagagtttgttaacagctgttatatatatgtgtatatatacatacacacaattctggttaagtgaatgcttcccagtattcttggattctaagtgtttcaatttctttttctttctttcctgtatgtaatagtctatatgagtctatggttaatgtatgaaaatgaacaaaaagttaaggagttataaacttataatatgaacttacattttaaattaaggattgctctttattttgaaatgtgccaggcaaatagttatttctctgtgtttcatatttcagtgaaacaacatgaatagtgataacttcccagttgttcggaggcagattgcctcattttctgtagccaaagattgaattaataggctctcacaaaaggctttgacatctcctatagtttatgaatatgatatatttaaaatcaaatagttggataaaatcagaacattcccaaaacaatttaaaaaacaatgtcaattagatgttaaatgcaatacaaatagaatttatttttcatttttataatttcaacatttagattcaggccacacatgtgcaggtttgttatgagtatattttgtgacacagaggtttggggtgtgaatgatctcatcattgaggtaatgagcatagtaccaccaaatatatatatatatttttttgaaacggagtctcactctgtcgcccaggctggagtgcagtggtgcagttttggttcactgcaaccttggcctcccaggttcaagcgattctcctgccccagcctcctgagtagctgggatgacaggcgcatgccagcatgcctggctaattttttgtattttagtagagaaggggtttcaccatgttggccaggctggtctcgaactcctgacctcaggtaatccaccctccttggcctcccaaaatgctgggattacaggcatgagccaccacacctgaccccaaatagaattttaaataaatttaaaaagctatgacagaatagttgcatttaattacacatttgttataatgatgatctaggtttcagttttatatgtactagataattataaattattgtacaccatattattgtcatcaacattttttatcctatattttaaacagatacctgactgaatcctatggaacaggtcaagatattgatgacagaattgttgaaggtattgctaayttttcagttgttacgcgtgtactgaaattaatttacaagacttcttttagtggtctggaatgttcttctctcagagatgcaaaagactctcttatctcctactaatcattgctcatatatcatcttgttatttacctaatatcaattgtttctgcccccacccgcacctcatgaaaacactaagaaggcagggatttttgtttcatattccaaacccttagaatggtaactgatacagagcataaatatctgttgaatgaatgaaagaatacaggaatgtctttagcttccagtttgttttatggagcttgttttgtgtaaaggaaagaggaagaagggttatttggcattaggtgcttttttagagaagtcattttttaacgaaggccgtagtgtgtaaattgatttccttaagctatccatgcttgtataccttcttagaaagtcttcttgtacctcagtttggagactgctggcctagactaccattatgttgaatctcctgcatgatgccctcctgcatcatagactcctgttttgtctcttcacttagattcttacttctccttaatccagtctctgtatagaatttggaataatttctttttctttttcttttctttttttttttttgaggtggaatctcactctgtcacccaggctggagtgcagtggcttgatcttggctcactacaacctctgcctcctgggttcaggtgattctcctgcctcagcctcccgagtagctgggattacaggcgcccaccaccacatctggctaatttttgtatttttagtagagatggggtttcaccatgttggccaggctggtcttgaactcttgacctcaagtgatccacccgccttggcctcccagaatgttgggattataggggtgagccaccgcgcccagctggaataatttcttttgctttaaataatctgatggcttcatattgctctcaacatcatgccctagattcataacatcacccacagtgctctgtgtggtctggctcctgcctcttctgagctcacctggagtcatgtttcttctgactccttatgctttaatcacattgggctccttgtagttctttgagctgtcttaaacaggcttctctgaacactttttctccttctccctgtcttactttcccccactatgtactcagtaagcattttttaataataatggtggtaataacatatatgggatgtattaggcattatctcatttgtttaaaaatctgttatgtaatttaaatcttcacagaatgaattagaaactattttatccctactttaaagatgataatatttaaatatgctgaagctcatatagttcatcagttgtgaaattcggatataaagctaagcattttaactacatgccgtagtaaatgcatattttaacactctcttggcattttttgtttttaaattagagacagcatctcactatgttgcccaggctggtctcaacctcctgggctcaagcaatcctcctgcctcagccttgtaagtagctgggactctaggagtgcaatacacatgctcttgacatcttaaagaaaaatgttggttgaacaaaaacttattaggggccttgtatgttcatgcattttgctagatcatagcaaatgatatgtgcatttttcacaatgatgtaaaatctgcatgtagatcaatctaaatacaactctaataaacatttttaaagttgagcaccagtaaagtttttttttaatataaagaatttcctagtttcatttacagtttttatgtggtgttgtaacatacccagatatgtacttatcttgtaagtaatgctttattcacagtaaagtgccttactttagcgagggagtcgttcttaaaaactgaataaattaataaaaaagaacaaattatgggctacctcagtaaaagactaattagtattctgatttgctcacttgaggtgcacactcacttaataattggatatacacccagtttcttccccagtaatgtgctgtacagtatgtagtgtgttatagtggagacaagttggaaagtgttattccaagtgcttctatagcttcttttttttttttttttgagactgagtctcactctgtcgccgagtctggagtgcagtggtgtgatcttggctcactgtaacctctgtctcccgagttcaagtgatagcgctgcttcatcctaccgagtagctgggattataggggtgtgtgccaccacgcctggctgatttttgtatttttttagtagagtcggggtttcaccatgttgggcaggctggtcttgaactcctgacctcaggtgatctgcctgcctcagcctcccaaagtgttggtattacaggtgtgaaccactgcacccagctcaatagcctcttaatggagaatagtaaatgtaactagaagggtatagcgtcttttgatcccatccttaatagaagtttagttgctggttttggaatgagtatattattagtagcattaatatgattttctgttggagaggttcttatcctattttgggatattttacttgtattaaattcttcagcaaaaactagtagattatcagtaagggagttggggagacctgtaattgagtcctctttttgttaacacagccagttatgtggactttgaagagtgagttgaccatggtttttttttttttttcttcttgtttttttttgagttggagtctcactctttcacccatgctggcgtgcagtggcaagatctcggctcacctcaacctccatctcccgggttcaagtgattctcctgcctcaggctcctgagtagctgggattacaggtgcccaccaccatgcctggctaatttttgtatttttagtagagacggggtttcaccatgttggtcaggctgatctcaaactcctgaccccatgatccgcccacctcggcctcccaaagtgctgggattacaggtgtgagccaccgcgcctggctgaccatgttggcttcagtttttttatcccatctgaaacatgagggatatatgttaatatttcttttagttttaatgttttcttattttggcatgtgaaatggctggggaatgatctttaaaagagtttagagactagttaagcattctactctagatagaataggagaaatctgcttgaaaaggcttcataagaaatatgacttcatgtttatttttttatttattttattttatttatttatttttttgagatggagtatcgctgtctcccaggctggagtgcagtggcgcgatctcggctcgctgcaagctctgcctccggggttcacgccattctcctgcctcagcctcccatgtagctgggactacaggcgcctgccaccacgcctggctaattttttatatttttagtagagacggggtttcaacgtgttagccagaatggtctcgatcttcagccctcgagatccgcctgcctcggcctcccagagtgctgggattacaggcatgagccaccaagcctggccagcttcatgtttattataggaagaacatgcttcataaaaaaaattttaacactgaacatcatgaagcactttaagtttgttgatggagaatatgtgtgtaagattaacactaatttggtatgtttgtaattgagatttagatgagtataagagtagaatctagtaactcttatccagtcatgatatgtgtataggtgattataaaataacagtgaaaatattatatttgttcactaggattttaaaacccattattctgagagccttaggtaattctgtaaactcttaatttgttaaatttcactggatatacatgtaaaaatgttaamtatggagactattaatatgtgaaatgttttagaaaagtaagtcaaataatacatctcttgcctatattttctcacaagaggtttgctgttttatctaagtactgttgtgggcctgatatactagataaaacagtaaaatttttagggaaaaaattttaaagtctagttataaattttgtaacatagtggcttaaaaatttagtctttcctataacatttatattttcttgttatatatttgagaaattttcctatctcatggacttgaatagtgcctgagcatagtgggtagtcaataaatatttgtggaatttggcattacatgtgaattccttcatgttaattttttttttttttttttttgagacagagccttgttcttgtcgcccaggctggagtgtaatggtgcgacctcggctcatcgcaacctccgcctcccgggttcaagtaattctcctgcctcagtctcccaaataactgggattacaggcatgcacctccacgcctggctaatttttgtattttttagtagagacggggtttcatcatcttggccaggttggtctcgaactcctgacctcgtgatccacctgcctcggcctcccaaagtgctgggattacaggcatgagccactgtgtcccgcccatgttaatattttttagaacatttttttctagacatatatattaacaaatggagatatgccatgcatattttgtaatgttccgtcatgctaattttttgatggatttttttgtttctcaatagctaacccactcctagaagcctttggaaatgcgaagactgttcgcaacaataatagcagtcgatttgggaaatttgtagaaatacattttaatgaaaaggtaagtgagagtaagctttggaatgatatttttggggagtgtttgtgaaaatgcaagggtcagttggtgctgtatttgcacttaatggtaaatacctttaagtttcattgttactttagatggttgcaggaatatatgtgtccactatgaccatctaaaagctcctttcacaatctaaaacccagatgctgaatttgacttcagcattgagtattactgtatagctagtcatgtaagatattctagcacctgtgttgaggtacggtgcaaggtcaattgtgattcttaggaggctcaaaacttaacaggatttgggtagagacttaaatgrggatgtttaaaatgaaggatgaccattataaatactctgtgcttacgtttagttatttgttttttcccctttatttggtgaatattataacctctttgatagacaaatgtgtattagaaaaggtaaataatttaacattggttaattatattttaagactttaaatgcaaaaatatattttctctgtgttttgttttttagagctcagttgttggaggatttgtttcacattatctcctagagaaatctaggatctgtgttcaaggcaaagaggaaagaaattatcatatcttttataggttgtgtgctggtgcttctgaagatattagagaaaaacttcatttgagttcaccagataattttcgggtaggtcagaagaaaagaaatttcatatagccaggtgcagtggctcatgcctgtaatcccaacactttgggaggctgaggcggatggattgcttgagcctgggagttcgagagcagcctgggcaatgtagcgagaccctgtctctaaaaaaaaaaaatacaaaaaattagctgagcatggtggcactcacctgtagttccagctactcgggaggctgaggtgggaggatcacctgagcccaggaggttgaggctgcagtgagccatgattgtgccactgcactccagcctgggtaacagagcgagaccctatctcaaagaaaaaaaaattttgtataatttttgaaaatataattgccatcaagcctaatacttattttagtgaattttgaaatctacttgttgtgtgtatgtaacttacattggatcaagtataacatgttagaatgaccactgtactgagaagatctctattaaggtgtactgctgagtttatagtataacactgtatgaggaggcacataatggaatagataaaaggatagatgttaaaccctacgtcaatttaaactcaattagaaattgataatagctctgtaatactagctttaaagttacctttgacttatctgtaaaaatgtttgaacactaaattaatattaataaaggacacatgattgaatttcttaatttacttcaacaacaaatatttattgcttgcccattgggtgccaggcattgggccaggattaaaaagataaataatacacagtccctgctcttgatcaacttagatgtggtgggaaacgcacacacacacacatgcacacacacacacacacacacacctgagcattacaagcgagtagagtttctaggagcggtgactggggatggtttggttaacacaattttcagattctcaggttagaaaacagtgtayttgtatggagtatgggaatgtagtttatacaaaggaatgcaatgtgagtaaggaatgtcgtctgtatagagttccccagctgattctgatagtcttttttggtcagaaagcctccatttgagaatcataacacacataattactgctctgtggttgtgtgtgtgcgtgtgtgtttgcagacagcttttcttttacttcaatttcttttaatgtgtgtttgcaaattttaaaagtctgttgtcttaaaacactttataaatgtatctctttatatacttctaaaatgtccagtcttttctagagctctccaaattaattggaatttgaagctagttgcccacatttccatgaaagtaaaggaagcatttcttttttactatggtttttaaaaaaggaataaattactaggaattacatgaaatataataatgatgatayggttttgtcaatacttagctgacaataaagtgatgtgactgttctggccttaatctagcatttcttcctgcttggaggsttgggagtatrgtatttttgggtttcagaatgtacagcctttcctggtacaatggcaggcatcctgaaagggcagctattgaaatatatctggtcagaggatttcctgtttctgcagtgtgaaccaggaggcctgatttcctttcttacaggagagtccttgtgatggtaagaggaagagtaggggaacagcgttgcatacatctgccatcttgaatattcctctcatatgcaggcacaacacacccactactatatccacttcccccaaataattctgccttaaagtcacttgaaagtgtgttagtgatttcatcaggtttttctgtagtttagccctctggttataattgagagatcaggttttaaaaacaaaggggaaacctgcagtaggttgaacacttgtaaaattgttgaatttttttggtcactactctatcaaaattagtatgtaaagaattgtggatgtatacctgtctgtaaacatttttattaaccacacatatactttaaaaagtaaaaggtttaaaaatgtttgcatttagacatttcaaatatttctgcacatgtttctggagccaattgctgtaatcatggatagatccttgaatgtaaagaaggcttggatagaaaaagaatagatggccgggatagtgttctagttacagaaaaactaaaaggacacgtttctatccaaggttgtaatattaggccccactgtccagaagcaaagtatttgacaaaacaattggagtgaggagacaaagtgcttggtagcaaagaacatatttattttggctctacatgtttaaactattattctgctaagtaaaagagctcttatttgaaacagtccattgaaaatgcttaccaacattgtccctgctcccttctcttttatttttttcccaaagattctagggtggaagaaaaaaaaaaaaccatgtatatagttgtcttgtttttactgtattttagcatttaattataatggagaaggaaagatagaggcattgattgtctaaaatattaatttatccccaaatcattcaaatttttataaaattttttttggtatgtgtatgatgaggtgtatttaatttgggaattcatgccatggtacaataaaatcatagcaacctgatttaagagaagctgagatgtttaaaaaaacttgtccatcctgttctctgtgtacatcctttctgatcagatttgcccaattccatctaaatgtctttaggctgtgtgtaattttcagaaaaatgcagtacttttagtctacygtatagcaaatatgttcattcactttttattagaaacagtttttaaatgaagcaagccttcaattgtgagactaataaatgggagcagtagattcttgttgataccagtagattttctttttttgaactactcctcttgttctatattttggaagcatttagcttttgaaagcctttggtaagtgaagtaaatcactgaaataagaaaactttaaattatttgatccataaagcataaagcaagtagtgtaatttatgtacagtcattgttagctttcaataaatgtgaaaagcatgttttaaaaaactgactctaaaaatcaaaaattaagaaaatcaaggatagaatttcttaacttctcagaatttaaaatattacttgaaaaattaaaccatactatcggttcttacttgagattctacatatttagtaggaaggygattttcatgattttatacactatgtttagatttttgatactgaaaagatataaaattgttgccctttaaaagtagaaaacttttatgtcattgatttttaatcattttatttaatctaygctcagagattaggatttttaatattcctggttttattagtaggaagaaaatgcttataaaatatagaagtattgatttgaatggtgagattatacagtactcaagttgtgtttagaaattcttcatggttggcactatttggtaagttgtgttttctcctgtattatttccctgtggatcatatatgttaattatrtttaatttgttttgtcatagtatttaaaccgaggctgcactagatactttgctaacaaagaaactgacaaacagattttacagaaccgcaaaagtcctgaggtatagtagaccattgttcataaaatctttaacttaaaaaaaaactcatgctgaaagatgtgttataatttttattttagagcccaagtaagagttctaacttttaggyttatactttaaaaaattaaatattcatctaagtctctgtcacagtgtaatactttatacctcttgttgttatctagtgaagtgacaggttctggttcttctggttgggcatcactgcattgctctcctytcattctgttttcaagcatgaaggtattaaattgcctaagaatcattctcttctagcatttttgaaacttgctcttatattacccacttgagcttaagtatatgtcttttacaatttattgtctatttcaaggctgacgtgaggtttgatgtagacagtaaatagattaagcgttcttgggaagaaatgcttataggctaggcgtggtggctcacacctgtaatcccagcactttgggaggccaaggcgggaggatcgtttgaagccaggagtttgagaccagcctgggcaacatagtgaaaccccatctttacaaaaaataaaaaaaattcactgggtgaggtcgtgtatgcctatagttctagctacttgggaggctaaagtgggaggattgcttgaaccctggaggtggaggctgcagtgagccacgatcatgccattgtactccagcttgggcaacagaattaaaaacaaacaaaaaaaagctggtcaggtggagtgggtcacgcttgtaatcccagcactttgggaggctgaggcaggtggatcatttgagttcaggagtttgagaccagctcggccaacatgatgagaccctgtctctaccaaaaaattacaaaaattagccaggtgtcgtggtgtgtgcctgtaatcccagctacttgggaggctgaggcaggagaatcgcttgaacccaggagatagaggctgttgtaagtggagatcgcaccactgtactccagcctgggcgacagaacgagactctgtctcaaaaaaaaaaaaagcttatatattattgtagttctgtttaaaacatcatatttatgtaatatattatgaaaaatttatatattggtttcagtaaattatawttctaagaataattagatataattataccattaagtattatttttaacacattaagttcttaatgtaaaaatttacaacccttataaattttaatatgcagtgtttaataagtgatattaagttacacgtactcaaggggcttaagttatgaaatactaaagtaaggattaatgatagatactggttaatgttacttttattaattttattaaatatttaaattgagtaatcraacaagtttttataatagtcagtttttaatgcttctacatttgtaagcccgatattttttactcttcttaaaatgaatgagatgatttatatttttagcatatttatataaaaggatagaaagcaaataaaatattccattatttaaaattctaagcagacaaccctacagttaatttttgtttaatttggcattttatatatcattatagatacagaatctgaattacaaactataaactttgctatagccatggttggtacttttaagaagcaacattaatatttattattgtatctttctttgtcttgataagactatgtttttctgagatatcaaaatatagtagctatattcctttcactaagataatggagacctttcctagtgggacatttcagcagttctgaaggggggaaaaagatataaatttgatcatttgccatggaaaaaaatggagtagagaggaaagaaaacgagtttactctccaaagagtagcatgtactctccaaagaagaaaattgccctcttattctagagtcagtatactctttcagaaatcttattcacattgagtgtgygtttatatgtacagttaaataatggattaatatgtttaaattactttttatgtcttctttatcaggaggatgaggtgatcattttgactaattaaaccctttgcccaattccatctgaatgtctttaggttgtgtgtaatttttagaaaaatgcagtatttttagtctgccatacagcaaatatgttcattaacttttgattagaaacagtttttaaatgaagcaattctttgactgcaagactaaaaattctgcatgatgtgtgttttctgctgaacagttttggctgcatgtgattgtttcctttgcttcttttaagaataaaattgaattttattgtcttagatattttccagaaatgttacacattcataattgaacattttaaataattttgtggaaagacaattatagcttgagctgggaatcatttgtttactgggaggaaaaaatatccatctccaggaggcatctttaatgatcagttaatcatgatcctgttatttaatgtttaacttgtatattctcaagttctggaaaatttctagtacaatcttttcgtgtccagtaacttttatgtttctccttctagtttctgcagwcctgactttcttcttctttttttcttctgagttggtatagagtctaacaaatgagcacattagatgcaagttcttttaggagagaaaacaaattttcttctcattttttctgaaatgttttaagtcattgtgtaaattattagagtaagtataatgcttactaatatactttaccatatatatatatgcatataaaaaggtttaaaaaagaattctaaggcatgaaaattgtatcagcctgacccctatttactacaacttaatattggtgcagttggtggcagttaacctaaaggagtcatactgattgtcacatttaaattttttattgcaccttttaacttactttttctttttttaattaacaagaataatgtatatttatacagtacattggaatacaatgtaatgtttgatacatgtatacattgtggaataattmaatgaatatatttatcattacctcatttaaaaaaactgtaatgttgattcaagtattgatattccctcctttttcactcaatttttgtctttttctaatatgctaggattataagactttagagcgaaaattgtaatttaattgaaaaacatctaatttcattattttaattgaaatttttacggataagtgtagattcacatgtagtaaatagtgaaatagaacagagagatcctgtgtatacttttcatggtcatttagtttttgaatgttagaatagtaaagattttcccattgacagattttatttttgcatgttatatagtgcattaattgacctggtgtagtagttttagtgtacttaaataatgtaacgatcagttaattggtgtcttcttgttttgtagtaccttaaggcaggttctatgaaagatcctctgctagatgaccatggtgattttattagaatgtgcacggctatgaaaaaaattggtttggatgatgaagaaaagcttgatctcttccgggtagtagctggcgtcctgcaccttggaaatattgattttgaggaagctggcagcacttcaggtttgctttttatttttttaagaggaaaaaaattaaatagaatttctgttatttatttgtcatatgaaaattgtctctttatatgcagtttgcttaaaaastttaagaartatctaaaatatactgagttamatgttgaatctcccaaatgaagaatgtttcattatcagtcattctgagctctgttttgaacaaatcagtgatattgcttaggaataaacctctcatttttgaagkataaataactgactattttatcctgataaatttagggtaatttttagttaaattttccagttatattacacttttccaataggtgagaagattaattctctatcatctattaaggcatttttgaaaattttcaggatcattgggtgaattaattagggcaatttaatatataaaagcccatgtactttattaatgagaaatgaaaataaatgaaaattttaatcttatgcagattgaaaagagtatttaaatacatggcaaaagcaacttttcaactccagtgtttcagtctgtacatgaacagtaggactttgcataattctaaatttgatctacgaatacagggaatggcaaactatgaaccacagcccaaatttgacccactgcctgtttttgtaagtaaaattttattggaacaatgccacacccactcatttatgtgtggtctataccagcttttgtgctagtgtcagagttgagtagttgcaacagaggctatatgtcctgcaaagcctaaaatatttactatctggccctttagagaaaaagattgtcaacccctatattaagacattattgtacgatcttataccaaggatgagttaaggaaaacctacagcaccatttaatgtagtagtcaataatgggctttggtgttagatcccagaggctctctgagctttggtttcctcacttgcaagattaaataaaccatgagaaggacttttaaagtacagccagtacctagtgtaatgctaaaggttcttgccttagccatgccaaagaattggtgtggtggctgcctgcagtgagtgatggagacagggaccaagagaaaaaaaagccatagactttattgagcagagtgacagtacaaagctttcacagtgtggaaggggtcccgagtgggtagccagagttagattatgcagtttccttttaaactcttcaaggcgggaaatacgtgcagggggaagatgttaccagagcgagaaacaaaggcagtaaattattttgtgatgtgttttagattttgaggaaaaccggaattgcaacttaggttttatttactttatgaccttgcagcggcttggcaaaggagacgggaatttacgggactttacaaagtatgtttacaaggagttggaattaggagcatagataaggcccactggtcacagaaaaatgggcatttaacatttcttttagtttcaggggagggggaagggagagagggagagaggacatagggaagcttatggcaaaatttttgctgttatagctttcttggggaagaaaacacatgcacaaatcctggtgttaggaatattttaagcacatatctttaatattattcatccaggaccaaagtaagtcctgatacaggaaatgagtgagtttcacagcttcctgagcccctactygacccaggaaggccagcgggcacctcctctcactagcaatagtgtgcatatagggaaagagcacaagaagacaggaaaaaaaagaagattaaaaaaagtgttatatgcaagactcttcttattctgcatttcatcataaacatcgtaattgtaatctgtatatcataaatataatgaggtaggggatattatctccattttacagaagtggaacctgtgttgaaatgatgcatgtggttattgatgaagttgtagatgtgagagctggttctgctcatgtctgactaacacagaggcttgtgataattgtcccttctttctcccaggccactgaaatttgtcatctatgaatgaacagactaaaacagatgtcttaatgattttcagatctaatgttctgtaatgctgtgaaatcaataatgtgagatgcaacataacatagtggatgggagcacgtgctcctgatccagatgctttaccacatactgtctgtatgaccttaggcagggaacttagccttttcgtgtcttagtttcctcactgtaaactgaagataatagtacctacctcatgttgtaaagaggaataygcgagttaaatatttgtaaatgatttgagtacttgtgtctggcacatagtaatcattataagtgctttaaatgagtaagtacaattaaaatacagattgctcccaatttaaaatgaaaaaaaaaaattcaagcaaaattagatatgttcttaatgtgcattaaaattttttgtttttttttgaaggattggaaaatttgttttgaaaaygtaatgaatgttagcatacatttcatttgctctctagcattgttataccaaaggagcatatgtgggagattctaacacaaaaaaaagtctttacaataattaatacacactttagaaatgttgttagaagtgataaatggcatcttcacacctcttattattaccctgtggtagaagatgcagttgtatagagtattataagtgttgcatgatcaagttatttgaagagtatgaaatgcccaaaaggtaatgctatttgcrttatctcttatttttcttctctaacttccttctattgagggtaaagtgaacagaaatcagggaagattggaaagagacagggaatcaataagattaatatgtgattcaattaattattttaaaagctaagattttattatatttgtcttcatccttcctatgactcttcctatagatccaaatggtttctttctaattagaagtgatttcttttttccctagggagcttaatttggcatgtcttagcaatttgaaaaaatgttggttttggcaggatatggtggttcttgcgtgttatcccagcattttgggaggctgaggcgggagggttacttgagctcaggaattcaagaccagcctgggcgacatagtgagaccccataaaaaaaaaacaaaaaaacccccaaaacacacacacaaacgcacacacacacacaaaataaattagctgggcatggtggtgcatgcctgtagtcccagctacttggaaggctgaggtggaatgattgagccctggcggtcgaggctgcagtgagccatgatcgcaccactgcactccagcttgggagagtgagaccctgtctccaaaaaaatttggtatttttataattattctactggaaagattattctccaataagcacttataggactcttaactgtcataaagaagtttttgcatgatgaaaatgcagaaaactgcattgggactgcctatgtttttaaaattccacataacagataaaatgttattataagaaactttaaaaatgtttgaagaagttcttttttggaaagaagtgatatgaaaactttacatgatagtattttgccttttaagacttattaaaaatcctgttttttttttttatcttagccttacataatttttggaggtgtgtaagaaactttgcgatatagtaaaaaagaagaaatagttaaatgaattatttgatggtcaattttttgagagctatataattttaggcaatatgtatatgtatagaacctacacgagtaataagcacattttcatagaatgaaacattcaaaatattctcaaagtatctctcttttttctttttttttggtaggagctttattgagatctagttaatataccatacagttcactcaattgaagtgtatatttcagtggttttcagtattttcagagttgtgcaaccatcaccatagatttagaacattttcatcaccccacaaagaaaccctgtacccattagcagtcactcctcattgcccacttctctcaaccctaggtgaccactaatctacttcctgtctataaatttattctggacatttcatataaatggaatcatacaatatgtggtcttttgtgattggcttctttcacttagcataatgttttcaaggttaatccatgttatagcatttagcagtacttcattttatttttattgccgaataatatttcattgtatggatatactacattgtttatccatttgtcagtttctagacatttgggttgtttccatttttggctattatgaataatgctgctgagaacgtttgtgtacaaatttgtgtttggatgtgttttcatttcccttgagtaaataccttggagtggaactgctgaatcacatcatggtaaactctgaccttttgaggaactgtcagactttttcaaagcagcttttccactttacaaagctattcccatcagaagcgtatgagggtttcagtttctccatatcctcaccagtactatgtgtatgcttatagcaatcgtacagggtgtgacgtgttatctttttgtggtttttatttgcattttcctgatggctcaagatgctgagcatctttctgtgtgcttactgaccatttgtatatcttttttggagaagtgcctgttgagattctttgcccatttattaattgggttgtctttttattaccaagttgtaagagttttgaaaatatattctaagtacaagtcctttatcagatatataatttgcaaatcttttctcccattctgtatgttatctttttactcatttgatagtgttctttgaaactcaaatttttatttcagtgaagcctaatttatctgttttttcttttattgcttgtgattttggtattatatcaaagacatgaagatttactttgtgatcatgaaggtttatacctagtttttttctaacagtttaatagctttagctcttacatttaagtctttgattccattttgagttaatttttgtttatggttgaggaaggggtccagcttcattcttttgcatgtggacatccagttgttccagtacctttattgaagaagctgttctttcctcagtgaattgtcccaacatcttattattgtaaggtctcatttttcacatttttttctcatatatattctaagattggtatgttaagtagtttatgaatttgtcataaaattgtcatgattttcacacattctttgtagtttttaattaggtagtcttagaatatatcgtttattaatattaatctgaaaatatttgtaaaatgctattttttattataatgcaaataaatataaagmatagttaatcgttagtactttctctgtaccagacactattccaagcatttcacatacataacctcattaatctaaatarcaaccatgtaaggtaggtaaagtaattatcccagttttatggacgaagaaactgtgcacaaagagaataagtaacttattcaaggtcacatagctagtagttgtagagcctgatcagccctgagactaaagcactttctttctttatagtactttttaaagcagcccttataaatagaaatctgtagatatgatgtactaaggcaaaaatgacctgcctggccaccttctgctgcaatatatcttytcctcacatacccctgtgcaagcacacaaaaaataaaatggcacacgtgcaggctggatgtgccaatggcagatttctcaaaatgcccacatgggtcaagacctaactgcattgcttttttttttttttttttttttttttttttttgctattctctgctctgcagtgtaaagatattgaaaatgtcaaaaaggcttgcagatacccctaagggtaacagtaaataaggaaaagaggaagcatttgtactgatctctagcacagaaagtcaagctgttggaggaactggacaggggtatacatgtatattagtgtgtatatgaaacataaatgaattttgtgtttcgaattcagctcatcatgtatatgcagttattccaaaactggaaaaaatctaaaatctgaaacacttttggtcccaagcatttcagttaagggatactcagcctgtacaggtaatagtaaatgtctcttcactcccttcgaccccaagcaatatgagtacatgcttattacgtatatgcataaacacatccatagacagatatgtacatccaaattgatctatttaggtgccttacagcgtttgcactaaaattactccttgaaatttcttgaagtcatatgaattttaatgatgagatactctatttctctaaagagttaatatattgaaaaggattataatctatcagtgtagtttgcttatagggtcaaaaaaaatgaaacagtgacagtttaatattgatgtgcttaaaggattataccatggacttccccaagggaggatcttctgttgatcttagcagtacgggtgtttgacaaggatagtgaaaaagtgaggtagatttaaaagttacaaataagccttgcctattatatggttttttgtaagtgaagtataattctaagaaatgggtcttgaaaatctggtttatataatacttattaatttcaatgaaaatatatttctattaggtggttgtaatctgaagaataaatctgctcagtctttggaayattgtgctgaattactgggtttggaccaagatgatcttcgagtaagtttgaccacragagtcatgctaacaacagcagggggcaccaaaggaacagttataaagtaagttccttaagtaattgcactgcaaaaattttgccttgcagtttgtcaaggaaaaacataagttacattctgtttaaaacctgagcttggtagatcaaaattctctacatctcagtgtagtaatccaccatataaataaatggagtttaacatagctcttaaagttgttccttgctgatatttggaattcataaggtaagagagaggtttacttttctacaactatgaaaatatgagctgatggtataaatcaatatatgacagttttaggcaacagatcattttactttaaaagtaatttttttatgccaataatgtgtactaaaacacatctattaagcagatctcacttcagcaaaatacttagcaaatgacactttccttatgtttaggattctttatttgggagaaattacaaatgacgagaaataagggcttaaccaagattttaaaaatcagtaaccaagaacttctagattgtacctggatgtttttatacttttgtctccatgtcctatattttatatatttttggttttggtactgtagaataaaattgacattcagccttgtcattctgaggcactgcaggatcttcatttgtggagggaagaagaccctttatctcttactaataagataggcagtgagctctagtgacatatttccgaaaaagttgcaacaaatttaaacaaagaattttttgaaaaagcttttagcctctcagaaaattggctatctcttattcttttgaaaattttagcaaggtatgcttagcctgattctttgctaagcaaattcaaaattgttcttgttataaagaaaaactctggaagaagtttgtagagtaccaccctacagyctacagttacttggttccttagagatatctctgcggcccaagggaaagcccataaatgtgcaggtgggtggttctcaggcattgcttcctccattttcccattttctccttgttccaaagcagttttttgttgttgtttccttttttcaatcaatgccattccagaatccaaagcagctcttttatgtactctatatatagcgtgtccacatgaaacttcaagaaagggttccattgcagaaaatataagtgagaaatcactgtttagagaggcttaagtatcaaatgtcaggctgatctgaatgacttataattctacttccaaatttgactttcttttttttttttttgtgctctcttggtaccccatgcttatctttatgatagtatttagcatggtgtttggaaattctcttctgtgccagtctctcttcatcagactatcattttcttgaggacaatggctctgtgtctgtacctgcaacatttaatactattataccatatagtcagttatattaaatagtagaatgggacagttcaaattttaagatgtaaacattttatcctaaacagtgtaaagaagttaccaaactttaaagttatcctgaattaaacactgtttcctttgcatttaaggaaaaccaaaagggaggttattcctttgaataattttgtatgtattcaggatgtaaattaaggtcaaaatgattttttaagcctaattttttttaccccaataatagacttttgatctaattttaggtaattccattagttttcttgtagcagttttctacttagccccatttatctgtgcctattctcacrtgacctttggtaactctttattttgttcttctctgtgkgtatgtttaggtgcactctgtggcattttcacagtgcactattataaagaatttttactagcatagttttcttttatagggtacctctgaaagtggagcaagcaaacaatgctcgtgatgccctggcaaagacagtgtatagccatctttttgatcatgtggtaaacagagtaaatcagtrttttccttttgaaacatcatcctattttattggagtcctagatattgctggttttggtaagtagagtttcttttgtgagtatatatttgtttcatattttttcacacattagaatttgttcttaaatcytttctcctttgtaactcattttacttgatgtatgtgtaattatatgtccacactcacatttcataatatgacctagatagggagctgatactttaaagagaagaggaaagactcgtggggattrgttttgatgatactaatgctaaaattaaaacattgattgaaactgctagagttaaggatatctctatactctaaaaggaatacaactgaataaaggtaaatccttgtgtgctactaataaagataatacattcactgattaaataacaaaaaaagataaatagagtcactaaaaccatttactaatttgtagagctggggataggttgacctaacttacaggccaacctcattactatgtttagaaattcattgctgttgctgtcagcaagtagctatattttccatcaaattaataagatatcaaggtaagtagttaaacaactgtagagctgttcaaccagaaatgaaatgggtcaccagcatgtgaatgctgctttgctctgagtgacaaaaatataaaaatcttgaaatgtaaatctaatgggttttgtattgggctttatcaatgtgggcattctttctgactgtgaaggagtagtgtcttctttgtggtttttgccaaagaaatgtatgagtgtttacatttggggagggatggagttttgcttttgatgtaatacgtattttaaactttataattctctaccttttgttcaaaggtagagaattattattattattattaattttttttccttttctacaacagttttagcataacacatacaaaggattataaaattgtaaagccgagtgtatcttagacatcatgcaatataatctcttgattttagaaatgaattggtatccacagcatttttgataagtaattttacagattatgcakaaaaaaatcttctaaagcacttgtattttaagtaatttttgtgcttaatttagattgctttaatacctgtgctttaaaaaattgttggccgrgtgcggtggctcatgcctgtaatcccaacattttgggaggctgaggccagcagatcacttgaggccaggagttcgagaccagcctgggtaacatggtgaaaccctgtctctactaaaaatacaaaaattagctgggtgtggtggcacatgtttgtaattccagctacttgggaggctcaggcatgagaatcacttgaacccgggggcggaggttgcagtgagccaagattgtagcactgcactccagcctgtgtgacagggatcctatctcaaaaataaataaataaatagttaacatgtggcttacattttatatcttttagtatacaacatttatctcatttgagaarcaccttatttgtcaactgaagcagggtatttttaatacttttaatgcctataaagttttgtcttgaaatgagaacatttgggaagtatagaacaaatatatataatatacaaatttaacctaattttaaattaagccattattacaattacattttatcctatgataaatttatatgaagttgatctcataatgactcttggttctggttttatattttcagagtactttgagcataacagttttgaacaattttgcatcaactattgcaatgaaaaacttcaacaattttttaatgaaaggattctgaaggaggtaattgccattataagtttaatttaagatctgcataaagctattttaaattttaaggaagagatatgctgcagttaccctgattggtgtggatggatggtgtataacggaaggtggctcagggaatctgggaagcccwgcagaggcccyggggctcaggcacgtcagaagtgttaatggttcagctgaagtttagggacccgataaaaacccttaataggggcttcctcagaagtgaacatctgtttttagtagtgacttttaatggacttgaagctctgtttctttttatgattttgttgtctctacttcttttttttttttgagatagagtctcattctgttgctcaggctggagtgcagtggtgtgatctcggctcactgcagcctccgtttcccgggttcaagcgattctcctgcctcagcctccccagtagctgggacaacaggcgtgggctaccatgcccaacaaatttttgtatttttagtagagacagggtttcacaattttggctaggctagtctcgaactcttggcctcaagtaatctgcctgcctcatcttcccaaagttctgggcttacaggcgtgagccaccgcgcctggcctgttgtctctacttctaccacaccaaacaaccttctacccgcatccctgcctttggcatctcccactctttttttttttttttttttgagacgaagtcttgctcaggctggaatgcagtggcgcgatctcggctcactgcaacctctgcctcccaggttcaagcgattctcctgcctcagcctcctgagtagctgggactacaggcacgcgccaccatggccggctaatttttatatttttagtagagatggggtttcaccatgttgaccaggctggtcttgaacttctgacctcaggtgatctgcctgcctcagcctctaacagtgctgggattacaggcgtgagccatcatgcccgactgtagctccccttcttcaggtctctctgcttctgcctactctgctgctggctcacctttccctgtctggcagcaaagccatcaagtcaggagatttgatgcatccattgtcctggagtgcctctgggcagtactttccttgtcatgccaccttttggactgtcagctgcttctactttatctgggctgaaatgtgcaatcattttatttcctatttccatcctttctatcttttcccacattttaattatgtttatgtttttgtgggcttcccagcacattctagcttttgtacattttacttacattctgtagttaaatgaattctggcataaacaaacaggtaaaacaagtacttaccagtaagataatttctctgaaaacgtttatccagtcacattagttctattaccatgtgaagttttaccttcatgcctctaatttaacataagctaatccttcccttctacaccaacctaccaaaaaactttatctagaaatattgtaaaaaggagactgtattttgatttatgttcacctttttaatatactttaaaataaatgtgaatttcaaattgagttgtgtttaagtggacagtgccttctagaatgtcagaaatcttttctagtatctcatgggaggaaatatttaaacactcaggaaacaatgttaaaacatatttacttaagttcattgcatagtttatccatctatgataaaatccctttaaaaattttaagaagacacaagacatatttgaggactcaaatttgatcatatattgttcttctaaattacacttattttccccaagtgatgtatcatatatattatatcactgtgttggtattagagcccatttgcagttaattgctatttccttacctttagtgcctgtctgcaagtgttcaaaaatctgttatgtttttggaaaaccatttaaggctataccagtttgtataaacctttgcattctaattagcaaatgttatgttcagaaacagtgcaaaattcactattgctcagtattgctgtatctatgattatgattatttcatttttaggaacaagaactctatcaaaaagaaggtttaggtgttaatgaagtgcattatgtggataatcaggactgtataggtatgtgttttttaactccacctttgaaaaatataggaagatgtagtgaatgtgtttagtgctttttctgtgctttttaattgacattacttgttatatgacttgaaactggtatttgagagaaggttacttctgtattactgcctggaagttattttttccaccaagrcttcaaaggtatctttgttggaagttttctataatctcttctatttattttgaaggatgttttcctatttaaatagttagcatgtgaattggttaagggggaaacttaattgcctagtcagtaaagacatttattcacctgaggaagtccatagttaggccaggctccaggcaagtttgtcagggtttgccctgcttttctgtgattctcttgtttctgctgtattctgtgcattgacagcatcctctaactggttgcgagctggcttcatgtgtcacagccagataacactgcgcagcaagagaatagaggctctgctttcattttagtggtaaagaaacctttccctatagccgcacagccagttttcagtcttccatttctttcccaccccatctctaaaataaactgttgggcaaaccttgtttttaaaacagtttgataatcctgtcagtaactgatgtgctggatttgaaaaacatagtataataataatactactttacatcagtataaattttcaaagcactttcacatttcacttggtccactccacatttccttaacacacggaccctttctaacctctgagtctttgactgtgtggtttgatatggctggaactcttccccttccatttgtctttcarcccactttcacctcatgctacatctatcaaaatactcccatttgtagcttagttcagcatgcccctcctgccctaccactaattacccaagaagcatcattttctcactaatgtagttagaatctttctcttcctatgtcttatagctttgttccacttaatcattgttatatactgtattcaagcagtttacattttatagttagttttggacaggaaggaatttcaaacgaatggaaagagcgtaaaaatgtgttgttacagattttgtttgaaagcgtttacatcagtttctaaaagtattattaaaaagctatgcatgtagaagtttctgtagttttactttactttgaatatagctgtcatttcgaaaaggaggaatttccaattccttagcctcttctcctggtttacaaatggaatggttattrtagtcatttgctttctttatgtagtagcttttctaaaacctatattaaatatatactgttacttttttataaacggccagatttgaaataaaaatccgtcagctctctataacttttgagagaacacatatagaatcacatgctatgttgtttctgatcagtccttgaaatctgtgattagtgaattgttcacatatctttaaaatgttatgtttttacactattgtgagtgttttcattttttgaaatagatttaattgaagccaaattagtgggaatactggatattttggatgaagaaaatcgccttccccagccaagtgatcaacactttacatctgcagttcaccaaaagcacaaggatcattttcgactcactgtgagttttgccrttctgaaattgagactatggtgggacgagacattattaaaaaggtgcattagctattagatattactagataattagaataaaaattatggcgtgtatagagcamctatattatatccagcacagtatcttccttagatggatggatatttatatatgatttttatgtagtcaagagactttttctctgatgaaaagtacatttcacctgtctaatacgtacaatgtgcctgtagtctgagatactagggaarctgaggtgggaggacagcttgagcctgggagtygaggctacagtgagttgttagcatgccactgcactccagcctggccaaaagagcaagatcctgtgtcaaaaaaataaaagtacaatgagaattacctgctgtcttcatggtctcccttctgagctaagtgggtatcagttgctttgttttgtgaccttaatcacattccaggagttggcactcggagtcgcaagcagccatctgtctgcttatttgtaagaccagcagttaargttgtggcttagaactcttgactggtgcaggcaatacaaattagataatgatcagccaattcattttgaccctctttcctaargagttttgagtggaaaatacactcagagagggaaattgaatctgaagcaatagagagattaggtagagtaaagagaaaagcagacagacagcagtagaaacaaatgagaggtgcactctaaaaggccagaagacctggtttctgttttcctttcttttttttttgagacagagtttcgctattgtcacccaggctggagtgcaatggtgcgatctcggctcactgcaacctccgcatcttggtttcaagtgattctcctacctcagcctcctgagtaactgggattataggcatgcaccaccacgcccggctaatttttgtatttttagtagagacggggtttcaccaggttggccaggagagtctcaatctcttgacctcatgatctccctgccttggcttcccaaagtgctgggattacaggtgtgagccaccgtgcccggctcagaagacctggtttctgaactgctgttaggtcgcagagctgtgcttgagtctttagagccattttccatgagggtggactgtgtggctattgagatgtttcctgtgttcacctcttctgaacctgtcttttcattcagccattgtcacctgaggtaataaaagcacagctccatccttgtacccagaaagagcctggctagcacagacaatgtgctagccacacaaatggatgtcagtttcaaccacaaagatagttgctgcctcatctcatagacaacatcattaacaacaacaacaacaacaacaaacaggagagtgaaaaagaaaagccgtttagagttgcctagtggaattagggaactaataggcaaaattgcctctcaaacaaactgtatattattttgagattgtaacatagtataatgattattgctttgatgaatccagaaacttaagtgaatggtaacaagtagttttgtttctattcatcattaacaaaatcagtggtaaataggtgaattggatttacctgaaaagctcatgtaattgtgttaaccttcactagggactaaaatctcacatccacctgctccattgacttgcaattcttctgtatccctatatatttcttgtaatgtggaayctatttctgttacttcagtggagatagaaataaaacaatatgtatcctcaacaaaacttctgctaaaattgaagatatatatccawtcctattccttaatagctcgctggtctttgttatgaccagcctatggatgcatgattacctttaccaggagttggcacctagagtcataagcaggtgacttaccaggggcactaattgctagtcaacagaattgtcacgagtgtctcagaggcatgtgacttaaaagacagtaaactgaagcatcaagaatggaccttggctgcttttgtcaaccaagaacaagagtaaagcagtaaatcctattttatataggttattccttttgttgtattttttgaaaataaataaaataatcatttattgaacacttagatgtggcaggcactattctaatgtttttacttgaattatttaatcctgttagatgtgtatgctacagatgagacatacaaggagaggttaagtgacatgcctaatatggcatgtaaagaaatggtaggttgggagtcaggctaggcactttggctgcagagccggcactctgacttgtcctgrtgtattgcctcccacagggaacagcctctctgttctgctacctctttaaccttgagcaagcctctaaggttcccaagtcagttttctcaattttatttttttgatttttctttttcttttttttttttgtagagacagaattttgctgtgttgcccaggctagtcttgaactcctgagctcaagcaacccacccgcttcagcctcccaaagtgctggaattataggcatgagccaccgtgcctggccagtactaactgggcctgaccctgcttagcttttgagatcagatgagattaggcgcattgagagtggtatggcggtagactctcaattttaaatgatgtctttttttttttttttttttttttttttgagacagggtctggctctgttgccctggttggagtgcagtggttctttcttggctcactgcaacctctgcctcccgggctcaaaccatcctcccaccttagcctctcgagtagctgggactgcaggcctgctccaccatgcctggctaattttgcatattttttatagagatggggttttgccatgttgctcaggctggtctcaaactcctgaactcaagcattccgcctgcctcagcctcccgaagtgctaggattataggtgtgtgccaccacacctagcccaacatcacttttcttacccttaggttatttcaagggtcagatgtgatcttgtaagtgaaaacattttagaaactttatgatatacatgtgagatattatgattaaatggtacaacctaaaatgatttagttttcttgaaatagattcaggctccttgtgtaaatatgttaggctatattatttgaaacggtaggagagtccctttgctgatgtcaggtgtttctttgactggctgcacatggaaatgatttgatataaatggtatgggctttgggatgtttaaaagttctccaggttgatccttttgtagttcataagcctgatgattggattttcatgctcatgtgtgcgatcttcctccctcagccttgttaatgtgttggcacattactcatctgacgtgataaagatagatagattttaaaaagttatccaggtaattctaatagagcaccaaggttgagaaccactgctttagaaataggtggttaactctgtaaaatgccaactgggttttgcatgtgcttttaaaaaaaaatttttttattataagcatgttcttttaaattgtgtttttttttgggtctctttctctccgtctctgtctctgtctctgtgtgtgtgtgtgtgtgtgtgtgtgtgtgtgtgtgtgtgtgtgtcttacacctattttctttcctaagagattataccaaatatttgctagattttattgatactttaaggcatactcaatacataaaagcagtataattgtgaaaagtgtgaaaatttcctgtataattttaagtgttttacatctcagttgttttgtaaagaatgattatgtaatatatttttgatcatttaataactcatatatgtattgtttttcagattcccagaaaatctaagctggcagttcataggaatatcagagacgaygaaggcttcattatcaggcattttgcgggggcagtgtgctatgaaacagtgagtataacttttacaaggagaaaaccatttcatgttgaagctgcactgtacagtatgatagcttctagtcacgtggttattaattatttcacgtggttatttaaattaagtaaaattacaagttcarttcctcagtacactagccacacttcaggtgcccagtgtccacactgactagtggtgackgcgttggacagtgcagatacrgaacatttcygtcatcacagaaagttcctttggacagagccatgttaagtgatgttatcacaagatggacagaaacattcctgtttgatttatttttcagacccagtttgtggagaaaaataatgatgctttacatatgtctcttgaatccttaatatgtgaatccagagataagtttatacgggaattatttgaatcatccacaaataacaacaaagatactaaacaaaaagcaggaaaacttagcttcatcagcgtgggaaacaagtttaaggtatttgtgttatttaattttttttttactatatttaaaatgaaattattgttttatattctaaaatggataatgtagatcactgtcagaaatctcacagtgaagttcaagagcagaccctgcattgttgatatttgtatgtaaaatatcataatgtaggcctagtaattgaacatacagaaatgcttgtaattwtctgaatgtgttcattcttggttcttaacatatctgattgcctctcctaatgttcttgcttctgcatactgtctggttgaccttcaaaccttctctttcccatgtgttttctgtttccttcctcattcagcggttttgttttagctggagtagtccagctcgggatggctagagaggactagttgagttgagagaggaaagcaggcacagccaggggcttcaggtaaatgatcgccttcatggactcctatttataaagtggctgccatgttaaaaagagcccatctgaagttaatgattcagtttgtaattcattttcaatgtgtttctctcacaatggcattttgggtgtgcatattacactaaaatttgattaaagcttttaataacttctgttaaagataagcacttaggtgtggcaaactcttcaaactgcttatttaacatggaagaatatttcatttgttttattaattttggatcaggaatttattcttcaaggtctgacatggaatggcacagggtttgtcttagaacactactaattggttctagttattgaggagtgtagaaaaaaaatgttaaaatttgtgaagttatgagtttaatgaatgacaaactatagtatgtagaacaaaaaatgtataygagagaattaatttcttatatatttctacagagtattattgttatatttataataaaactctacatttgcctttcactatatgtactttaaatatttaaaataatgtaattaggaaaaagatttaagtgtctgaatgttatggtactgataatataagcctccccaaatttattttggattgaaatgggctctaaataactaaattgataaaatatttataagagctagtttttttttaagcttaaacataaatatagggaaaaacctcataatacatttttaggtaactgaataaaaagccttgaattttgttataagttatattcattattatgagtttctgattcagtgaacaatctttttttwatttgagtattcttctatttctgaatcgacatttgatagcagattggtttaaaaatagtatatttgcctatatgaaatggatgtcattcactattttcctactctaatattattgtagtattgctgataagagcatacttgaaattttagaaaatataaataaagacattcttacagtttttctttggattacataatcttttatgttgagccttgaaacttcttataattgcttatatttaatacaatgtatttttttacattaagccactgaaagtgatagctgaatgatactaataataaaatatttcacgtttttctctgagataccttgaaatgaaataggaatagattcctagttttaaatatagtagaatagctcattaaattaaaattgaagtatataaggcaataaacacaaaacaggctatcatttacagcaatacttcagttatccagcatccctggaaaccagaaattttctattggaaagtgcctttttcaggttattgaaacataaaccctttactgttagtgttttagaaaaagtcatcctttttgatggaaacataattctattataagaatatttgtatgttttcaaataaaaatacaaataaagyatgagttgcckgaggctttttactcttaagccttatggtccttggctgttctttgatagttgactttcttccctcttttctcagctgctaagagtttattttgatgcttctgttcttttgactttatctccattttttttttttttttttttttttttggagaatactgtgcttagtctgtggatgaaggagtctggactttgcgacagttattttctttccaaattagtcactttaatacttttcaggcatggtggttcagattgattacggttgtcagaactctgtcagtgagataagtgggatacaactgtatttctttaattcaatgacaaatccattccattttaataacttaagcttctcagtatatgtgatgtatactgtaatagtatcactcacaggagaatgaaatttggtgtcaggccgatgttggaatcatgactttgccattattagctccgtaacctcgggcaagttatttatttccttggattgtcatgttctatccttaattagatyaaacataataactcctgtgaaaagctttgagcagtacctgacttatagatgacattcagtaaactatacttactaattatagctatgattaatacaatgttagtttaaaaattaacattagtcttttgtaagtagtttaataaatacctcagtataaaatccagatagaaaaattttacataattaacttattttgcagagtagtaaggcaaataaatgattttaatacactgaaccacaccacatcataatcaatgttataaaaacaagaaagcatagtaacttgtaatgttcattgtsaattttttttgagaaaattgtccaagcatttaaaaataactgaaatgtaaaatgttttaaaatgttaaagaggcagggtgcggtggctcatgcctgtaatcctagcactttgggaggctgaggcgtgtggatcacgaggtcaggagatcgagaccatcctggctaacatggtaaaaccctgtctctactaaaaatacaaaaaaatttgctgggcgtggtggtgggcgcctgtaatcccagctactcgggaggctgaggcaggagaatggcgtgaacccgggaggtggagcttgcagtgagcctagatcatgccactgcactctagcctgggcgacagagcaagactccgtctcaaaaaaagaaaaaaaaaaaagttacagaggatttctatagctaggcaggacaattttgtttacactaagtgttccataaaacaatcctaatatatactattagtgtatattttaaacatgtcttcattcctaatgtgtgtgacacaaactacagtttgccacattcaaagactgtgctattgatctcttattaaatgcatcctcactattttcatttacttccttcattgcctgtacattttttcctcattcattccatctgcaaatatgtgtgtatgtttttaatattgctaattttcagtcttttaattatacaacttctgtgtaagttattgttcttgcattacattagccattttgcatgatgctgtctgttaaagaatttgtgtaccaggaggttgttaaactggaaygtgttgtatttggatgttattgcatgttattttattccagtactggagagctaatattaactcatgacactgtgtactttggctttttgaaataataaactgatttcctttctttcacagacacagttaaatttgcttctggataaacttcgaagtactgtgagtatgcttaaaaagaaaacaggtttttatgggtcatctaaaactattattagtaattatgcaagtaggcatagtaaccctgtactaattaaaaatacattttaaactttattctcttattttaaaaaattagttttttttctgaagaaaggtcaaatatatatgtgaagtcagattattttataaatayatagaattcttgactatttaaaaattaagattatcttacagtttcaagaaagtgaaaataagtggtaatagtggagaatttttcttaggattaaagattagttatgaaattcaatcttattttattactcttacagtaacattctccagacatggcaatgttgatgtggaaaaaatggacaaaatatttttgtgccctgctatagagacaaaatttattagaagcctgttttttaactatacattttagtaattcaccccattttcttaaatgagaaaaacatcatagaaagaaattatatgtggtttatataaatgaagcatgattccaaagtaagacttattttttacacaaatccacagaacttgaaattttgtttttgtttttgagacaaggtctcattctctctcgcccaggctggagtgcagtggtgcaatcacaactcgctgcaacctccgcctctctggttaaagtggtcctcccacctcagcctcccaactagctgagactacaggcatgtaccaccactcctggctaatttttgtattttttgtagatatgaggtttcgccatgtttcccaggctgttcttgaacccctgggctcaagtgatctgcctgacttggcctctcaaagtgctggcatttcaggcgtgagccacggcacctagttagaacttgcgtattctttttcaaatagtcattttgaatagctagacatttattatatcagtattattgttgcttaacttactgttagattaatttttggaaccattaaaaatctttttaatatcctctttggctgcaaatatctatctcttaaggccatgtatatttaaaaaccaaatctgatgaagagagtatttttatttcttagatagggtgctgctctaaaattatgagattactttgtgatttatagaaaaaaaagcatttctaaaacgtgttctagaagtgtctgtgggccgggtgccatggcttatgcttgtaatccccagcactttgggaaggctgaggcaggtggatcacctgaggtcaggagtttgagaccagcctgcccaatatggtgaaacctcgtctctgctaaaaaaatacaaaaattagctgggcatggtggggcgcacttgtaatcctagctacttgggaggctgaggcagaagaatcacttgaacccaggaggcggaggttgcagtgagccaagatcacgccactgcactccaacctggttgacagaatgagactctctctcaaaaataaaaataaaaataaaaataaatgaataaataaataaaagtgtttgtagggagcttcattgttgaaataattatttgcaaggtaactactttgaagagaaacagttatttggatgtctattagcttcagtactcaacaatacgtttcattgtatacataatcagtattctttctacctcattcagcataatctgataattgattccaaatgaatgcctttaagctttaaaaaatattgtttgacaaacaaatgttaaaatgtacamcagtgcagcttagggacctactgtatgtttttgaaatagaatgattgaaaatattgttttgttttcttttacactttggcctaagtcttaaggggcataattttatttactccttttgtcatagggaaatttccttatcatagaaatatggcatacataaatacatttaaatatagaaaaaaatcacatgtacatcagcctgcaaagtgtgttgtttaaatatgttaaacaattaaatgtgttaaactttacagtgaaagacttctctttttacagtttttgacattcaaatctaaaatgtagtatttttgtaatattattaattagtaattcaaaaagtcattgtaagctttaaagcagaaaaagtatgcttgtaaaattttgagttttttttttttttgacggagtctcactctgtcacccaggctggagtgcagtggcgtgatctcagctcactgcaacctccacctcctgggttcaagtggttctcctgcctcagcctcccaagtagctgggattgcccaccaccatgcctggctaatttttgtatttttagtagagatggggtttcaccatgttggccaagctggtcttgaactcctgacctcaggtgatctgctcatttcagcctcccaaaatgctggattacaggcatgagccactgctcccagccttgagttctttagtaattacttttacaggttcatatgttaatgttaatatgctttgaaagttgcaggtattcatagaaacagaaaactaagaatgctatatgtattgtaacaaaaagtacctttattttcctagggagcaagctttattcgttgcatcaaacctaacttaaagatgacaagccaccactttgaaggtgctcaaattctgtctcagcttcagtgttcaggtattttcataatctctgtcagtgtgtgttagtagtcatagctcaaatacaatttaataggttcagtattttcaaataattcaccattatcttgattattttacagtgcaataaaattttcatcttatattttctttaattataagaaaagtatagagccacatgtggtggtgtacacctgtagtcccagctacttgggtggctgaggcaagaggactgtttcagcctgagttcaaagtcagcctgggcaacatagcaagatctgttttagaaaagaaaagaaaagraaagcatagatggcaaattatttgagcaatattgagatgttgtttattgtgaaataaacaatttcacattaaacatttatgaaaactctctaacagcaaaactggatcttccttaagtgggcagctttctcaatccagcagtagttcatttctcattccacacatgatggtcagaaggtaggttttgttgtcctttcttcccactccacgacttgtaaagaaaatgaaacacgattccctctgcatctgtgacacttcatccatttgcttaaactatcacttcctacccctcaccctgccatgtctgaccttgctcaggcaccaggcttgctctgtttrctttatgccttgcccatcctcccttctcaccaacactacccctaatttttcccaaggtatcagccttctcctttcttgtttaccttttgatccaactcagcttcctgacacttccttaaactttcttctctgactccttattttgctcttttgagaggtagatttactatgaagctaagattacttaagcttcagggtccttcatttaaataaaccccttccaaagccctgcatgtaattttctgcttcgctaaaggcctctccccaactatataagcttcagcccccgcctcacaaatctagatctacccttgacctctctcacaaaaccatagctattgagaaatctaattctgttctttcttattgtctgcacagggttggtagacaagacaggatggcaccagttaaattcatcgtcattatctttaaagggctctcaaacctgtcctgccaagttttcctggtcagcatgttctgtttctcatcagagactggtcagacccatcctgctttcctcaaatctctgcgcctctgctgtcaratgggcttacctccttaactaaatatcctaaagcttctcttgtctgctatcaagcacttctgcctaccacttaaccttccctcytgttgagaaagtaggggttgcctctctgcctggttgaggcttatagttctttgaaagccatctcttcctagtttttcatggatcttcagcattgtttatgtttgtcatactattccctttcagatggatctttcccattaccatttaaacatgctgaaatctcatctctaagccacatttctcttacagctacctcttcctccttatttttctccagttccttttctctccaagaataggttattgttgctttttcagtttcatgcattctacttactctttaactccaggataatttagctcccaccttgatgaggtcaccagtgattgccttgttctgaagcaaatgtcccttttgcagtccttattttagtggacttcatagccacatttgactctggccaacccttttaacatatccttttcttggttcctgacatggcgtatgcccctgcttttcttttgaattctctgaccattcctgattcccctgcaggctcattttcttctacctggacatwtgttatcatttttcaggatttaagttaggcctctttttcttctcattctatgtcagtactgtccagaagacctttacatgatgatggagattttccatatctgtcagtttagtagccatgagacacatttgactcctaagtacttgaaatgtggctaagaatgagtgagttactaaattttaaattttgtttaattaaaaatttttttttggttgggaggggcagggtttattctgttacccaggctggagtgcagtggcacaatcatggctcactgcagcctcaacctcccaggctcaagtgatccttctgcttcagcctctcaagtagctggaactagaggcatgtgccaccaygcccagctaattaaaaaaawttttttttgtacaracaggatctcactgtgttgctcatgctggtctcctggtctcaaactcctgggctcaagtgatcctcctccctcagccttccaaagtgatgggattataggcatgagctgccatgcctggccttaattttaatttttaaaaatttaaatttaagtagtcttatgtggctagtcccgctgtagagcatgtggctagtgactgccaagttgaacagcacagatrtgtattcccttaggtaggctccccagttctgctattgtaaccttctaaatagtgagtcctgatagtctctaatccaagctgtcaccatctcttacctggatttttgctgtagcttcctaagtattctcctatctcttcagtctgtttttcacatgcatccagaattatcactccacaactcatctctaatcatcatgtccttttactgcttaaaatgctctaatggcttcagatgagtattagggtgaagaggtcccatagagcctggcccgtgtgtccctagcttcatttgtttacactctctccctcccttctctccttcagtcaccctgactttcattttcattccctaaatgctgcatatttcctcccagcacaggacctgtgcacatgctgcctcctctgtttgggatgttcttgctatactttttcctttatctttcacatctcagctctgtcatcacttcatatgaaagcttttcttgatattcctgacatggaggggagcctgaatttggggtgctgagctcaagtgcctttatttcacagttgtagttacaaattttatacatatttgtataattattttatttttccctcctttattccataagccccatgagggtgggaactgcatctgttttggcttacacatacattcctatttccctggcatatactagactcagtaaatatttgttgaatggaatgaacagtgtagaaaatatgaagatttatttgtgactaatgctaacaaatactggaaaattaagtaattcatgtctgttgtattmttccataaagtagagatgtatttttgtaatattcaagtccatttttttccccattggaattcctctttatttcctaagtgaacacctagtgtcctggcaagttgcacctgtttagatttagctatatatgctatcagattagtggagagggtataggctactgatgaatgctttagctaggattcctctttcaataagcagtatatttcaacatcttaagacatgttggcactttaacagataataccaattcattatactttgatttttttaagtatcaataatagatatcataatagtaataatgataatgatatagaatttgttccagtcatgtagctaggtgatgagaaaatgcaaaaatccrtaagttgtagaaataaaaatatttacgaagctttctaaaataaagatatttaagatttgaattgtactttaactttccattttcattttaaagagaattaataaatttaagtcaccttttactaaaattactatttttttttttgagacggagtttcgctcttgttgcctaggctggagtgcaatggtgcgctcttggctcaccaccgtaagctccgcctcccaggttcaagcaattctcctgcctcagcctcccaagtagctgggattataggcatgcaccaccatgctggctaattttgtatttttagtagagatgggctttctccatgttgaggctggtctcaaactcctgacctcaggtgatccgcctgcctcggcctcccaaagtgctgggattacaggcatgagccaccgcgcctcgtcttttttttttttgagacagagtctcactctgtcgcccaggctggagtgcagtggtacaatcttggctgactgcaacctctgccttctgggttcaagtgattatcctgcctcagcctccccagtaggtgggattacaggcgcccaccaccacacccggctaattcttgtatttttagaagagactgaatttcaccatgttggccaggctggtgtcgaactcctgagctcaaatgatctgtttgcctcggcctcctgaagtgctgggattgcaggcgtgagccaccatgcccggcctaaaattactatcttctgattggcaaataccagggcaaagtaggggaaggtgaaagaaggcaagttttcttcttctgtaaccttggggctgtgctgcctgtcttgtagcaaagaggggtgccagctctgcaccgagaagccactcatcaaactccaagagtaaaagccagttcatggaaatgtttagaaggcagagtatttgccttagtggttaaaaaaaaaatttaagcttcaaaacatcttaagagtaaactagctgcaagtgctgagaaagcagttgtaggcttggtaatttgttaagcaccatgaaattcttaatgaactgtgagccagtttatagtttgcagctacagggcaagccaggagacttagatgcatacatttccaaaggtacttgtttatttgatacaagtgggcaaaaactgtgatgatactaaccaaactttacttttctttctccaagcaaagcctagagctaaatctagttctggagattttttttccccatacgaatgatttctttaatgtgtttcattaattaatattgaaaattcacagtaacagaaattaaatagtacagaataatataagtaacaagaaatctcagctcttaggggtgaccacttaactctacgtcttggrtatattttttatgctggttagattaagctctgctttattcttttaaatatgtcatatcccatcatatggttgtaacataatcaattgagattttagtttttttctggttttttttctattaccaacagtgacccagaggacatctggacattgtccacatgcatatctttgcccacaagkgtgaaaaatcatagaatagatttaccgagccaaagggatatttccaaattgccatccaaaattgttacactggcttacttttctactaagaatgcatctgtgtgttttcctacactgtcatcagctctgagtactagttgttatcttatacctttgccagtcaaatgggttaaaattcaatctgactgtctgtaaaggccatctttcctgtgagattactttaaaataaaaattcactggtttaaaaagtcttagagtttgttttaatttaaatttttggctagcaggaatttattttggtgtaagaagtgagacaaggatctagtgttgtttttgttttccaaatggcttgccgtttgtcataatactatttattgaataatcttactttctccgttgatttgaatagtcccagagactgaaatctaggtcttgtaaataaaagtcctggcatcayttatagctcagcctttccctgcctatctcacactttttctgacctgaaaagctcacattgactcaagactcagattaaccacttactagagttatactgaaaatagatatttatccaatagactaatcatcccagtagtctagttgctttgagaagtgagtgaaaggcagtctttatagtgaaacagtgagctcttctttcttttccatttgccttatgcaytgatgataacttgggaatgtatctactttttggagtttctttcaggaattttgttctaaaattcacctcaggcctttgaaagtggtttaatgcagggctttgccttatatactgtgtttgtgacacagagtcttctaacagaaaaaaagatacaaactagacttgatctttccttagttttgttttgttttgttttgatacagtgtctcactttgtcacccaggctggaatacagtgtcctgcaaggctcactgcagcctccacctcctttggctcagatgatcctcctgtctcagccccctgagtagctgagactgcaggcatgcactagcatgcctggctgatttctctattttttttttttttttttgtagagatggggttttrccatgttgcccaggctggtcttgaactcctaggctcaagcagtttgcctggcgtggcctcccaaagtactgggattataggcatgagccactgcacccagttagacttgatctgtctagagaccaataatttgcctctagaaaagagtcttattgggtttacaggaaatttgactatagtagttttaggtggtggataagttgggacataatgagcataaatattttcctatataatatttagttgctgataattctcataaattgcccgtttctaaacagtatcttacaaaaatgatcattcacaaattattttggacttccgaacagtgattgacagtgctttgtgcttgttcgtgaatctagggatggtgtctgttttggacttgatgcagggtggttacccatcacgagcttcatttcatgaactctacaacatgtacaaaaagtatatgccagataaacttgcaagattggatccaagactattttgtaaggtataaatgccacccaaattgaaatttcttagctatgaacttgtcttttctattaataattgacatttaactttttaacttttatttttcaggctttgtttaaagctttgggcttaaatgaaaatgactacaagtttgggttaaccaaagtattttttagacctggcaaggtaaatatacattttttactttaaactgtaacatcatgaaaacaaatagttggggttagtgaatatcttaaagtatttaataatttgtattattcttgaattatatggtcactaacaacatgaattgctattttccataccatttctcagaaaagaaaaaaaagttgagaggaagataattatatataatgttcataatttgtttagctttactcatacatatttattctaaactccccatttattttagagcacaggtgtccagtcttttggcttccctgagccacattggaagaagaacagttgtcctgggccacacataaaatacaccaacactaatgatagctgatgagctaaataaacaaaacaattgsaataaaaatctcataatgttttaagaaagtttatgagtttgtgttgggcctcattcaaagctgtcctgggccacatgtggcccatggactacagcgtggacaatcttgtcttagagctttaataattatttgagaactaatagtctcatagagaaagcactttttcttgtttaaactcctgaaaaattagaaatatttattgaaagcttaagacaaagatttaaatatcttttctctcgttatgttacctttaatttaattttgactataagaagcygttatattggttgatgggtttttgacattcttaatattatagtgggttatttggtaaaggattgaaatcattatggaattttgtggtatatagtggaaataatgtattttattagttaagaacctactagctgttttatttgtgttgtctgtcacttagtagcaaaaatttctcatctctgtttaaaatggaaatgggggttgggcgctgtggctcacgcctataatcccagcactttgggaggctgaagcagtgggattgcttggttccaggagtttgagaccagcttgggcaacatggcaaaacctcatctctacaaaaaaatacaaaaattagccgggtgtggtggtgcgtgcctgtaatctcagctacttgggtggctgaggtggggaggattgcctgagcctgggaagttgaggctgcagtgaaccaagattgcgccactgcaaaaaaggttgggggtgggtaatgggagttaggagagacagaataattttggcggtacctggtattatatagctaatatgcacttatcaaaagctccataaggatatctgagaatgtgggtgagccaattcagagatacagtagtcctttttcattcttttcttaataaagtcttctcvctagccatctgtaatttaaaagtcatcccccccccccacttttgttattgaatatgctacctagcattaagtaacctccttacctccaaaaaagctcctgaagaaagaaaggaagcaaaacgtggccaagtgtgtttgtgtttgttgtattctctgccaaggcctatgtaattgacatgtgaccattttcagacagttagattttggatttgaattctgtttacatcatgtctttatgtgttcaaatgcatttatattttaatactgatactaaattatttcacttcctagtttgcagaatttgatcagatcatgaagtctgaccctgaccacttagcagagttggttaaaagagtcaatcactggctcacatgcagtcgctggaagaaagttcagtggtgctcactctcagtcatcaaatgtaggtgttttcctttacacctataggatctttcattgtttcaagatggtttgtggagtgttgtaaagctgtctcagaggtgatgctgagcaacagagactgagacttgttcacactgggtcccaggttcctatttgtagatgttctttctttttttattttttgagtgtatgatatttattttctttattcaaatgtgttataagagtgtcagtttcatagtgtcctaacaaaacagaattcactatcttgatctctcgtccccgcacccctcaccatcccctaatctctcagacttaaaccagaacttttctttctgcctgcatggcatctacaatacacataccccgaaaattctaattgtaattgattttcctttcttatccctgaaatattgtcagtcaccagatcctgttgattccttctccaaatactgtacattcctttctttttcttgccagtgccttagtgaagtccttttccaccttttgcataataattccattagctcccagactggttttcctggtttcttagagatatctctctaaactagaagccttttataactttcctttcataaaaggtgaagtctaaattatttgatgtctttcaagatcatgtaaaatggtgtgtcagttttttgtttcagtctcttcccccaccatcccctcttaaatcctgttttttgaacggaagtctgtcataatcctgaaagacactgtcttgaacaccataatcccaaatgttgaaatcttaaaagatgaaagtcccaaaactaggattctgtaaaaataataaaaaaagatatttatttacattttaaaaaggggatttgagaaacgtataaaaacatgacagaactcttcataggccacttttcacaataaaataggcaatawcatatatataggcaataaacatatatgtttattgaaactataaacacatatactaacaatagttgcatgggtataacaggagcagacaaaccrtattcataaagaatagggcgaaaggtgaaatgcataaacacatattattgtggttggtaattgtgcacccagctttgttactgcagtcatctgaaatactgtgatgatgaacaagctgtcttttgatgagatcagtcaaaaaccatagtgagtcaccactgcatttgtagttgcccagagaactgaaatcttgagaaattttatcttttacaagtgcagatgtatgataaaggacatctgttcattgattaagtttcagtgtttttatatacatacacaatgtttacccagaaagtaaatgttgtggtaatgcattttcatggagttaaatttgcaaaaaatgaatacagtaaattagaactctccaaaaatttctacataattaaaaaatgctaacaatttaagatagtgaaaataaaaacaaagaaaaaaaaaacacccaaaactaaaaaggaagtttgacataaaaaaaagtgtatcacagggacagattataggcagttgcatggagatagtccataagagctggctgtctttctcagtcattaactatattttgaagtcttgtaccacgaataataggtgctttttttcttttaggacatggttcttggagaatatgttcatattcattttcttcatgagattgctctttttggaattcttctgtgattsctctgattgggatttttaggatttttgatgttagggattttaatctaggaattttgatcttttgggatttcaacatttgggattatggcttttgggattaggaattcaaacccctttgacatactgggctaagctgcttttatgtgtggtttggccaggtcatagcagctacatagctggcccaagacaaaagtgagggacagaacattttggggttacctaaggatctgtggcaaacctttaattgttgggagctgtgtaggaatcagtaacttgattacatttacagttgccccttatactcatcagagtacctgaaatagtgctaggtacatgaaaaggatccagcgaatttttccttatcagtagaaaaggaaaattcttttggcctaatgaaaaagaatcatgctaacaaagattatttttgaggtattttgttagacaattgtgaatatagataaaaagagaactattaatataaaaagaaaaaagatagcagaatcttttccccatcattttccaaataaaatacagaaacatctttattactgtagtttaatacgttcagctttacacattgcattatgataggaaacacattatagtaaactcatctgttacaccattcatttgtggactgtgttctacagtggtaccgaagtcagtaaccgggcagggatctttgcagaatgttaataggaaactctgaaaaaaaagttcaaggtcagatcatcctaggaaattgtgagtaactgaagttaagtagatttctttgctgtaggattctcagaggcttcactcagtatgttcattgtgaacctccatacagaagtatagtgtacagcttttcataaactcatttgacaggtaaatccttttttcaggacatacctattcacatttcatagaacaaatgttgcctaagacagtttgggaggtagcagtgtagcatactaaggaaataatgcatttaaaatgtaagcctaaccagatacatgatattgtaactgcccagtgggttctccttgcccactacccagacagagctgatttatcaagataggaattgcagtagagagacagtaattaatgtagagtcggctgtacgggacactggagttttatgattactcaaatcagtctctctgaaaactcggrgatctgaatttttaaggataatttggtdggggcttgggttggagatgaaatcatagggggtcaaaattgagtttttcttgcttgcttctgttcctgtgtgggagcacagaactggctgggccggattacctatctaggtggcatcagctggtgcattggaaggtctgcaaaatatctggagcactgattttaggtgttacaactgtgatgttatacctgggagcaatttgaggaggttcagattcatgcagctggaggctgtgtggctcctaaaccgtaatttctaatcttggagctaatttgttagtcctacaaaggctgactggttccccaggcaagaagggggtttattttgggaaagggttattatcatgtttgtttcaaagttaaactttaataaactaagttctttcccaagattagttcggcctacacccaggaatgaacaaggacagcttagagattagaagcaagatggagttggttaggtcagatctcttttacataatttccttggttgtaatttttgcaaaggcaaaattacatctttcaacatctttttatttttaagaagaataagaaattatagaaatgttaaaactggctgggcgtggtggctcacgcctgtaatcctagcactttgggaggctgaggtgggaggatcacttgaggtcaggaattcaagaccagcctggccgacatggcaaaaccctggctcgaataaaaatacacaaattagcccagcatggtgtgtgcctgtagtcccacctcacctactcaggaggctgaggcatgagaatctcttttttttttttttgagatggagtcttgctgtgtcacccaggccggagtgcagtggcacgatctcagctcaccgcaagctccgcctcccgggttcacgccattctcctgcctcagcctcccatagctgggattacaggcgcccgccaccatgcctggctaattttttgtatttttagtagagacggggtttcaccgtgttagccaggatggtctcaatctcccgaccctacgatccgcccgccttggcctcccgaagtgctgggattacaggcgtgagccaccgcgcccggccgagaatctcttgaacctgggaggtggaggttgcaatgagccaagatcatgccattgcactccagcctgggttgagactgtcaaaacaaaaacaaacaaaaaaggtgttaaaactttgtttttgatgtctgatatataataatatggtcgtcaagatttcatgtttcttgagaattactttgtgaaaatgagtttttttaatatatgttagatttaaactgaataattttctatcattttattttactcttacacatagtgaaaaacaaaataaaatatcgagctgaagcctgcattaaaatgcaaaaaactattcgaatgtggctttgcaagaggagacacaaacctcggtaagatgaatagttcctaaaaagaactctacaaaacctagttactgtaatacaaaatgacaataaagtcataataaaaagcagtttggatactcaggttttctcatgttctttgtaaaatgatgtattagtcttttatttgtaatatttatttgaagttagttaattcatttattaccttattacttgcctcattctataaaaggatttgaagkggcatacaaaaatgtgtaaagactataaaacaagaagtaagtagttgagagaagctcttttattctgattattttagttatttgagtttcttgataatgtcaaggtgacattttttaaaaaacatctcactaatatgtttaccataattttcaagattatctgtaggaattacattgtcccattataaattagtstatttcttatttgaatctttcatttttaatttacacttttaaaaattggaagtctgaatatctctattgatccatcacaccttttcaaagagactagattaatttcctctgtgatttgaattctcaaagttgtagaaggctttaatcccattgacaggcatcagtgtcattcacactcatatttgattttttttagccttcaacaagagatctgaaaaagagaatagtagataatattgaaaacagaagtgaaataccctgtttagcattttataaatgaaaaatctgccaaaagtactaaaggatgaaattaagctctaatgaagtattatttttacagcattgatggtctggttaaggtgggcacactgaaaaaacgacttgataaatttaatgaggtagtcagtgtgttgaaagatggaaaacccgagatgaataaacagatcaagaatctggaaatttctattgatactttgatggccaaaattaaggtatgtaatttcaaccygamtgactttgactttttatgtaatttaatatattttgttattggtattgaaattgtatagaaaacgtccttagtttttcaaaattacaaaatgtgttgagactcaatgatggcaagtacatgctcatcattattacctctactctttatgtttgaaaaatttcatagcaaaaagttaaagaagacaatttttatgccatttcttctgttgctaagaaagatatccctcgcaacttaatacctaggtgatgggatgatctgtgcatcaaacccaccatggcacacgtttacctgtgtaacaaacctgcacatcctgcacgtgcatccctgaaattaaaataaaagttggaggccatacatggtggctcatgcctgtaatcccagcactttgggatgctgaggcggacggatcatgaggtcaggagatcgagaccatcatggccaacatggtgaaaccctgtctctactaaaaatacaaaactagctgggtgtggtggcrtgcacctgtaattccagctgcttgggaggctgaggcaggagaatcgcttgaacctgggaggcggagattgcagtgagccaagattgtgccactrcactccagcctggtgacagagygagactcyatctcaaaaaaaaaaaaaaaaatgaaaaaagaaaactaaagttggagcaaaaagaaaatggccgggcacggtgggtcacgcctgtaatcccagcactttgggaggccgaggcaggcggatcacaaggtcaggagattgagaccatcctggctaacatggtgaaaccttgtctctactaaaaatacaaaaaaaaaaaattagccaggcgtgatggggkgcacctgtagccccagctacttgggaggctgaggcaggagaatggagtgaaccgggggggcggagcttgcagtgagccgagatcgcgccactgcactccagcctgggtgacagagcaagactccgtctcaaaaaaaataaataaataaaaataaaagtggtggggcatggtggctcctgcctgtaatcccagcactttgggaggccgaggtgggcggattatttgaggtcaggaggttgagaccagcccagccaacatagtgaatcgccgtctctactgaaaataccaaagttagccaggtgtgatcgcacgcgcctgtagttccagctacttgaggcaggagaattgcttgaacccaggaggcagaggttgcagtgagccaagattgtgccactgcactcctgcctcagcgacagagwgagactacgtctaaaaataaataaataaatgataaaagtaatataatactataaaaaatttggaggccagatgtgatggctcacacctgtaatcccagcactttgggaggcccaggcgcagggatcacctgagctcaggagttagagaccaacctgatcaacatggccaaaacctgyctccaccaaaaatacaaaaaattatttgggcatggtggtatgagcctgaggtcccaaggaagctgaggttagaggattgcttgagcctaggagatggaggttgcagtgaacagagattgcaccactgcactccagcctgggtgacagtgagacccctggctaaaaaaaaaaaaaaattggagaaaccaccaaaaacctcttaatacctccacattaacaaattcagttagttactgttatttttacagtataattttacttgtttttactttaccttacattctcttttatgcatacatttttacagttcttatcataatatacatttcaatttctatctctaccattgttatatacttgtccatgttaatacattatcttcatagatacgataatgtaattaattttgtgaaaatagcaatttcctctccaattttgtaggaaaaaaatgggatcccttattttgttttgatttttatttatttgattactagtggagttgaagacttttctatatgcttgttaattatatttcatatttcattaattacatttcatatcttctcattatattttagagttttaatgctttttctcagtttcataggtcagtgcaagtatgtgggatataatgaatatcttaaagtgagcgttttatattttctgcagatattttatgtaaacaatggcaatcttggaggtagaaaggaaaaaaaagatctggaggaaaatgaaaatgctrtaaatagactcagctgattttataaatctgtcaagggccatctttgtttatgtggtatcattataaattaaaattaacccacccacattttttgaaggctaattttagaaatccaataattttggatatattttgtaatttttaaaatattctctaggtactatttgaacattattctaaaatagtagtaaactattgctaaattagctgatcattacttaagaaataattctttttgagataagaggcttgctctgttgcccagtctggagtgcagtggyatgatctcggttcactgtaacctccgcctcccgggttcaagcaattctcctgcctcagcctcccgagtagctgggactacaggtgtgtaccaccatgcccagctaatttttgtattttatttttataagagacagggtttcactatgttggccaggctggtctcgaactcctgacctcaggtgatctgtccaccttggcctcccaaagggctgggattataggygtgagccactgcacccggcctagaaataatttttaactgcagtatattaccttatccacagattacctgtctaattgatgtgtaatacttgtgtgcagagataacataaaacattttttgaatagtatttaatgtacaaacagtatagtaaagataacggacgtattgcttaccatcttacctagtttttgctgtatttgcatattggagtagttttttattttaaattgtaaaaaacaataaaaacattaaaatttatcttagccatttttcagtttataattcagtattgttaagtatattcacattgttgtgcaacagaagaaataagcttttacgtacctatttattttattttttaaagtccactatgatgacgcaggaacaaatccagaaagaatatgatgcactggttaaaagctcagaggaactcctcagtgcattacagaaaaaaaaacagcaggaagaggaagcagaaaggctgaggcgtattcaagaagaaatggaaaaggaaagaaaaagacgtgaagaagacgaaaaacgtcgaagaaaggaagaggaggaaaggcggatgtgaggcatttatattattttgaataagagacttaaagaaatagtgaattcttggtattgacagtggttaatgacaattatttgttttgttttgtttttgtgacagggtcttgctctgttgcccaggctggagtgcagtggcgcgatcttggcttactgcactctgcctctcgggttcaatcgattttcctgcctcagcctcctgagtagctgggattacaggtgcgcaccaccacgcctggctaatttttgtatttgtagtggagacggggtttcactatgttggccaggctggtctcaaactcctgaccacaggggatccacccgcctcggcctcccaaagcgcttggattacaggcgtgagccaccgtgctcggttgacaattcttaaaactgtgttcttattttaatgaactaattttgtaataagtttgaaaattgagagaataaggtcattttataatagtgataccataaaataattttaactataatctgaatttgttagcctcttacacctgaggattttcttctttttaaaactatgatttgtttattgttttctaagctagataaatgacacttctacttttctgcagttttaaaactgataacattttgaaagattgccatgatagggtagagagaacagatgagttgttgacttggagagggactagagggaagcacctttaatcaggaccttacagccaggctttgtaaccacattcatctagagatgttaaaagttatagaatataattatatttgttttatttaagaattattgtcaatagagttaaattttattttattcaaaataagttgatgtatgtggccaggaggttaatttgcattcccaatctgttacctttgtttattattaaataatagttaaattgccttctgaaggattctttattttctgttaaatttttgaagagttttctattttttattaggaaacttgagatggaagcaaagagaaaacaagaagaagaagagagaaagaaaagggaagatgatgaaaaacgcattcaagtatgtacttactgggttgaatttctattaaaatggaacctacaggctgggtgtggtggctcatgcctgtaatcccagctctttgggaggccgaggcgggcggatcacgaggtcaggagatcaagaccatcctggctaacatggtgaaaccccatctctacttatacgaaaacaaattagccggacatggtggtgggcacctgtagccccagctaattgggaggttgaggcaggagaatgatgtgaacccaggaggcagagcttgcagtgagccaagatgacaccactgcactccagcctgggcaacagagcgagactccatctcaaaaaaaataaaaaataaaaaataaataaaataaaatggaacctatgaaagaagtgaaaatgagatcttgatttgctagataagctgtcactagtttatcctagagaccaaaggccagtttttgaagtggttatgggaatggactttggagctagggaagtgggttcaaatccaagatcagtcactgacagaaattgtgacattgtacacattatagtgaggaactatgggtcacagttgtctctctgtagaatgtggataaataatagttgcaagcatttgacagttaatacatgttaaagcattgtgaacactgtgtagatcaataaatattaataattgtttttatacctaggggaaagtcaaatgaaaattcacttaaaatgttaagttttaaaatatcatataactttgtagatactggaattaataaattaggattaagagtctctctccacccctagtttttaaaaagtcccatgttgagaataaattgctcatgtatttgaatttctgtttgtcatggctttcataatatatcctaagcataaccaaaactttaaattcctgacatctgctctctaggtgttagtgttaatgggatgcctaagatactcatgtgatgtttgggacactaatatttrtagtcatagagttatggagctgtggttcttctaccttctcttggtcttgggaaagaggcaaaatggggatgtgtttgaagcattaatcataatagagaagaaagtagagactgaagagatctgtgcttaagcaattctttagtaaagaacttgtatgggggcagttatgctttccctttattttaagtaataaggggagtgatcaagtaaacaagtgaagaactcttggtgaaatagctttctgcccttgtcaggctgaagtggaggcacagctggcccgacagaaggaggaggaatcccaacagcaagcagttctggagcaggagcgcagggaccgggagctggccctgaggattgcccagagtgaagccgagctcatcagtgatgaggcccaggcckacctggcgctgcggaggtactggggcccctgggtggggtatagcgctctctcctttgctttctctacctctctgcctctcatttccatgcagaagggaataggagaaaataatattctgaaggccctgatatatttgagctaaaataattttaaaattatttgtatcgactttcatactcaagtgaatgagataattgatttttcatcatattattaaattgttgacaaataagactaaaatttcactaatgagtactctattaagaaaatatatcaacctttaccctgaaattgtttaagagtatagtatattaggtagacacctaatttctaaatacctgtcatcaaacactggcattgaaataagtgactgtgttatataatgcagtgtaatgtatttgtagttgakatttttctaatgcaaaaaaatttaatgtattaaatatcctgtcagttgaaatgagaactctactctgcaatgcctcagaataaatgagtttccctttacaagaagggagggttaaattcattgaaatattttggcttcttgggtttctgaattatctctaagcactccactatagtggagtgtataggaatgtggaagctcttattaaaagttgcagaaaggtttaatagattcagtttaaaaaaatttagtatgtagaggcattaattattttgattatttataataacaaaactaatttgtaaggttcctttgtatgtaggtatatatatgttgtatatatactgagaggcacatagacacatgtaaccatgcttttccgagcttaaaagcagtttatgacaaaatatagagtacaaccactagatggcgatgtttccttgtgaaaggatcaaactgcaatgtaatggaatatttggcaaaaaaacaaaagacggggaaggaaaagggcatattgagttgccttcatgctttttctattaggttggtgcgaaaataattgcggtttttgccattgggaaaactgcaataacttttgcacccaccaaatagtatgtgattgtattggggagctctgggactgcttgtatatgaaagtacattatattgtaaatgaactgaatatggctatatgaacaaaagatgttataattattaagctcttgggtttgagtccaatatttgggctctttattaagatttcactgtaattaaaatattttggcccagatagggcttttataaatgcagactcagctcagctgctgttctgttccttccacctgtgttgcatcagaatgattgggagtctttatgtgtaactgactagccgcctagggcaggctcttaaacgaaccaaactcttacagctgctatccctgatgtctgtgaggaagtactgcagttgacagagttgattttattatggcagaagtcaatttctaagggacttgttaatggagtcattgttggtactcatcatcaagctttrtatttatgcacttgaaatgttaagctgtatccagtgccattccatatactgtatacaagatactgtctcatatgtggaccccttcccatcttcagaaaggtacatgtcttccaggttgagaagagtggatcgtttaggacctttaacataaacaagttacctgtaatttaaattaagcagaattagctaggtaatgggaccatattaagtaatgaggagatattcaaacccttatgacctgaaaggcagaagagctagttttagttatgtggttcaggcctaggggtggtatgaagaatgcccttcaaatcctttctgtcagctctccaggaagctttccctgaccctcaggtcctcatgagctccttcccttctggtcgtcgtggttattttatactgtgaactacaagcattagcacttcattatgaatgatgttctatacagatatcacatgtttgatagtttaatcttactccatgggctatagctaaatgtttttgaatgtttattttacctttgttagcactgagttttttctctaacaaatttatgagtaagaactaagtaaactgttcttaatctatagcatgatgttgttgggttctatgctgtgttaaaaaatgtatatattatagatagattctgcttcaataagcaattttaagttacttttccagcttggattcctatccggtaacttctaagtaagaattgttttckatgtatgtcatatgttctgaaatataatttcaatcaattacacatatgattcttgatgcaaagagatggtttcaaattacctaaaattgtaaaataatatccagattctattaaaaacaaacctcacaatatatgaattttctaatctagatgtartgtatttgctctttaattttcactgcatgccttattttccaatcatttttaatgaatacttaaaaatrtattaaaattctgagtgatctcatgttgattacaaataattgagtttttaaaatcaatgagtaaagtaattgaaacacaaatttgcacaatccagattttcacagttcacaattggttacgatattaactaaaatatattcttttcacagaaatgatggaacaagacccaaaatgacaccgtatgtcacttacctttacctttttaaaaataggttgtagatactttttgggagtagttttctcattggagtaaattttaaattattttcttctattgaaaggtaatgagataacctttttcatatttttcttgtctaggaaagtttaatgctcttgtatggtgctcaatcacagtagctcatgatttggtttccttctttgtattgtctgtttaaactataatgtaacacctattttgttttatgtatatatatgaattttttttttttttttgagacagagtttcgcttttgttgcccaggccagagttcagtggtgtcatctggggtcaccataacctctgcctctcgggttcaagcgattctcctgcctcagcctcccaagtagctgggactacaggcacgcaccaccacactcagctaatttttgtatttttagtagagacggggtttcaccatgttggccaggatggtctcratctcttgacctcgtgatccacccgcctcggcctcccaaagtgctgggattacaggcgtgagtcactgtgcccggcctgttttatgtattttttttaaactgccccttaccttacttctttatagaagcaggtgtggaggcataaataataataaaatatttgattttcagtatatatggtagttcattctgctatatctaaaataattcatcatctgaaattgtatatgtagtgctaactttggtgctaatgtatctttttcatatgaaaatctacccacaaagaatccaggtaacatttggaatatacattttgtttatataaaatataaaacatattttgtatgtatgttatgtatactacatataaggattttggaatatatataaaatctttattttaacagctttaaggactccaacttaacatttatgatgaggattctcaactctatcaggctccagtcccaataacaattttttaataaatgatgcaacctatgtaaacaactctccaaacaatatatgtaaaggagaaatacaaggatagtcatttataataaaatgtttatttaatatgaaagtgcttctgcataactgcagtagaagacatgataagcgatcagatgtttttgcttacgtatagaatcaccacgaatgctgtatctacaaatacaaattgatataggaatgttgtgttgggcattcacatgccatgaaattgtgaacaatcctttgtgaagttctgaacagagccaagtacaatattctctcaattacacagtatttgygtaagccctagacaaattctgtgaatattaaaggcatgcaaaaaatacgttgtttacatgtataactttgtttacatgtaaaatatgtgtttgtatgtgtttttcacctctgtatgtctcacagacatgttaaagttaaatggggcatggagtagttcttccttgggtaggacatttggcattcctttccccttacctcagcagatgccaggagtatactcacacattgttgttaccacaatactgccccaaattttgaaaatatctctgagtgggcactcttgccctccattgccacaactgctttatagttaccatttgagcttgaattaaataagcccgcaatcagtgtctaaggtgaaattatatttgcatatagtttggtaaaatcagaaggaagaaagcacctgggtgcaggaaccatttctgtctggcaaatttgttgcagtgtattggtctaggtcaggtgtatcttgatgcagggtcagggaggataatgcatcagtagagattgccatccattgtagtgtcagagcatgcagaaaaacacctgtgtgatcaacagacccagtggtaatgagatttgaaagtccatagactcccttaaaacctaccatgggaaaagaaatggaggaagctttaggagaaaaagatggtaaaaacagatgctcttgaatcctgagacaaaaaccttgaggtggagtgataatagaattaaacatacttatcaaaatctgctgcatttaaaagtgagacgattctgagaaactactagcttgaagagagattgataaatgtattgctcaaaagataatttttattagattgtatttgtgttatattttgtttttgctgtccttcactgtcagctttgaaagatatcttgttctctgactgtgctttcatagacctccatccatacataattgtagacagtgttcattacgagaaaagaggaatacaggagtgytctactcctttagtcagggtcccagctcttggcaggcattcaggaaattgcacctggaagcaartacacccatcttcttttcttatgattttactgatttggaagggtttgaggttactagagtttgatgagtagaatgaatgagaaaataattacgaaggaaaagagcaaatagggaaataagttaaagaagtgttgatgaacactatgaaacttcattctgttttaaagaattaaacaaaatttgataaaagttacactcttctgggtaacaaaagcaaaataagttttttgcctttggcaaatgtttatccctggaaaatcagaatgcctsagatctttcattagtccattttgatattctttttcttaaaagcatgctttgatttggaatttttagagctttgaatacatcagattctttttaaaactctgacrctgtcaaatacatcagcttgtggttttcaccattgtgccttatctaagtaatatttactaagcaactctggtgcaaaaatcctcatatggaatctatatcttgccaagtttcctgtatggatttagaccatgttatttgtattctatatggaaaagaataccataaaagctttcctgagattttatctaaaagttgctactgcaaaaatggagagacattcaaataacttgaactggatttaaacaaaaatttttctgtgtgttacggctagatttgttgaatagtatattctaggcattaacaaagtaaaacagttatgaacagttgwtaaataatattgaaaatatatattttaattatacttytagatcttttaattaatttatgtagtatgacttttatgtaaccatattgtattatcgtttttcttgtagggaacaaatggccaaagaaatgtcagaatttttgagtaggttagtgcagtgtaattgggggaaataagtgttcacctcaaaatcatatttttaaattacttttgattatttggaccagaacctgttacatgagtagcctagtctttctatgtaaagtgatatttctttctgtacaagaaatatcacttctccctcaccccacccaacaaagaaaaagttaaaaaccagtattccttcaaagtcatggggataccattggcattttgaatgggacagttcccttggcagtggaactctactgcttatctctggcctccaccaactcagtctcagtaggggacttcttcccctcatcatgacaaaatgagtattttgcaactctccctggggtggtgctgcccctaatttgggcaccactgtgcgtcgttgaagaggaggtagaggaagaacatgactcttgaggggctctgcactgtggcacatggtttgaaaaccactggtgtaaattgagccaccagcaggatctggtccattacttttataaatggatatgattcactaacatgttaattcttaattttgaagttacaaagataattaaaagtgttaatatattaacacttaaaaatcagtttgctactattgtattctttacatgattgtctttatagcaagtctgaataatcagcaaattacccctttactattttagtaactccagagatgggggtggggaaacatttaaatgtgttgcattgatgtacttctttggatgctatgttttttagtagatgtacttttgtttgaggtaataggaatgaaaagttagggatattaaaaccatattttaagcaataatcatttgaatttaatgtaatttttaaaagtatcaaaacacattttacatatattctaataccttatatacattctgacaattataaaactgtatattatgtcaatttacctcttctttcaaaagaaadcaacaaaaacaaaacttaataattttcagctgccctcctagaaaagactcccagaacagcttaaaaataaaaggattttttttgtttattgattggtagtttagggatgtagaaaagacaaataatatttgaataaatataaaagcataatttattgttaaggaaatgagagaccttgctgatacacagctggccatttttgagcaaagcaattaagaccaaaaagctacatggaaaattgccacttagaccgcttatgaaaagtatagattctgcaacaaagctaaaacagattttaatcataaaaatacaggaaggactaatggccacacattattcttttttttttttttcttctggaacatttttttaaaaaaattattattatactttaagttttagggtacatgtgcacaatgtgcaggttagttacatatgtatacatgtgccatgctggtgcgctgcacccactaactcgtcatctagcattaggtatatctcccaatgctatccctcccccctccccccaccctacaacagtccccagagtgtgatgttccccttcctgtgtccatgtgttctcattgttcagttcccacctatgagtgagaatatgcggtgtttggttttttgttcttgcgatagtttactgagaatgatgatttccaatgtcatacatgtccctgcaaaggacatgaactcatcattttttatggctgcatagtattccatggtgtatatgtgccacattttcttaatccaatctatcattgttggacatttgggttggttccaagtctttgctattgtgaataatgccacaataaacatacgtgtgcatgtgtctttatagcagcatgatttatagtcctttgagtatatacccagaaatgggatggctgggtcaaatggtatttctagttctagatccctgaggaattgccacactgacttccacaatggttgaactagtttacagtcccaccaacagtgtaaaagtgttcctatttctccacatcgtctccagcacctgttatttcctgactttttaatgattgccattctaactgatgtgagatggtatgtcattgtggttttgatttgcatttctctgatggccagtgatggtgagcattttttcatgttttttttggctgcataaatgtcttcttttgagaagtgtctgttcatgtcctttgcccactttttgatggggttgtttgttttcttgtaaatttgtttgagttcattgtagattctggatattagccctttgtcagatgagtaggttgcgaaaattttctcccattttgtgggttgcctgttcactaggatggtagtttcttttgctgtgcagaagctctttagtttaattagatcccatttgtcaattttgkcttttgttgccattgcttttggtgttttagacatgaagtccttgcccatgcctatgtcctgaatggtaatgcctaggttttcttctagggtttttatggttttaggtctaacgtttaagtctttaatccatcttgaattgatttttgtataaggtgtaaggaagggatccagtttcagctttctacatatgdctagccagttttcccagcaccatttattaaatagggaatcctttccccattgcttgtttttctcaggtttgtcaaagatcagatagttgtagatatatggcgttatttctgagggctctgttctgttgcattgatctatatctctattttggtaccagtagcatgctgttatggttactgtagccttgtagtatagtttgaagtcaggtagtgtgatgcctccagctttgttcttttggcttaggattgacttggcgatgcgggctcttttatggttccatatgaactttaaagtagttttttccaattctgtgaagaaaggcattggtagcttgatggggatggcattgaatctgtaaattaccttgggcaatatggccattttcacgatattgattcttcctacccatggatcttccatttgtttgtatcctcttttatttccttgagcagtgatttgtagttctccttgaagaggtccttcacatcccttgtaagttggattcctaggtattttattctctttgaagcaattgtgaatgggagttcactcgtgatttggctctctgtttgtctgttattggtgtataagaatgcttgtgatttttgtacattgattttgtatcctgagactttgctgaagttgcttagcagcttaaggagattttgggctgagacaatggggttttctagatatacaatcatgtcgtctgcaaacagggacaatttgacttcctcttttcctaattgaataccctttatttccttcttctgcctaattgccctggccagaacttccaacactatgttgaataggagtggtgagagagggcatccctgtcttgtgccggttttcacagggaatgcttccagtttttgcccattcagtatggtattggctgtgggtttgtcatagatagctcttattattttcaaatacgtcccatcaatacctaatttattgagagtttttagcatgaagggttgttgaattttgtcaaaagccttttctgcatctattgagataatcatgtggtttttgtctttggttctgtttatatgctggcttacatttattgatttgtgtatattggaccagccttgcatcccagggatgaagcccacttgatcatggtggataagctttttgatgtgctgctggatttggtttgccagtattttattgaggatttttgcatcaatgttcttcaaggatattggtctaaaattctcttttttggttgtgtctctgctaggctttggtatcaggataatgctggyctcataaaatgagttagggaggattccctctttttctattgattggaatagtttcagaaggaatggtaccagttcctccttgtacctctggtagaattcggctgtgaatccatctggtcctgaactctttttggttggtaagctattgattattgccacaatttcagatcctgttattggtctattcagagattcaacttcttcctggtttagtgttgggagagtgtatgtgttgaggaatttatccatttcttctagattttctagtttatttgcgtagagttgtttgtagtattctctgatggtagtttgtatttctgtgggatcggtggtgacatcccctttatcatttttgattgcgtctatttgattcttctctctttttttctttattagtcttgctagcggtctatcaattttgttgatcctttcaaaaaaccacctcctggattcattaattttttgaagggttttttgtgtctctatttccttcagttctgctctgattttagttatttcttgccttctgctagcttttgaatgtgtttgctcttgcttttctagttcttttaattgtgatgttagggtgtcaattttggatctttcctgctttctcttgtgggcatttagtgctataaatttccctctacacactgcgttgaatgcgtcccagagattctggtatgttgtgtctttgttctcgttggtttcaaagaacatctttatttctgccttcattttgttatgtacccagtagtcattcaggagcaggttgttcagtttccatgtagttgagcggttttgagtgagattcttaatcctgaattctagtttcattgcactgtggtctgagagatagtttgttataatttctcttcctttacatttgctgaggagagccttacttccaagtatgtggtcaattttggaataggtgtggtgtggtgctgaaaaaaatgtatattctgttgatttggggtggagagttctgtagatgtctattaggtccgcttggtgcagagctgagttcaattcctgggtatccttgttgactttccgtctcgttgatctgtctaatgtggacagtggggtgttaaagtctcccattattaatgtgtgggagtctaagtctctttgtaggtcactcaggacttgctttatgaatctgggtgctcctgtattgggtgcatatatatttaggatagttagctcttctttttgaattgatccctttaccattatgtaatggccttctttgtctcttttgatctttgttggtttaaagtctgttttatcagagactaggattgcaacccctgccttttttttgttttccatttgcttcatagatcttcctccatccttttattttgagcctatgtgtgtctctgcacgtgagatgggtttcctgaatacagcacactgatgggtcttgactctttatccagtttgccagtctgtgtcttttaattggagcatttattccatttacatttaaagttaatattgttatctgtgaatttgatcctgtcattatgatgttagctggtgattttgctagttagttgatgcagtttcttcctagtctcgatggtctttacattttggcatgattttgcagcggctggtaccggttgttcctttccatgtttagcgcttccttcaggagctcttttagggcaggcctggtggtgacaaaatctctcagcatttgcttgtctgtgaagtattttatttctccttcacttatgaagcttagtttggctggatatgaaattctggattgaaaattcttttctttaagaatgttgaatattggccccaactctcttctggcttgtagagtttctgccaagagatccactgttagtctgatgggcttccctttgagggtaacccgacctttctctctggctgcccttaacattttttccttcatttcaactttggtgaatctgacaattatgtgtcttggagttgctcttctcgaggagtatctttgtggcgttctctgtatttcctgaatctgaatgttggcctgccttgctagattgggkaagttctcctggataatatcctgcagagtgttttycaacttggttccattctccccgtcactttcaggtacaccagtcagacatagatttggtcttttcacatagtcccatatttcttggaggctttgttcgtttctttttattctttttattcttttttctctaaacttcccttcttgcttcatttcattcatttcatcttccatcgctgataccctttcttccagttgatcgcatcggctcctgaggcttctgcattcttcacgtagttcttgagccttgattttcagctctatcagctcctttaagcacttctctgtattggttattctagttatacgttcttctaaatttttttcaaagttttcaacttctttgcctttggtttgaatgtcctcccgtagctcggagtaatttggtcgtctgaagccttcttctctcagctcgtcaaagtcattctccgtccagctttgttccgttgctggtgaggaactgtgttcctttggaggaggagaggcgctctgctttttagagtttccagtttttctgctctgtttcttccccatctttgtggttttgtctacttttggtctttgatgatggtgatgtgcagatgggtttttggtgtggatgtcctttctgtttgttagttttccttctacagacaggaccctcagctgcaggtctgttggagtacccggccgtgtgaggtgtcagtctgcccctgctgggggtgcctcccagttaggctgcttaggggtcaggggtcaggggcccacttgaggagacagtctgcctgttctcagatctccagctgcgtcctgggagaaccactgctctcttcaaggctgtcagacagggacatttaagtctgcagaggttactgctgtctttttgtttgtctrtgccctgcccccagaggtggagcctacagaggcaggcaggccttcttgagctgtgatgcttcccagttggagcttcccggctgctttgtttacctaagcaagcctgggcaatggcgggcgcccctcccccagcctcactgccgccttgcagtttgatctcagactgctgtgctagcaagagactccgtgggcgtaggaccctccgagccatgtgcgggatataatctcctggtgcgccatttttttaagcccgtcggaaaagcgcagtattcgggtgggagtgacccaattttccaggtgccgtctgtcacccctttctttgactaggaaagggaactccctgaccccttgctcttctggagtgaggcaatgcctcgccctgctttggctggcgcacggkgcgcgcacccactgacctgcgcccactgtctggcactccctagtgagatgaacctggtacctcagatggaaatgcagaaatcacccrtcttctgcgtcgctcacgctgggagctgtacatcagagctgttcctattcggccatcttggctcgtgcctccacattattctttagctagtcttatatgtaactaagaatcactatgtcaaagaattttaagtatgtaggatgaagtatgctattttttattttctagaatgaaagcatacagagaccttttaaagaagcaagggcaccttatttatttcattgttaagcttagtattgaaagaataatttcctttacttcaggaagaaagtgacatattctcagacatcatttttcaattaagtatgtgtcttcactgcttgccaggatggctgttatctttcaaaatgtaaaagactgagaaaatacatgtttattttcaggtattatatcttgatcaatcctctttaagaggaagtatattttaggtagtaggtggataatggagaatttccttgtgtcacacctaagaagcaatatttttgttctttaatagttagttagtttaatattttgtgccaccttcttttcatgtcttgaaatgtgatgtatttaaacgcttctcgttaccttgagcttaaagtcttgcagcttattctgagtgtctgctatttgcaagtgtaatcttttgctgaaaaataagtttattattacagaaaagaaattgttcccatattttctgattaatgatctcaarttatatgcataaaagtcttaaaggccaggtgtggtggctcacgcctgtaatcccagcactttgggaggctgaggtgggcagatcacttgagctcaggagttcgagaccagcctgggcaacatggcaagaccccatctctacaaaaattataaaaattagcctggcttgttggtgggtgcctgtagtcccagctatttaggaggctgaggtgggagaattgcttgagcccgggtggtggaggttgcagtgagccaagattgtaccactgcactccagcctgggtgaaagagccagaccccttctcaaaaaaaacaaaaaacaaaaaacaaacaaaacgcaaaaccaaaaaagcaggccttaaagcactgcgtagcactgttttgaaaaagttgaatttatttcattttattgactgctttggattttatttctttcctctttccccatatgtgctactaaatgagtcatgatacagcacttgtgccctttgaaatctctgttatttacctcatgagctaaaacctcttgaatttactagttttcttattacttatgagggtgtgttttttgtgtgcttatagaacttttctaagtgttcttatagcagtgaagcctacaaagtaagagtttccagattccatccrttcttttagctgacttgaatgactctaatgcagtgggttgcaggtttggctacttacctatgtactctgtaaacatccagaggcccagggatattctgagccactgtgtgtgaatggagtttggccatctgtagatttccgcagtctctccaggtgatcgcactgtgcagcctcattgctcataaacaaaactttaatatgcttttaatgatctttcaagtgtgttgagratttctttcttgattttgaggaatatatgtcagtatatttttcaactttaagtgttcgtatatatattagtaaaaacattgaaactgaagtctgggggaagtttgtggaactagaatattagaatcaaaagtttggatttaaaatctaatgtgactatcgagtggcatgctggaaatttttaatttatttggccatcttttagtatgccattcttaatctcatctgtcaaagaaacaaaaattatgtttttctagtagctgtttccggttttcaaacttatgcatgctttcttgcctctttagtcaatgttttcttcatgtttctggtttaaacatgcaaaaatgtgtaataattacagaggtcctgctgtactagccaccaaagcagctgctggtactaagaaatatgatcttagtaaatggaaatatgcagaactacgtgataccatcaatacttcttgtggtaagtgtttggagaagatcaaaaatagaaaatgttcatagtgataggtgataaatacctagattagggtgaggtgtgtgtgtgtatgtgtgtgtgtgtgtgtgtgtgtgtgtatgtgtgtatgtacatataatacctatattatctgaatcttttggtccatgaatgcacagtaacaaatggcaatgcagtgctttctttttaaggctatttttcttcccacagaacaattagagtaaaatactatatccagaggatcccacatagttatgttcttatttaaatcacagtgtttgagttcagaaaactatgagtaggaacgatgaattcagaaaactatgactagaaacaaaagtatcataattgtacataatttctcactacactttcctccattgagtatatctgcataattataaaaaatgtcttgcttgtaaatctagtttgtattttatcacagtgactttttattctattgtcaagacttgttgccttcgacaaattgcttaatgtttctgatgcaattccttcatataaaagacctgtttagttcagagttcttctgtggagcagatgatataagatagtaacactgtgtaaagaaatgatctgtgaatttgaacaataatattataaaatgcttatccttatgaataattagcttacttttgattttgtaccattaatttaaaaataaaaaaatctccttatgcgacagaataattatatcattatgttagacgaataaattaacatgtcaattttttttttttgctcaatgtaatcaatagatattgagctcctggcagcttgyagagaagaatttcataggagactaamagtgtatcatgcttggaaatctaagaacaagaagagaaatactgaaacagagcaacgtgctccaaagtctgttactgattatggtaaagagaaatctgtacttttgaacgttttaaaatatatgtatataaatgcatgtatctgtacttaagacatgggtaaaatgtcccatataaattttctcctattttagaactgtgagccattgaacctaatacagccttgatggcctatcttttatagcgttatttttatgagtatgtctttaaactcatacttgttaagatatattgaatttactataattgagacaagaattttcttgtctgaagagggtgtgcatgcataattttcacacacacaaacacgtgcacacactcacaagattaaatgtgaaaatgtcaggattgccatgcatcttttaccttacatgtgaaatgaattttacatatgaaaatgagttgctaaaaaggatgatggttagtttttatttttaaattttctataatttttattttttaaataaatagagatgaggtcttgccattttatccaggctggtctcaaactgctgggctcaagcaatcctcctgccttggccttccaaagtgctaggattataggcatgagctactgctcccacccctttttctaatttttaaaatttaatgtagctcagtttttagaaatagttccctgaaatacccaatattgttatcttttttatttgtaggtataagtacttttctgttgctcccagaatagggttatagcctggaaaaagaaaggaattgattcatgcattgtccatttacactctaattcctttgtttcaaaaataattttactgcaaacattattttacaatactgcaaatatataaaagtgagaaatattaccttgcttcagactagtgttttgcctagatcaagatttgattttttgattgggatcctgaacatggattttgttactttgttatgcaaaaggccaaggtgtatacttgaaattggaaagtagagtagaagagatgtaacctagtacaagcatgcatgagctttaacattaactgagaatacgtgtgatatgcgagttgtaatttcaatctttaaagcaataattggacttactgtgttcaaattggcacaatttattcgcttaattctggttaacatcaaggtgacagcagattcaatattttgtgtgtttttttcccctaagcggtatattcccaacagttgatagtatagtttagcaatgcaggacccaaattgacttaaaaaatgagttcttggttatattttgctttcctcactaccttccaagtaaataaaagcagtgtttaaataaagtcaatttaatagtggaattctagtgtttctaagttgttgcaaagaatagattgagtgagggcaatattattattaataggggtaatattagtgccagttattgctccaggggtgtcagtcagaatacaggactatgcaagggcagtgggagatcacttgtaaccaagaagtggcaggtggaagccccactaaatattgtgacactgctctcttctccagtttcatatttttcctcttctaattgaacacaacaaaatgattacattagctgttcactgtctgtgtagtgagttctgaccacagattacctttgttttgcaaaaaatgacagtgagctgttctttttagctgtaaatattataattactaactttagcttgacagactttcattatattgtatttcaaaattaatacatctgagtgatcacacttcttaaaaagaggttcatgttgtaatatttggcacacacattttaaattaatgtacacatatttattgtatttgtgactcaaactttgataccttattcatctagctttacccaaaaaagttgcaaataatacgtggctcaccttgctggttcaactactgtttctgtttgtaatatattatttaagaaaacaaaagagtagattaggaaagcttcctaagggttctatcaaggtttatggacaaatttaggaatttatgtgaacacaaccccacacatacatattaagccttcagagaacttgattatgagtcattttcaggatatattttatcaaatgtaacttctgctctgaaaagtacttttttttgcttttctctttctctttatgttcttcctcatacaaaattcatcttgacacaggagcatagctaaaagcaaaggttaaagagcaccaagaagctcaattgagaaaattctatacttaaatgatttcctaatgtggcagctaaacaccctttaaaaggaagtgctgtgtagtctaatatttagaaggaacaattcattaatttgagaaaataaaatgatgacaacttatgattaacaaaaatgtagcttcgtattgttgacttaaagagtaataggttgacagctaatggtaaactcttaaaataatgcataaggagcctcagaccctcttcctggtacagtcctggatgagcatactttcatctcatttactgcagagggagattttttagaaataattttttggtcagtggcaaatcacctagtaaatatttatagtaattaattgtttaaaacaatgattttggaaagtagttttattttatagtttataaaataaaaatggcatgagtttaagatttagagagtttaaaaaaagcaaaacatactgttaccaaaacgtagtaacgtttttactcctgtaatgtatataattttttgatgaattctcattattttctatgaaaattctagtaatgtatgaaaggtactataatgtctattaagtcattgtattaggtttttgtttggatatgtgttccaaaaatcacaaatgaagtatgattttttaattttggtcctctttatatgtgcttcaatcagaatttcctaagcctaatgagtcaaaatagccttttaaaaaaatcagaaagcagcacctgcttttaggtaattctgagaatatttggcttgtggataggatatttacttttcagtcaccacctcgattggaaggctttataaattagaaaaatgctcatttaacagttttggcatttttatcttttcttcaacataaaatatttgttcacagattttgcaccatttttgaacaattcacgtaagtcaatgggtggtaactcatgagctaactggaagatgggttaaaatactttacaaagtactaacttctattaaaagttgttttgctacaattttcagtggaattgtagtgtgttaaagttgttatatccatactaagatatattttaatttgagatgatgctttatttggatcactccaatatgtatatgtattacaraaaatctagtgaaattaatgttttatcaaattacttgcattaagaaaatgactagcattttaaactgagagtatgtacarttcttattgtagcaaaactcttaacatagcagctgaccttttagaataaagactaacttttagrtgctggtttttggttactgtattttcaaacactgatggtgtctgcatttctgccaaaggtattttagttttatagataatgtgatagtgtataaaggtttaataatgatacctccttaaataggaagaggagattattctgttacgtttatagcctcttatgatacacattctttgataatttaaaagctttgagtcaccttagtgcacagtaaatctcttgtagaattagttgattagtaatgatttggatataatgtcacattcatttgccaactggttggacctgatgttttgaagtgcttcttataatttataaggctgtatttgaagattacacaattgaatgtgaaggaaagttatttagaatattagtttcaagcttttaatgtctgtktctttgtgtttttccagataagtattcgtttctagtcttccccaacaaaatttcagttctcctgttagtaagaaaagctatcaaagactttctatttagtttctgaattttatccagtatcttaacttacaggagacttacttcaaattaaaaagtaggttaattaatgaatgactatcagtatcatggtaaatttcctgtaaactggacattaaattctaattcactactttagatggagggaaggtttttaaattcttagttttgaattagtacattttcaacaatgtagggagttttgaaaacttaaaagtagaaacactgaactgtaagtagctctgggaaaacaggagcaaaagaatagataagcagatgtctgttaatatgtgatgcagcttttaaagttactaacaaaaccrggcctctcgttccttcatagggatatatagctttgctaactgctttttgctttctctggtttgcaaagaaataaattcaactgctataaagcttttgctatttcttggtgtaaaaagtagagtaagagtattttcatcctttcagtatttgcaaattcttacagaagccatgtggctcttcttggctttatatcatatgtacattttacaatatttctttgacacacttggattttcatagtgagactcttaactgagctgctgtaartggttgttccacttttgaagttctgtgagtataaaacagattaaacaggctaaccaaaattatgctgctaaagatgtaaagtcattgccccagggaaatgtttacatttgcagataaaakaaaaacctaattgttaagtaatgaaaattgagctaggaatgaaagattgatatgaatgaaatgcccagtactagtagaaaagcaaggatttttcttttcttttggcaaggagaatcaaatgttacatactttgcacttcattggattttattctaagagaaatctgatttcagagtaagtaaatatctttaagggaaagtttatgcttactgttataaggttttttttgtcatatggttgtctaaatgttgttaatatctatgtcattgtggtcattttaaatcctaaaatttgttgrcaaaagaaaaaatttttatatggcttctactttttgtggaaatagtgattaaactgacaaatgtctacatccttcagatttttgaaattactgtttattttgttctatcataaatagttgaataaaagttactgtacaaatttgaactctttacaggaagaatataaatctagtaaataatagtagtttgttttcctgccgtgtgagtttattttaggttactgttacagtgatttgtgggaatctgacaggggtttgttgctggtagtggtggtggtagtggtatgtgtgtgtttgtgttggcaatgctaagaaacatcttaagggaaagacaattctaagaagtaacactctgaattttattaatttgtaggcaataaatattttcattttgttttaaatttactattagggacctttcttctttttaaaaaattattggggtatattttaggattaaaggctcttttcttttcccttgagctgctggtataactttccttgttctgtgtaatagctcagcaaaacccagcagctcagattcctgccaggcagcgggagattgaaatgaacygacagcaacgcttcttccgcatcccattcatccgccctgccgaccagtacaaagaccctcagagtargaaaaaaggctggtggtatgcccattttgatggaccatggattgcccggcaaatggaactccatcctgacaagccacccatcctacttgtggctggtgtgtatgattcacatggaaaacaaattatagaacaaaaaagatcataaactctctgaatgaaacattctaatgtataatataataatttattacatttcagggttgagggatggagtcttgcggttaaatcacatttccagttcagtgaggattaactcatttataatgtgaaattgcttggattaaattatgttcttagcacatagaaacttgtctgtatcctaaaaacctttccatttgtgtttcatcatatccattgatttgtagtggcttgaggaaatgtagcatttttattaactctggtaacttgtttgatcaatagcagtgtttattaatattgaaagggtccttgatgggggacaaattttaattgtttctggtgattttattaagcagatttccatcttagagaaaaagtcttaggaagttttcaaatctatgagaattaataggtatttcaggcatacaactggtaagaaatggtcctgaagagagagatggtaattttctgatatctcatgaatacaggtaaggacracatggagatgtgtgagctgaatcttgaggagactggcctgactcggaagcgtggtgctgagatcttgccaagacagtttgaagaaatctgggaacgctgtggaggcatccagtaccttcagaatgcgattgagagcagacaggctcggcccacctatgcaacagccatgctgcagagtctgttaaagtagatgttgcacacyagccttacagctgggagcctttgccatggtacttaggtagggtgtgtgcccccagatttaaccattccataatcatgttagagttacttctataaagtgaacagattttattaatcacggyttttggtgaatttgtttaaggttaattatggtagcaaattttggacctaaacattatttttctgtatcccgctgtaattcccaaaactctcattattctctaactattacacatgggcatattctgatgtttctcatcctttgccagaagactaccttacatccatcgtaattgttctctaggaaaagagaacttttttcaaaattcaaaatacttyttaaggatggcacagtaccatataactggagtaataaaacatgagcttacattcttacaataactaaaccacttaaaatgatcaaggcactaatgttttggtctgaaargctgtgtactttatagacattttcagacatttttggaaatttccattaaaggtggaaaatctatttttttcctcctttgcagtgtcttagtttgaatgaaacacttcgaagttctagaattctagaaagagccttaatgtatttgatgtattctgtgataagaggtactaatagtatccagcacagatttgcttttctttgctagcacaatgtgtgttgctgtcagaatattctttttatattctgtggaaaaataaaggaaattcagattgtttaaatgcctaaaagttttgagataagttttgtttcaattagaaaaggaaataggttttaggtggcatagtggcttaactggactgaattcaaatattctttcaacttcatctcaatagtgatttttgtatcagaatcttgtccaagttgtttcattgatttagtaagtgttctgcttccaacatctttmtttttaagaaattcctagtgtcttttttggcctttgaggttttggtaattgtagacctgtttcataagctttgtaattcagaaatccttgtatttagtaagtgcttgttttacataactgataattttaaaatgttttctttgtgtgctgttagtattgattcaaatgtcagcagctttaagcctaatatttatgactttcacatttggaatttaargacaaaaatacatcaaggagttatgctgacataattctaaggagttttgttgtattttagaataaaattataaagtaaaatgattctctgtactgctttttcccccagtttttagagaccctaacctttgaaatgaaattccagtgatttcttttttccctagaaagattacctcagttagggaagtatttcccagctgactagtgtttgtgagccacagacactgtcttcagaattgcttctctcatgtcttagtagagaaatatttatttattatgatacattcaaatgattgtcaagttaaattaaatggttgtgtctgtgctattgagaatgcaaatgtgattatcttttgaaggctgtattactgcatagcttcacccaccctcgggtcatttcgtccctgtgattggggacagaaggtgtagctactgaagtaaatgacctattctctctcttccatctctcgcctttaactggtgtttttatttgtgtaggatagtgaatgataagcttttttcctaaccagtagtgagtaaagttcttgaacaaaatttagtagccaaattgttttttaatgacatgtctctttagtacaatagttttgtgtatcttttagatacattaataggcactagatggaaaattaaagagttaaacatatttaaatgagagaatctaatgtttcagaaatttgtaagaaatgtatcacagcaaagggttgttataagtccttagtttttgactctaatagttaatacaattatagttaatcttaagccataatgtttctaatcatgtcacacagctgtcctagaacttatctatttaaaatagtttcctgagttaattttggccagcagggcaactgccctaattcagatagatttacagtaacctacgtacagtagatgcacatacacacagacacccctttgctggagaaacttaggaccctgtcagccttttaaaggaaacagcaggagtggtgtcctaaatgatgttcatgcagctgctttaccatgttcacagtcaagcccatgcatgccaggttaaaactgtggaaatcaaaagtaaattcactcatattttaatcattttaactgagatttaaaattagaagtttaaaccactatatataaagaactaatcttttcttaataccagttctttccatagcatatgctttgcaaaggcagcatgcataaaatatttaaaatgagaggacagaatgttttcacatttgattcaattttaatataattcctaattgtggtaacacagttgagatatgtattatgagttatgggaactaattgagaaaaggaagttactctaatccacgtatgttaagagaatattgagttttcttagttgtaaagttggggagatggcaccttctcagaggattgtgaaaatatgaggaagaaacaaaacagtgcatgtaggagcacagggccacacaaaggcattctattgttatgctcattctgcttctgtaatgacttttcataggtcattcttgtgaaccattttgttttgcaagcaaccaaggaaagaacatcttaagtggaaaatcagtggtggttgtgaacacttagagaatagcaatccacaggcaagaataatggtattgtttgtagagctttattaattggatattttttaaaagacattttcattcacaggtcattactatggttctcagcgatccaaatatgtagatcattggttttttttttacctgaagtagcttaagagtacttggatcagtagaataaatatttattgaatcaatcagtcagccaattaatatgatgttagtgatagacctgcctccttttatggaagaggtaacagatccagagaggtcaagtaatttagttgtagactgaaaaatatatcaaagcctttgctgcaatcatatgtaacaaaaagaaccaaaacaaacactttttagtggcacctgtggatttacaaagggttgcctctctgtcattccacaacttcagaaggtgtgacaggttttccctatttatcattaccaataataacaagtattgagagttttaaaatttctcccagaagataaactaacaaggatggaaggggagggcaaaggatatctaaacatgagaataaggacatgttagagggggggaaacagttgtaacaataaggaaagagaagagcaacagtggaagagacaggttgtgtgcccctaaagattctgcacccccagtttggaaacactgatacattttaggacacagagcactcctagatctctacgaaattttagaatgaataatgtgtaatttataggatcagaacgtatggttattaaaacttggatcaagatatgcccggtgtatacattcttagcacataggaatggcactgccatactggagaaggtcagcagtaaataggcattctgtacataagcctcatggaagggtaagatggagagactggcagaagtagcacctactctgctgggagcacttctctgagtacgctttagttcaattcaaatcactgtattctttccccattgctaacctaatatatgaaacaagcttagctgtctcagaagtttttcaagagatgatcaggaaaaattaatgcacattcaaaaggagaatcttcagtacaaatttgtttttttaaaaatagatttagggctgggcgcggtggctcacgcctgtaatcccagcactttgggaggccgaggcgggtggatcacgaggtcaagacttcgagaccagcctggccaacatggtgaaaccctgtctccactaaaaatacaaaacattagccaggcgtggtagtgggtgcctgtaatccctgctacttgggaggctgaggcaggagaatcacttgaacgcgggaggcagaggttgcagggagccgagatggcgccattgcactccatcctgggcaacaagagcgaaattccatctcaaaaaaaaaaatagatttagggggtacaagtgcagttttgttacatgggtatattgcatagtggtaaaatgtgggcttttagtgtacctaacacccagagaagcatacattgtgcccagtaggtaatttttcatccctaaaccttttctcagcctcccactttctggagtctccaatgtcggttattccactctttatgtccatatctacacattcaatcctaatttgtaccaagtagcatctcacctttaaatcacaggcttattagttgggtgttttctttttacttatgaaaattcatctagtcaaactgtcaattaatttttcctcatttcattaaaagtgtatatctaatgctttctctaaaaattgatgtactggaaatacaaataaataaatgctccctgtgtagaatttccacttgcatcttgtgcttttaataccattacagggtgtcatgaacaggttgtaaatgttgcacttattgccgtgtttcagatggaataagttggcgaattctgggctcctgaagcttgatccagtcgctagggctggaagcactgtgttaggtggctgcaggaagaagcaaggaactcaaggtgattgaaacttctttggacataggccccaaatttcctatgtgatctccatccaggaaacaggcaggattctgtgtgagtgacagctactcattttgtagagattagagacacaccaaattttggctgcctttctccagaccgttactaatctgtgagaagacacaggatgtaaaaactggggaccaaaagaaggctccttctccctaaggccttgaatatagctggtccattccctgtgtcaagaacctaccatgatcctgctgggtcctctgagagtggaaggagactctgtccatctcacctcatcagctcttccctggctggttggaaaagaccaacccaaaagaggggtgatccaaggagtgagagacacttaccacaaaatgggaccctccccacagaatatagggcttttacctccttctctttctccatagaaaactacatttcctatactagttagagcacaagtagtatagggaatgtagggggtgaggactacattatacaggagtgatagtgatagatccttgtttctcctgatgaaatgttttcatgtacttttggtcagcctatcatgcttctatcatttgttttcctttgtgaagttccagggatatggaagtgggtaggtaacctcttgccaccattctttgttctgtggcaccttgtcatcatatttcaccttgaagtccttgtctcacattatagatcttcactttggtatgcacacaccaaagttagtgtgaggaagtagtcattgaagttattataggacgacattgttcatctgtggtggaagacaggattggtatgggaatggtgatgaaagctaggtgtttgtgagggtttgtaaccctcatggggcactaccacttcccaaaaaattgtctccattattaagaacattttgtttttatgtgtgtgtgtgtatgtgtgtgtgtgtgtttgagacacagtctcactctgttgcccaggctggagtgcagtggcgtgatcttggcttactgcaacctccacctcctgggttcaagcgattctcctgcctcagcctcctgagtaactgggactgcagtcacgtgctgccacacccagctaatttttgtatttttagtagagacggggttttgccatgttgcccaggctggtctcaaacttgtgacctcaagtgacccacctgccttggcctcccaaagtgctgagattacaggtgtgagccactgtgcccagcctgtttttatttttgaagcttaatgttatatgttgctctttgtgtttactattttgttgtcttttggcagcattaaaattttcatgcttaaaatcatttattgaatacataaaacaaatctaaagactatctactaaaacaaaggctcattaaaaaacctatgagtatatcacttttactttattgaaattaaggtttgtagcaaatatatctgatattagaacatttgaaagagatagagacagattcattttcattaagcagcacataaaaaatggactgaattggattacattgatgccagtctaggtatacacacactaaagttggtgtgaggaaatattctgaagttattataggaagacattgttcatctgtggtggaagacaggaattgattatgtcatatagtacaacttcgcccttctcccaacatagcatcttctttaaaatagctttgtgtagtaacaagaaaagtaagatttttccatggtatgtgtatctgaacctcagtttcttttaaagaacaattcaaagattattggcaacaaaacagtctactatgtaagcagtagttgcgtataaaactagtgtgcctaataactgaatactgaggtttgtgtttatcagacgtagtgtggagcatatatacactcactacagtgcctacacactacatacattcatgcgtttagagagacctgcatctccctgcgtaagtagtcatcttttaaatgtactttctagcatataaagagtttgcttcccaataaattgttcagtccctaaacaataagtaagctatgcttgttgcaaatgatctgtgagtaaaattttcagggaaggtggaagcaaacctggcttatgatcattttgactatcatccaagaatagtaaaaatatgtttcgctgattgcatttggggttttaataataagtaagtgtctttttcttcagaatttactggttgccaagtacatgactcttctatatttgaaatatggtgtgtgctgattctcagtgttgactgtatgtctggattttgatgacccatgaatatgcctgtctccattttccttgagaaggcaaatcatctctcttgagatagcctaaatgataattgtacattttcagtttttaatttccttcccaatcttgatggttaaattcttcatattctacggtcagtaattcagaatttcttttactgattacctgaaagagaaatagttttaagaacttaagaaatgccacccaaggtcaaaccaatggttcattccaatattactgccactggtagataagaggatgtgcttgccatttatgacatcttctttgaaatgttgaagatggcctcaaaatattcttaactttataacctactagaaatgtactccatgccctcttaagcctatttagattctcaggctgacccatctcatagagcaggagtggcagatagtctgtgaatgagtcaccattttcccatccaaccatagtagacaccattagtgtattatagcatgcttcctcagggaacccatgtgtcctctgaatgtctgtcaacacagaaatccacatagccaggaataatcagcattga

SEQ ID NO: 8917 - DNA, 170090 bp, Homo sapiens
  misc_feature (1)...(170090): n = A,T,C or G, or insertion/deletion polymorphism (see Tables 1-2)
atgtcacatatttactggattccagaagcttctcgacaccgtgaagataaaaagtcccatgtggcatattgatttctaagcgatatcctggtgcaggctggatagattctattctggagcttatctggaagggctttctcatccccagcatcacagcggagaccccggctcaccctcacaggtcttagcacacctgcacaggccagccctcactgctgacctctaacttactcatggtatgttgatcacctgagagatccattccacacaacattctcttccaggctccagagccaaagcacgtaaagtgtcttgccctgaagtcagaacccggttagcaacaggctggattagactttatggcctctcaagactattgtgtcattcctggtccctgattcacaagctctatcagccaaggctgggggttgcagacattgcctcctaccttcagcagtgatcacacagtagacaccagcagacacaaagcatgaggccagtttcagagctttctctaaaaccctctaatcaaagacaaacattcttcttcagataaaaagaatgagacattctcaaaccactttctagatggtgatctcttcattatattatcaacacagggttgaaaagttaaatctccatggcactcagtttttcccttgagtttctctattatttaaactacacacccattttctttccctctccccagaaacacaattaaacacagttctttgatttttattattttagcaaaatcttttttctattctagaaccttttcctcttcacctctctctctctggttgtaaacatagccgcctggtcgtacagagcctgtttcctctcctgcgcttttcggtttacccttcctacccacctctccttctgggatgctgctgacaaatctctgctattatttatcgtggccaagtcctacaagccacccatggaggaagactttaacagcctccagagagctgagatatgcttgtttatccacgagcagaggaggaaccccgtgcttttcccttcttctcagagggccatgttttgagcaatagcgcttcagctccaggaaatgcaggaaagaattgtccttcccgatccttacagaaagctctgggcctcgtgcggcatgaacacctctcctccctgtaccaaagcctgcggaaaggacttgccaccgcagctgccggcctggagggcagggaaggcggtggcagccaacaggaaggtcaggcgaatttcctggggctggagccccgaggacagcctggaaactaagcggcagggtggcaggcaggggccccgcactgatgcctacgtgaacccacgtctattgtggccccaggtcccggccagaggtcctcaggtgaccacccagccggctgcatatttgatccctcaggctgctgccagcctctggagataggtgacaatgctcagagcggctacagtgagtgctttcaagcctccatgaaggttagaataggcagccgaggggaagtcccttaaacaggcccaggggatacctcctggcacccaggctgtgccagaccctccaaggcgcttcacatgcacccacacacctcacagcacccccatctatgaggtgggtgggatgagtaacacctccgttttgggggagaggagaactaggacgcagaggcttggcgaatgtccgccccaggcggcagcccctcagctgcccaccagactgagaactgcaccccgtcacctgcctcaagtctgggatgggacccctgtgtcacactgccttacacgaagccattttgtgcatcttggcaccacattcaaacaagggcacctttagaaagggcaccttggacagcagggagtgtgtcctgaggtgcccacacagatcacctgggttcacactgagtctagagcccaggctgccccgtgggatttcggcttcctttcctccctttgggaagggtcttgcttctctccttcacttgctgcccctgatcctcacagtgggagaagcagaggaggaaggagggggagagcctccttcctaggaatcagtgcccgctccactgttagtccaaggtcaagaccaagaagaaagcacccacaccccaggagactcaaagactgaaactcaggagtgccctcccggccacctttcaggccctgggaagctcggtgtggaggaagaggcctgggttctaatccgtctcattcagttacaaagacaggaaccttgggcgagggctgcaaaccctttgtggcttttctcacctgtaaaatgggggtaataatagttacctagctcatcagtgtgcttgcttgtgaggattagaagcattagtacagacaaattggcacacaggaagtgcccaataagtaatcaccaaggctcttcactgcccatcctagctgcttccgaaacaaaacaagccaaagggctcccggcggcagccctttttcctgaactgacctacgcaggaaagagtccttgccacaattaagaaaaatctttaatcaatacagttgaaaattgaaacattatttcacaaggaacagccattaaagccagtggttaccaagaagtgagtaagtagaagaccagccccttgttgaacgtaacaaactacatgtctcttaacaacacatattactaggtccctagtaaaatgattaaaaatatctattttttttggttgagttagaatctaaagcccaggaaaataaagtgaattggcaagtaatctcaactgcctctcaacccaatactgtagctcagtggttcccagattctggtatcatgtggggaggcggagtcccggactccaccctggaatgtctgacctgaaggtctgagatggggcctgacttcttaacaagcctttcagggtttaggtctgggggtctagggggcctgcactttgagaagctctgctgggcaatcaatgttcttggtgccatccaaagatcaaagagtcaaagagactgggggtgagcttgcagcaatgatgaggttttggggaggcatagaggtgtcctatctgccttagggcacttggcctctgtgaagccgtaattcttcagagtacggaaactggggctctggatttaagagattagggcagagctatgtttagtaactaggttttttttgtttgtttgttttgtttttagacagagtcttgctccgtcgcccagactggagagcagtggtgctatttcggcttactgcaacctcggcctcctgggttcaagcaattcttgtgcctcagcctcctgagtagctggaattacaggcaagcgccaccaagcccggctgatttttttgtattttagtagagacagggttttaccgtgtttctcccagggtggtctcgaactcctgagctcaggcaatccacaggccgcggcctcccaaagtgctaagattacaggcgtgagccgccatgcccaggctaatacctagatctttagacctaggtgcttggtggtctttctaccaattttaggatgagttcagaaaagaatacctgggactcccaccatccttaggcatgaacatatggaaattataaaagtggctctaagggacaaaggggtgcaggtggcagcacaaccaaagcacacacagcccgatgtggtattttctagggatcgcccccttctctgagtgtgcgtgcgtgcgcgtgcatgcattgcttctggttcataaatctgagccaagtcttacatgcagtacagacctgtgcattagaattcacagggtcactgggctagttcaaatatctaggttctgatcttaagtcggggctgggacgaagagacagacctgaactggaagaaaactttggcctggagtgctctggtcaaagtctccgagtcctcctcttacttcccaaaccgagctttgaaccggaaccaacagcagcggaaaagtaaagttagcagctcttccccaagtgggagtagctcctcatcactcactgcctttaaaatcctggtttgttttacatcagggcagaacgatgtaaaaacaacaggattcaaatgaaatcatgaacacgtttgccctttgtacctgtgtactgctctggcacagtgcgcgctgaggagggaggggtcgttcccaggaggaatccacctgggccccggctgccacagggcagggctactccatcggccacagtaaggagaggagggacagcggacatctcgaaagctccctctgctttcagctcctgtctaaacatttgagtcctgcaccgaattcacctaccaaacctcttcattttagccatggttacataaagctcagtaaaagtggctcctactctttaaacaaaacgtataaaatggacaaagcctcgcagtgcagtcgccagctgcacccacggtatcggcagggctgtgcacggccggcgtggaggggcaggctcggcgaacaggatcccagtgtggcgcccggagcagctcttccagggccggaacaggacttgggagaaaacgcggtttttctgccattgttccctcgcaatgcttcaattcaaacaatactaaggttgtctcgttcgcctcctcgccccgcccctttacccagagactcccatttaaaaacacaaaaaaccctcagtccgtgacagagactccccaccagctcccgagttccaggaaaacttttttcgccctaagcctggcgtctcactgcctagtgactgacactctttcctggcctctacggctgcagctttgcccaaagcaacgaaaacggtgcctcaggctacattttaagttcccagttcccgtgaaaggccgacgcttgcaaagcacaggattgacgctgggaacccaaggggaaggaaaggtggaaagcatgatgagggaagagcaagctttctcagaaccttggtgggcagcctggcgaacatccacacgcacacacacactcgggagcgcacggacgagctgccttctccaaggccactcaaacgtcccaaccactctcgggcgcgcaagtccaagcgcgggagccaggacttaccgccaagacgctctgggcgaggaaccccacggtcactgtccccagcagcagccacctgcatgggaaagggaggaagagagacgtgaacgtgcgggcccggcttgtcagtccccgagagttacaccgaagggtccatgcgcgcgtgacccacggggaccaggcagaaagtcgcttaccgccgtagggcagggccggccaccgcgcgctggtctctccccatgctggcggttcgtccactctgggccccggtcagtcccacttagcctagaggcgacagacaaagcgagtttagcgcaggatgagggaggcagcccatcctcaccgccggtctcggtccgcgagacgcggggacagcgcggtgcgcggcccgcatgcaggggtgaccggagggccgtcccccccacgacccggaaagaaggagagcctcccgttaggcccctgtgggtgctccttggccgaggagctcggtcttcgctctcccaccctccccctttctactcccaagcaggagagcgtgcagccctagcctgcacaaggcgctccaagtcggtgctctcgggccagggtctgggcgccgctcgggggtcgctctcacctcgggctcggcttcaggggctgctgcccgaacgcattggcccttccagaagcacccgccggcggcacaccggcagggcggccggccttgctgggctctctgggcgccggccccgggggctcgggcggcccctttcggtcctcggcctggatccgcgaacgcgcgggcgcgaggggttgggacgcgggagcctcttgagtgcggagcgcggagccctggtgtcccggcgcactgcagccacactcccgggccgcgcgctcccgccgcctcttacccgcgccgcagggtcctcccctttgaggcgccgcccgcgcaccgccgggggggagggggcagcgccaacaaattggggagctcggcccgccgcgctcaggtctccgcttggagccgccgcacccgggacggtgcgtakcgctggaagtccggccttccgagagctagctgtccgccgcggcccccgcacgccgggcagccgtccctcgccgcctcgggcgcgccaccatggggccccggctcagcstctggctgctgctgctgcccgccgcccttctgctccacgaggagcacagccgggccgctgcgaaggtgagttcccggccagctccgctcccggcgtcccgccccgagcttgggcgccccgagaggcccctttgtccgcgcctggacccgtccgcctgcccctcgggggtcgcgcgtggcacggccaggtgcattctctgggccggggttcgttgggggtccctgyaggctacgatcgcgcattggtggaccgagcctcctttgttatggtatgggtactggagagttaaggaattcctccggggaagggaggagaaacagcccgcgctgtggcggggtgagggtgcctgggagccggcgggatttgaacccgcgtcgcgggtatgctcggcagctgggcgccttcaccagtcccgggtgcgcgagggagttgggggctggagggccgggagcgcccaccccgcgcygctcagagacccacactgggagctccgagctcctagcccctgggagcagctttgggcgtatttctccttgtctggagaccctggtggctgaggctgaaaagctctgggccctttgcctggaaacagctgtatctgagctttcccacgactgctgcctaaggcgcgctccaaggcagaagtggggctcttctggacgcccggcttgaagaagccaccatcctcaactcgttgccttctattaatatatattttaaaaaattataaccacattcatatttgagcatgaaaccaaagtgaaactccatgtcattgttccatgcacaaattgtttttctagttttcatttcctttggttatgtgcttgcccagaaaggatctgggagatcggtttgcaggaggtttgcaggagtcgaggcttccagccgtggacaagcctggactgactgttgtttccttttttccttcccctccgagagaataaagacttcagctgttgctcagtgtcacagccatgcagtcccacaggccggaaggtgtggcttctgaacagattttgcagtttctccctcaaatgcttaaaaatgatttttgctacttaccagattttccatacttattcttttactgttcttaatcttgttctttgttttcctctttaaaaaaaaawtttacttytctcctggaagaatgatactcactaaatccacttaactgtatagaaattgttaactgttacatgccagagagaactggtgatatacacacacgtctcctaattgagagcttatctccctggaggcagcttctccactgggtattgaaaggactaatgattacatcagcaattaacttcagattgtacctcccagcccagtctccccaaacttcatagccagttatttaaacactctttggtaatgatgacaaaatactttccaaagaacaggcttgagagcactttattttggtctagaaatattgaccaaaagattgaacgcttccaaggtgagatggtgaagcctgatgatggtaaggtaaatcagagaaagttcttcattgggaaataggagctgtttgcatttcgattttctgatggataatgttagcaaagcaaagaaagctaactgtaagagytggctttccaaacatccaggactgtagaaagaaagaaccactcagttacgcaaatcctgttctcacccgggaaatcaaacgcattaatgttgakttggagatgattttacttccctttaatcatttcctaaagctcaattacattcccggccactgtctttgcagtgtcccttgaggtgccatggactgtttttaagagatgcagcctgtgggcacttctgatcacagctgacctcacagatattatcrttactctgtattttccctggcttaattagagaaaagtgcttaatgtgcagatgatgtatgggtatacaagaaaatcacttaaaaactgaatctgcctaattttaaaatttgtctcacttttcatgccatcaataacattttggcttacctccttccaaaatcagctgttaratgtaccataacactgaaatagcttcaatactgatccaagcaaaacataatttaaaagcacattttgaatgataagatgctgtggatttgatcagatcctcattcagaagccagtggaagtgactgttggcttacctctcctttgcactgtctgaatcacacttcacctgcatttgtacatccagacatcacctgctgtgtgccaggcatgaattgcccttattgttttttcttcatgaaaggctgtttaattttgtatttgctgtatctgctatggtcatattgtttacgtactcatgggtggattttctaaaccattgattttatcccacgctgaacctaccactctactccccgctcctcccttcctccacttttcttcagcaagaaaggaggaatagcttgcaggctccagacaaacacgtgccagcagtgttctgattgtgagcaccctctactcttagtcactcagttgcactgggcggaatgaacccttcctgcagcagctttcacactcccctctagctggttctgtgtgatgcttcttaacagattatttctcaggattagaaacgtgaactttcccctcagtgtggtgatgcttgtccagcaatactgtcatctcctgaccrttagtcaccacctctgggactgaatgacctagagttcaaactaagtgagatttcattcccatataagtatggaccatgttctactggaaatgtagtttagaagagaaggctggtttctgaatcagtcccaacaagagcagcatcgcccaggatctcaggagtgatattggtgaagctattccttatatctgcaagctctttatattaatagatggaattggactagggtgaagggacataactttaagaccaaccagaagacacaatgttcatgtactctgactagattcacagaattatcaatgctatayattattaatagtcacgtgtacacaggatgagtgtgctttaggcaccagaggaccttacattttatacctgcttttaagcagatgatttgggggtactcatcaaactctatacctcagtttccctggcaggtctgtcccttcctcacacggacccgtttgtgccttccttcattccacacacacatcgggaacacctccttcctgccatgaccttgccaggtgctggccatgcggcagggactcacccccactctctgtcctcaggaaggtcaggtgagaaatattggaaaagaaacagacgaatccaagtcaggctggtaaatgtcacaatcaggggaatcgaagggctataggaacactgaatccagctttggggaactcagaggaaacttctgggaggggcttccrcctctgaaatatgagggagaaataggaactatacaccagcatgtcatttccatgtgcrctgtgatggtgtactatacacagaagacatggtcattctgcctgtctgctctcaagtctaagggtctttgcactgaaagatgaccttcaagtttgctcctttgagataccaaaatgtcattgtttctgtgattaacaatcttggtggctgaactttgctctcagaggggtggaaagaattggaagggcagggtttaggagaccartgttaaaaaagagctcccagctccaactgaggccccagtatgtggtcctgtcccttttctcggaggtggcaggtaggcaggcaggggatgtttggaaagttgcggcatggatgactgattctagtcaggagtgcctttaggaactgacccagaaaacctacccttacttgggccaggccatgagggaattcacaaaaccctacattattcattaacaaggctgttggcaaatttctgagaactggcaaggatggtcataacaagttcagttatttagttaagagctggtaaagattttgcagacaaatggaacccaccagtgatgatctaagacaaacctttgtagacagtggaagaacatcaakaagtggctaaatgacaacagtggttttgatgaattctatgatatttgttataataattgttccccaaattgaagaaggattaacctyattaaaatgtctcacaaggaggtttggtattttgagttcttgggctagagtcagctcaagcaacaatagaatgcctaaaatartgttagagcattgttcttcctgctattattaagcaaccatgaaaaaatgtcaactatagaacaatacaaaagacatattcctaccattcttatgcatacaatgaaaagggatrtcaaccagagcatgttttaatggtgaatttcttctgagkcttttgacactgtaggaatgactttggggtgaagactttgatagtctggtacacagtgagctggttccagcctcgtttccctccattgttctcctggtcctaactctgggacatgggtccctcctagcgctctttccgtgtctctgcttctgtcttcttcctcttcccatgcccctcagtgtgggtgagctgcaggggcagctctgcgtggttctctttgttctttgcactctctaacttccactgggggtctgctccatgatgcaccattactccctgaaggggactccagaactccttcttgaactccagttcaacgtcttcacatttccacgcgacgcctccccttggctgtcttgctttgatctcaaactgagcaaatatgttcaggactgaactcattttttacctggactgacaacccttcccgactctgccattttggtcctggtgccctctgatgtttctgggtacagagcccagagactatgaggctttagcctttcctcttctttatcctctgcgtctgctcagtcacaaagtctcctgcttctttctggatgcttcccagaggygcccgcagctttcccttcccacggctgggactcccttccagctctctttgccttgtgccaggatcaccactgaaccctcatggccctgcccctcctcccagctctcstgctctccagcccattcctcaggctgtgagaggctaattgccctcaattccctaagttatggtcatagacttgctggttcaggatctgccatggccacctactatctcactggggytccccctctttttggcttggctgtgcattccctttgtggtacggatctgtcaaatttttctggcctcgttccttgctactcctcgacatacggctttggtaactgtaaggaaggataatctctgcattccacagaagctgtttcatcttctcctgctccccggcctgcagtgtcctctcgtcttccctcggctagcacgcattccactgaagctcctgaaacagttcgcagcctgccccttttccacgtgatcccctctcgagtcagagtggtaatgtgaaatattgttgactatctggattttaaaaaatccagcctaaattgcaattcttgctctgccattcagtagcattgtaatctctttgagcttggagtctctaatacatacrgtgagggtagtcgccatgtctagggagagcatgtgcacatgaagtaagcactcgagmggtgctggttgtggttgctgccacatggcttggagttacattgtcatttgtgtcttggttccaacacttgccaggacataacttctttttaaagcatcccaccatgtttgggagagtgcccgacacagaggaggaaatcaggaattaattacttgtaattggttccaattttctagctgccattctcttgggagccccctccccacccccggagtgtcctagagggagctgcctgctggcttacastgtccacccctgtggtattactagtgaacacaaagatgaatctgggcaaacgaaggtgtttccccttaatttggaatttggagtagatattccaccacagactaaacatgacttggaaatatgtacactgctgaacactttatgtaaatagtttattccgtggtttagtaattttctctgtggaagctttgctggatttggtttttaatctgcatactataaaaacatttcattttatctgagttttaaagctcacttgatctttaaggtacaagacaaatgccaagtgtccaaatcagatattaaagcaatcttttccaggccacttgggcttttgtgtttctgttgttgtacctcttacctgataaaggagagctattcaacctcctcatcttctgttgctyttagaatcagtacattgttcagttgtaaaattaccattgtttagtaatacatayacatacacatcttagtgtactgtggccactgattccagcaaggaccacagccagagatamtggccgtgagctggaagcatccagtttgatgtcagttgctctattttcatttcaccaaatacaccaacaattggggaagccatttgtgtattcactcatagagagtgcagctaacttaaataaacattgctcaattcagcagaagatctggaggcacactattcctgtattggacacaattaaaattgtttaaagattttattaagtttctgctttagaaaacaaggatattcctttgtgaagaacaaaacccagtgtgttccagctgtaattcaatgttttgaaagctatttccacaaacttttcccagcagccacactcatccctagagatgatccacattcagaagaaaatgacagatgatgcacgttcagaggagaatactatgtgtcttcattgcacaaagataaaccttgcmtaatcctcacattcagcacatggggcatttttgaaggtactaggtcagtatttgttctctgtttcagcgttgtacagataaacycaatgataaccattttggtattgtttccttcatatttattaaataaacaatattaatatctaatctaattggtggaagatttggctattacatctctaataatgctttatttatatgtatattactatgtaatataaaacaatcaaaatttattttcagatccgcagttcccttgtgtgcaagtaatgcntgatttctragcacagtggcatttattttcatatcatccaagagcaccagctttgaaatgtcattttaaaatataagcaactcttttttatcattagcttgaatttttgagttgcattttagagttttttaaagaatgcaatgccattttaatgttacagaattaatactgagttgtgtgtgacgtatttgctaccaccagactaaggaccctacgattagtctggcaaaagaaaagtctgtttctcaaagaagctggcattaacgggtcagacgtgcacacgactttttggaaaggcgatggcaaygtctcaactacatccagagaggagacagtccagggacacactggttgtgcaccagtcacaggccctgcagggaaatgtgtgggccctggtcttcctcatgtgtatgatggggatgagggcagttgctttccttagggagcaaatgtaaggattaagtgagttaatgtctgtgaagcatttataccgagcttgctttgtgccaggcactactctgttaaattaaagacaaattcagaagcataaacagcaaagtaatgacatcaagaccccttggggctggaagggcccacacaaggatctccttcagcygttgtccaacatgagctcacagcagcatcagctggagggctccacgaaacagctccagagcttctgtttttggaggtgtggggtatgccgagaatctgcatttctagcaggtgagggtgcggctactgacagcccgacttctttcactgaggccgcygcttgagcagccttaggtgcaggcctgcagtgycgggacgttagtttgcactcactttgaggctgaacccctgcgtgtaacatggccctccccgttctctttgtcttctttttccgttgatttctgctcctgcccgcaatcccggttccagctgtgtggtgcagtttggaaggtcagatgggcgggggaggaaggttccagaaacatgcatgtggcgtgtcaggaagtggaggctcctgagtggatytggagagggctgggctgatggtaaatgagcacagcggtgcctggagcagactctgccctccgtggctttctcccctcttcgggagcctggcgtgggtgtctcagaactgatctgctttcagtctgagttttgccatcctctgcggcgagcctgcgagcttgcacacttgggcaggatgcgctcagcgccctagctcagaggccgacccagggcagagccagtcagcgggcgctgggacgcaggactctgaacatgggtcctctgcctccctcccacctcctccaggcccggccactcggcttcctggtgaggaattcttaacgaccgccaaatccggtttctagagataaaagacggttgaaggttagtggtttaaaataactcctaaattttggtccggaaatggcctatacaatgaagataaacttaccaaagcaggaaaatgggtcagtgatgggggaaaataccatccacggaatggttagttcagcctcagcatccgatttatttcggacacatacacaaacccggtccagaatcaataatattaactggaaaaggggatgacacggtttttattacgtaggatatgtagtgggcgatcttcttgaawgatttctcattcctagcttatctttaacaaacatgtttttcatgtaaacattatgctagcgccagatgctttttatcaattgttaaagcctgtctagtctgactaaatagccattgggcgcctccataataattagattttgttttcccaaatacttgaaaataataagattgtatttcttcaggaatttaggcttttaaaactttttttaaaaaattctataattcatacttctttattatttcatgttgatcatagatattttctcttttttccatggaggttatcatcaattaatatattatgatatatggatttttttttctcttgactagatcatttatttaaaacataaataactttgggtattgtcctaggcgagaagccaatttgtaaccaaaggcccatttctctctctcttttttttttttacatcagcgaaagtaaaacaagagtaagaattcacatgaaaacaaagtaggaagtaatagtttgatagctcagtatcttgcttttggcctttaaaatttgttcagtaagtgtgtgttcagcgcttactctgaattaggaaatatgcaggtggttggaattgttcttatactttgcattcggacatgtgcctgagttaaagtgagaataattttggtaatggtatgatagatgttaygttgaaaatttagcacttgcactgttctcttctggctccaaatcttttcatttaagttctgagactgcaaaaggcatcagtttcagactctggagtcagatgagatggatttgaattcctgatgacagttttagtgatggattttaataataaaattaataaaaataaatttatttgcccaaacagcaactagctgtttgactttgggcaaccttcttaacttctttgtgcctcagtttccccatctatccatgagggataataacgtattcctttattgtgttgtgaaggtcgcagacacgatactggtaaatgagtgactgccatatcataagatttcatgctgtgaagtagatctttggtcttcctcttgtttcctggcatacaattcctgaaattcttggaatccgaagtgataagtgtctttgtatgttaatgagttgactggtggctggcccccccaccccgcagcttcagagttaggctggtccctgggaaagaccaaggcaggctaaaggatggattcagccccactcacaacctctggggagaggggccgtgtaggaggttgagttaattaccaatagccaatgatttaatcaatcatgcccttatataaggaggcttccatgaaatcccaaaaagacgggcttgaggagcttcaggatggctgaagatgtggagctgttcctagaaggtggcatgccctggtagggctggaagccctgccccttcccctacaccttgctctgtgcctctcttccatgttctgggtattcatctgtatcctttgtaatacagtagcctttataataaatcagtaaacataagggtttccctgagttctgtgagccttcctagcaggttaatcaaaccccaggaggggttcatggaaattccaatttataaccaatggacagaagaataggtgacaatttattcctggcaatggggtctgaagtggggcaatcttgtgggactgagccttcatctgtgggagctgatgctgtcttcagatagatggaatcagaattgagtggaattaaaggaagcctagctggtctcccctgaagaaatgattgcttgcttggtatgtggggaaacctcccacacagccggtgtcagaagcttgttgtgagagcagaggaaaaactgttgtgcctctttgtatcttcagatgagcattcataaaatgttagcttttactattgatttcgtgattatactatcgatattcgtatgtacttaaaactatgaagtatctttcttttactacgactttatttcttataagagatcagcttcttggataatttacaaaatattgggattataatgatattcaaacaatcgaatacatcttgagtgcataattcttgagggcacaattctatccctaatgtattccaagatggagcccttggctttgaggtataacaattatgagatgaacaaaagcaaattgaaacaaggcacgttgccgtggtttcgcgtaggtggtggcagaatctccgtagcttcacttctcatgagatccatcatagccactcagagaggagactgtcatagatttcttcctgtaagcgatttatgggaaggtcctagtttaatagggcagagtgcaaaatgggaatcacttttgagaactttctctggtctcttaatcaagtgggagaggcgcagggctgaagttagccagcactgcacatctgagttttggcttgagcacagtggagacagctgcccacagcagctcactccccgctagaaagcgcacctgtctccccggagagctggagctgactttggaggggttgcatctctggttgcctcagcctgacattttccatggtagaaaatgtctctggggctccagaggtggggcttccagccatgtaaatatttgcatgtaaatattttagaattcagcatargttgaggtcagaaagccatttaccrtgaggctgggtgcggtggctcatgcctgtaatcccagcactttaagaggacgaggcgggtggatcacctgaggtcaggagttcgagaccagccygaccaatgtggtgaaaccttgtctctactaaaaatacaaaaattggctaggcgtggtggcgggcgcctgtaatcccagctacttgggaggctgaggcaggagaatcgcttgaatgggggaggtggaggttgcaatgagctgagatagtgccattgcacttcagcctgggcaacaagagcaacactttgtcaaaaaaaaaaaaaaaaaaaaaaggaagtgaactacaagaatattttgtcgttggctgttgtttaatgggacattcaaaagctttaattgaattcaaaaaggagttatttaagatttggacttaaaatcagcccattcctttattgtgtctctgtacaaactccgtctcaaaaaaaaaaaaaaaaaagaaagaaagaaaaccatgtagtgtgagagcctaagagaaaaatctgaacatgctggcagattgaggatgtttatccattaaagagtctaaaagtgggatcttcacatacaacttcataaagtcttctgagctctgtacatgtcttaaggaaatgagtctgatttgtacatttttacattaaaatgattatttctaggacattatggcttttgtatattaagtgtgctcaatgaacagaactgtaatctaacttcacaaaattagattttaaatacatawaaacatatgtacacatatacactacataagtagaccatgtgtgcatttcctataaaatgaatgatattcattcattcatgtaagaaatatttattgtacacccactatgtgccaggcactattctagacttggagacaaacagaaaagaattgctgccctcagcatttatttatgggatgaatacagagaagcaaacaatttctgccttttatcatgctgaactagaaattatttaaarggatatccctctctgctattttagggatggttcaacctcccaaattcaactttgttaaaatagttgtaaggaagagactggagtcctttataggaaattgtgtctactttgtgtctcagaagtacattcatgagactaacagacattgagttgttccaatttttggaaattttgaaatatctctccagtaggaaatgggtttgcagagctcttctctcttccctgggaattaagtacagctagccatgggaaataccacttgggtttagagtggatgaaaccatcagatgtggaaataccagatggaggaatgggagggaggctgtggacagcaaatgtgtttctccagtgtgcaagayttcttggcactttgatgaggatgttgtgtgtcacaactgtaatgatgcaagaatattgtcctttgtcttaaaattgtgttgctctttggccatgtcagccggaccctgtgtgaaggggctggaggcaggcagagaaaagagatgctcttgtaatcatcagggacacacctcagacctctagttccacaggacccgagtggtcgtgctaccatctctgcacaatggcaaccctcagggacagactgtcacaatgtatggcagcaccaagaaattgggggctcgtctcctccagctcagcgcctactcaaacctggaggagttctggtcacaatgagcacttgagccttttctgagagtcaaaattaaaatctggttccaaggaccaaggcttaccaggtttcctgggcaaaagaaacctaatttgtgagttagggataaatgaatcagaaacatgaaaactattgctgtgagaacactcagaggcttaaacaaggaaacgcaggtcaaagttcttggcaaaatatgttggcgaattgtcctggacaattggcagtgcatgtcccacattatcctgcaacagtgacacgctgttaataagggaaagggtataatgtgaaaagctctgatgaagtgtgctaggttacagagccttttcggtggaaaataattctagaaatggtccttaatttgattccttaattggcaattgtcttcttaaagtgtcagagtgaggaagatcagctggtgtttccaatatgttcaaacagcatgttcgaaagtgcaggcctgagtttgggttgctgtatctgagcctatctgccatctctgagcagagtcaattgccatctcaagtcagatgattggcagtaactcctagaagataatgtcaaatttttaatacaactttttctagttctatatgatgtgcacttgtgccatttgagaaactgtagcattaacttgaaagctatagttggcaaagcgaagtaattaggttgagtttcttatcattcatagccttctaggtagacgcagcagccgctacctctacaacattttactgactcttccctgggtcagagcaatgccacaggtgcgagcccccagctttggcagcctgcagacgtccagaaacacttctctaggtgccacagtcctacacacctttggtcatgtttgcctaagctttgggactttgctaatttgcatgggagggctaaacctccagcccccaacggtggcactggggagtagactaagtgttcctgcacggtgaccttgaatggaatccagcatttatcactagttgaaagagagtgactgcacttttagggggtgctctgggtaagttgtgtaggtgggaattgagattttttaaaaataacagccaatttattttcccacaattctagaatctacttatgaatttgaggcgtgatatctttggctgttaagtgacacagattacctggcagttgcctttgtatgctagtgagaaccctggacatatcctgtttctcctgaccctttacatagagataattgacttgatgacccattgatcccatctgcctacctgccagtcatcatcctttgagttcctgtccctccctacakgttgagggagggacctggtgggagatgattagattatgggggcagtttcccccatgctgttctcatgatagtgagtgagttctcatgagatttgatggttttaaaaattgtgctttctccttcgctctctctcctgctaccatgtaagacatgccttgcctcccctttgccttccaccatgattgtaagtttcctgaggtcttccagctatgtagaactgtcagttaattaaatctccttactttataaattacccagtctcaaggagtatctttatagcagttatagcagtgtgagaatggactaacaaaaataaycacctccagattggaaatatatgaaaagttgagagtcaagaaactatagtccagtctagaccacagcatggcctcttttggggggcccgtgaaccccttgagatgatatgcaaatttttatgaatctgtgcacaagtgcatttttaagaagacaatgcctggaacttttatcacattctcagagatgtatgccacagactgctggtctagagggccttggtagcagatttttatagtaagaactgtcaaaaagattttccagggaagaagaccctgaatttggcagtagataagaatagagctaaatttgacaatgcttccaaagctttggctctcagcggcaggcaggatgcaggcacttctgagggtggtgggaaaatcggtcggaaagacagttttggcgaatgttaatcttattgtttgtatcaaatgtttggcatgaatctctcgaaagacatgtgtgcagaccccatcttctcagctgcattttggtttctttctccatgcccctccagggatggcacagtatctgagcatcgccatgtagaatctatgctcagtaagtgtgtctcttgattgactaattggttgtcaaggtcatgctagaaaatggaaatttgaaggtgaatctagattggttcatctgcagatggtggaactggcgattatgatccctctaggaacccagctcagagctcttgaagagggagacaagaagtaaataacccactaaagaagccgggtctggtcacaggagaggtgtttctgtgaacacttttatgaaaaggtgcgatgtacttgggggcagtcagggctctgcacaattagtgaaggccattgcattttcagcacttgacatggggtgggtgataargaaactgacaagtctagtccctgccacgtggccagcctcgcagggctgagaaggcgatgggagagggctgacttgtggtctgatttgcccaggccagcgaggtccatgctgtgacctgggtgaaattactaatggcgctcccgtgcacccctagcacatcccgacatggaagatgagttctgtggacagccagctgtgaggagatggcatggttaaagctccctcgccrttgcctcctagttgcagaaaaatatggcagattcttggttgctgagaaatgctgaagaaatgaaaagacaagatcaagagtttagatgaatttagtgcaaaacgtgaagatgatcaaagagacaagtgggtggctaatgtgatgccaggctacttggcatcggtgtactttttctagacaccaggtcctcgacacaccttaaggtcaggaggggaagccccagtgttctcggacaggtgaggtgggagctgcaagtgtcctgaggagaggggcgggcaggacactcacgtctgtgcacgtgattcaggtcaggacagccccccacccgccctgtgarcacctctgtgctggtccaagtgcaaagaggcccacccctgggggacgtgcaatcgcccttggcttctgccactgcayggcgacccccctgccgagtttcactggccactgaaggcaaagagagtagcagagtgcccagcgtcaccggcaggatagacccaaaagtgacacccacgttttaaaaagtgggctggtccaaatgcagtgatattgacagatcattgatcacaaccagttatagatttctttgttccttttccagtccccacttgctctcgtgcacccaagcttcacttgctaagctttaaaatgtaaaacaaaataaaaactaaaataaaagtggggtggagagtgggtctggtggaggtgtggacagggatgatgagctggaggtgactccagggtgagtgcccagagattttggtcacctggggtggttgatgagtagtttgcgagtgaagctagagtccaaagggaaggaaggatcgaggaagccggaggagcctgtggaaggaatgctatgggtttgtaaccttttaagggaatcttgagtgtagtgtaagcatggtggtcattagatgtactgattaagagggtaaatcataaaagaaattatgacttggacataaaatttaaacagtgcaaggacatgttaatgataaaacgaatgctgcacagattgtgttccctctggggagtctggaaatcaaaatcccagaagccgcctgccgagcrcttgttagcttgcaacgcgctcacgtgtgtctgtgtagcttagtgtgttcgcactkgttgtctaaccaggaaaatgaactttaaaaggccttcaactaggctttaattaagaggaaaagatgacaaaacctacacagcagcatgtcaaaattaccgaacatgaaacaggactcttctgtttagaatagcaccgagtcacctttggaaggagtgacgcccctgcgagggtgctgtgccccyckgcagcatcctttcagccaacccttcccttcamgccccttttcagaagcagaccctctattwttacttcccaggggccttaaaacccacctgcttgtcctccatgaggatgtgggtgaagcgctgaccctcattccgtctctgggatctgtccactgggggcagaacatgtttctgttggaagacagaggaagaagcggtggtccgtgccagccaccttgaggagcagcctgggatccggagcatctcatgttccatttcttcttgagttttccatgcatcaggawcctgagatgttggtatttagccctgaaggtggctgtgggtattctctatgcgcttttggactttaacccaaaatacagatagcgtaatttgcagtgtaacgtctaacatgttgaacyctttacatattctgtgaaggacgaacctgcaagggcaccgacttggagtatctcatccgttgtcttgggtgaggaaacactgacaactgaccaagaaatcggtgaactcaaggcctgcaaagagcttcctgagaaggtagacaggaatagtaacagggctgcctggagcagtgggggatgggcagggggtcagggtgggtgcgcagggccttgtcccctcacaggaacgagttgattgcaaggtgatgaggagccagagatgctggagaagagggaagctgttcttttgccttgggaagggtctcctcttggtcgcggcagtggatggcaccccggcctggatcgtgctagagctggaactcatcactccagccctctacctccaggcttaggtgcggggccattcagaccctgttctttgagatcaaaatcccctcttccatccaggagaacttaggaatccagcactcgccaaaatgaggagatctggaatggaagccattgctctccccagatactcactgaccttagtccactctgtcctctcctctccactgaagggctaggcctgtgacacgcatcttttttttttgagatggggtcttgttctgtagcccaggctggagtgcagtggcacgatcttggctcactgcaacctccgcctcctgggtcccagttcaagcaattctcctgcctccacctcctgagtagctgggattacaggcgtgcgccaccacacccagctaatttttgtatttttagtagagatagggtttcaccatgttggccaggctggtctggaactcctgacctcgtgatcygcccacctcagcctcccaaagtgctgggattacaggcgtgagccaccgcgcctggcctgacacccatcatttacaggtagctcccgaggcttgaggcatttcaacaacctgtccagggttttacacaaggacatgggagggataagaatggaaaatcagtctgttatgctcaaattgtcagggttaatcagtgttcattatttcatttcaaatgacatacatttttgtgatttttgatttttgtctgtgcaaagaaaatacatatactaaataaaaatagatatagtgaagtgggaacaattctgtcagttgctctaccctgtggttagataatccttaaaatagacattttggttgcaagagacaaaattatgctgatctcctgagccatggatttttctatagtggcaataggagtctctcttttcacattttgctattttaccagcaagatcaaagctgagtttcaaggctcatagtagcagcgattcaaggctgcgctcaggcttaattattattattattattattattattatttttttttttgagagggagtttcgctcttgtttcaggctggagtgcaatggcacgatctcggctcactgcaacctctgcctcccgtgttcaagttattctcctgccttagcctcccgagtaactgggattacaggtgtctgccaccactcctgggtaattttttttttttttgtatttttagtagagttggggtttcaccatgttggtcaggctggtttcaaactcctgacctcgtgatccacctgcctcagcctcccaaagtgctgagattacaggcgtgagccaccgcgcccagaccactcaggcttcttgaattcaccaatttcttggtctgttgtcagcgtttcctcaccaaagacaattgatgagatactccctattggtggcattgccaccacttgaacggctctcttctgagtctgaaaatagtttgtgcttcctgtgctgcaggtattgtagcgcctgcattagcccctgaaaggaaacgtttctcttggaaacaccagtgttgggctctcatgtgcttcctccttgtatatagattggaagtgtgtgtgattttcaacttcatgtccttgagccccagacagccgcccaggcaaggccatcccactgtacggcgctcaaggacgtgccggcttctttctgggtctcacagcagggtgagcattctgctcaagtgacagctcatgatgcccggccttctgacctttagagaagagttcatccgatacaatgagagccccaaatgtaaactcacttcatttcattccatgttccaatggaaaaaccgagtcttggctgtggtggtgcttcttgtttagagaggaaccgggaacttcacaaagataagatattaataggactggatcctttgtgggcacgaagtaggggagtatttagatttgcagctgtgtgcagccatttagactagatatctgagtggctggcctcrggctttagggtggggamggcaggctgtctggcttgcccctgagatgtcatgcggcctaaaggaattctgttactattgttgaatggctgaataagagcaaatgagggcgttccttccctctgacacatagtggggaaaagtgcgtctctgcatgtccagtgccctgyggcttggccttgcagccctcatgtctacacctggggtgcccggggcctctcctgcctcttcctaggtgggtggcctctgtgtgaagaaagacaagacraacagcatctctgtgggccattctccaccctcagcctcaggttttccaaatgccactcctgaattttctggagttttgtgtcgtttccaaacttgtttcgaagaagagctttgaactaatgtagcagaatgcaaagtggaattcttcccagaaacgaattctgtttaactctttgggtttagtggaggtgtcaagtagcttgggacacagtcagaagcacacactgtttatcgtgtggacttgggaaaagtgagcatttgggatcttctgctggtcttgcctgagtccaggcatccatgtaatgcaagctgcctctctgygaggccagcagggctgcagagccggggctcatggtttgttcacctttgggatctgggaatacagcttcagccaatctcagtgccccacgaagtaacccaccgcctttctggcactccggggtgcctaggatttctctgtccctataggcggctcctctgtatcccagctggyggtctyactgcctcagccccattttcctgggaactgttcctcctcttccaggaatggatttcttggcatgatacttctgcctctctcccccacrcaatctgaatgccacacaaggctctggaccctgaggctcctgtctgggcctgaccggacagcgggcccctccaggcatggccatctctccctttagcctgctcagccctcctactctgcctgcagccaccctcaggagcttcgagtgttcagcaccctcatgtgaataaaccagatggttattggcctgggtgtgatcccaagcccccatttcccctccagtgtcaagtggctgagtcccactggcttcagtgtaccctgaatctgcagctgcagcctttgagccaatgctgtccttggtcgttcttggtcttgtcagtattgcccctccatggcagtttctccttagggcattcccgtatccagtcctttccctccttccaggcctctccagactcatagctcactcatatcagggagccgatgttgcacctttgccctctgcactatgagaatctggggcaaaaattaaacggggtcccatttccagagggtctaaccaaggctttggacaggggatgtggtcatcgagtagtagctctgagtcagttttcccagagaaaaggtaccaatacatccagatagtttatagagatataaggatttattataaggtcttgactcacacatgaccatgggggctgagaggtcccacagygtgctgtctacaagctgtggaactgggaaagcgatggtatggcctgaagtcctgagaactgggagcaccaggggcaggagaaggaaaatgtcagggagcgctaatacaacctccttctgctttttggttttgttcaggctctcaatggcttgagtgagaccagcctactctggggaggatggttctgctttactcagtgcaccagttcaaatgttcatctcatgcagaaacacctcacagacccacccagaaataccgtttcaccagatatctgggcatcccatggcccaggcaaggtgacacataaaactaacaatcacagtagcttagctcaagtgctgatttattatgagtggtagtatttccactgcagaagacagacgcttactaagggctgctgttcctaaatgtgtaaggtacaaaggcagagccaaaactctgtattcacggattcacggagacagtcccagtgagtgaggcccacagggtgaggaaatatgcgtgggattccgcagcacacgtaagagcccatcctatttcttcaccattgtagattcacgtttttggaatgtgcatttccaatggaaaatygatgcttcctggcttcaacattttaataaaaatacttctggctagtgccctagtctttcattttgaaaataactcatgttagaaaattgatctattggttacattttaaacatgaaaagatccaaacactgctcagagtgttctttccctgaaagcctcagcccagactgacggccatcccctgtgctgctgwgggcatgtgcctcgctacagaaagggccattgccttgtaatggaattattctgacatagcctttagaccacaccatcagctttcccaagggcagggacggtgtcatctctaggcttatcttcctggccacagcacattgtctggcacttgtcactgttcatttctcttggagatgaaataggcagaaagtattagctacagtcaagggttgcatcttcttttcagatgttcaggagatggtaatctccatcagcatttgccttactgttctgattaggtgaatactaarcccattcgagcctctctttttcatatcatgaggatggagccatgtttctgctcattaaaaaggccttttacaaaaagaagacagctatggggaatatattttgcttgctctatctgtgttaggaagttagtattcattaatcatgtgctacttctccatgtgttttgcacaaaaatcggtgaaaaatgatggctttctacttctacattcttgaagcgtgtgcattagatttttctatttcttaagggactgaaggctaatattaggatatcatgttgacttctcaagacgttaaaaccaaaagacctctgcagcttccaaatcatgcttactgatttcgggattatgcctccagcccccaaaatcaacacctataatttaaaagctgtgggggtcacattagtcagatgttagagagatgcttgtggcttgtgggttcccagattccagaatttgggctttcctcccagcttagctctgcttgtgacagatgtttaagttagagagacactaagaaaacttccaggaggagaggggtgaaatttagcagcctctttttagatgattctacctgggggagcacatcctgtctgggtgtgaaattgagagctgtgtgtttccacctgcaccacagcatccaggtgcacgctctgtgggatccctgcccgttggtggcctgacctacagaccctttgctgaaggaccctttgctgaaggctcctggcctgtggccatcaccggacagaccctttgctgaaggctcctggcctgtggccaccactgtcatacagcgctgttccttgggctggagggagagcttttgccacctcatctcccatcctgtcgacatgtgacrgctttgccagcccagccacagtgactaaagtcttcagggtcatgaaaaataaccccccaaatgccacccactgctgctgtccaagctcaccccaccagcataaggcctggcttagtatggtgggacctgggcatggtgagccccagatgagctcacagatggcaggcagtctttgagggaaactttgatgtgcatgtgtgggtgtgtgcatgagtgtgagagcatgcacatgcctgtgtgcatgtgcctgagtgtgcattgygttcatatgtgtgcctgtatgtgagggagtgtatgcatgtgtctgcatatgcagatgtctgtatacacagaaaggtgtgtgcaggtgcacatgtgcgtgtgtgtgcgtgagagtgtgcgtgtgcctatggggcgcccagacaccttggcccttccctttgtattcttgctgttcttagtgagtttacatcatggcttgggcacggctcacattytcatctccctacattagtgacatcaacacatttcacatttggcttattagccacttctattcaatgtcaaaaagcaaatgtatgatttaaaaactagctgctgacataaaattttctagtctacattattctttattttcttgaacctctcttttcctgaaatctctgattcgatgactcgtcttttctgaacatattatattatttgatgacagagagaatcaagtaattactcttcagtctctgtctttcctatgaagaactgaacatccttcaaactgggaacactaaataaaacatggtaaggagagaactgaatcacaggcaaggcaaagagagagaaagataccatgcaattgcttaaaactaactgaagcctttatgcttggaggtgaggccccagggcctcaggggcacctggaagcgactgggatcactggctcattttgattttgaaatgtggagacatgcaggaagattggagagggcaatgttccgatggccacgaaagaacaaaattgaattccagaaatcacatatcagtgaacttagcatggacaattatatttccaaattgattttttttgacagaaagcttgtgaatacttaaataaagagttcatgatccctggaagccaacacaggtgccccaaaacaggtcaggagaatcagtaggcacagcagggatgccattcagggacatatacttcagggtacagaccctgtgcttggagaagccatgtcccagggtaggacacacagttatgtgagagcacttcatctcaatgaccttggcagggcctcaaaattctccccaattcagagctcctgcagccatccttgactggtaggaattgacacttgagttgaaaccagcttgccattgctaatctaaaggatgtgcattggaagtgaggacagggtgacttgcgtggatgcagccatgccagggaaggtacagtagggatgaagatggcattgaggagacacaatgaacagcttagaatgcacagcatgagtaggaaagtgataatacctaagagtcaccaccagcttcccttgatgtgccagtactctacatgagtcccccacagtctgcgcaatgacagtgtgaggtgggttgtcttactcccattttattgatgagaaaacaaaaggtcaaggacttttctccactagtattcaaactcaggtctgtctgaatccaagtttacaatattgacattgatatgccacctctccagcattggtagggaattctgacaaggggagagaggtcaaattgtaaaagttttatacactagaaactggtgagtaattggtgatttgtgaccaagggtctttgctggggagaatcctcttaagtaagactaggtggataatggtaagcaggccctaaggtgaggcgaggacacgcagccaggaaaactgaagggagctgttgtgtttcaggcataaactgatggagatctgagcagggaaggtggccaggggaatgcgaaagaaactgtagatgtcagggccttttgcagaaaacatccacagaactgtgtgccgactctctgaagggcagagaaacagatgggttgagtaagtttactaaaatgtgagaggggaattgatgttcctgccagattggtaaacggccataccattagaagaagagtcccttattttgtgaaaattcattggctgagaggtactaattatttcagatagtggaggtaaagtgggtaagactttactctttgatcaagggtctacccaaatcttgactagtcttcttaattacttaatttatagatttttgatgaaattgagtttctgtgtgagcccccatagtggaaatctaagcttcctactgttttttttaaacattttctctctatattgcagcaggtaaccacttcctcttctctttcccttcactgcagtttgtgaatgatctggctgtttttggcttatggcacatctgggttctcctttggtccttctcaagaattaattactgttcataaagtattttgaaataatgtcagaaaatgtccttcaaggagcacagagtactttttggaacattaaaaaattctcagtatttctgcttctcacrttttgttttgggaaataagaattctggctgtaggagatggcggggggaggttagtcttcccagagtcgtgtcatcacagaacagtgttgctccttacagctgttatcccaagagaagaaaacgggagagagtgccggccacgttttgtggcttacacaagccagttgatggtgtcaaagatgttgttgagttctctggccaaaggatgttctgttttctgaaaaagtttagagctgcagaattgtttttatgctsgagtggctaaaaaaatgggacacatggttggggtgaggagaaaagccatattttactgatccaaaggaattggatcactcctgaagcaaacaaagtataatacggcgatctaagtagatagttgcatatattgaacacaaaggcagagcattagagtaagaaaccttcagccagatctcggatgtatttcataacatgtgttcgttgaaagaatataagaaaggctctaggtcttgaaaaaagaaagaaaattctccttcacatttatattcatgtattactagcaagattacaagttctcagaatagcaccaagatgaaagaggcttaccagaattattgaaaaggggatttttcgaggccacttataaaaccaacacaccaaatttggtgttgcagatgtaggcgtgggattgtcctctgtcttcagaggtgtaatacgtaaagcccatgccatgcggcgctgctaagccaaagcaaaccatgatttgtgagcaagaacttgaagattctatataattcattttttgaatactttctcttgtaatacaagcatagaattgttttcgttttcaatggcataatggtgactttgtgatgtattcatgagaattatgaagtttggaatgtgacttttattttaagattttgagggaactcctaaaggcatttcacttttgacctttatctgaaacttgtggctgactattgctgggtaataggcaccaagtgtgcatttttgttgtgtctgaaaatctggatgtgctgttcggcacagatggagcaaacacgcagcaaactaaggaccgtcagtggcttcccattggctcattgaacaagttaacaccactgcagtattttagttattttaaaaastaactttaaagaatcccaagttctttatacgtggcaaacttcatcatttggtaatggatttagaaataaaagtaagctccaaattaaaagaaaattgccaatagaaacagaaaatattcataaggaagggtaagacaggaaaggaatrtcaggaagggagaatcaaagtgaattcagtaatgtgcagacactggagttcacaggacctaaagcaggtgcaacgtggacgctctctggaggtgtctggcagacccaggagaagacagtggccacagtaaggagggcagccagccctctcgatgcaggcccacgggagayaggccagcactgcagaagggactcactgaatagtagtgccaagaaagtcagtgttgagaatgaaagaaaatactgtgaaatgggcactggttagaaagttgaacaacaacagcaaaacttaaaatatgaagtcttggggagggaaaaactacctgaagcaaatcctgttaaacacttctgtgtggctggtttctgatgctaggaggttttcccctgcaagaaaagacacaagtaataagaatttggcatattttggtttcctcctataatctatatgtgtgtgtggtcctccagccccccaaaagaatagattgaatgtgtctaacacaggttcaggatatggggaactgagcaaaaaaatacattatatggtttgcacattcaaggagcttacaatcttcctggaaacactagtcattgaaatgatatcacaatgaaaccaacctgagcattatgtacatgagctcagagaaggagcccgtattgtggggaggagcagtactgggaagcatcactgagaagggcctcaggtgtggaactggactccagaaaacctcaccttccatggggagcgatgattattgatatgtatgtgtcataagaagcaaaaatagatcagatgtgcagggagacatagctggaaaaggaaagggcgctccagtgtatatgataaagattggttaggtaagtgccccccaaaagtgcatgcaaagccaagtaggtagaaacataaaaaacagtaggacattgagagcacctgtggccgactcgaaacacttcatatggaattggaagaccccgggcaaagcactgagttgggttccgcagaggagccaacygtgacagtgggcagatgagatgaagttgggcctgagggtttcrtcatagtcctagattaagggaagatattttacaggaaaaaacatgatttgtagtttgagaaaaatgaaaaggaggtgtgggacgcctctgagctgctgaaacatctaaggtagcatatatgtacccagcaatcccacccaacattcccacagtctaggcagatggagaaggtgatcctgtcaagaggcrtggctgggagaagagtggccatagtttgcaagtccaaagaatacatagaaaataaaagaggaggaaatgcccatgaagaaatcagttatgaaatcaatcaggagcatatttgttaagcatttactatgtgtggaaaatgggtatccttggggaggaaagcctttttaaaaaggctgtgaagtcactacatagtactttgcagatgtgtgtgtatatatgtgtatatatatataatgattagaagaatgaatgaatggatgaatgaatgagcacacccaaaagaaatgtctaggaagtgctttcataacctctctagtgagtccagagtattgtatgaaatgcaatgctttcaaattgtgggaaaatacgcaggtatttccagaatccaggtcacaaagaccaaagaagaatgataaggctaggaaggcagaatacataagatagtgcaaagggaataaaaatgtcagatgggctcataaaaattctgtgaatacattgtggaaaaagctaggtgcaaaatagcattggaaaggaggagaagaaaatataaaactcctgtcaatgtaggcagtgtctccttgaaactcacttcaccttttatgagattatcatttatacccatctgccacaattctaagtggctctattgaaacttactaagttcttctgagttattgggagaaaatattattctaaatacgttaacgtatgtacttctcagtgaagggggctggaaataagaaactagagttccattygggatcattttgaaaggggagaaaaggctggggtaaataggaaagrattttttagaaactttcatcaaaggcaataatgctagcatgggttacttaataattataaaagatgatatgggaattaagggaaatgaagccaagtggagattgggaaatctgaagaaaatgaaattgcttgtttgaagtgagtgacctttaacttactcaacttgcaagacgtgggtcaaaagatagagggaggggaggacaaaatatgtccaagggtcagctctgcaaaggatggcctgagtcacccagagtgaatctgaaatgcctggttccaagagatttccattttatttatgtttacagatttaggggttatgagtgcaattgtgttacacggacatactgtgtggtggtgaggtctggctggtggatgcccatcacccgaacagcagttccgagagatttgagagcagagtgcagaccctgggaagctggaggtgggtcccacacacagctgaggaagaaaagggccttgttgccagtactctggctaygaagttatcatagtacctttgcaggagggattattatattaattagcttaaaaaccttgataaaaagatgttctgaaaagatgactcatcctatcasaggtttcaggcaaagacaaattggggaaaawaaagaatggcttagacagaacatgtcagcagccagtttttaaatgacatgtttgccatgtgatatttcacagaaatggctacacagaaatgaaatgtgttaacattgatgatacagaaatatccaataaaaatagcttaagagagtgcttttatgccctggaatataactacagaggaccgtattgataaattatatggtaagatttattgggatgcaaatttcaatcatttaagctcgattaacgtactatacattggttatctaaactggagttcaaaaacccagatgtctactgaggtcaggcagataactgggagcagccagctttgtgagaaaacgcacatccctgcaaaaggatcccagtgggtccctgcttttaaaggtctgggaaggaatcagaagcctggggcctcaattttaaaatattcattcaaaaacttctagaatatggtgcaggccaaacagggtacatctgtggcccraatctggcctgcgggtcaccagtttgcaatctctgttccaaagttaargcacccggtatctttatactgcagagttttgaactgtgttgtatggattacgtagcagtcgtggaattaaaactggtcacaacagcaggagagcaggttcaaggccagcatttgttctgagtggctggtgtggagtaccacactgaaagtaggggtttttgaatgttattttgcctacagtcagaacatttacatacttaatggagtgcatagaaattgatactgagaaattaattattgcctgtaatatttggatttagtttgtagtaaatatcctacaaaaatttggaaccctcccatgcaacctgtataaaaacgctccgggtgtagaggagcctcagcagaggagatggatttggcggtacaaygagartcagtcttgaaggccaggacgcattccccaggggcctaacaggaggctcawgaacatctgcagtgatttattgaaccagtgctggaaggaaaatgacaaaatatttgagtcaacaataaaacaattatgcagatgttttacgaagctctgttccactgtttcgcaatctggggtggtacacatgcaggtttttattttttaattgacttgatttttagagcaagtttaggttcacagcaaaattgtacagaaggtaccaagagttcccacgtacctcttctckggcacackcatggcctctcccatgatctctacatcccgcaccagagtgggtcattggctacagtgcrtgaacctgcaccgacacgtcactatccccctgtccatagttcatgctggggttcactctcggtgctgtactttgtatgcatttggacaaatagataatgacatctatccatcattatagtataacatagagttgttttactgcccacaaaattcctccatcctctgcctattcatccctaccccsttacctctgacccctggcaaactatggatcctcttgctgtctccrtagttttgcattttccagactctcttatagttgtcttatagttggaatcgtatggtatgtagacttttcagattggtttcattcccttagkaatatrcatttgaggttcctccatgtctgttcacgtcttgatagctcatttatttttagtgtgaatattccattgtctggatgtcccacaggttgtttgtttgttcacctagtgaaagacgtggtggttgcccccgagygttggcagttatgaataaagctgctgtaaacatccatgtgcagggtttcgtgtggacataagttttcagctcatttgggtaaatagcaaggagcatgattgctggattgtgtggtgtgtttggttttatcagaaactgccaaactgccttcccgagtggctgcaccatcttgtatccccacccgcaatgactgagaatttttgttgttccacaccctcaccggcacttagtattgtcactgttctgggtttcagccactttaataggtgtgtactggtatctcattgattaaatttgcattttccccataacctatgtggaacgcatttgcatatggttattttcaacctgtttatcttctttagtgaagtgtctgttaaggtctttggcccattttttaattgggttgtttgtctttttattgttgagtttaagatgtctttgtatattttggataacagtcctctatcaatcaaatatatcttttgcaaatattttctgtggcttgtatttccattctcttgaatgtctttcccagagcagaacattttgatgttaatgaagtccagcttgttaattctttctttcatggatcatgcctttggtactgtgtttaaaatgtttggtcatcttccttggggaatgagcggaaggtgacggctgcgagcaaggatttttggaagagagagaatgcatattttgcttttgcctttgaggtgctgcaacatttaagtagaaagtccctcagtgctgccatctgttgctgtggccacagcttccctcctagggcctggcgttggcacaatcactgctttatggacatcagttctctgttctacatgacagggaggttcaattagtacatccctaagctcttgctacctatacaatgttatgatctcatgagcggatactgtgkctatcagtgcacagccaggccactcttggtttcttttcctgacactcctcccattgcatttctgtctaacaayggtgacgaggttggagagagctccaggggtggtgtgcctgccgcatcctttcacatatattgtatatcatttcaactcagcaggatagatgatgctgaccccacctgaccaggaggaattgagaggtgtagggagttagtgacttgctcaaagacacaccaaaggcaaggaatgcggccagatccaagttcagaccagcctccygagggctgtgtgctttgatttgatcacctgtttctctttgaattatacgtgcatcagatcagaacatctaataacactcatgggaaagggggcttcctaaaggtggagttactgcaggtatcctgatgcctgctttccaacctgccttgaattttcattgacttaaagttgagctacatacgacgtattagagaagaaaaccatggacttctatcccawtataataattagctgatgatattgtcattattcataccactgctgtctcctcattaggtattgtgttcattgggaacagggccttaatatttgcccctgtttacccctagtacttagcacattttatcttttataggcatttaataaatatttatcaaaaataagcaaatgcacaatacagtagtaaygctgtatttttaaataaaaattcatttttaatttgatsaggccctagatctttttggtctgtcttctgaagtcaggatttttgaaatgtagtgagaaaggaagggaaatgggatcatttagtgctttaaactgcagtgtaagcactcagtgtgtctcagttgtaatgctcttttggcagatgcgcgtctgcaaccctgaacaagtttcagcctcacttgactgattagttgccctcatttaaaagaggagccacatctgtgcagcactgatggacactggggtcagtctgaatgacccttctaacctcagaattagagggtgagttttccagactttatacccattccctggtgcctatgcttttgaaagaagaaagaagaaaaattctaggtgtttagttctttattattcagttgccataaacaatttaaaccccttttttccaaccagacagttaactgtaggatctgagtttggaaacagactctgtcctaggatctgtgtgtttaggagcgagctcggctgtctgaagacttcttccctgactaggtgagatatatagagacgacactgctggatggagttgtcacaagtggaatgaggtgatttaggtaaaaaagcttctgcaaaatgctgtggatggtggtctaagatgcactcagccactaacagagcctttttgacacaggtaggtcattccactgattctcaagacgaacccataatagacctttaggtccttcaaaatatacatcccgcgttagcagggaccttctccacttttctccatttcggtacccacaacagtgaccgacagttacaagggttaaatggacattgctgaattcatgtgagtgatttgccaggcccataatgccccaaaggcccagtaggtagttggatctgaaagcacttgctctctgagacatgatcaggcagccatttactgtctaaaaactctctgaaaattttaaccatgcttatttaaattttaccacacatgtgcacacacaccccatttatttccctggaaggaaggagaaggtggaggagaacgttccctttgctttaggattccctttgggcatatctggcacagaggagcgatgcctggggtccagcatcccttatcagtttccatgggcaccttattgatggtgacaggtgaagggtcggacgttctgacatcagccacatcatacttccatagtagaggtgacattccaatgtggcttcctttttacctgctcagggtgtagcgaaaagcaacttctgccttgtctcactgttgacatcttaccttactgttggcaagaaaaggattaggcaaataggaagtgactagtgttaggtactggccttcccggctttcttcttcttttcatttgtagcgaagtgtcaccatygtggaacatccatgtgtgcaatgctgagaagagttcccccccttttyttttagaggggacttatgatggaggatggaagaaatgagaattcagagagacaagcatgggccacctgccacgcccacaggtgatctgcgctacatgcatgtgctcagaagggtttmggggttgctctgtgggttgaggtgtttcttagaaagaagtgtgcaatttcgagagtgtttccacttcaattttgagtccactatatactgtgagatgcagaaaaggcagagtcagcatttgccttcttcatgtgttcacgtatctayggtctatgtgaaattacagaattattactttctctgtctatggaaaaatgtgtgtaggtatacttcattttttctgagttactgaaaaagaaaaagaggtctgayttttagttcaaagccatttttcacctatgtgctrtacattacagttcttaaaacagtaaaactttaaaggatatttctggcggagaaactttttttgttttaaagaggctatgaccagaaatttctggcctaatttatgtactccactttgatattgagtattgacaaatattacctgatcttaccccttgaatatgtcaattctttgggtagtgtacctgtaaaactggctttgaagaccacaaatacgatgagctatttaggattcatttttcaagtagttaataaaattcttaaattttgaaataacttcagacttagaaaaaagttccaaagtattcccgtatatctttcatccaaattccccaaatgttaaygtcttacaaaaccacagaacaatgatgaaaatgaggaaaataaaattaagataatactctgatctgatctactgacctttttggaattttgccctttgtcccatcggtgtctttctctgatctcggctccagcccaggattccatattgcatttagctgtcacatcgccctggtcacctctaatctaaacacatcctcagtctttctgtgtgtatgtgggtcagggcgggggctggcaggggtgaccttggcgagtcctggccagttattttatagaaagtgcttcaacctgggttatctgatgtttcatgactaaatccaggtcatgtgttcttgacagaaatagcacagaactgacgttgtctcctccttgggaggtgtgtgatgccagtttccccaatgcctgatgatgggactctgagggttggctcaggtggtgcctaccaggtctctccatgaagttactgtttttctttggctcctaatatgtatcttgtggaaagggcctttgacacagtatgaatatcttgcttctcctcttactttgcaccgtaacgtgactatccctgaggattcttgcctgaaacagctcttgctgcaacgttcagtggttggcgccgctgtctccatcccgtctcatttgttagttgggattctgcagaagggaagagctttccctttgctcccatttgcttacatgtattcagttatttacttagatcagaatgggcttgatgattggttttattctatgaattgtaatccatttccatcattgtttttcaaatcatctccaatttgttctttgggagctccttccagctggcgcatgtgtctttgtgacacgtgctgtcattttatgaacatgtcgttgctttcctggaatcagaagttccaggctcactttgttctctccctgccccacccctgaaatcagcctttctcttaagacttctggacccttctatggaaaaacaaaaatctaagttaggggggctaggcatgcccattgctactgtggtgtctttgcttctagacctaactaaggctatattctccggtgacgcagtaaatggtcgctgttagagaaatggacatctccactaagggcacagtttcggccagtgcccccagccatggcacgtgtgtggtgatggtggagaggctgtgtggagtggtggaaacactggcctgggaggtcagagacctcgttcccatctgccccaccctaagcctcagcaccttccagtgtacaaaggggccatgaaacgaccctacaatgattaaccctacaatggttgttgtgagaacaagtgagataatacaatayaagcctaaaacagcaagagaaactagaaactgatagctcttccttttatctccttttcttacccatttgcatcagaaccttgggtcctttatggcaaattacttgcttctaccattgttttgatsatttgaataattctcctcttaattagaygtagatttagattctccttccttgtagtctgattagaaaactttaagaggaaggttgcactgttatgcactaaaaacaatatttatcaaggaaatcgttaatgtgcccctactgggtatggtaggatgaacacaggtcagtttcaggtagatgaaytttcctgttatttctctgaagaaggtcgcagccttcacrrcagcttcacagtcttgccaggtgatctgcagtgacatctggctgatgcagaccaagtatttcaaactcaaaccaacaagcagctgtttgtgttggagtggagtgcggggtgaaggctgggggtgcgtggagaagaacgctctagtccgttaccagatctggtttcattctggcatctccctaaatcaggtcacagccatttcggcaggtatgtgtttctggtctcgcagtgccagcctcctgctgacatttcaccctgtatgtgaggcttcagaccccttcacccagctgaggaggctaacaygtttccttccttctgcttgagagttttggacctgaaatatgatctttatggtataatcacttcagaatctcatacaaaggcctcttgaggttgatggtgtccagggcatgcaatcgggatgcgccctgtggtcagctggcacctaccctgccggcaagggcctgccgtttgtgttgcgtcttccatcagatgtcacctgygctggacacacgtggagacctagccagcccccagagacccagttccagatgcagcttaacttttatatgcctagtgtgttccaggtgcagcttaatttttataatttcttgtttctgacactgatcatcataaatacataagataaatgtaaaataacaccactattttcataattcccaatgtacttcattactttgattctgtatttcttttctacatgcctgtgaactacaggcccaatcttgcagcataattcaaaaagcgtttttatgacaatgttctctctatgtcgtaggaaaaatatgtatgcttctgattttataaaggtttttagtttacttattctacattttcctatattattaaattatatcataaacaagggtgttttaacatatgcttcgagccctggagaatagaaaagtcttattttactggcatcaggaaatggattttcttctaggtatgagttaattttctggaactttccttaaaatgctacaattatttttccattgatgtctttactgaaataggttatgcacagccctttgttagtagagcatgctgtcaatacagctggcacttttccaagtggctccgggtcatcgtggtgagcctggatcagttctccgtgcgccaagaggtgggccgtggtgctgcaaggcgtgtggaggtgcgcggaggttcggcttttgcacgttggcctcctctgctgggctctggaaggtggtgttcccactccctcctccttgggttcctttccacttctcactgcttcaaacaagtcccctcctccttgtgtctcacctgccctcggctggaagatgggcggatgacagagtcagatttgttgagcctcccacgtgccaggcgtgtggtcctggaagtcagctgatttccttgtcccagttgtgttaagaggcaggtgtcattcccacatggggtcatggacaaggcacccgggtttggagaggtagagccccttggcaagccatgcagccaatggccagcagagcacagtggcayggccagcattttaactgaggcttgaagctcaaaagcattttccctgccacaccaccctgaagtcatctgcagaagccaaatgaccaagtttttctggcacagcagtgaatgttatcctactgtcattcttttactcgacacatttttgttaaaagctcacttggactggcgaggatggttgccttctctctaaagagagcagagagctggccatgccggcttctgcatactcacctccctttccctcccctccccacccaagaaatccctgccatcttttgcattcaggtccaagctcctgagcctggcacgacaggcatcagagtgctcatcacaggagtgtgcagagccattcgtcatccatatgcctttcctggttttggactggcagtgccggtgctctgaggcaggacacagttggcatcggccctgctgaacctggccccttgtctttatatgctaggggttgactgaggccagtgaatgtcttgtatactgtaggtgcttaacagcagtctgtcaaactttcctcctggagtcaaatgtcatgagctttgtgaccactgctttccagagagtttcttttttctgtatttttttttgaggggggcagctgtgttctaggtgttgatgatgtttggagcataccctgtgaataacagatgtgcagctctgtataggatcttcatggggtttaaaatcctgacctacatattttttatgtatacataaatacacatatacatataaatatacatataataataattacctattgccctcaatgttatacaggactgtgttttaaattaaacatgtattgtgtgtcttattttgaagctattccaatgccattatttgggaaccattgaatctgaaaatcctgaaatattgcaaattttatcatagctattatctactccatgttaattttcagttgtttccagctatagatcagttttctttgtctaagtgcttcttacactcrtgtcactgaaaacctgaagagtacagagcccagcccctgttttgggtgcttggataaggggagcttactggtggataaggaaaactccagagactgagagctctttggagttttctgggtgctccagcacagggatgctttgcaaagattcctcaagcccttctgcttgtacaaccaccagaaggtgctttagagaaggggaggcactgagatgacagctgtgcaactcaggatgcacccaagacagaaaaaacacgttcatctttgtgagcttgagttgggcatcctttccgccgttctccctctgtccttcttggaggtgctgaaagtgtgcgtagctccgtctccctgcccctcctccctccactgggtcatgcaggggctccctggacaccagatagtgcgaggtccttcccctcgcctgtgtggatggtggggaggctcagggcccactgggtgaccggaaatcctttctccagtgggctcattgtgctctttgtgctctgctcagcagccgctgccctcgctgtgggtttcctttgtgattaatccttatctgctcaaaaaggcttgcttcacatttgccctkggctgctggtccctggcagagtgcaactctgctgccttatgccttttttaagtttttggattcctttcaaattttctcaaatctcattaccctgattaaacattttttcgattaaaaattaaatttctagaaaagtgtcaggaagtatgcaaataaacgctggcatgctttccacttgagaktcatcaattgcttacattttgccacattcgtggttttactgcctctccatattactcttgwtttttgctgtgccatttgagattaarttgtaaaggtcatctcccttagcccctgaacatgtcagcgttagacccaaggacaaggattttcttttacgtaagcatgatacctttattaagttcaggaattgtaacattgttgcaattttatatcccatgtccagtgcacgstcactgtgccagttagcctagcactgccctgtstgtttccccragtcagcatctggtctccgcgacgtatactgaggccccacattgccctgcctttctwygggctgctgttcttttgctagatgagttttgagttttaaggttttcttacccccatccagctccgtggccacatttctgctagcgtgactccagggctggaggaccgggggttggcagccttctcttgcttttcctgagctaggattcgtggcgacagagttggaactactccaggcgggttgtgacacgtccgtctccccacatggagaacggtggcttgccagttcccctygcgtcccttcggctggcccggagcttggtgcgtgtggatgctgccgtctgtgagcccattgtgagaccgcacggctgaaacagctgaattggggaatagctttcagctctttatctcagtggcgatctttcgctgtgtgcagtttcccgggtgcaggccggggcatgacttcattctttaggttatgcggcaccccccgcgcgggctgctggctcagtccccctgcttgctgtatctgcgtctggggaccgccaccacccgcatctgtctccacgtggtggccatccaggactctcagtgacgacaccgcagacggttgagctgggagccctcacacacttgcaggcatcatcatcccagcaggcatggtggagtctggggagatgcgcaggaattcccgcgggctcttagagtctagtgttcagtggaaattcgtgctggggataaagaatggccctggctggagtggaatttcgatgactgccacatcatcttcaggaactccattgtattctacgggcagctcccaaacccaagactgctggcagcagaaaggcctccaggaaggcacctagtgacgtagataacaaatccgttttaygtgccacatttcctcataggatgtgcataggatctcctttcctgaaagccaggactggcatgcagctccctggtttggggttgcagccacctgtgtggagtcagttgkctgggctgtgtccttgtcaccagaatcagctcccctgactctcagcgtcacacacttcctgatcccaggctcacgcgctgtgaagcctggtgaaagcacatgtgtcgtctctcctgggttcacagcctgagctgtgcgctatgaatgcractgcacacagctktagtttagggtgcctcaggctcaacactgtgtgagacttgtttttgactactttaatacttttctttatttagaatgtaccccacaccttttctggctttgtgatgtactcaaattgccttcgtagaattaggaaatctgcatatggaaaataaaccaaaatcgtattgcagtcggcgctttcctctttcctctttctgtgattttctacctccctacctttctttatcctttctttcatctgkctgaaaggaagtgaggwcacactccactcattcccagatcacttgaaacatttggagcctaagggagaatggagaaggcagcgagaaggtctctagcagtcaaggccgatcgatgatggtgggacggcgcccacagcccagcatcttgcagagccgaggtgggctgagctgcagcagcacttggcgatccagcaacagggaaggaggggaagaaagccctcttaagacacagtgagagacaatggggaaagtgtaaaaagcatgtcccagatctcagagcctaatgccctgggatcacgtggtgcaggggccattggccctgtcagctcaggagctccagtggccttcaatccccccatcaacccctgagtaaggggagaggaaggcaaggaaggagagatggaaggaaagaggagaaaaagagagggagaaagaaagagacggggaaggaggagacagagagagaggagagggagagaatattatttaatacttttgattcactgggccaaagtagcatgtcaaaacaatttccttctttaaaaccttttggatttaattaaagtatggaactagagttggcattctttggtagattctgaagcatgaggcctgaatgtgcatccattgaaatacattattttaaccttttacttctttctcctcctctccttccctccttttttcccttatctttctaccgtmctccctctgttgttcttaggaattattgggaatttggatttggttttgggcgcaggtaggggttaggagggtggttgccaagtttgagttttaagagggaacctgcagccaggttagttgactcagctaactccagaggacagaatgaatgattctactgggaatggcaaacagggttctgagagctgaaaatacacattttatgaggtctgcaactccttaaagtctatgtctttccctcccatgaagaaggaccagagtctgcrgtcctttgacctcagaaataattaacctggactcctgaggggtgggtgtggaatgcctcctccccgttcagccttcattcctggctgggaggggttggggacgcagtctggggtgtgtgttggaaagcagtgtctcagagcaggctgggagcacagctgccgcagcagccctctcctgccaagcagtgcgagggatgaggatgtcctgaactttttcttttgatacagtttttacagatgtgttggctctgaaaaaatgctggcctacttttttcttttttaaataatagtaaacattcagctgtttaattttaggttttcctttatttacaatgaggarttcatttttacttggccctaatgttgatagcctaaacttacatttctttaaagtttatttgagagccctaataagtgtttgtaagaaatgatctataaaataatatgccatttaatgattaaatttacattttcatttratatataattggtgaactgttactatccatacaagaggcaaaatctactttttcattcgtctagaagatagcatcaaattccattttgatgataaaaataaacacaggagctgggcatggtggtacaygcctgtggtcccagcttcttgggaggctggggcaggaggatcgcatgagtccaggagtttgaggttgcactgagctacaactacagcactgcactccagcctgggcaacagagcgagatcccatatgccaaaattttaaaataataataaraataatacgcagcttgctcattttaatgcatctttcaaagtgggtctgtaagggcgtggtggggctcagtttatcttagtaatctgttttgtgcttgacatggtaaagggttgggtggttttcccaatacttcttgattacatgctgtattctgtcttatctgaacctccgttcctgattttgaagtatttcatgaggggtgtgacatcattcctggaggccaaggccgtcgtgaattcactgcagacagctgtctctccttggtctggggtggtttgtctctggcttggactggagaggatacactgtgtattcttggctttgagttccttgactgctttctgctgcgtgggagttttccaggcatgtttggagagcggacagggttcagccagctagacctacctgcctgctctggagaaatttggttcacttgatccaagttcagatgcacaatttatggtgtccaactctggtccacacactcaggagctcctctaagctcacgaggtccttgggggatcagtgctagcagccgcctttagggcacaagtgttgatggactccttgcagcccttgaaatgaaatactggttttaaaatacagcygtaaactggaaggttatcatgaaggagacttagacccattggggaacacatygaagtgaagcagatcaggacagctggaaattccaggcagggaggattaatcagtgcagcagaatcaggagatgcgtgtttccctgaaacatgtattgtttcactttccttcccattgtatgaactctggaccctgggggttaaaagcctgggccatgcttcctcttcttgtacagtagcaggaatgtgggatgaaaagcactccgagattgttgatctttgtgagatttttgcctaaataaaaagtagaattaagagggaggaggaagatcagtaagatttaaaatcccatacttaagttacgcacatgaaaggaacttctgaaaaatgcttttgccttctgatttgctctaaatatgtgtcagcttccagttggacagtttaattaccaccactctgggagggcagacgcattttgaagtagtagctgcatttttcatgttgtatactgggaaggctgatggtggagggtgagggcgctgggtcctgccctgggcggtctcagccccccacttgctggcgggcaggtgcagggcaagctcttggccttgcagacctcgcggtccttgcctgtgggactcaggcagtgacccccacctctcggggtgcggtgaccgttaagcaggaatctgtttctgaagctcctactgcacacggggtactcaaaaacactggtcctctttccattcctcccctaatgtggcgttgaagaaaccacactccacccagttaaaccctcagatggaagcatgggcctcctgcatgtttctaaattccctttaaataggacccagtgtttcccagcttcccgcccggtcacagctgggacccacctgccctgtgcccacctgccctgtgcagccactgtgtgctggcctcgaaatgagtcactcactgtcaccgggggacagccggtgtcccggctctgctctggccttgcagaagctctgaatgaacaagtggcaggcactgcaccaggcccggggtggcagaggacgcagagtgtccttaggagacaatgtctggcagagcccctgcccctgcgcggcttccctcactgtctccacctgggcagctcacaggaagcgccctcagctctgatgcaaatccccagatggcttgaggaattccccttgggtgcggttccctgggcacagcaggatgtgagttctctctaggagggatggaacctgggcagtccatcgcttctgtgtcttccttcttatcttcagtaatttgaatcttaaattttgaggaactccacttgatctaaaagctagggagcccttgggctgctgggaagccacagaagcagcactggggtttttgctctccaaatctaaacagcggtagcacttcaggagaacgcagcagcaaaccagtgagttagcaggctcccaaatccgagaggtggaaaggaagcaacttcaaatgttgttttgagagaatccaaaattgcccaagagctaatagcttggctgtggaattccatcagaggcagtcccttctgggtgaagttgtgatgggtcggggggcttcctgcgccagggcggtgtgtgggggctccattcccccttcctggggagcaggctgcctcttgtcctctcctgtggtgagctctgctgtgaccacattggggctgtaaggggagttcatggaattggtgaacaaatctttttcacatttttaaaattgtggtaaaatacacataacagaaaatgtactattttggcctttttttttttttttttttttttttttgagacggagtctcgctctgtcacccaggctggagcgcagtggcgcgatctcagctcactgcaagctccrcttctcgggttcacgccattctcctgcctcagcctcccgagtagctgggactacaggtgccctccaccgcacccagctaattttttgtatttttagtagagacgaggtttcaccrtggtctccatctcctgacctcgtgatctgcctgcctyggcctcccaaagtgctgggattacaggcgtgagccaccgcgcccggcccactttgaccatttttaagtgtagagttcaccggctgtgagtacagtcatactgttgtgtgaccgtccccaccatccactccagaactcttttcctcttgcaaaactgagactcagtacccattaaacagaaaaaaaatgtcatactgtatgtcagcacgagaggcatgcattccgtcttcatctctagaaagcytgggccrgagatggccttttgtaccacccttgccgtggtgacacttggttttagttggctgtgactactagggatctatgagttcagtaagtcacaagcctgtcctgtgtggagaggttacctgtaatggtgtgatgtggtttcactgtatccccacccacatcccaccttaaattgtaataatccccacgtgctaagggtgcagccaggtggaggtaattgaatcatgggggcagtctaccccatactgttctcctggtagcgaataagtctcaagagttgcgayggttttataaatgggagttcccctgctcaagctctctagcctgccgccatgtaagatgtggctttgctcttcctttgtcttctgccatgattatgaggtctccccagccatgtggaactktgagttcattaaaccttttttctttataaattacccagtcttgggtatgtctttattagcagtgtgagaacagactaatacaggtggcacggagcagagatggcacgagatagaagaatggctcctgacttcagagtgaaygagagagatgtaagattaggttgcctggtagcatgatccatgtacagcagccttcagagtaacggggatgcagctttacatccattacgtaaagaaggaagagcgtctgggaagctgatattttggctgtggccctactatgccatgcatgtcagccgactagtccacctacagattcaactattgcacaagaacagatgcagagcccggaggagaaggcagcacttagctcccacttcctttcttggtctgatttctgtgaccattaaattaatataattaaattaggttgactgacctatttctattttaaattagaatattttaccatgttgcaaacacgttcttaaaaatacacttttagtttcacttgtttttatgaaccagaaagtccaaaaactggacaataagctcagcatagtgaattgttccagtaaagattcgctctggtttttgaaaaggaaaattcatgttaagccagtttcctgtctagtcagcagagtgcaacagaagaggaaagatggacaatgttgattccttcacctccttaggctaaaataagatttcccatcttgtgttttgctccacctagattttgtagacacgcttaaaaattttttttaagtagtattgttaatgaaatactttcagtttgtttcagatttgcacaaagtttagaataaatatgtcctgactggagagtgaatcatgcaattagtcactggactgagtgagttagaaccacctaattagggtcaatgagctaaaaaataaaaataaaacaattaaggctagacggaagaggaggaaatggtgactttttgaaaagaaaacaaggtctggagagtattgccttaaaaaggtaaaatgtgcaaattaacaagatggaaaaaaccattgagtgtggttctgaaaactgagcaaagggcgcacgcgtcagaaatggctttggaagccaagggcctcactccagggaccgggcggccccgtgtcatctgaagtctttgcatccgcaaaggatcccataggttgctcaggatcgccggtgaatgagatcctcaggttaaataaatattttggtgacagatcaaggctgcatatatctatcatacatgtattttccacttttaatgctatgaaatgcaatgaaagacatctaatattaaaactatgctgaacttattttttgaagatatttaatgatttaaggatttaaaatatatatattgtgggaactacagtgtatcagcttctttgcatagtaagactaccaagagctctagttaaaccgaaattgaagtcaaagcaacaaccaaaaagttaacattgtttattaccttatttattaaattatcatttatatcacctggcaatttcagattgactattttttaataaagaggcacatagttggtgtaaatagatggaaatacattttcaaattcaaaatatttattaccatttaaattttcttttctttttttttgagatgaagtctcactctgtcacccaggctggtgtgcagtggcaygawcttggctcactgcaacctcyggctcctgggttcaagcgattctcctgccttagccgcccgagtatctgggactacaggcgtgcgccaccacgcctggctaatttttgtatttttttagtagagacgggattttaccatattggccaggctggtctcgaaytcctgagctcatgcgatctgcccgccttggcctcccaaagtgctgggattacaggcatgagccactgcgccggcttaaattttattttcttgagtgctgcccggttcactttggctccacgtgacttctgctcatttaagcttcacagtatgtggtagcaaaaggttttctagaattttctggatgttaacatgcttaatacaagttctttgtctttaggaaccatatktctatttctacaaatctcatagccttgttgtattgtatgcactgtaggcaatgggaaaataagtattcaatgaatgtcagtgagaaaagaaagaaacgagggctatttgtgtattactcattcaaatggaaggaccagggacatggaatgaattatattttccatattttatgtatttcttatttatttttataataaattatgaatggtttaaggctgctaaatattcttcttaggttcctttggaaaaggcaagagttcctgaagttgtagcacatttcaatagctacatagcattacgcttgtcaattaattagaccatttggcttcaagagttgctggtaaactctatttatgtattctcttttttcatgtcttaagagtgagactcccctctcagggttatagtggggaagtgtggtttggaaaggaggcctcaacatgcactgaccttgtacagttaaccacagtgtctcacagggtcctggagagatagctcttggcaccctctgccactgttcaaataccagtgtatgtcattgagagaccatggctttgaccagcaaaagttcaacttttctctgtggtatacctcagtttttcttctttaaccayaaatgtacttgtgcttttaggtaggtcctttggaagtagcacttacggtttgcagagtagcatttttggtttaccagccgttatcttccatattcttatggagagttttagttgctgttgtgctcacatttgctcatggccttggaaggatgtcgcatggaagtctcccagatggatctctgaccrcttgtcaaatgcagagaaggtytgccgcaggatctcytccacrtgttcgttattctgtagggtttgttatgtgcagtttctatttacattatgtttgagttttcaaacctggttttaaagatacaaatcagataatattatccttagaaggtgatgttttcaagagtgatttctttgggttttgggaactgtgcagcagcatttcagaatctatcttttatragtagtataaattcttccatttatttttgaaaagtggctttgcaagtgagtgcagttatgaaaactacactttagtttcattctggctggctgggattagtctaaacatgaagatttttttaaagacatgtctggtgtctgacaaaagagatgaacagctatgattgctatcatagagactatttaatagtccctctgtgaaatggaagtaatattaaattaatcaatagaatgcatttgttgaatgcatagtgartgcgtggttagatcctatcccacaggaaagaatatctatttgctatccttgttgctgaaagtatcggatagacccccccgccgccggtctggggcaygaatagagtrtagctgggttaaagtggatgsaaacccctcaccccatggccgacctccgcatttccagttgcacctgtaaatacaccagggcttcaaccctctttaaacttcccaatgttcttcaaactccctgtgcacgttctcatttccatatttggttcccttgctttctctttctggaatttcctcctttgctttcccgggcactgacatcctccctgtggttctgggctctgaggtccagttcacctgctccctcgaggatgcacgttcacagtgcctgctggttcctgacmgggcagcaccactcagcaagtggccatcctcctctgctgtcttcacctcttcctcccgagtatcatcctcgtccaaaaccatttttccttctccagcatcttgtaggtttgttgcaatcatcctgtggagtcatttagtttttttgatgtgtttttccccccggactagaatatgcccgaaggtagaaaccacgccctattcaccctgtcgcttggggcccaggacaactcttgaacatcttaaacattatataggtgtcttgtctctagccrgagatttcatggggaggaggctgaaatgttaggyaagattttaaaacagttaggtatgatttaatagataagaagaacatgagatatacagcgtgatttgtagaataaaaatcttcacataaaatttgtctaattgacagtagaattaccagctaagaaaatgagacctattaccttctcctgtcataagataaggtcagtcacagtcttttctttcctttgcctccttccccctcccttcctgccttccccctcccttcctgccttccccctcccttcctgccttccccctcccttcctgccttccccctcccttcctgccttcccccttcccttcctgccttcccccttcccttcctgccttcccccttcccttcctgccttcccccttcccttcctgccttcccccttcccttcctgccttccccctcccttcctgccttcccccttccccctcccttcctgccttcccccttcccttcctgcctgcctgccccctcccttcctgcctgcccccttcccttcctgcctgcctgccccctcccttcctgcctgcccccttcccttcctgcctgcctgccccctcccttcctgcctgcccccttcccttcctttccctcctttccccctgttcctggtggaatcaccgttctttcattgggaaacctcctgtcttcccctcatgacactgaattggtccttgagccatgacctgcctccctcccttgcactcttctcccgccttcttgcggctgccctgctctagctcccatccccaagggcaaggacgtccttgcaagtctcctcatttcccttccctcctcatgctaatacacttgacacaagtctcacagatgaatgccaccaaaatccagcgaatgggataggtctccctcatctctaaacttttagaccctacccaaggcctgctagaaaatgaggtggaaaacacttggccttttgtgggcacaggcagctgccccaccagtgtccttgcagcactctggccttcaggcagccctgtgcagggctgaagccgacacctgggctgttctgctggcacacagacctcctccgmgggaagtgtgctcctgctggcttgtccagccaccttccttgtaatgggcttagcgtggtaggggccacagcttctctcctcttaaccagcaagctccttgagaacacagctcatgtctaagtcatccttcaccctccagattgcaagtacagtggcaagcacatagtaagtgctcattaaattgctaccaagtgagtaagagtagcaggcctgttcagttgcatattccccagttctgtggaaaaggagggcttacctaagtctgctttttagaagaggaatttatctttttaggatggggacacacagagaatggcaggaggtcatataatttgggttacattccaaatctccactggaagagattagtgatgtcgctattctgggggagaagatgagcacaaaatcagcaatgatttaaaatatttaattgtttaaggaaaaaaagtggtcmtactgccaccactggttttactaaactctgtttttgagttgcatgtccgtcatgcttgaaatatttcactagtcacttaggcttttcatgtttccttttaaagtatgttacaaactgtagggctccttaaagggtcagctggtggaacgcagtgggataaatagaacatgggcgctgctgtgtcttcctcagagcaaagccaccctcccgcttctgtgctgtgtatcacttcccagaggcaaacggagccctcatgatatgcttcaaagagagttctgttgatgggaaaactatctgcatactccctcttgctagccgtccagtaaacctatggatcatggcattaagctagaccatttgtttggaatttctcgcttaatgtgacaatatgcagtgcacttcctggaccacagagggatagacagcagctgttggctaagtcatcctctgataggagctaagtgatcctctgttaggagctaagtgatcctctggtttcaaacctagacccagttgggagttcttctgaaggctgagtgcagtaaaggttgtgggtggggtcagagggcatggagttttccatgtgtggtatcatgttggcgctcaaaaagttttatattttggagcattttgtattttggattttggggttaggaatattcaacctgtagcgcatttcttttacaaaccttctcctactccaattaatcatgttgatgggcatgaagacagcacattatactttatatatayacacacacacatacatatatacgtataattatacgtatatataatacatacataygtataattatacatatatacgtataattatacgtatatataatacatacataygtataattatatgtatatgtaatacatacatacgtataattatacgtatatgtaatacatacgtataattatatgtgtatgtaatacatacatacacatataattatacgtatatgtaatacatacatacayatataattatacgtatatgtaatacatacataygtataattatatgcatatgtaatacatacatacgtataattatatgtatatgtaatacatatatacttataattatatgtatatgtaatacgtataattatatgtatatgtaatacatataattatatgtatatatacctaattatatgtatatataatacatataattatatgtatatatacctaattatatgtatatatacctaattatatgtatatataatacatacatacatatagttatatgtatatataatacatacgtacatatagttatatgtatatataatacgtacatatagttatctgtatatgtaatacatacgtacatatagttatctgtatatgtaatacatacgtacttatagttatctgtatatgtaatacatacgtacttatagttatatgtatatgtaatacatacgtacttatagttatctgtatatgtaatacatacgtacttatagttatctgtatatgtaatacatacgtacttatagttatctgtatatgtaatacatacgtacttatagttatctgtatatgtaatacatacgtacttatagttatctgtatatgtaatacatacgtacttatagttatctgtatatgtaatacatacgtacttatagttatctgtatatgtaatacatacgtacttatagttatctgtatatgtaatacatacgtacttatagttatctgtatatgtaatacatacgtacttatagttatctgtatatgtaatacatacgtacttatagttatctgtatatgtaatacatacttataattatatgtttatatgatacatacatataattatatgtataatacatacatacttataattatatgtataatacatatatacwtattatatgtatatytacwtataattatatgtatatatacatattatatgtatatatacatatatacatttgtatataattgtatatataatatatacaattatacatatataatacatatatacgtataattatacgtatataatacatatatacgtataattatacgtatatataatatacgtataattatacgtatatataatacatatacgtataattatacatatataatacatatacacatataactatgtgtagaaacatgctttaaaattaaatgttattataaatttggagattgtagatggaatagattaaaatgtaatttatttggctgggagtggtggctcacacctctaatcccagtgcttcgggaggctgaggtgggtggttcacctgaggtcaggagttcgagaccagcctggccaacatggtgaaaccacgtctctactaaaaatagaaaaatcagccaggcatggtggcaggcacctgtaatcccagctacttgggaggctgagacaggagaattgcctgaacccgggagagggaggttgcagtgagttgagatcgcgccacagcactccagcctgggcaacagagcgagactctacctcaaaaaaaagtaatttatttatgattaggaattaataaagaagacacttatgcccagttgttggaatttctgtaagtcttcccgtaaatgtgctatcacttttcagacagcaattatagactcctttatcagagtcagtgttactgggactaaggagaattaaggcggagaagactgtgcctctgctgtaagtcaggtgtgggttcaaggtctttatgctctcaggctgtgcggccaagatctgaaaagttaaactcctgtctgcctcaggaatgtgctgtcttaattctgtaccggcttgcacctgtgcctgtctggcagcctgttctcgccgtctttccctcatcctgggttcttcctaggtgaacagccctgacttttcgcaactcagctgaagtgtgccctaccttgggggtccccgagtccccctctggcatgcccgtgagtctctgctcacctcccttgcagcccacgttttattgtaatttcacctttccttatccagcttgctcacacactcagctctgtattcttagcactggggggtgcctggcccatgcaggcgtgyagtagatgggaagtgaatctcaccacctgttaagaaaaagataagtatgactgggcactgccaggagctgtgaaggagtgcctggcacaggcctgctggtgcttcccctgccccacccactcaccctagtcttgggcatggggccttggggctgtcttgcgtgggctggscttgggagtcagatgttgaaagtgaaggcagaagcccacatggccggtgcaggccagggtggcaccagggtgtggaaggagtaggccatggaagatgaaaaccgggaatagctgggagaactccstgcccttcagcacagccggragccgcacagttctccaaagctggaagaaatagtccaacgtcttttttcgtgcctgtctgggtaaaatttgctgttcttcaaagggtgcctgtaaaataggcactggtggaatgaaggggttaaagatgaaagttacaaaggatgggagcagggctggtgggaaaagaatccggggaaccgggaagagtagctaagagtgacaactctatgggtgggagattccttctctggaattagggagtttgagtttcattgagagaacgaaatgtctctcaagtctacatatytgcctggagctgacacttggtttgggaggggmtccgtgggacccggatgctggggacgcactggccttgccccactgtgctagtgcgtcaggccagtgactcacaagcacgggaaggctcgccccaggtcatgcctcccaacagtgtttccacccatgggtcccagcagacacacacgaagcccaccaactcatttcacacacagccatccaaggaaccactgacccatggcaactaatcatactcacatctgcttgcagctggacaaagaccaatgacctggaggtgaagtgccggtcttcatggtcattccctccaggccatcctattccccaagcaggaacatttaatgtccacccccgtttagtgggaaaaagggaagaaaagaagtgaaacatgagtcaacaaaattatatgacagggaaaatgagaccagaactttagtcacatgttgttcctaagagaagccaagaaaacaccctcatttcctcaaggcgtgtggtttcttgggagcctttctgccctgcaaactcagtctctaattgagaagcagaatagagcatgtacctcacatgtacaaatcttagtcatactacagcacagagagagacatgttacatattagaaattcactgtttctcacattttttgtgcttttttttttttttgccaagaatgtatcaactcttgttgttttcaaattagggcagaaatattgtgtaactctaaacagtagtagggactgttttgtttctatgtcttccattattaaatggaacagaaatattattttatttacctaagttgtcctttcaggggagttaatgatgaataattattttcacatctttgggatcacatctatcttacattagtcaaaacaaatgatgatgataataaaacaaatgcagatgaaagcacaatgattttgagttctgtgagaataagggagagaagttaattttacctttaaaaccacaatactaagtatatttttggaagttgaaaaatgttatgcaaatgtaagcttttaagaaatcattatttgtactacaacatttggcctatattttactrttttttaagtaatttttaaatgccatggacacttttttggggagctaattttattgaagtttatcaacttacagaaacatatcaaaggcgaagggtacagctcagtgcattttccccaaagtgaacatagcagtgaacccagactayggaccagaacattaccagaaggcacgaagtccctggagtcctcttctagtcagtagccctcacgagtaaccaggatccaacgtcatcttgttcggctttgacttttacaggaatggagtcacccagtttgtcttcttttgtgcctgcttcagcttgctgcgggtgctgtagctggcctgccctggtgtggccggggactcccttccgtgaatataccccatcgtttctcagtcccttgaactgtttccagctggggcgattgtggatagtgctgctgtgaacaggcttaagcacgtccctttttctcgaattttattgaaatacaacaaagtgcaaacatcacaagtgcacagctcgatgagtttttaccgacgtatacacccgtgtagtcaccgcccgcaacaagcaaagaatgtttcctgcaccccagaaacctcccttgtccctacctttgccacacccccgcagaaggtcatcacaattctgacttcttttccccatagacagatgcctccgttcttgaatttmatatgatgggatcatacagagtgtgctctctctggagaagttttaagattcttttttagggcattcttgggccctgggggtccatggagctggggagagccattttgcagagcctcacagccaccgcggttaaaacaagcgtgacacaagcagcacagcggcaaacaggacagaagctagaaagtccattctccacgtgcagtctttgaggtttcgctatccgaaaaaagtgtgagtgcctgctgcatctgtgtgtggttatcttttattcaccacaccagcattttgtgtgtgtgaatgaagtggaatttaaaataatagaattgaggccgggtgcggtggctcacacctgtaatcccagcgttttgggaggctgaggcgtgtggatcacttgaggccaggagttcgaaccagcctggccaacatggcgaaatcccatctctactaaaaatacaaaaaaattatcctggcgtggtggcccgtgcctgtagtcccagccactcgggaggctgaggcaggagaaycgcttgaatccagatggcagaggttgcggtgagccgacgtcgcgccagtgcactccagcctgcgccacagagcgagaccccagcaggacgtgatgaaggtcaatggggttttgtccaacttgcctcagttggagcaacgtaccagtgcgyccctgccgtgtggccgtggggcttatccctgggagtggaatttgggggaaggagccggggccaggscccagctacagcggaggcggctgagcgccttcyagagggttgggaatgtcccgctcgcaatcccgccgggagcgtgtggggcccgcgcttgctgcgtactcttaattctgcccaagtagccctaagatacagtctcttgcctccatacgcttatttagttgggtagggaattatttaaaagactccccgaggaagtgctgcaaccaggaagagccctcgacggcagtatcaccaggaaagtattttgacatttttgcacagcatagggaatgcgagaaagaatttgaaagataagctgtttagacttggcagatctccacatgtccctatttggtgggatgtgaaacacataaaaattgtgaaagctgcgatgttaaaggtctatcttccatcaaaagcaggaaaaaaaatcagaaaattgaggacctcatcctgtttaactcattccaaatatgccttcatcagaagacatgtcccagttaaactgtataacactgcacccttctcccctccctccctccctccctctctctctgccacacacacacacacacacacacacacacacacacacacacacacgagtagcatagcagctggtattcttcrgttcagttaaaaaggcattctgtaaacagaatgagtgagctttcctctttttgcatcctctsgaatggaattcactgtaatcttgagaagagcgccctcttggtctgtagatgcgagaaaaccagaaataggctttatttcttattaaaaccattracttctcttcctcccctttcttctttggcactcgtactgtgtattgtamaatctttgtgtattttaagaacttaatatactttataacgtgaatactgatggtggatctctgaatatcttaattggagcatgaaagaaaagyttcacagtattaattattttaacatatcctgaaaagtttaagagacttttagagaatataaaagatatttggtttagggattactttgtagtaccttttgcattcctttcatattgtattttttgttttcgtttaaagctgatctctgctattgaagttatgtgtgcgtgtgtgtgtctgacagagtccactggggactattattattattttcttttctgtttcaaacacagttaagtcagtttggcttccatttggagacaacttattatactctgtaggccacatggtctatggggaagaggctaaaaggactttcaaaactgacttggttttcattaagtttgtctacagttttaggagtataaataataaattcayccccaaccccaagagctttctagggtcctctttttccacattggtctggggtacctgtgttgctgttgtccatggctggtctrcttttataagagagaccgagaccccygcctttctttcctttgagaactcccagccatattccccgtcttccaagtggagactgccttcgtgacccactttcatcctcatgaccactcgggttaagtgtgtgcctcacaggagcacaacacaggcattgctccaggaacttggaactcattgaccctagaacaccaatgaggggaaaaccaggaagaggatgagtaccgcacagaatgtaccagttcttcccattctagaatctgaaacagatggtatgggagcttatctgtrgggtcatccagacacsgggagaatgcagagccctcataaaggccctcagatatgcagccagcagggagccggtggagtccaccagtctgcatatagctttagatttttctgggagtccagatgcaaggtgtatttcctcaggaaatgatgaaatggtgacatagcttttcacatgtcaggtcaccartgaaattgtgaacctgggtaacctgcattatttatgtaccccttttaaacacagtaatttacaacagtgaattaagacttgcattacctgacttttattttaattcaycrtttgaagcttatacattacacctgagtgaagggggtactcaggtcatcytttgtattttttttttctttttagcagtgaaccattgaactgcagctaaaataccttcatatgccagggtgaaacccagcacgggcccttatatgacagaaaggaccagaatagtgatattttaaaatagattttatttaacaaagtaaacatacatcttaggatatttgtttgtcattcttgtcattctaaaggctagyttttttgttttttttttttaacaaaaccatttacataaaatgctaggccacccagaatgtgacacaaaaatcatgatcttagacatcttttgttctgaaaagctaaccctaatttagatatttttggaatgatcarttttttagaattgataatcaaattccctacacacataaagccatgcatgtttttggtccaggattaaaaaaaattacttgcttatgaaaaagcgtaaggtggtgggggaaggccggggtcgggggtcagtcctgtctcatctctgattttccccagtgttccttagtacctgaagtggtccccagggtaaaactacccacccgcctgtcaccggcaccggctgggggtgtttctgtaccaaaagcacaagaagcgtcttgacccgagggtccacagtcacagccttgcagcctcttatctgcagtcccaggcaatggaagcattcacggatggcttaagggcccagttccaggaaattcatttttataacctccctcaaattgcagaaagataaagcttctgagattttatcaacctttcagaaaactccagatcaccaaatagccattttcagcttcaatcccttaaatccctgcttaatctgctctttcccagaaagcagcaattgactcacaagtcgaaaatccacactacttcaggctggtgttgagtttctgccagctaagcccagatgactgctggacatttcctaaatggactctgcagatacatgagacttagcctggtgggttttccttttggtatctgtaggagggggatgaaacactgcagagtttaaagaacagagatgtgtttccaaacttggctcaaacgcaaacaggttgtgggcagtggcataatcccagcaaagaggctgccccgaaactccagggacttggagatgacctggtgatggaatagctggtctggacggctccaggtgtcaggtgccagatgccagcgcactccccagagtccccggctcttccctggctactctgtgatctggagcagtcaggtaatcattgccgagttccctgtttggagctttgtcccacagtgctgttgtgcacgaatgcactgtggttgaggtgcgcggtgccactggatttccatctacagttgttacttaaggttgcttagatgggtaacaccagtaacagcaccaagaatacaaccataattgggtactgatttcatcarttctragatgtgcatttattgatgttttaacaactctggaattgggatagatctaacaattgataatgtgtcattgtttaattagtacccttcttgatttcttagtatgggttttacaattggtgtcgtcttagatgaagtacagctcacatcaggctcaatgctacgggagcctggtgtgagctgtatgtgaggctgcctccaaagcactcagggtgtaccggggagacacagaagtaaacaacgagaaacgtgataagcctgacaatagagacatgcagtcagcaattcgcaggagccaggtasggagcaggtgaccctcacctggggattagacacatggtagtrctggctgagttaggtacctctggtgaggtctctcagtactggtatttgtccattttggaagaacctcctggagcacaggttacagattttggcctcatctctttggatgcctctgagtggtcaccaaaacccagattatgaagcaaatctgtgcacatggattgatttaaaatgttaggaggttatgagagtgtaggctgaaaaytgcctaaaatgtgagtcagagaaaaacacagacctatcatctctggagtttttttggactgttgtcagctgtccccatttccaaaatataaaattgagaacagcttactgtcttggaggcacttgttcagatttagctttacaaaataaatatctccagatgtgattgttttatgcaggcgtctccatggcaatgcagctgaggctggaatatgttgttaaaaatatacactttgcatgatcacaatactattagtggcatgattttattttcaggaaatgataatcacctgaagtagaatataagtaaacattttatatcagacttaaagcagagcctctaataaagcttattaacccgattattcatctcatacctctttacattctgtccacaatacctgtgtctgtcatggtttaaaattgggattcttctaaggaaattgcaartgcgtgtrtgtaccgacgtatttctatcttttcatgtgatgacaattttacataatggaaattgaagttgggttctaatttcaactttgtcctagcgtgttataataaatcttctaattcagtttccacatctgtaaatggggatggcactacctatcttgaaatgcttgttatgatcattaaataagatgatcgctgactgtgcgtggcacctggtaagcgtttgaacacgtggtagcttgcttcctttccagcttttatcacaggcttggattcatttccttccattttaaamgttaatttttatgttagaagtgaactacaggctgggcacagtgtctcatgcctataatcccagcactttgggaggctgaggcgggtggatcacrtgaggtcaggagttcgagaccagcctggtcaacatgatgaaaccccatctctactaaaaacacaaaaaattagctgggtgtggtggcggatgcctgtattaccagctacttgggatgctgaggaaggagaatcacttgaactggrgaggtggaggttgcagtgtgccaagatcacgccattgcactccagcctgggcaacaaaagcaacactttgtcttaaaaaaaaaaaagtgaactacaagaatattttgttgttgactgttctttaatgtgacgttcaagctttaattgaattcaaaaaggagttctttaagattggggcttaaaaatcagctcattcctttattctgttctgtacaaacttttttttgcgcggccgtgtgtccttgagaccacgtcattgggagctctcagcctccacggtcttaggtctgacacctctaaataagaagcatgacatttgggtagctttgcaaatatgggtgttgccctgttaaackaatccccgagggagtcaacttcaaatagaaattaacaaagggcaaaaagtataggtgacattgttcactttttgggctgagtaacacttgggatttgttctactcaaggatttttttttatctatttgggcaggggatctgcaccctaagtggaactgcatgacagccccatgaaaaccagtgcagataagattgtgtccgaaggacagggcaggcttcgctcataaacaagtcaagatgccagaaccayctccatttgcatagtgccctcgctttgaaagtgttcttctatttaaagaagttttcttttccttccagggtggctgtgctggctctggctgtggcaaatgtgactgccatggagtgaagggacaaaaggtgagttgccgaaatttaaatcacaacatttctttgtgaattggacagtaagtactacattaacagtaaccgaataatcagcaattcaggtgaaagccttattactgttttgataatttccccagagcaatacaaatgaagccaaaccaggcttgacattacttctgagtagtaatattattataatagctcttctccaaagaatgtaatagtatgtggcaattaatgtagaaaaacatatttggtttattttcctttttgactcttggtagaaaatctgttgaatctatcgtactttttcgaattgatgtataagaactaattttaacatttttccggaaaaagaaactagttcctattctacttgaggaccttctcttcaaattagtatttttaaaccatcttttaatccatcacatgcttgtctagatttatttataaaaatattgcttgggaaacttagtgtttcccaaatgtaaaattaaaatgtatttctttgcaagcaaactgttcccctccctttcatttaagaaccagggctccagataaagataagtttctctggaaggcaagttgaatctgtgcatttcagttggttggaaagagggtgcctggctgtttttttatccagaaaacagtgcagcatcctggtactgtctgtgggtcaccgtggaaaccaggtgtggctgtgaggaaatgccaccaccttaagccactcagcctttggtgcaggtgcgcacagcaggttgggaccctgtagaatggagtggatactctgtaggayactgtttccagaaagctgaaggtgtcattctggctagcgtgtgaattcttacttccctccccggcatgccagaggttttatggggccacagactgatgctttcgaaattcagcaaattctagtttacagaaaattctgtggtttctttttgactatttgctgaaatgccaacattattattttaaaaaatatgcctgataggtgatggcactagtgtwacctggatagtttttgaatgaatggagtatgtaaggaaagtttcacatcttttcatatcaactctaatttatcttcatgctctgctctcttactttggatttttctagcgatttccagtgtgcatgctcaagagttattttaaagtagacgcaagtgtttctcatgccacagacattttgttaaaaacctaacttgaaatatacaagtgagttcaccaaactcataaaaatgtccttaaaatgataaaatggagaactttggggtcccaacaaagaggaattaaggcctggatcatgattacctctgttttccatgtgactttgaaagcagcagggctggagccaagttggccctgctccctcctagggacagcagggttgatgtccacctccatttccatttgcttctgtccagccggcaggccttggcggcccctcctggctctggagctttacatactttcttattctatccgcatctataaacttatatatattttttaggccaggcatggtgggtcacgcctgtaatcctagcagtttgggaggctgaggcaggaggatcactggaagtcaggagtttgagaccatcctggccaacacggtgaaactcagtctctactaaaagtacaaaaattagcccagcgtggtggcacacacctctagtcccagctgctcaggaggttgagacaggagaattgcttgaacccaggaggcggaggttgcagtgagccaagaacacaccattgcactctagcctaggcgacagagcaaggctctaactcaaaaccaaaaaccaaaaaccaaaaaacttgtaacttttttaacgtaatttatttcagtttttcccaaaaatccactcatcaaaacatgacaagggagaatgatagggtgtagccttccctacctgtcaactgacatctccacaacctggtaacacccctcagagccaagccgcttccactccgagtgggctacacatgtgtggggaaggcaggggaggcggtgtccagcacctggcctgaaggaaaggggccgccaacatttcatctcarcattgcccaaggaggagcccttgctgggrgtggccccctctggccaggcgaggtctgtgcctgtcctggcttggagcctgcgtggggcttgcgccctgcttaggacaggaaggcagagaagtgtggggccacgtggaagttgtgtcccgagggaggctccatgccagcttcctacaggggccagctttagccttgacactgggagtcagcagagcccgggccaggactgggatggaaggagyaggatcctgctcccctccttgtgtggccttagccaggtttcccaccaagggacctaggccagggagcccagcacctccaggacttttttggcctgacctgctcctctacactcctgtttctccattgccaactttggggttcttactgtttttttttaattttttttaattccataaagaacatttaaaataaaaygctagcaagctctaccttagaccattctgaatttgtgatttaaaaggcaatgatgattgaatggattcagaagacctcttgaagtctaggcctaggacaatagctaaatggtttagtattatatcattttaacaaaaatggagaaggtctatttttttctcatcttgagcataaacatttcaggtcctatggttcacacagcattgagaaggggaaagarcccttcctcccactgacagaggaaattttaaacaaacttccccttattgtcttggaagtcctgttaaaataatcaatttaatgatgtgaaatgcctcagcttcactgagctagggtttccgatctggttccctttctctcatcccaaagtcagctaagaaagaaatgtactctaggctggcaggtcaagagaagaagtggaycytcctcagtggctgccaccttctaccttctgcacttcctgccaccttctgcatattcagagcgtcccagccctagaaatgcygacctagtgtaaaaacaaaatgactaaaggggttggaatamtggaatacaaatctactggtttagatcactagtctgcttatgagctgcaactgaacrccttctatcctcatagaaattattttgatattctcaaatgtctacacattaaattgattttgattggttgttctttaaacagracagtaggaggcacagctsagatgcagttaaagttaccaagctgggtcagaatgtcacagccttagaaatttggaaattattacttctaagacatattttcccacrtctctttgaggagcactttgacactattatttgcaaaccatcagtatcctcaacagaaactggaatatctccagtacaaatctcttttgactaagttctgctttctatggcgatatgacagaatggrcaaaatgtcttatattctrtagatactataaatacattttagtgcaacagatcattgctggcgttataatctcatagttttcaagtartcartaaatactagatagcttgatctgagttcaacagttaaattcagcaggtttctactggatttcagagagtctttgctgagttgtttattttcccacttgcttggaaggccactcatatcttcagatgttttctgttaggtaattaatttggccttgcacacagtggctctgtgctcctccagagactgcggcagtgtgggaatgctgtctgcttgtactgattagggttttgaatgcttgccttcacagaaatagccaaaagttaagctcttcttttgagtgataatttgattttctcaagtatttaagatagtaggaaaggcaacacattcccagaagttactgctatatgctaaggaaattaaccatttatgttttgctaaaatagagtttacacaagacctctttcaaataatctaacctgggagcccacgtttccataacactatcaccatagtctgtgaccctgcagtgtccaaaaaagggaatttaaagttaaactagagatggaagactggtgtacataaataacaaggcgagagtaaaccatyacattccaggagaakctgttgrgaaaacaaatacaaaagtctttctgagaaggaagtgatccctgggacctggagcataaaatcaagggacagcttccccaattcagcaggaccccagcctctcatgtcctcactaatttgccaggcttgcttagatatagactaggttcttctgtcacacgtacrtgtgaagacacatgttaattgaactgcattaatcagagaaaacagctcttgggaccagctgataaatgctgtcatagcaaagatttgacggtttctactatagtgactccaaaaagggacattsccaagccacagtcttgtgagcagagtctcaattaagtagaattgtagcatttctagtgagtagtgacaactgtgtggatatctcataccttcttgtaatactttaaccctgctgatacccagatcctcrgcaaagatatagagaagcagcacattatcctgttattactaattagattgtctataaatcacagctcctgtccacattggctctgcattgcaataatattgtcatcagatagaacaaccaagactgctttccaagcagagaactttgaagatggcattgctatctgtctgtctaaaatgtgtatcttatctgatttgaaaaggctggagaagtctgtggccagtctggaagtgatttcattgctggcccaggaaatctgggaagagtttaatgtcgtgtatggctgagcttgtacaggataccctttcttttgttatggcaaacagtttgtagctttaccagccatttagcgcctagatatttgacacaatcggtgtatgtccatgtcacacctttgtataaacctgtctctctgcatctcaacatttggctatagctgctgcttttacacaacggatctaggctaggatagaaaaatcctggcttgtgagtgtcagagcaagaaagagaaagagactgtatcttgggccaggcctggggccgagtatgttttatgcacattattgtaatatctattatacagtggaagaaaccaaccagcccgggctttttccacttggtggtrttgacagtttgagtgggataatttttggttgtgggtctgtcctgtccattgtaggaygtygagcagcwtcccagcctttacacatcggatgccaggagcacccccaccccagcagtcgtgacataaatatatctccagctgttgctgaatgtctcctggcggggggtggggggtrcagactcaccctggatggaataccgctgaactaaccccatcttctatagctaataaaagacaaataacaggattcaggcactaaccagagtacgactcagtttctactycttcagataagcagaccctaatctgagggagtcgggccagctgaagacacggctcagaatatccgaagtcttgagcaagttcctttcctcttactgactctgtggcggacccactgcgccccaggccacctgccaaggacagcaagccttctgaagcctttctctaacgggtcgggacggggaggactgctggaggaccacaaagaaatgagcctactcctctggggccctgggcagacctcccagttcctgttctacaggagtcaacgtgggcctccagcccggttcaacaactaacccacagcgagcccctgtgtgtgacaaggggcaggtcagccagtcagcagccactcctgccccattgtcccctcctgagacaggttaggggtgcccagcccatcaaaatatgcatcccaccccattctggattgcttttccctgtgcattaggaataaaacctctctaaggggaaggcattttgaagtaagcctgtttcaggcctgtgagaggkctgcagaaacacccccagcgtgagcactgggtcaccccacagcccctgcctttcggaaatcctggtgtagagtccgctccacaaggagctccttcctctgtttgaaggctggtcgtcttcactgtgtctccgcgattacccaggacgtgggcatggccatgcttctcacacgtcctctctttgactcaggatcatcgacttgtgcctctgcctcctccacatctggaagaggcatcttcttttcccttttcacaggctacttagagctggagagggattgtgtctgtcaatccttagatacatgattaattaatcaacgcatgtttttcagttgttactttgctgggcactttgagagatgcaaaatgagcactcttagtatatttctctcaaggacatacaaaataagaagaaaaatattatctgtaaggaataccataaatctaatacctaaatacaagaagagaagaggacagattttccagtctgttgaattagatgtgccattttacattgattgttttttattagctcccattgccagagacattgcaatgtctacgtgataaggagtttaggcttgagcttgcatgctggttttaaacacatcatctacaacattctagtcgtttttgtgctatattgtaacaattgtcaaagtgccttagaatctaacattacctttaaggtatgggactcactttttcctaagatcataaatttagggtattttcatagttgtaattaaatcttagatgaaattcctttttgagacagggactgtactttatttgtatttttggagaattcaataatcttcaatttataaatawatttatttccatgatctttcctctaatttacacatgggtaacaatagacatagttttagccatgttttcattatgaaattaaaatatacaaggacagagtgctttaaatattccaccatatagatagatggactggctcttctcctgttattccttgttattcctagtatctgtgtagaatatatttgcatctccagtaattattaaagaataataattaccttcttgtatgattatctttcttgcatatcttcttttttttttttttgagacagagtcttactctgtcgcccaggctggtgtgcagtggcgtcatctcagctcactgcaagctccacctcccgggttcactggttcacgccattctcctccctcagcctcccaagtagctgggactacaggcacccgccaccatgccaggctaatttttttgtatttttagtagagacggggtttcaccctgttagccaggaaggtctcgatctcctgaccttgtgatccgcccgcctcagcctcccaaagtgctgggattacaggcgtgagccactgcgcccggcatcttctttcttttattgctgtttttaacagaatattaaaaaatttttcctataaattatattaaccattgttttaaacgttaaaggtgttatgcttcttagatactaaattctttactcaagcacatgaaagcaaatatttttgtgtagactctttgaaactttggataagttcattcatttgaactaataatggtgagttattaataataacagtaatttattaagtacttaatatgtgagacgcactgtgccagatttgacttagtgagaatttcaaatctagtctatttaaaaagaaattcaattttcttacttataasgtgtgaaatatataccataaaatcaaaacrcattaaaaagtgttccttagtgtacaatactagggggatttaaaaaataaatataagctttgtttaggtagtgcattaagcatatttgagattactaattttttgagatcaattgaatgcctttgtttatacatgttttgaatattcctgagagacaatagtgtctagtttagcctttcccaaaatatgatcatcagaccatctttaggatgtcaacagatgtttcctccgggatggaaacgggaagaggttccaaggacacaggcgtttggggaaaactgagttcaggttaaatggacatttgttgttttgccctgggatgtctcagagcctgtaataagatagtgtatcatctggaccttccgtgggtgctgcgtcatatacagttccccacacttatttgaacgcccccctktttttttctttttcttttttgagatggagtctcactctgtcactcaggctggagtacagtggcacgatctcggctcactgcaacctccatctcctgggttcaagtgattctcacgcctcagcctcccaagtagctgggattataggcgtgtaccccccmacctggctaatttttgtagttttagtagagacagggtttcaccatgttggccaggctggtctggaactcctgacctcaagagatttgctgtctcggcctcccaaagtgctgggatgacaggcgtgagccactgtaccgagcctctgaccctttttatttctgaagccaggaacggcctttgtgaaagagtgsatcrgtggataaaaccttgattctagtgtaagttcccccatctacccactgtttttcaccaagttgttttgaccaagttatgccctgacctggaaattccccagagttgctaaaagaactgaatgggggatactgtacataagagcacttaagcaacttaaaatgtcacatgtagggacatatgcgtgtcatgtgaatagcagctgcattttgaagttgcaataagtgtgaggaaaatgtgcttgttagctcagctctagacagatccatggatagaaagacatagacatggatccccatccagctaagtatttgcaatccgcaggtgaagcctggaaacccagagaaatggacctgttccatccgtgacagaagcgctcccaggacctaaattaaagggatgttagaatgttttgagaatcttggcagggccattaggtagtgtttgtagcttttggatgcttttggtggagggaaaatgagatgggctcacttgggaggtctgcctgcagtttccatccaaatttctaatcaacgttgtggttttatcatccatttccggaatcattaccccttaaaatgtgaggaaaacgactctccttttcttcaactccccawcttttccaaataccgctgcgagtttttgttgccaacagcttttcccaatgtgcgtgtacttaccaacgtccagactcctccctcccatcggccagccttgcttggtctagctattattcaaaggggaacatgcgtgagatatcacttygtttttgccatctaatggattccaccccccaaagtatctgactttgacactcaggctcatctgcaggacccgagggtgtcttccctcccctcccgttggctggctaaatgggttaatagaatacattctcttttccttttccgtgttttgtctggcgtttgcaatgccaagatttttttccagatgtcccctatttcctatttccacataccgcacatgaatcatcatctggcagaggaatcgtgagaatccatgtgatcagtgtgcgttcccacattcacctacttttgtcttttttgatagttctttgaaaacaatgaatttttttaaaaatatgcctgaattcaagggtaaaatatcaacaatgtaccctagaaaagcccctggaagcagatctatgctaaatggtttattttattctgcacacgaggcccacccgtcgctggctcccctatgccttggacgtcactgatacacacacatcccgttcccgaacagggagagtgagctgcacattctcgtttccagctccacttcctagttctgcccaccgtaaaatctgcccttttgccatgcgctgtgggacctgttagactcaggagagaccatcatacaaattgatggctcttgatttgcagctgtatctggagcttaccgaatctagtgcagctttaaaaatagggagccgattctgtttccaagttcagaaggagcagcagaaaatgaagtatctcgaatggcagatcacatgccatgacttttaaagcccagagcactctccaggagtrcaggctgtcattggtgtggcccagcaccggcagcctctgtcccgactatttatgggaaaaaatatttttttgtaaatatgatcttgacaaaacattggctggcaggaaaayagctttcttttcrggggagcaaaatgagagtgtatattttaattcaagatcaaagacttaacataaaacaaaccctgacaaatgaaaactgggcaatgggattttcctcctgtttgttggtagaatattttgagcattcaaacacrtttctagacagcaagttktgatgctagataattaggtagtgtgggtgtggagaactgcacgctcaaaaatggtattaacagaccttcatccttgtgaagtggtttagcacaatgtgcaattaaacaaaggaagaattagtcagagttaacgagcaaaccagatggctctggggacgtggtgcccctttgtcagatttttcttcctttggcaaatccattaaacatggtaaaagtatacttcatatagcttagctttggttcgtcacatagttttatgagtttaatgctaactggccccaaattcaatgattctggatttcctcacatgagaatctgacacgagaagctaacagtgattcctggctaatttctaaaaagctgtagtgaaatcagaagggttaaagacccttggtacsgtttctcctttattagatatttggacaaatacctgaaggtaatgaatgatagatgtgaatttcttacacacgtcttgctagagcttgaggacttaaccagagaattttctgtgggcgtcccgctgtagcatgttagggccttaggttartttgccctcctagrtgagaaatccacaaccctaagacttgagtacccaagtctgtggcatgtggtgacatgcttgattttgaagtggttttccctagaagattggtaaaggaatgacatctgtctatagtagagccagtaaattccttgagctggagaaccaatgtccactcatcccagtgcctccttgtcctgtgggctcctgctgtacccgtgggcctgggtagtggccagcggcagtcctggagcctgccctacaggttcatgatggaagatgctagccagtaatagcacaactgaacccccaagtgaacactctgctaagacctccagggagggagaaggcacggctgcgagaatggatgtccaatgggaagaaattgatctgcagggggcagggaagggcaaaccgaacggtcattcgcaggccccaaaagctcaggcagccgctcaggtgcrgtggcccatgatttacgcctccaaattccatttccctgtttgaygtcaggtttttcccgatttggaaatgttggtgctttgagaaatgtccatggacaactgtgcctcctcacctcccccttctcacttccacrtacaagactccagaatgttaaaggacacatctccatgagtgtgaaactgtttgtcgctgtttgactctctgtgtccccatgtggggctccccagtctcatcgatatgtcctgggcaagggcaagaggcacctcggtggatcttgttcccacactgactgtctcctcaccacgcgggctggaaatgctgtgtgtttttctgagtcagggctttgggaggcagcaccctgtctccaggttcttggagttttatggatgcaacgtcattaatcatcctgacggggctgatgtgggtggcaggtgttgggttctgcctcctgattgggaggaggggctgggtgccctgccctgaatctgaatgtagaggccctgggtaaacgggtgtgccctgtcctgcctggaccrcacatcaggagccctgggagcagaggttcsgggcggctggaggcctccttgcttccgcctctgcacgtggaacctgcatttcttcacaggagaccgtggctccacaggtgtcctgcctgtcagggcagaggaacataccacggggggacttccagcaaacgtgaggaacagcacgctggcgtgactggggcagaaagcagagtggtgttttcttctttgggggcctttgatagggacctgggcagggtgtggtgggggccggaggtgcagwggcttctgcaggaggctggggaggctccccgtggtcttagaggaggtgcaccatcccgtcccacctcactcgccccctttacccttcttycctttataaaatttctgccctttctgttcctcccaccacaatttcccatccacttttcctttctctctgttcagggctcatgtacacctgtgtgattttccagggtgtcacgacragccctgatgacccgcgcctgccacctgtgtgctttgtcctctctacttcacatgtgtgcatgcacacatcacgtgcatgcacatatcacatacacgcacacaccacacacatacatatacacgcaccacacacataacatatacacacaccacacacacatacataccacacacaccacttacatatacatggaacacacaccgtgcacacccacaccacrggcacacactcacacacacacrcactttcttcaggaacctcccagccctccccctccaccacgtggcctgaatggagccctcctcgtccacctgttttgggcttggttctgctcctttttcctgagtgggggattttggagggcgctgcccttgggcactcagtgtggatttgatgctgtggaaggggacaggagagctggtgggccaagctgggagggcagttaccgtggagtgagagccaaggccagccggcagaagtcacccacaagagggtgaacgtcggaagtggggcccaaggaaattactgacattttacagggcagaggcatagggctttttcttttcctcttagtctccccaggatgctgtaatagrataccacagactgggtggtttcagcagcagaagtgtgttcctcccgtgctggasgctggaagtccaagatcaaggctccagcagattcgaggtcggctgtggaccccttcttcataggcagcgcgagggcgggggctctctctggggtcttttttctaagaacactaattctgttcatgagcctcatcacttcccaaggccccacctccatgccatcaccttgggggttagaatttccacacaggaatttggggcggggcatggacattcagaacacagcacttttattatcctgggatgcaggacaygtacagtgatgtgtggcgacaaaatgcatcccagctgtgtttaagtaactgtgtaattggctggaaatttctcaatgtgaaaaaattcgagtcattcagatttaaagttgaaaacctcctaagaggaaagagttgggactctgacctctaaaacccttctaaatgttagtgtcctctgagttgagatctttcctgtgaagctggaggtacttcaacacwctactgttactggcctttctagagcaaaagctattttactgaaaagaactttggtatgcagtacatgtcagaactgtccactcatttgaagtgaaggaagatcaggcccataatgggtgattacttcacaagcagacatttcctcagtgtcagctatgttttcggtgatgtattctgaggaaaggggagcggtgactctgcagtattgagccaatgtgccttcatcctccctgtctcttcacatctgctgatgrgaaaaccaaagtttgtggaatccccaatgccatctggttttcctcccctttttcttttctgaaaaatcacgttccaagttgaagcaatcatagctgggaaattttgttacattttcctcactgtctgtggttttttccattcgctaatcaatttgattctccatattttattcctaaaatcattttatctgggcatgtgaagtggacgctagtacttgaagtcactctatttaaatcttgcctgactttcttaactagctgttctgatttctgtcctcctctagagamaattgaccagatgccatttctttggscttcctattggataaggccgtgaacccaaagggagggggaaatagatgataatttaggaacatgggagttggtataagcatccgtttcctttcctgtctcactcatttgcctttaggaagttatatcgttaatcctaartgtgtgtcttccctgtgtttcaaagaagagtcccccagcctggaggctgctcattcgcattctgggtcacgtgttcccttccaaggcttccctgttctccctgccacttggagggggcgcaggagccgcctgctgggtgcgacgggccagaagtgggtagtgacaggcccggaagtgggtagtcattaaaaacttgccttgcacggaagctactcagtatgtgcccttcaaaattggatttttaaaggaatctgcttcacccagtgacagagaagaacacacatgttcttttccatcctgtccaatattttgttcctgatgtagaccccccccccgcccccgcaccaccactcctcaggggcatcctgtgcttgatagcggggtgtcagctctggaagcatgtgggtgattttactgcagaagcacgtggcttggcaggtgctccgcgatggtcccgcccagctgcgcttcctgagtcctgtaaggcgcgtgtatgtccctgtgcatccctttcccacctgtcaccgggcacctcttgcccagcgagggtgacgttcaaatgggcacctgaggactgtgtgtgcagcgaggtgtagctccacccaggagggtgtatttagggaccgcagggaccaggaagggctctgggatcagctcctccacagcgggcctccccggagacccgagacagggctgcctccctgtccttgcctgatttgttatcccaaaattctgggcctaacccacggcaggatatttatgtggaatatcaaatagttgttaaaaagatgactgctttccctgtttcttcacagaacgtgctgattctccctgtggagaaccaagggtgggcacctgtaggtttagaattcccatgagagctcagtttccaccaagttggcaattgtatatttgggaatcaagggaaggccatttcagggtgcttggctgactggccctctcttgccaaagacaaattgcctcagtgatgtgtcccagacctcagaccctgggagtgggaggtctgggggcgtgggaaccaggtgcccccaacctgcctcttagtgaagcttctctctctttatgtctctctgtctctgtctcttcgtttctctctctctttctgattctgtgtttgtgtgtgtktgtgtgtgtgtgtgtgtgtgtgtgtgtgtgtgtgtgtgtctaccgtacccatacttggtcatctatcgcccaattgatgtaacttaaaaaaaartccatatacgtgggaaagtgtaacatgtttatatactctacaatctatttttattagaaagtttatacctcataatttgcaaactgtaacccagttggtctgtttccacatcttagtttctagccraagatctcaatattttagtctattgacattaagtagttaagaaaaaaaggcaggaaatgatactgtaagtttaatctttaaaacgtctacaaagtaggcatagtgaaaatggcattaaataagrtcttactgatagaaatttttaaataattgggccacaccttggattgaaatatatctccatattatcttttgaaaacaggcttgccaactttatgaagagcattgaggtgaagagagattagcagctcagggaagaccatttttaagtatttatgaagtagctatttattgtcttaattaagcaccggtattttgcattgagtttgcaattatatgcttttcttatctattcagttttaaaaccaagattttaagcaaaacacaaaagaaaaaacttcaagatgttggcttaatttctttctttgggtgactgtatatgttttaaaggaattaatggtgtttacttaaaagagattaaaattcagttatttattaatttagattgatctcactactgytttttcaaattaatgaggttaggctratagtgggttttgtaaaacctccagctctgctgagattaccttgtattctatgggcaaagttggtttgtctagttttaacctggcaattgtatatctgggagtcaagggaactgttcttatctcttagattccaagtatgattaatggagtattgaaattattgcagcatgctgggggaaaatgttatcagtgataagatacagacaagtaacttgcttgggggtaaggaagtaatctggggatttcagaccggtgtatgtcgttagctacttccaggctaaccatggaggagtgtggtggctttactaagacccaggctgacctgacagaataaatggaatgttctatgcttgaactgcctgaattmcagagatatttattaaggaaaaaacacaaaaccttgagtataagataaaggggggagtttcttgaaactgtcatcttttttaaatactcaagaaattccaattttcttatgtctgtcttagccacaaaaacaggaatgagatacttcctgggtcatgacttgtgggaacactagcagtgtggccttttcattctcttttaaaacattctgtggcttcagaggaaatgcagctggcttgttggacatagaaatcgtgagaataaacacaaaatatttacgtgtttaaaaagcagtraagtcagaccagtttctttcagaaccatttgtacagcatttaactgaatacttgagcacgtttgatttttaaaataatgctgccaggtaarmcaggcaggtggagtcatccctgacttacagatgatggcaaagctgattttcagagcgtcccaggggttggcgctggagccagcaccagaattccaggcttaggttctttgcccatccatgcagtgactgaagagagagcatgaaaagcagggcgcccggagctccgcgtgctcacccggagtgcaggtgcttgtttttgcagtcatttgaaattaagattcctaaatctgcaccctcttgtagatttatatcattttcttgggatctttcctgagtcactcatgaaaatattttatttttgtttatttatttatttattttttgagatggagtctgctctgtcacccaggctggagtgcaatggcatgatctcggctcactgcaacctctgcttcctgggttcaagcgattctcctgtctcagcctcccaagtagctgagattacaggygtgtgccaccacgctgggctaatttttgtatttttagtagagacaagtttcaccatgttggccaggctggtcttgaacgcctgacctcaggtgatccacccgccttggcctcccaaagtgctgggattataggcgtgagccactgcacccggcccagtcgtgaaaatattaattgagtacctaccctgtgccatctgttcgaagtgctggggggagggaacgagagggaatgccagtcactgcctgctgggttccagcatctcctggaggtgctatgtacgcggctctgcacaccctggcaagggaaccgcagggactacggaaccactcagaggatggggaccctggatgtcccctggcagggcacctgtaaaacccaattttgataaataattatatctaacacatttttaaggaaaaaaaaaagaaaggtttttcttaattgccaatgagcaattctctcaaggtttaaacctgaagactgtcttgcatgcttttgtattattaactataattcttatcttcagagtatttcatctgcaattttcaagtttacttttatcayagaccaaaaaaagaaaaaaaaaatccatcacctaccttgtggtgtttcctgcctttgctgtgtcctcgttttgttccacaacgctgccccacacccacatacattattaagttcacgttaataacatcctcggctgtctaagtacttaggcactaattggcatttttcaacatttctgttaatgtagaacaygtctttcgaaccctcaggggccttgctttggagctaatgaaaataaagcaaagtgtctttataagaaaaaaaattaggtcaggagcgttggctcacacctgtaataccagcactttgggaggccgaggctggcggattacctgaggtcaggagttcaagaccagcctgaccaacatggtgaaaccttgtctgtactacaaatacaaaaattagccaggcatgatggtgcacgtctgtaatcccagctacttgggaggccaaggcgcaagaatcgcttgaacctgggaggtggaggttacagtgagccaagatcatgccactgtactccagcttggatgacagagcaagactccatctcaaaaacatatatatttttttcttatacaaactcagaagagagctaacctcttattgatattttgttatcaattatttatgttcctgcagtctttcttcttaccccaaatcttttaactaagtcatgacctagaattgtgataaatttcatggaacttcaaaaaaaaagacggttgtgctggtgagcagaggcgtgatttcatgtgcagactctcagcacctcctaagtgtgatcattcctgcaatggctggagctcaagttggaagcattcatttatgccatgtgcatttctaggtctttgaggatagtattccatatatattttttttaatggagtaagtaaaatccaaaaccaaaagttaaccaaagtgttggcagtggtgactgggcatttcagcccctgccctgggttagggctctcttgagggacattcctcagttggcttcccaactcttggcaggtcagtaccaagcctctaaagtctacacggaggctgcctcttgcttggtgtgtcctgccatccttggggtgtcacccaggcaggaacccccagagagctctgtgcaacttatttggaggatggttttgctaccactgggctttttccagctttgtcatattagataaaggcctcctgctgtgccaacacctagcttcggtggctgattttggcctctgattgctgcagtgtgcaacatgcacaaccatccacaccgtccatagctgcagcaagtgaggttccaakcctgtagcakaacacttgttttctgtactgtttttctcgttttgaagatrtttttaaaaatatatatttgagaaacagaatgttaggtagtaggtttagaaagaggcatctgtgattttggttttaatgagtgttcatgctgataggttaagcaaaggagagaatgttatcatcttttttgggatccaaaaaactggatagatttttttttcttttagaattggcaaaactcaggagaatggactaaattaccttaatgcataagttttctataaacttatagtggaagaagrccaaagaagaacctttacataagttttactggcagtgggatgtttagcagtggtttcttagagacctccctgtgattacatttgtatctattttatgcatgctttgtagaatgtaattttttcagtattttctatttccatacagctattttaaaaattgaatttgctattttttctgtattgtcattagattcaaatactctcccaatttataaaatggatgtgaaaatgctatccagaaaatatccatcattctcattatttataggctgaccgcatttacctgtaacgcaatagcctcgatattcaggttactagtttttatatttaattttaattaaattttgaatcctaattaaaaatatttaccatagagttcttttaggccatatcaaagtgatttctctcactccgcccacagaatgtgttcaatggcactgaatatttaatattttaatagtaatatattactacaatgaatatttaggaaaaagccttaattcttttttttttttttttttttttttttaaagcagagtctkgctctgtcrcccaggctggagtgcagtggcacgatctcggctcactgcaagctctgcctccctggttcatgccattctcttgcctcagcctcccgagtagctgggactacaggtgcccgccaccacacccggctaattttttgtatttttagtagagacggggtttcaccatgttagccaggatggtctcgatctcctgacctcgtgatccacccgcctcggcctcccaaagtgctaggattacaggcgtgagccaccgcgcccggcctgaaaaagccttaattctttaaggtccaccagggaggtttagtttatttgggggaaaatgtatagtcccagagctccctctagtggcgagcagctgcagcccacggagactcctcacccaagccctgattgaggccgttggttcctccgcccgggcctgtcacgggctggatccactgtctgccagagtttgggttttctccagatcattcagtgtctgagtacttcttcaacaagggggtgcttggctgagatcccatgggtgtgtctgaggtgccagggcccgccggggagggtgtgaatgtgcctgtttcacaygraggcagcgctctcgaatgtgctgaggggtgccagggccctggggtgctgctgtgtgggtcgcaggtgcctggaggtggatgaagggtgggtgtctacggacgccccgaccaggagcttggcccttcacatgggcatttgaatgtgttgttgatggagcccggagccaggaaaatacaagtgtttccagagaacgcactgtctgctggtgtggtttgatgcgaaaacggaattaagctgttgatgacagacgcgctgcctgagcgcaggcacacgtggaatctgactgagcaggttcacaagcctttggaaaaagatcatcatcatatttttcttcctttccaacgtggaaatctgactgctctgggggactgacttaaaatggttctgtttaacaatatttgaaacggagtactgctttggagtaagaattaatgagagcattttggactgttttttctgaaaaaagataagaaaaaactcttgaagataatagttgcctctggagacctttgctgctgctcacagctttactgtgcgcttccatgagtgagtctccactttcatcatggacaaatgtctggaactttggtaagatttaaagacctttggaaatttttaagattttttttggctgccagtaatttatcagcactcagttctcctagaacatttttactggatcggggacgtcagatggtttgtttgcttttggatggctttcggggaacttttaaattgtttataagaagaccatactgagggcccccttgagttattcttgtgttgaatgatagttctttagaaagtattttctgaaggactctttttaattcatttttttcttttaagctgatgtgcaaagtggattttcatggatcagaaaatatctatggttttatttctttgtaaatgtggatctatcagaaatattcactgtgcatctcctttgtaaccatcgccttstagctttggattacatatgacttgagtgttcagctctgtcagtcaacttcatagtgaatgttaaaattcatattagaatacttgagcctagaattgtgccagaattcatcatgggctcagataatgtttcaacatcaggatttgtccaatagaaatctctccttgaacatggacacctggagacaattctgcattaaatgctatagctgcaggcaggctttcgctgagcacagggtggaccttcttcatcacatggaccttatcgtgagggcttgggattttccactcaagaatcctggggccagaagtccagtataaaagttgtagtccaggcttggccatacggaggaaggcattttcacttctagtttatccagcccagctcccacccctcagaccccagccactgttctttcggccaggagactccagcactgagttctctcccattcttcacacagatttgctcatctccatcatcggcagccttgggagtagtcagaaccaagctaatgatagtcagaaggaggacggtggaggcccatgaaatgaggaacttgcccaaacaaccccacgtgctttagaagaggcaggacaagtcccgaagtctcctagaaatagaacagctctcatgatatctgaaagtcatggattttgaaagatcaaaattcaaaagataaaaactttgaattttgatcttttcctgggctagcrttgtgcgataggcaactcttgcaatgccagtcaggagccacaagccgttctggttttcacttttgatacagaatttgataaattacacaagatattaaacactttattataaaacaggctttgtgttagaccattttgcctaacgtaggccagtgtttaagttttctgagcatgtttaaggatggctaggctaagctatgatgttgggtaggttaggtgtattaaatgtgtttttgagttaaaaatattttctattgggctgggtgcagtagctcacgcctgtaattccagcactttaggaggacaaggcggacaaatcacatgaggttaggagttcaagaccagcctggccaacatggcgaaaccccgtctctactaaaaatacaaaaattagcggcgcatggtggcacactactataatcccagctactgcggaggctgaggttgcagtgagccaagatagtaacactgcaatccagcctcagatgacagagtgagaccctgcctcaaatatatatatatatatatgtatatgtatgtatgtgtatatatatacacacatatatatacatatatatacacacatatatatacatatatatacacatatatacatatatacatatatatacatatatacacatatatacatatatacacatatatacgcatatatacacatatgtatatacatatatatacacacatatatatacacatatgtatatacatatatatatacatatatacatatatatacatatatatatatacatacatatatatatatattttcaacttacaatgggcttattgggacataccccatcataagctgaggtgcgtctgtatgtgctgctcaagctcttgcgtatacccacatagttgatggagggccactgcacacatttcctgatattcactgtctcaagctagacgtctgggctggagggagaaaatgagaatttcgggaagaagatacagatttgcagccacgctttttatgcatgattggtttaatctttgcygctttaatgttaaatatttaaatgcaagaaataatagtaatgataaatgtagctgctaagtgcaacaatccacactgttaaatttcattcacatacttctagtgaacacatatacatccttttaagagttcagttgtatgtctcatagagcaaaggagagtgagcactcacgccttcctcttaggsaaagcagaccctctaggggatctccttgcatctgtcccccctcaaactgtggtggcagtattcctgccctgacgtcaagcctcatggtgtggagggagctcccggcggggcctcgccacagagttttccatgaccccgcggcacccaccgcagcyttcccacccctttcccagcggcggcattcaggaaatggtcctgcagatgtctcttctgatgtctcttctgatggtggttgggctcaaggagttggccttgtggaayttcggaaagagttctgcagtcacccactgactgtgacccatccttgacatcatttccctttcactggatacttggtgagctctggcttcaaatgtgagggctttcattccctgaatgatttgcagtctgctcgtaaatggaaatctcgaggcgctagatgacagaaagcagcagcagggccatcgtggtcccgaacgcagcttgccctgcacctctcagccactgctgcrgactccagccagtctggaatggtgcctagaatgcttggactgcaaaggcgacgggggtcctgtcctgcccagtaacctttcactacctcttaaagtttttaggattcgtatgtggaatcctacctcatgctgagcgtcatgttatgcaattggctagttcagcatcccatgacattttattgaattcaaacaccatgaatgaataaaacaatttcattgcctgtgaagaagttacagggttgaggtggagaaggaattgcagtttccctgataagcattgcttgtttcccttggatgcacccagcacatggaggctgccatacccagtacactcagtgctcagtaccaaacccggtacccgtactcattccgtgcgtagaggaagccccygagagctggcagcatctctgtgtgtgcttcagtccattgtgaagatccgtgatcctaatatttcagattggaaaaatccattaaaattttgatttaaagatatggattccatgtcagccactgaaacaggtgtcatagggcctttgacagtaagaattttgatgactgcttattctaggtatattttgtgttaacatcagtttttgttgttggtaattatattttccccccacatttagaagcttcatgctattttaacttcagctgtcctgggtatttgatttgtatttgaatttctgacttagctatgacggaagcttattagagtatttgctttcctgaatcatgaacttgtttctacaagcattggaagaggaagggaaataattgggtattataaaatgactttctatccacgcattttaaggattttttaaaaagtatatgcttgctttagataatgcattaagcaagaattttaagttgctccatgcatgaaaccctatttcatgcctaatttacaatgcctaattttggtgctaagattattctccatgttgtattctttcatctttatagacaatggcactttgttctccctccacaaattctgaatttcatcatttggggacacagcagtagtcatctccggctttggcgtatgattttccttttttgatcagtgctctgcattgcactgatgttcaggaatgagagcacaaggttcagctgcacgaaaactttctgtgtagtatttttcaagtttctcgtttctttcttccattttaaatagtctttgctgtgacagacaatggttgtggttttcatttttgcctgacatgaagtctgtggccgccatggatttttggaccttgccttgagcacaccatgggaaacagatgatcgagggtcctgttgctccctgactctaactgtgcacattctgccttgagctccagtggaagtgggrggtcactgtggtcacgttagtagcattgccagttgcagctgcaaagtctggcttggaccctgctagctccaataacctttgcacaacatgtccagctctttgctcttcttacaatcctggtggaaatgtgctaaaatcttggaggaataatttggccccatactgcatgctggtcgccagctaactgtatagctgtttaagtgcttattctgtccgtttgctctgctctggttcccataataaccttggacagggtacagagtattagattattcgtgtgcacttttatctggacaaaagattaagaacrttaaaaaaatatgtggggaatggcaagaaccatgtccatggaggagtcacttccttcttagctccttcatttcaaagctctggggatacacagattgcttaaactttctggtgacatttgggaaagaatgtgttcttgcggtaaaagcaaggtctgggaatttggatttctgtgttctgttcccagcagcacgaggggtcacccagtgacgtacgacaagtcagttaagcatcggaatcttaatttccctatctgtgaaatggacatagaagggtcggtaccttgggctgacatgaagttggtgaattgtttgatgttctgctgggaaccggcttgctctagtgacccagaaaaaacagggactatggtggaggctgacctcatttctatttctggctgtagtgctgactcagtgagaaacttgtagaaatcagttaatctggctctggtcctcagtgcattccatggttaaattgagaattataaaatcttatcatcgctggtctcatggcgatactgcccatattaattaagtactaaaaatactccaccaaatgtattagaaagcttctacatggacctgcctttctcatttccttcctgtctgatgttgggttacttggggctacacaagtccatatttatttatttattttagccgctgtttggagttcagtcctattctggtttgagcagacttttcctatatccgaaaactgggtgccccagattggtgaccttgtgcactgtaactccttacagcaggattttctgccattgtgtcctggggccatcactgcagggtgtatttaaggagctcttcatttgaacaagtcctggtctgggaatgtttttccttcctcaytgtcacaggcctcagggagaaggagccagccttccctgtcaaaccttgggatcagggccctcgtggagtcacgtctgtgcttctggccgactccctkgatgctgctggcctgaaggggcagtgccacagtatggggcttgaggttctttaatccatttactgtttgattcaattctttagggtttgaaacaatctctcccatatttatccacatactgtgtctagactcctgacatatcctttcaacgaaacacagctctatggaggtgtggcggctgagtcccaggttcataacgtccttcctgcgtttgtaaaaatggagcaggcagttaattcaccagttaagtgccaggactggctgagtggtttggaaagaaggacgactttggatgtttatgttatgtggtgtgtagcttgtcggttgatttttactttcaactaatgcaactttgagaaaggcactgaacactaagtaatcctgcctgtgatctccaaactgtctgccttatgtttttaaatcagctaacaatggttactgaatctacccaattcgtatggtaaggctgcactgaagtccacatgctgtaaagtaaataggttttcttgatttcttacaatggttatgggttkttkttttttttttttttttgagacagagtctcactctgtctcccaggctagagtgcagtggcatgatcttggctctctgcaacctctgcctcccaggttcaagtgactctccagcctcagcctcctgagtaactgagattacaggcgtgcaccactacacccaactaatttttgcattttttagtagagaaagagttttgccatgttggccaggctggtctcgaactcctgacctctggtgatctgcccgcctctatctcccaaagtgctgggattacaggcatgagcgagccaccgcacccagcccaaaaaatactcttgaaagacatttctcattaaagcccaccatcaccccatgatggcccaagggaggctaagcatcttgcatgaggtgcacactgtggactctgcccacccacatctcctaatggtctctaaagaggaagacgtcttggaggctccatcacagaatctcagcactgaggctgttgctaacaagagagttccattgattgagcgaaattataaccagttcagtgaaaaacacctcgctatttgttactctatttacccaagaaattatttggcattaagtacatataaaggattgtgctaggaatgagatataaatatttcctgccctcaagagtttaaaacacagtagagcaaaaccacctgaagtagtcgttgcyatctgtttccagacactcactgtggacttgcgcaaggctggatgmtgcttagatttattatgggaagtggctcataggattatagaggctgaggagttccatgatctgccgcctgcaagcctgggaactcaggactcctgaagtgtaactgggtccaaggccagcggctggagagcccaaggggctagtggtacaagtccctgaatctgaaggccagagaacccagagttctgatgtccaagggcaggagaagatgggtgcccagctccagaagagagagaattggcctcycttctgcctttttgttctatccgggcctcaactaacaatgrcacctgctcaccctgggtgagggcagatcttccttactgtccatgtattcaaatgcccatctcttccagaaacacaccctcaaaaacacatccagaagtcatgctttaccagctctctgattatcctgtgacccagtcaacttggcacctaaaattaggcatcaygggccaggcgtggtagcccatgcctgtaatcccagcacttttggtggccgaggtgggtggatcacctgagatcagaagttcgagaccagcctggccaacatggtgaaaccctgcctctactaaaaatacaaaaattagccagcgtggtggcgcaygcctgtaatcccagctacccgggaggctgaggcaggagaatcccttgactcaggcagtggactttgcagtgagccgagatcgtgcatgcactccagcctgggcaacagaatgagactccatctcaaaaaaaatatatatatagccatcacagttggtcaccaattccttcctctgttctttactgctgccttttgcctgactgatgttcctcttctgtagggtgaaagaggcctccyggggttacaaggtgtcattgggtttcctggaatgcaaggacctgaggggccacagggaccaccaggacaaaaggtaagcayggctgtgggattgggggtgggtggatgtaagattgcccgcattcttgagatagcggtgatcaatgacartggcatttctattctgttccagggtgatactggagaaccaggactacctggaacaaaagggacaagagtgagtacagttgctactcwcaatcgatgattccatgcgtgggacaggcccgcttccagagccrggcaccttttccctcctttctccttgccctcgtcctccatctcctctcccagctcacacagcacgggcaggcaggcgcgaggcaggcagtgaggagcagcccrygactccctgagccccagtccttcccatggggactgtgcacaggctgagctccttagtccttggttctgcaaacttgcttycccccatttgttcttcttcaggaatctcttctgggcattttttaatttgggggaaggggcaattgatgatgtgtccacagtcattagacagagatgacttcatttaatggaaaagtcatggtattttcagagccagccttgctcttcctcctctccacctcttagtaatgatgaaatgggagcagagttattttgtgcatgggcagccttatgtttgaagggatcagcagtcagcttttaaaaacttatttttttgtttttttttatttcaattttttttggtacaggtggtgtttggttgcatgtataagttctttcgtggtgatttctgagattttagtgcacctgtcacccaagcagtgtacgctctacctgttacrtagtttttgatccctcacctccttccagccttccccccacctgagtcccgaagtccattgtatcactcttatgcctttacatcctcatagcttagacgccacttatacgtgagaacatacggtatttggtttcccattccygggttacttcacttagaataatggcctctagctccattcaagttgctgcaaaagacatcattttgttccttgttgtggctgagtagtgttccatggtgcatggattccaccttttctctatccactcgttggttggtaggtacttaggttggttccatatctttgcagtggcgaatggcagtagtgtgctttgggtgtagcattgctcctgtaagcctgggccatctgccctaggctgtgccctctgctgcctcttgtgcagagtgctctgtctgctttgtgtgtgttctgacaccaaaaatgagggcatgactccattaaccggggagatgcaggaggaggaagtgaggcttcccggctcttcactgacacgcttttacttccgccctcacagggacctccgggagcatctggctaccctggaaacccaggacttcccgtatgtatagaaaacgtgctctacttcttttatgaaatattcttccatcaggcgattttctgcctgggttacattttcactttcttcattgcagggaattcctggccaagacggcccgccaggccccccaggtattccaggatgcaatggcacaaaggtaaatccagaaccgagaccctcctttttgtgtgtgtttacgtaatttttgcatattaaggagtcaggtagtgtgattctgttaatagagttttatttgccacaattggaaagttgcttgtcttaaagtttgctttatttagtaaggaaatacagttttcccatatttagtgtaccagaaagatataattgttcctttcttttttgtagacttttatcctaaaattgcatttaagcacgaaasttattacctataatcatttactacatcacgtaagaaaatgccattatgggcctttgtccctattaatgatactatcaagtctayttcttctttcataaagtggtacccagtagcacagcttgtgrcaaactgtttttaggaaatgattttaaccaacaaatgaagggtagggcagagtgatgcatgcgatgtcagggctgatgtgtctgccacacacagtgcgtatgaatgatgctctgctgtctccccagggggaragagggccgctcgggcctcctggcttgcctggtttcgcwggaaatcccgtgagtagaggttatttagggcagaacttctttyttttagttatgacttctctcttttcattccatttccttttctttctttctttgcttatgttttaataacttatattttatatataatattacatgataacaattttaatgctartgatattttgagaaaaacaaaactaacaccaaaactttcttttttagggaccaccaggcttaccagggatgaaggtacattttattttattttgctttattggattcattacagggaatctgtttacaacaagtgccatagaagcacattctctttaaaccactttggctgatcgattgtttctgaacrcacttccctaaactctgttacatgaaaagwctgtacaagtaacccacaaactcagatctcagactctaacgttcagacacttggcacagcttcttaatggggaataagcagcggaaggaggcctggtgtggtggcgaaggctcacttcacccaaactggggaggcagatgggagaatggggctccctgggtgcctctcagacttcccaggagggaacctggggcagcttttcccaggcggggtgttgatgtcttggggctcggctgctggcatcagcccgacctcagactgtgcagtcatgtaatgtgtcggctgtgcttgggcacagggcggggacctcgggcatctggatgttgggatcagccttgtcaaagggaggcttacaggtctcagcagctgcagtagagataacygcttacctggatgaaggtgagagtccctgtgctcgctcctgtgattcagaacacgtaggaaatagatcctcataatagccctgtgtgttagcatgctccagagacacagaaccaggagcatgtgtgtgtgtggccagagagaggagaaactgcttctaaagcattggttctcatgattgtgggggccggcaaactcaaaacctgcagagtgaggtgggcaggccagacaccagagaaggggtggagytgtagtcttgggtctgaaggtggtgtgtgggcagaattccctcttcctccagggaggtcagtcttttatcctgtaagaccttcaactgatgggatgaggcccaccagcattatggagggccatttgccttattcagagtctactgatttaagtgttaagctcattttaaaaatcccttcacagaaacatctggtctggtgtttaacccaataatgtggcctagccaagttggcagataaaatttaccattacgccgtgcttttataaaagtattcatcctgagccttttctcaaaagagaattcttgttttgtgaggagagcctgtggtcacgcagtagtctttcaaccagagacaagggcccttgtctagagttgggggtggtcctcgggcagtgtggcagacccctttgctttgccgtctctacattcagtcccggctgcggctcagttgaccaggcagtggttaaygctggccattaagacggcaatcatgatgggagagatggccaggctattgatttccagtgtagayggggtctaaatcccagacttaggctagtcctgtaacactaatatatgccaactatcaaagagttttcagcttctttacatgaatgtcgatatttgcaactttctattttctttcttcatcctctagggtgatccaggtgagatacttggccatgtgccygggatgctgttgaaaggtgaaagaggatttcccggaatcccagggactccagtaagcatttgctgaatcattatgaacatgtgccacctcaccctcccagttcgcatctgaactcatttctttctcatgcattctagggcccaccaggactgccagggcttcaaggtcctgttgggcctccaggatttaccggaccaccagtaagttttgggggctgtctctcygaggcaatcatttaaaaaacaactatattgaggtktgaaaataaataataatttagtaaaaactttacacagttgtggtcgctcttaatttggacatggcggaatcagcttccctcttactaaacgtttggctgrcatcccggtacccatatacccagagctgtgggaaagggatgatgatagtaccataaactgataccctgaaacaaataatgcagtcatggttgaaggggctggcggggtactgctgatagtcacagcctgtgggagtgagttcaaagatggacagacaggctgtgccccaggtgacttcaccagggagcaggggagayggattggtattggtatggtcacacctgagggtcctgcacctgctaggagtggggagggaggggaagcccaggaaaaatatttcacaaataaattatcatgttgaccagagaatcttaagataacgtcagcctgaagaagggcttaaagctccctagagttctgaatcctatttaattaaaatgctstctctcccagggtcccccaggccctcccggccctccaggtgaaaaggtaaaagttcttttcattttttgttctttggcattagtataaggctatcatgaaattgctatagctcactcttcttattctttcagtctctaaaaaaaagttggaaaattaacactatatctaactatacctttaagtatctatcatatatcatttattatctattgattatctatcartatattgatcttttctttcatccatcccttagtcaatactttggaatcactgatatttcccttagttttctaatgcaagagtttaaaaactgtaaatttttaaaaaggtctttggaatttttgatcagtcatactttaaaaactttttcatagacattgaattcagcatgatcgttactttccagaaaattttatgagagttatgggacaaagctattgcctgaaatctaccatcttattgcattttgtgtgaggtttgtagaatgactttgaacgaagtagacaaatctaataatgagagcctaatttttaatccacagggacaaatgggcttaagttttcaaggaccaaaaggtgacaaggtgagtgcatattgctctggagtgctttcatgttgaaaaccacagtcctcacctgacagttcccacctttggatcaatgtctggactcttacaagtatagttactcttctctgcrtgttcttgcatttggtagttagtgttttccttaaaatgccagcattattgaatttattctagcttattcagtacgctagaatttatggaagtgctctgtgatctgacaagcagagaacaacgagactaactccaattatctgtacaaagagttcaaactcttcttcgtcagtgatgaggtcagacctaggatttatgagtcaaatttaggacttgaccaytagatgagtaaccctgtaagccctgcagagcgggagtccaccgccaggaaattgggagtagcacggtgggcagcggcccctcaccaccggcctctcttctcagaggcgggcatgtccagggccaccaccaggagaattaggactagcacggttggcagtggccccgcaccaccggcctctcttctcagaggtgggcaggtccaggaccaagtgggtgtgggaggagatgcagtgtggagccgggagggcacagaccacacagcaggtggcttcatcctgcagagaggaggcaagtggtgggtccctgatcctctccaggagtttccctggatcagaccaatgaagcaggcactggctaagaagggatgcctgccattgctgtagccagcctgtggaaggccagattctcctctgacatccaagctggtggaggcaattacaaccagagcgcccaatacagtggggcctggatggatctggatgtgcaggtggcctctgcttgccacccaagattttggcccagtcttttcataaactttgaaatatagtgactctgaaatgtatgcagttgtaatttttaggygtacccggcagttaggatgcccgaggagggagactcttgatggttgtcttattctgggrttacctaaaatgccttcttttttctcaagctctattaggtagtttgtattcctttcctccgtgccatcagaagccagtatacactatacaggggcacgcaagtccggaggtgtcttgcaggtgttcagattccatggttattcctgagctagtggccacccatagaagaagtgaaattctcctcckgggtttagatacttgttgtatcatcttcctattgaaatttgattttctgcagaggcaaggatgattagaacagaatagagtataattacattttaaaaataggtgttttattttaggcttttacctctctctgcaatttttcatgtctgcataattgttttcatgcctaattaattttacatttttatgtcgacagggtgaccaaggggtcagtgggcctccaggagtaccaggacaagctcaagttcaagaaaaaggagacttcgccaccaagggagaaaaggtatgartgggcttcatcagtgaatactgattttctaattttggacaaattccaaaagayaaagagaaaatgggtcaaaactcagtttttccagctacattcaatcctggtctggaaaacagatttawagactgttcagtccataaaatacgagcccctttgagagcagagacagctggaactggattggtccaagcctgatctgaggctcacccsgctggatcagggcttcttaaatgtgccccaagttggagatggcttggtcaggaggagggagctgggctggggggcaggaggggggcagggccagtcatcatgggtcaagcatgataaaccctgccctgcttacatttataccagtcaatgtcaagtgagtgctggagatcaacatgaatttctttgttaatatatcagaaaaaggttttttttttttctgctgtgtgtttaatgcagcatataacaaatgatacagctgtttgatagtgctgatctgtctctcgaattctttcagggccaaaaaggtgaacctggatttcaggtcagtactcagtttctgcctatcatttttaggtcaaagaccataaagatttaagtttcaagtttttttcaccttaagtttaatatctatctaatttaaattttgcttaaatagacgaataaatctctttgtctttttattcstttaaggggatgccaggggtcggagagaaaggtgaacccggaaaaccaggacccagagtaagtgctttccaaagtcyttttatcataaaacaattctccttccatgcggaaaatcgcagattcacagaaacacaagaacagaaaaggctcrtagggacttctagtttatccctttcatgccccgaagggcttttcygagactctcctgagctatatcagttgcaaggcttcccaggcaggcgaggtccttccctgtttaaggatccagcactgaaggtgccaccgccggctgttcaragaggcttctgaagagccctgggccatccctgaaaccttcggtcctgctctgagagcagcaggttggttggactttgccacccagaacaccagacagtgtttgcacagccacaagcctgagaggctgagttgcttttcactttagggatggtggtggcgtgagacccaccccactgccagtcagctgggatggttctggtttctacctggaaggagcatgcagaaacctgcattaaatgaagcatttgcataagcttgcaaatactcagctgccaataggcaaacttctctaatgttagctttgctaccaagatacaatcatattttagaagacttgtagctcatcggactctgctctttaaaaatggagttctcttatattgtaactgtttcataattattcatcatatacaatattacttattattgtggtattgtcaacttacatagarccctcatttaccttgcttgtgtttcataggagagacaacatattaagctatctgaatcagagctttggtgttatatccgttattatatrtatatacatatatatatatttgagacagagtctcactctgttgcccaggctggagtgcaatggtgtgatctcggctcactgcaacctccgcctcctgggttcaagtgattctcctgcctcagcctcccaagtaggtgggactacaggtacctgccaccacacccagctaatttttgtatttttagtggagacgggatttcgccatgttggccaggctggtctcgaactcctgacctcaggtgatccacccacctcggcctcccaaagtgctgggattacaggcatgagccaccgcgygcagtctattatttattaaatactaacgtttacatcttyattctacagggcaaacccggaaaagatggtgacaaaggggaaaaagggagtcccgtaagtgtttctctgtgrtttttacaagcaggctcactgttcctaccactggcctctgacggttactgcttctctcttcggtttcagggttttcytggtgaacccgggtacccaggactcataggccgccagggcccgcaggtaaacgctggcactattgtgagcctttatcttcactttccaattcaacccagaagtctgtttattctttcctagaataaaggactctgtactcaagggaaaaaaatcatttatgcttcttctgggtaaaaacacaatttagtggtttcctttatgttcatgattttttacaaaataaaaatatatgaaatgtgccaytcattcaaatttttatatctttttttggtagtagattatttttttcctgatcataaagcaatagaaaatacagaaagatatcacgaggtaaagaaagcttacctaattttttctgttacctgttcagaagtggccagagttcgccttgttcctatgtgcatacacaagcaggcagtttttaaaggtgatagtgaacaagacatcttgctttttcacgtaatgatagaaggaggatctatttcaatggccgtcagtgtaattatgatgtgaacatccatgccttttgttgcgtggtatttaggccatttccaaatttgtatgcttacaagtatttttgctcacttgtctggtcatttctctgtcaaattcctaaaagcgtaatattggggtccacagtcagacacttgttttgaaatttttgccacatgcaaccaaattgccccagaaagtccttctgccagaccagggcccttttagttggggaactaactaaaaaaaaaaaaaaaatctaaaaaatatttgtcaatctgacaggcagaaaaaaaaaacctcattattgctttatttttctctcttaatatgagactaggtaatgtaagtctttactaatataagagataattttggaatagtcatcaccaaaggcgaatggaaagctgcggggagggcctcagtagcctacggttaatttattaaagccagggacaaaaggaagaaacccttggctgtaattttttgaggaagtaaaatcctgtacattttaaatggtagatatatttagaatatagtggctaagatatttatgtcctctagatatttctaaaatcttctggtattyatataagaaaaatcaaaacattcaattcttgtttactgccttaatttaaaaggaaaatatatacattcrtggtaaaatgtacatatctttggactgtttaaatcattacgatgayrtttatataaaaatatttgatatgaaagggttaatttctttgagtttttcatctactatggatgagattaaaccttaaagtgatcagaatttatccactaatgttttcagttaatattagattttacattatgacctccaatgcaaatttgagaaaatcttcacctaaaaacatcatataaaatgatttatttaagaaaatgtatttggaaatcatgcttttatattattttatttcatttctctttttaaaattgaaaaaccctggttgccagttccrctcatcaatgattctgttttccgaggaagtgtgcagttgatgggacaagtatctgggcttttgtaaggagaataattagcccccaacttayattttgcagagatctttattttcatgkgtcatgcgtgtgcaaagcaaaatgaaatctattcatttttgttgtaatcgtcacagaawgagagataytaaagagagaaaaatagttttaatttactgtaggcacactctattttaccagaagaaatgtttaatctgctttctgcaagacaatctttatagtaagaatatgcaaggaaagttattttttyttttgtagggagaaaagggtgaagcaggtcctcctggcccacctggaattgtgagtaagagtgctgtccctgggtctgtgagagcgctgggggaggaaggagaggaccctgggtctgtgagagcactggggggaggaaggagaggaccctgggtctgtgagagcgctgggagaggaaggagaggagatgcagggcacacacccacagctgtctctagaattgcatttgttatgtaaagtggttcatgctacttgaaatgattttctaatttgttgtacggagtttmgtgtttattatttttattatattttgataatttctgcacatctttaaatcactgaaaatgaaaaggtttscacatgaatgagaatattagcaacatatttgactcctttttttttttgaaatggagtcttgctctgttgcccaggctggagtgcagtggtgcgatcttggctcactkcaacctctgcctcctgggttcaagtgattctcccatctcagccccccgtgtagctgtgatcgcaggtgccygccaccatgcccagctaatttttgtatttttagtagagacagggcctgactatgttggccaagctggtctcgaactcctgatctcaggtgacccacccaccttggcctcccaaagttctgggattacaggcatgagccactgtgcctggccttgacaccttttttaaaaaaacgtggtccattgaggaaaatttttgtaagagaaacaggtcatctgtaatttaactatcctggtaaaacaatttttatttttgcaaataacattttactactggtcaacatacatattttgcatacttgtcagtgatgtgtgtgacatttaaaaatgggcattatcatgtttgcacatatcttcatggtgatcattttcagtgtcctatcagagagttgtgctttaatttttttagccattttgcccccagacttttttgaaataatgaaaatgttaccgttctctcctttgctgccttccttgcagtgccacaggtaatgcgttcacacagcccattttatttatagatttacattgaagggttttactttcattttttaactgacaaaaattgtatatatttatggtatacatcatgatgttttatatatataacttgtgggatgactaagtcaagctatttaacattggcacattttaataatatctattaattgatacaaaggaattatagttcaaaggtaatatgcaaaagttgactttgccgcttgtcttgaattccattaatttagaatcagggccagtgaattttctccttgttaaggagccgaaagtgcctcttcttgtcttgcgaccttaaggaagcgcctactttttttttttttttttttaagagtgttcctctcataatacgttgtaaagtaaaacattctgtttatggctagtatgtacaattagaaattataaatctaagcctcaaattgatgttactccatctttacctcactggagtgttacaaaagctgctgccaggcaaactattacaaaaggaagcagaaccgcctgcctggcaggatcctttgcagggatggttgcagcatgtttattccatatgctttcgttgttgttgctgtttgtttctttgtttgagacagagtctcactccgtcacccaggccggagtgcagtggtgccatctcagctcaatgcaacctccacctcctgggttcgagcgattctcccgtctcagcctcccaagtagctgggattacaggcatatgccaccacgcccgactaatttttgtatttttagtagagtcggggtttcaccatattgaccaggctggtctcgaactcctgaccttgtgatccacctgcctcagcctcccaaagtgctgggattacaggcgtgagccaccgcaccggcctgtcccatatgttttagaggcttatccccttcctccttgtccgctaccattgctgctacttcactttcatatttcttgaaataaaaacaaatatgtacatttcttcactcatactgctttactatacaggactagccattcccatgccacgggatgatcaccttttccttctcgattcaggttataggcacaggacctttgggagaaaaaggagagaggggctaccctggaactccggggccaagaggagagccaggcccaaaaggtagctttcttgcctttttcccccctcctcctactccccctccttctctcctcctcctcttcctcctcctcgtcctcttcctcctcctcctcctgttcctcctcctccttcctcctccccctccttctcttcctccgccccctccttctcttcctcctccccctcctcctctttctcctcttcctcctcctcctccttctctctctctccccacgctttctatttcttcccctctttttgtctagttttgacctgtgttcctccatattttggaagcatctgcaggccttgcaggactgtctgtgaccaggtctcctccaagttcctatttcactgtcacaacaggcttcaggagcccttcgctgtagctttgagagcaatgcatttccagagtgggggctcgggtggtctcccgctctgttttctacgttccctttggccatggacacttaccaatgcaccaagcaaggctttcagtagagaaataagaagtgtatacaaacgggtgaactgttctgtttgatccaacactctctttctcttttcaggtttcccaggactaccaggccaacccggacctccaggtgagactccttaactgatttgttatagcatacttgcacaccttctgtgctgtttatattctgaatatataatttatcacgaatgttagatatttgcacacaatcggtagcaatcttacracatcttttctagtgatgaaagcagagtagacaagtgcttgtagataagtatcttgtcttttgtaagtgaccacttagcatgttaatgaacatgtacacccttatgtctctcctggggatccagatctattctgcccagctctgatgtaaccccaccagagccagcctgcccccctcttttcccacggctcccactgagcaggtcytgtctttccacagagcccygattctagcacagtcaggcgccttcctcctcagcgtcctgaccactttcccctctctctgggatgtttcccagctggagatcagactccaggacaaaaccccttccagctgctgtgcccagccccagccttgcctccctggaccccggggctcctcagggtgaagtcattctccagtcactccagacgtgccaacctgtgtttcctggcagactgcgctttgcagaggctcgctgttgtctctgtccatatgcgcagatgcacgtgtgtccacgtgtgtgcgtgtgcacctgtggtattctcccaggtcccagagctgacccgataagcgtctgatggaaacgctcacstgccctagcattggcacacaacggagtgttcgcagcctttacgctttttgctttgtttttgatgtttacatttatttttgtttttatccccgtttattattttatatttgtttcctttccagctggtctaagttcttgcagagcccccttttttcctttattgggaacagacgacaccccacacagcccacgcctggctcarggcagggccttcgtccactcccactttctctcttttctgtaaaaactctgactctacccttaaaagcatcccttttgtctcttcytaattcttggattctcggaaatgtgtgacttcatgtctcctcacagaagccttgtttactgtctacagccttttatctaacccttagtggtctcttaacccagacgcttgataaaaagccattgaagttgctctggctggaggagttacccacgtccccctcccaaagtcgctgcgctsctctctgtccagtcctgccctgggctcgcctgtggccttgaccattgcctctgcccgcccccagctccctgaccgtcctcctcaccctgagggtctggttggcctcgtgcccgggtagttccttcattttcctctccattagacatgctgcccctcmttcaccactcaggaagggcacacagtattttgtggaagcccacaggggccgyccctcrgggcycttggctgccttkgagcacgttgtgcttgtggcttttctccccagtgacaggctggatgtctcaggctctgtgcccctttggtcagcgctcttccctctcctctccatgctgctcttcattcctgccaagtcttcctgcgtcctgtttccctcgactgtcctttttctcacactctcctcatcatagcctgatgctgggagcagaagctggtgcgtccctcacagaagcagcagagctttctccatgcagcctcctgcaccaycactctctcaagcsytgcgtccggcctcagctctcccaggggyacatggtcttacccttacaragttacagtggcygaacctgacctgatatgttcacacctaatggctactctgacttcaracccttttacagaaccatcttgtgtgtccttagttgtgattttctgctctttcttctagattgccaacccactgaccatccctttgctccaggtccactttagctttgttgaatgacatttctatgccctcattggccaagtagaaatgcagtgcaccctctacagcctttttaaaatatgttgggaatactatttgcactgagagaaattcacagattttaatatctacgtaatgagtccctgttcyttgaagttaatttgtaggaaacatttgactgtcagcatgaaatggcaagacacctgccagcttaatttggttttacatgtctaaagcagttcccttttcagtgatggtctggttggatttttaccttgaacagagttaggagaatgagtttrtgctgtagttgctaagtggccstgaggttactgatgtgagcttctgtctggttgcaggcctccctgtacctgggcaggctggtgcccctggcttccctggtgaaaraggagaaaaaggtgaccgaggatttcctggtacatctctgccaggaccaagtggaagagatgggctcccgggtcctcctggttccccygggccccctgggcagcctggctacacaagtgagttccctcagaaatggtttaatgtggggtgcaagcagayrccagggtgcygggcagacccaggttgggggctgtgatagtcccccacagccagagtgtaatagaaaggcgtggattcttctaatcatccatattcctctaagggaatcttcagagaatgaaccatgctacaaaaagcaatagttaaaatttcaaaataaagctggtttaacggagtaaataacacgttaaccacctctgagactcctggcatctaaagttaaaaagcaaaacwgttgagttatgtartttttattgaaaacagaatgcattcttcttcatctagagatacaaatgaatactaggacacacacacacacacacacacacacacacacacacacaccccagaaacaaggaagacaggattacatgggtaaagattacattagtaaagtccagaaaagccagcttttattccagaaaaggtgaacatgtaacatggaagtcttgactcaattaagatggccgtgtggtcccaatacaataccaaagcaaattcgaagaaaatctccaaggatttaagccaacctgtgcaatgggagtgtgttcagatacctggagccagcctttggaacctgctggatcaaaaccaacgtgtgctctgtggggcccctgaaacacgaatcctctgtggggttgattgagaaaggattcacaggcttcaagtcccagcaagatttatttgctmgaattcaagcaaatctttacgaaagggagttctcatggatgaggccactgttgggggctgggccaggactagatggagccatggattccagcctggcagcttcgatggggaatgtgatctacatgaatttgggtaggagaaagaacagatcatgtgtgactttggggaacttttctcctctgctcttgtgattgtgtgaaacatgggaaatgaagataaaatattgcagtcctggagacactcaatccagaggctccttttctctgtgtgtctgagagaaggttgtgagcyctgaccaaggggcctttgggttccrgattcattcagcggggaagggagtgcctgggaggcagagatctagcagtggtgacaagactcaacagatcctgctgtcctggagcaagtattccatggggctgacaggggttacccaagacaagggaattctcatgaatgcaggagatgataagtccagggataaacttaagcaggagagtcaacagagggttctggggtggggggtgggcaggggattgtggttttaagcagagtgatttacaaagacatgaagggggtgagggagccaatggtggggaaatctgggaaaaggacattcttttggatgttcgtaattttgcaagtgatgaaatataaacacacgtcatgtaaaaatatgaactttacactcttgttaattgaatgggatgtgttagctgagcacattgtaatatttactattccaggttttctaggtggcctttttagtccacgtaaattaagtaattctcaatcacagagtatcgagtaataatttagaaatgagatttgtactaagatttataatgtatgttaaagaggctayatcttaaagccattgctacctcaggacttatcgatagagcattaaccacrcaatgcagccatttktgcatgtaagttctgccactgcattcttgtctcaagtgggtacagccagctctaaaccatctgtggctgcagatacccttgatgagaaggcgttgtaaaatgtaaactctagatttgcactttagaactcctcagaaataatcactgcataaaatgaatttaaatggactttggtgaggatgtactattttttttttgtttgtttgttttttgttttttgtttttttgtcagggatwtgaagggattctggttgagctgaagcaggcaggagttatgctctggaaaaggagtataacagttacatgtctctcaatattcttgagcatacatttctagagtcaaggaattagtataccctaggctcacagggatgagagatgtgggttctttcagtraagtaatttaggggctgctctttraagcataaacatggagtccactttgttyaagacgatggtgccagctgcaccaatgtcgaagggctaacgaggagccaggcaggaccagagtcaccaggagcaggtccctagcagtggcygtgggggacccatggtgaccccacttgggctttcttgcctcctgtgctttgtggggagaaactcagggaaagacacataagcacataagcaacaagcaaagcaaaagcacctccccyatagttcctacacagcggaagctaacttgttctgctgagctctaaaccaagtcatcaaacaaggtgtgggatctttttaggcattctggttctagctggggtgggcgagctggagagttgaccttggttaatayattcaagccygagggagggccccacagccccactccacaccctggggcccttctatagtctgggactcagggygtccaggtgacagctgaacagagactgcccatgactttgtcattaggtgaagaccctgtaagggagaggggagggccttcagtgctggtgcatgagtgttaggrttatgcctgggcagggaygctggataccaagttgttcactgtgtcttttttcttcaaggatcttggggaaggaaatataaactccatctcagtgtgtatccaaatcataaaacaataaacaatactgatattttttactagaacctaggacagatggtgtgtacattactgcagtttatttttatgcctctttacataaatgatgctcagaattgaatgtgaacaatttgaggcatttcctcgtgggcagtctgcagctctaaaataatgattagttttgctgtaaattgggttagagggggaaaaaaggaagaaaatttttctagtctcagctttgactagatgcatgaccctggacaaatcacttacctttcttgagcctcagtttcttcatttgtaaaataagggtgatggtaggcacttcgcaagatgaaatgaaatagtatacaggacagggctgatgcacctacagatacttcagaatttgtgaaatagaaatgttggcagtgatggcttgggatggtgagtgggtggtgggtggtgtgtggtgattatgttttgcaagtggtggatagcctaagatgattttgaaacaractaaagctgaatttctaacacttrtcaaatagcctaaaatattttggttttataatagaggttgagttaggagagggtaaaaacacctagctatgatcctataactctgacaactcaatttcagatggaattgtggaatgtcagcccggacctccaggtgaccagggtcctcctggaattccagggcagccaggatttataggcgaaattggagagaaaggtaagaaattttgatttttttaaaatggtggttgtgtctttgcgtatgattttttcccacakacttascggctttggagccaagtgrgggtgggcagagttagggcgtaggttccttttatttggaaccctcttcamaatctmttcctagaayaagcatcttcyggaacttagttgatgrtctgggtgggaaaggtggagacagccctgaaagtcagagttttgccccttctccctttccgaggaccgtgaagtcagtcttgctacagtgggcgtggtcagcagataaaactcagactgatttgttaccgcaatctttccattcagtgtttgagaagagacttctgttaccaaagaatgctcttccctccttcaagccaagtcaaaaatctgcacatggaatgctcaccaattcttccagtggtgtttgcatcatcagtgtgagcaaatctaccgttgatgcattaaccagcttcactctgggctctcggttccatctttaatctttccaagtgtttgccttactacccgcacaggacacttatttatctcttccgccatcctagacacagaggtggattatcactgcatcaacagtcctgccttagaggggaataagcaatggatattctgatatttatatgcctgttagtaacccgagagtaggacaaataggaggctgtccctcaaatcaaccccactgtgtaccatttctgcctgtgaactgtaaacatgttttagtcttcaaatgtgtaagacagaaatgatgcatggaaaagtttcagccagcatcttagaattctgacagccacatacactgcaggacctgaaatggaagcgatcttgggcrtcatcacaggggtgccactgatctgagtcagtgtacagtttgggttttaatgagtctgtctgctctagttaccaggcgctcagtactttgtgagatgggctcttccattttatgacagatccagcgtccagaggttcttcacactgcaatcttagctatccatcccccagatcctaggagaagcatctgtcttctcgagtcttcccattcctctttcgactccatcgtctgctgggaatgcaccttgtctccccacccacctgaagccttgcgaacagacacacccacgaatgccccagtgcccagaacttagctgggttctcagctgtgttgtaccgtgccccttccactgatgggctcctgctctgcctcctgaaagagctcgaaatgaaaccatgtgcctgctcccacacttcgggggcatggcctacctgcactggccctgttttacttctgactgaggggcatcccagggcagagtgggcaatagcagtgcccgtgtgcggctgccagccagggcagggatgggaagaacatggccacgccgcctcgatgtccctggcatgggcttctctgcgagcactttttgctctgtattatgcctgatttgtgcctagaaaccagacatttcaatatttaagacacaggaatagctaagacaatgtaaggtctctgagcttggcttgaaaatcaagacttcagatgttagaatttccaaagaagagcatctcctctcctttttcagggctgcagtctctctcctcttctgtcctggatcacatatgtgttcttgcttttgtggcttcttattcccaagtccaccaaycagtgaastccatgaactggactaagcactcaaccaaagagaaaggggatgggtagttttcacattacagacaaattacaaaagtcaagtcttttcaggctgataggcacagttgaatttctggaccactttttactgaggcagccctgtcttttcgctgggagaagaacttggatctttaagcagtgcrtctgtggtcacacgtgacgcgtgctgggggcagtgggcccgttcattgacagacagggacgtgcgtttgactgcagtttccacccattagcagagagctgtctggaggagccattgccactgagcaaacctaagtttggatgtaatatgttagtgacagccttgcctttttctgttctctcagtgcactgyggagacttctggtcacatgttacacgtaagcacctttgtgttttcttttttaggtcaaaaaggagagagttgcctcatctgtgatatagacggatatcgggggcctcccgggccacagggacccccgggagaaataggtaagacccacatgtgaaaaggaccaggtcagagtttgctttggtgtgttggcatctytcctgtgaaagggatttcactccatagaaggcctgattttcrgcagccaatcctaaagyataatcagaagaatgtygggccccacttccaggatttgtccacattgctgggaatgatcaagayggcctcataaagatttcctaataaaagacagcagcataacagttccctccatgccacagattctgttatctcacaagcagttaatggaattcatgtttttcctttaagtggtccctgggtgtgtgggcaggggggcaggtgtggggtgctggaagcattcctgcttccgggtgtacatgtgcgtcgggtcacctattccctttctgagtccgtcttgggcattttagttattactctctttggattatccaagcaatcatccacttcctatacaratttttatgcttttgagtcttaagaaaaggttttgagaagtgtctcatgaatgctgtgttgctgtctttttccctctctctcacgaaaggtttcccagggcagccaggggccaagggcgacagaggtttgcctggcagagatggtgttgcaggagtgccagtaagtaaacctgtctgagttcatgtacatatcagaagttgccaccaagcacgtggacagagttgtgtcgttttgcatttgcaagcatggcttctgccttgtgtgggagctggtaagtgttgctgtgtcgagccctctggagtgactccatgcggcccttgtctcaggagaatgagcaagactgttacccacagagcccaaatcacagctgcctttcttctcacctggtcaacattttttcggctgctgccgacctgtgttcaggtgtggctgaatgggagtgtgtccttccctcagggtctctgggatttctggaaacaaatggtgtcacaggagccacccccacacagccacagtgcagagccgaagtgcygtctttctgtgttaccagtgctggtaacatcatatcagatcatctaaaagctggttagtcagtaggttcagcatcaatagtttctatgaaaagatcaaggaaagcagatctgtttgcctctgaggattagaaatatgtttttattcttcttcttacagttgaaaatttctgttacaacatctattgtgcagttgctttttcaratccataaatgaaatatccggatcacattgacatgaaacctttcaatggaacaaaataccagcttcttagcttttgtagtttgttttaaaagaatccactaaatagaagagcataataataatcttgaattttgaaggacattattttcttgcatataatgacttctgtttctgaagttttgaaatctcaaggcattgttcctctcgtattttctttgttcttctgagctttgcgagcatggactggtttccacaattcctttcattcctttttttctttttgtaagatattgaaagtcaaatttcagaattattcatttctgatgtagcccttcaaattttttaatttttaaagatattgctggaagcttctacaaaagaaaaccagggcaaaagcgagttgaaatagcaatgacccagctggaattcagcaatcattttctgcttttgaagttagatcttgggcttttgctctccagaacttccctggtgcctggggagctgagttagaagttgcaattgtttaagatatatctaaataaattagaagttcaaataactgggtagccctgactgtagtggggatcaaagacagaagaactttgaaggaagcagaaaaggacgtttttaacctctatgcaccgcttcatctcctgggctttcctggtggacttcctgcctcaactctggctgaaactcagtctagacatatctaataaaagacggaaaaagaggaaagaggtgagaaagaaggaatattgaggaaagatcataatatagaagaaaagaaagaaaacatacaaccccaattctactccttatgccttcatcaggagctcctttctttccggagttggaaaaagtctctaaaaataaatttatgggtaaataattcaattgagaagttagtaattttccttttattggaagctgtatttgaagctccgtgatttaactcgctcagaaatgtggttctcttattttgaatttggctagaggctaaaagagatatccataaacgagcacacaggagagtagattaaaatgtgaaatgctctgatttttcatttgacttagatagcatttctgtgacatttccttttgaaagacaagtatttgattttggggaaagaataatgaatcacaaaaggccgactccccgagcggattgatgatgcccaggttggtctgagcaggtttcatggttcctggtcactgggaggatgaattgaaaccaacactccctgactttttccacagtggcaccactttttagaggcagacagcgtaggtgtcagattttctccaattaatgcagccaatgctaaattttccaggcagtagttgaatcctcagcatttattttcagggagacggatcaaaagacctttgaactacttagawtcaagaagttctgtggcaaagaaagcacacgagatgtcctagggtcaccaatgtcactgttttaaaaacccagatttctcccgtaaatagaatgatggcaggcaaggtcatcattgttaaaataaaaaattatattttctcaccctaagatcacagtattggggagctttatatttttaggctgtgagtaatcaccataaaataatataatgatgtttgcaggttgagaaaaatatacattggttataatttcttacactagtattttttaatggatgaatattgccagttcagtgtatacttcctccagtatctcttttgttctggatgccaaggatacaaagataggaaaccttggtcctaccctcagagccctgaaatactagtggagagacagctctgcaaatagactgtcctaatgawgcaamgtgatttacagaatgaggaccagaaggcagcccgagcccacaagaaaggcygcatagaggaggctaattttagctgggattgaaggatgcataggagctaatattaactcaagagaaacagtttaaaaatcccamaacacctttcaagtaaataacaaattttccatgactctctgctacaatttctggcaggtggctcatagaaataatttgttgcctttcctgggacccagagcaaatagactgggtgtgttccacctttcctgagtagatccaagtgaagtgtcccaggtcataaggggcattagagtgcggggccagctcagaccactggtagtcgtccatgagaagcttctgccatgacaggagcgtgctacgtcagtgccatctsatctggcagctgctggccagtggtggctgttgagtctttgaaatgcagtcactgctgggtacggtggctcacgcctgaaatcccagcactttgggaggccgaggcgggcggatcacctgaggtcgggagttcgagaccggcctgaccaacatggagaaaccccgtctccactaaaaatacaaaattaactgggtgtggtggcgtatgcctataatcccagctgctcggaaggctgaggcaggagaatctcttgaacctgagaggcggaggttgcggtgagccgagatggcgccattgcactccagcctgggcaacaagagcgaaaatctgtctcaacaaaacaaaacaagcaaaaaacaaaacaaaacaaaaaacaaaaacaaatgtagtcactgtaatggaggaactgcattttttgtgttatttaatttaactttccaagtcatattgaacagtgcagagagttgctgccgactctctccatacttctggaagcctgcttgatgggattgggccaggagtcagtgcatcgtggttggtatggaagatggaatgggaggcagagcagcttctcccgttccttagcctgcgatgtttcagctgttaggaagcaattcaggcaggaaagcaagtctgctccatttaggttagtcccacatttgctgtttgtttgactttgagcaggacacagaagtccttcaagccccacctctccccctgtgtaatgggcagattttactcgctcatccctaactctccttagcactccagaggcacaggcataaggtacaagttttgcagctggaaatgcataaatgtggatcccagttccagcactttctggctgagtagtcttggatctatcagctcacttctttgagtatcagcttcttcctctgctrtgtcctggtttccatgttttccttgcagagctgcaataagggtcagagatgctatagaatgggtcatagtgcctagcaggctggtaaccaatgctagccatattttcagtctaaagattgggcaaatgttggtctgtccttggttgaccaacttcttcctttgagaagcacatagcatctgtacacacagaagcgtgtgcatgtgagggattcatacatatctaagaaccttctgmaaggaagtttatgaaaaaaaattcacattaagtgaattgtgccagagttaaaattctgccaagtcgacagggagtctgaagatgcytttctcaggcctaagtgaacaagtcaatgggacaattgttggaaacattttctgtttttcttgtgaaacccaagtctcaggatgctggaggagaagccattggtgggtatgggtgttctttgcagwtttaactttccaggaactgagcaacgttctartgtgagtctcttgggaaagtcaatttgactctgctgactcaacataactcattttagagctggcccagtgcccactcccagagtttcatctctcactggtgccctggaagtccttatctcttctggaattctgggcatgagcataaaaggaagcctgttcaatatgcacaggagtattcagcactggccaggaggtgctgacgggtagctcagtgggcccagaagctggagaaaaggcttctgcgtgctgccggtggggctgaggcagcaggcagagctgaggacagcgattgttctttgagtctgtctgttactgaagctgcacaatgaaccacacatcaatcagaacctyctgacaggtgctgtgtgttcctatgaatgttgagcagttgttagggtaagaaaactcctggaggagagctgggtgcccaaagccacactataactccctctgccccatccaggtctttgcttgaaatatctaattaagataagtgtttttaagaaaaacacaagaagtgcagcagaccagggctttgtcacagagctcctggcttgcatctagaaaatcaatgatgaggcatgaatgcatgaccattttcaagaaggtggcttcttgattctatggttgcttgtgttacagtcacactggtgtgcttcatggatgggttcttctgtggatcacaaggctttgttcttacagggccctcaaggtacaccagggctgataggccagccaggagccaagggggagcctggtgagttttatttcgacttgcggctcaaaggtgacaaaggagacccaggctttccaggacagcccggcatgmcagggagagcgggttctcctggaagagatggccatccgggtcttcctggccccaagggctcgccggtatgtttatctccagactttgaatgtgcattttacagtgtggatctgcaaagcatygagaaatgagtaatttgaatcatattgatgtatttctatctccttgatgatggcacaaatgaacttgtttcatgattcatggttcatggaacaacttaagtctataaacctaggcattgccagttattattgacaaataattaggtgataacagatcagtgtcttctgatgcatttgggggaactgaacagatgtgtttgtgtatctttttgctttggatgggaggtgaaatctaaagttaatagtattcatgtcattgttttcaaaagattccaggtatcaacatctcattctctaaagtatctccctaagtagatgagggaggaagaatgctcagcttagggagaagaatgctggtttcacttattaactacaaggtggccctcctgggagggtagatgaagtaaataaatagtgtgagccagttaactctagtwcttattgaccacaaatgtcagaagaatgcgataaggacagggtgttggtgtgtctctgataacggtgtctttttcttcttctcacatcagggttctgtaggattgaaaggagagcgtggcccccctggaggagttggattcccaggcagtcgtggtgacaccggcccccctgggcctccaggatatggtcctgctggtcccattggtgacaaaggacaagcaggctttcctggaggccctggatccccaggcctgccaggtgaggcctgagaaactcgtgatgcagcrtgaagttgtaaacggaggttagggcaggcacctcgggtgcacacagaggcctggggytcgcataggccagggcgcacacttggctttgattcttccaggaattggggcaggacctgggcaagccttcagccttttgtgcctccctttcctcatgtatgtgatgggccaggtaatatgcaggtggagaacttgggtttacagtcctcataagtaagtacacagcacgcaccagctaaagtcagcctttgtatagaagtcacaccgaggtcaagtcattttcctctccttacccatttggctttccccgatgagcagcccattttggcttctgtgcatcccgagtggtgtgatctccacctcttcacagtcggcagacgcctgtgaatggatttagaggtcctacagcgcgatgacgatttcattccatggtggttttagttgtctgctgtttttggagtgaatcacgygccaagctctatgctgagcattgacaacacatggtcaaaaccacagacgtggtccctgccctcctgcacagcctgttcagaggttttccagagaacctgtagcagggatgagtgtgggctccctcgtcgttctcctctcccacgacttgcttattttcagggccagcgggagggggctgtggcgctaggccttgcacacagcaggtgctaatartttattatctgactgcgattcccagtagacatggagcacgcctgttcttccctagaaaatcccggaatgagaagaggagaggctaggaatgccttgtgtgtagatgagggaagtaaatgcgcgttgctaggaaacattcaaaagttgtaaaagtgagtgaaaggacttaaggtgattaaaaatatctaactagtaaaccttaaaaaacatagttatttataaagtagctggggccaggtgcggtggctcacgcctgtaatcccagcactttgggaggcagaggctggcagatcacaaggtcagacattggagaccagcctggccaatatggtgaaaccccatctctactaaaaatacaaaagttagctgggcatggtggcaggcacctatagtcccagctactctggaggctgaggcaggagaatcgcttgaacccrggaggcagaggttgtagagagccaagatctcrccactgcactccagcctgggtgacagagtgagactccrtctcaaaaataaataaataaataaataaataaagtagctggatatttgaaatacccaayaataaccacgttggagcaattacagcatgccgttctggctcgcaagtgtgctgattatgtcaataaccatattgagcctgttttatgaattcctattcccattagggactaatatttccttattaatatacagtgtataggctgggcacgctggctcatgcctgtaatcccagcactttgggaggccaaggtgggcagatcacctgaggtcaggagctcgaggcctgcctggccaacatggtgaaaccctggcatctgtaatcccagctacttgggaggctgaggcaggagaattgcttgaatccaggaggcggaggttgcaatgagctgagatcgtgccattgcrttccagcctggatgacagagcaagacactgtctcaaaaacaaacaaacaaacaaacaaaacacacacacacacacacacacagtccagttcctaagcattccagtatgggaaatgtcagccagtgtttgatggaagcccaggtgtagtgtgctaacataactgttactcttatccttctccctgttggtataatcagtgagtacttagcatcaagttctgactctgttgatggttgttctttgtttagaagcgtcccagaaatgtctcttttatgactccattagaggtaggggataccrggtttgatggaggaggacttcggtgagccaggcatagggacttccgatcactttcccttgggtctcttgattccacaatcaacaaatcaagtgctgtctttgtgcttgtgacatctgcagatttccagagctgtcgaagggaattagcttttcttttggcragaaactaccatcagagaaaccaactggagtactcacaaatataccctagcagatggggaagaaggcttctggggagggggaacagggctgttgatcctctctccccacagctgtagggctccttggccatccagagccaattagcttcgagattagaaaacagatgtctttgatcygccagagctgtgtgtaactgtggtaatcataaaagcctggtgcccagggtgtgtgtcaccaacagcaggcatttcctagggtcgttcagttggcgtttcccacagtctgtagctaaagaatgtgctggctgttctagggaggccccacatagcttgaactcttacgaggtgtacgaagattcagtgcgtgcattcttggaggggaagcctttggtcctttcttaacagcgaaaccctgacactccggtggctctcctaggcatgagtgcccagagggccggggctgtgcttcctggcttgggaggaaggatggttttgcctgtgttgctcaagtgagcgcagagctctccagctgcaccattacagataatggatcgttcgtaatcacccgcggatcatgttgtttggataatttcccaccaaacgamcgtaatttaggtcaatctcaaagcaacttagactttggtaaattgagagagaacagcaaaagtattttgactttttgagaccggctcactaagaaatcacctagagccacctcacatgttgttgttgtagatttttcagcttcttgtgactcttaattgtggactcttaagggattcttgtgtccaacaaacatcttggtcattttggacatgcaaacgcatggggagaagcgtagctctctgtgaaagatcctagaaacaccaagggaagaagtggagaacacaggcagaggctctgctctccgggcactcgtggtgctgggtaggatgtggcgtgcagcccacccactgcgtgtcctccctgtgttccgtgtggtcctcattccttcatcgtttgtctttgctctttttttcctctaggtccaaagggtgaaccaggaaaaattgttcctttaccaggcccccctggagcagaaggactgccggggtccccaggcttcccaggtccccaaggtacgattggaattccagctcaccgggataccacgagagtttcctcacgtttttctcacgctgactgttgrtctttctcaccacaggagaccgaggctttcccggaaccccaggaaggccaggcctgccaggagagaagggcgctgtgggccagccaggcattggatttccagggccccccggccccaaaggtaaccctgccagacggacccgagcctttggtccacctgtgacttctgtgagaaaagaggaggtggtagacatcaaaacaccacagaagctggtgaccgctgttcagggaggctttcagaagagcccaagcagtgctgagcccaktgatttcaggagcttctaggcaatagctgccttgcagtgtagggtttggttgggaagatgggacgctaaggctgtgcaagctgcatgggcactgccaccaatggtgcccgctgaaacccaccctccaggtgtttgctttttatccrtgaggaagactcgcagtccacctgaacacagccagggtgggttgggagttgggggagcgcccagggggaggtgcaaggagtcrcagggaggggcctttgctccgaggggaggagtcctaccggtgttagagccgtcacttcctgctgaaaactggaaggaggtraggagggaatttcttttccccctgcttttcacatttcttaggtctacttgtccctcaggtagaccttgatcaacacacttgtcatcacagaccttctgttcaggactgaggagaaggtgctgtgagcacaaaagggacrtgttgtgtaaggaagtttgtcttcgtacaacacaccacgcagccacacttaggttgaaatctcctccaggctcccaggcttcttacccagaggctccaggccccatccaccctcactgctgtaggctgctagcttggagaacaggagacggcagcccctttcctctgacagccacgcaacgcccacccacaccacggctgcttccctcaggctgggcgggcagcagagcatccctgttcaggagggccaggcgctgaggcctcgtcacactcacaactccctcacattccaccattgcctcacacagtgcctccttcacctgaggccrtgacccatgtgacatggagttgcttggctttgtggcagtgaggaggacagaccctatctgtgcagcagcctcacagragatgtgattcgggtgtgtgccactgcaracttacaaattactggacatcggagacctcagtgttgcatacaaagggtctgaactagtggctggccagcttcatagcccatcagagcttccagrgcggggcccagacagtgggcaggtgtccttcagtgacagatcctgtgggatcttgaaaagtgggcctgccttatagacccctggggtctgcatttctaatgaagtgatggtggtgacctgcccccscaaccacaccttgagtagatgaataaagtgcccttctcacctgcaggcgccaaggggtatatttgttttgtttggggagagtaggatgggaaagaaaagtttgaagagagcagaagaaaaggaaaggagagagaaagaggagggcagaggtgctggaagagacagcaacgcacctgacccctctgccgggcagtctcccctggcctcttccagccacctcggaaggcctccacagttgaccttctcagatcaggtcggcatctctgggcaagactaaaagtgaagaaagtggggaacggcattgtaatcgcaatgattgtttgtttgttttttttttttgactctttaaaacaggtgttgacggcttacctggagacatggggccaccggggactccaggtcgcccgggatttaatggcttacctgggaacccaggtgtgcagggccagaaggtgagtgccaagcattccctccatgacccttctcccccatccttgttattagttggatggaaaaaatgcaggttgtgaacgtcccaggacatgttgggccagcagatttttgtttttgatgaaataacatagaatagaaagtatcagagaacgtagcacatggaagtaagtattttgaagggaaacacttgttttgattttatgaaacatttgtttcaattttatgaaattttatgacagacattttcttgcctgtgtaagctgaaactcagggtaaaatatgtttcttactgtgagaagcagatgaaggctgtttgaaagccactgtcctgaaagaaagcatagtcacccaggatggtttctcagcctcagcactactggcattctgggttcaatagctcttttctgtggggggccaccctgtgcctttgtagggcttttgacaggagcagccctccctccacctatgggtcaccaaaagagcatcccccttccacccagtcacaactgaaaatctctccagacattggcaaatgtcactagggcgatcagattgccccggcttgagaactgttggtacagggtgaagtcaggattctccttgccctcaaatattctgctaccaacttgcctatacttgaaattctgctcagcaaatgtgagcgactaccgattagatcctttcctgtcctgattgtaaggaaccaatgtgaaattgccagaaggcattggtaccaaacgggagaaagggccaacggccatcgataaacgttgccagtgatggacccaggtggggcctgctccctggccctcaggagagggcagatgggcaccacaggggccgtgcctctgggatcccaggggggtttcttccggagaaatacctgacagcagggtgccctcctctggtggctgaggcagaagagaaacctttggacctttgtctttgtacaacccgccaccagcttcccctgataacctacgttgcatttgaacatttagtcaaccgcggcaacttgcggatcatcttaaacttagtgcaagactcaggagttagtaaatgcctaatggaatgggaatgaaagatttaatttatgattaaaaataccatgctttttcaagcatccccttgatggagtttgttccattttgagaatttccttctgggacaartagggaagttaccactgcccactaatgtccaaatcctccctctctggaaatatcatttgcagacaggggacaccggtggagccctgtgatttcatggccacctgcttgctttggagcctcacatctatgcctaaatccaggctgtttccaaggcaccttcaccctttattttaatcatctgtatctatcaaagcccagtgactcatgccatagtttaaaatgcttaatttactgtgaaaccttcattaatccaaaaaactaaataactggtgtccatgctagccctggaaccttgccatctcttaggaagaactccattaactactcacaaatcatatttggcattttaccggttactcagggccagtgctttgtcacaggcaccaggctgcagagttgaggggacaagctcaggtcagaagacttgagaaaaatgtcatttatccgtggggagccttgcttttcctcctttgtaaaatgaaaacaatgaaagttacccacctatggggcttgtggtgagattgaaaagatataataggtatgaggaagctttgcaaacgcttgaaaagggttgagcagataatattcttactaaatgcrttggcagtatctgttaagtcttcacttaygctattggtttgataaaaatactgactttgcaaatcaatttgcttctctgtgctttggggattttcagggagagcctggagttggtctaccgggactcaaaggtttgccaggtcttcccggcattcctggcacacccggggagaaggggagcattggggtaccaggcgttcctggagaacatggagcgatcggaccccctgggcttcaggggatcagaggtaacttcatgcagatcagtctggagggtttcgaggacaggatgtgcttatttttgcattcccagagcccctaccgagtatatytgatatgtatttgttgaacsaacgatgcaaatcttagaggcctagagctcgtggctttccgttgctggggccattcgtgtgcrtgggtctcctaggccgggagacgtgccactgctcctgtacagcttactctcaatttttcttctccaggtgaaccgggacctcctggattgccaggctccgtggggtctccaggagttccaggaataggcccccctggagctaggggtccccctggaggacagggaccaccggggttgtcaggtgagtgacatgcttctagaattatctgttcccaaaagcatgcttttctgaagcatgggggatgaggccggggtccctataaagtgaagcttagcacaatgtatgagataaaaagagaaaaaaataaaactcgagtttgtgaaaataggtttgattgtttgcttaaatgtagtcccagattcttctcccacccactgagatgatgtgccaaacaaagagacctttcctttattgtgtactccgtcacgtttcacattttattctaactgatgtctctatattatctttccataggacggttaattagtggtggataatttcaactaattgagtccatgtctagaacctagctttgcctttgatcataataatcatagaattaaggtggtgcatggaaattagagcaaaactagccctagtcctaagtactgygacaaggcagtggtggtgcttagggtggccttgctgactctcaatgacaggaaaggggagtgcttttcttttagaacaagagccatttgattatcctgatgaccccaaacaccaacacctaacagatgatccattcaagttcccagtgtgggcgtgctcacgggctttctgcagaaagtcatagttaaacagagcactgtacattgtagatcattctgtaaattcygctaaaagttatttgtgtttcacccaactgcaggccctcctggaataaaaggagagaagggtttccccggattccctggactggacatgccgggccctaaaggagataaaggggctcaaggactccctggcataacgggacagtcggggctccctggccttcctggacagcagggggctcctgggattcctgggtttccaggtaagtgatttttgaacttctgcctggatccatcatgaagacatgggcctcaccttattctttttatgactcagcatttactgtcagcattcagagcaagaaaatgttcacagtcctttcctttggccacaggttccaagggagaaatgggcgtcatggggacccccgggcagccgggctcaccaggaccagtgggtgctcctggattaccgggtgaaaaaggtaggggagctgataaccctagaagctcattttgtgtctatttctcgatgccacttgggaaattctcaagttgtcatagatcatatttccctttaagaygcctacaaaagaagttaggaacatcaagcagaaggctgggagacccccttcttccagtaggattcctggtgctcaatgcacatggggttgaaactgtgcttggccaagcaaatcagaaagaagctgggctttccttcttggcacagatgagattcttcttgtgagaaatggtggaatcttcagccatgccaagatacagggaccgagtccttaggctcagattaacaacctgcgcaagtttacaaggcttcgtctttatttcttatcgttatttgaagttgttccaaaataatgtcttttacaaagaaatactgtaaatatgacacatgaaaaggtcatttgttttgtagaatgataaaattcctgttctattattttgtatagaactgaggggcactatgaataagagtgataaagatatgtaggaaggagagaaatgtaagttatctaaacctgaaagccaagtcacatgcagtagagttattagcgaataatgaattgtagaaaatggctttttactgctcatttacctggggttggattcttctgtgtctcagacactggccattaatgccattttggacaagttatgagtgctttgtagcctttttgccagctgctgtccctgtcaacaagaacgtgagccttttgagcacctctgtgacactggcccaggctcaccagtgccttctctttcctctgcaggggaccatggctttccgggctcctcaggacccaggggagaccctggcttgaaaggtgataagggggatgtcggtctccctggcaagcctggctccatggataaggtggacatgggcagcatgaagggccagaaaggagaccaaggagagaaaggcaagtccaggaggcttctcatggccaagctcggaaccacaatgtgcctttcctgggttatcgggtcctccataaataataaccaaaccaacctgcgtttctgcagcaacttgcttgcaagcaaatgcgggtcattgctattttcttctctgatrtgtaggacaaattggaccaattggtgagaagggatcccgaggagaccctgggaccccaggagtgcctggaaaggacgggcaggcaggacagcctgggcagccaggtacagtgtggagctccggtccccagtgtggcaagggctcaggatgaggcytgtgttccccagctctttctgtagatgtcarcctgtcagactgctttctttatggttctaggacctaaaggtgatccaggtataagtggaaccccaggtgctccaggacttccgggaccaaaaggatctgttggtggaatgggcttgccaggtaaactggatttagaagaggattctttagcatgtgtgcgtgtgatactggtagggcatgtctgcwgaatgagatcctcttcagctgagacggacagaatccaggcacgtgtgtctttcacatgaattcacatccccagctctgaatggtctcctgctcagggatggatgacatttggctgacagaatggccattgctaagaaaactcaccatctaatggaataaaacatgggctgtatacagtcaacttttgatgatctccaagtgaccatccccttgtctaggatctccctaagagacgacggcttctccatccaggcttgtcagcctgagtagcttatggctccagagccctttgtgttagttcagaagaattctccggactcctctgctccaatcccggactagccttaatgctttrccatcagtgtctattgtagtgagagcagccgggaagaggaggagagtgcgggaagggctgggtggtgatggtcctcagagctcactcagaaagggggagagttcagatgggaagcccatctttccatctcctcttgagtcttgaccaggtgctgttatcactttaattaaaatataagcatctagattgctggtcatgcctatgtgtgaataagcctggctaccagcatgcatcacagaaccgagtgtgcacagactccggcctgcccgcctcatagtccctgtgacgtctggctgatgagagctggctgtataataaagaacataagatccatttttattctgttgagaaagtaaatattctaggtagttaatgtatttcttccctgtcttataacatgatggtcttaaaggacgggagagacatttcctagcrtggctctgatgtgatctgggtgactgacgtgttctgggtcatgagccgattgatacatgagggatgtgcattcttgtatctcaatcttggctggttgtgggggattcacgttcttgtatctcattcttggctggctgtggaggcactttttcatttgtaataccagcactagctaagcccaaatcaagtttcaattgtttgtgtttataggaacacctggagagaaaggtgtgcctggcatccctggcccacaaggttcacctggcttacctggagacaaaggtgcaaaaggagagaaagggcaggcaggcccacctggcataggcatcccaggrctgcgwggtgaaaaggtaaccagcgctctgcgtggaaaggtccccttctcccagctcagtggagatgctgcctgagaaatgctcagcaaatatctcagcacactcaatgagccataacacacagggagtcccataaggcagcacaagtcgcctctccttccccttgtattcactacctctcccccaaggaasaatctagagactggtgagaggctaaggtgggagacagctgtcagtgggataaaacagagaggatggaggrcgaagaggaatggcrggtagaaaccagatggttggctctactgctcttaagttttcctctccattcagaagtggactttgattctttgatgagaaatctggaaatggagttttgcaatgcaatattcattgcaccaaaatgtataccattatctataacatgcctacagatgcatgcccatggacaaatgtaaagttaatatgcctgacttttacttgcagggagatcaagggatagcgggtttcccaggaagccctggagagaagggagaaaaaggaagcattgggatcccaggaatgccagggtccccrggccttaaagggtctcccgggagtgttggctatccaggtaggtgaggggggcttctcttggacttggggaatctaagaaatcaaagaaaagcccaaacttatggatgttctggtgttttgtttttttctttaggaagtcctgggctacctggagaaaaaggtgacaaaggcctcccaggattggatggcatccctggtgtcaaaggagaagcaggtagagggccctctttgggacacagcccgggcacatagagaacagtggccaggggatgggaggccccaaggagttcccatcacagacggggagcagggaggccagctgtcctgtctcccatyttcagatgggcaaactgagtctagtgcaggttacaggatctttctgaggtcttgtcactagcaggatctaggacctaaatctccaaactgtttttgtggccatcatggagtttttgtcaccagcttttgagggtcagggtttggtggtgttgctgaaagcacgcagggtcctttctgaagggaagtcagaactgacctcaggaaaaccaggtgtgcttgggagggaacagctcccttaaaggatgtcagcaaagggccattttgtatggcarctagggtgctgtgagaggttatgcgggtgtctgatgtgacttttctctttgaggtcttcctgggactcctggccccacaggcccagctggccagaaaggggagccaggcagtgatggaatcccggggtcagcaggagagaagggtgaaccaggtatggcccaacgccccattccctatcagaatcagcagtgtccactcccagagacctgcagactgcctgtgttcagtgaataaagctgggcacagaatggcccctagactgcacatccctgcaactacttaaacactgatgtggatgtgtggagtagagtgggatgagtggaggggaagaagggaaggggtatttattatcccataaatactgagggcatcttcccctgaaataacctgagctctcagtggtgagtcagagacacataaaatacctgctgttagaacactttccatttcccttgtggttgctatgacaaaacaaagcaaagcaaaacaaaactcttttctttgcccagcatttccccatttgaggggaaatggttggaaatattggttggcccctgagtctgctcctgtcactggtgggctttaacttggccataacttggacaaaagtgcaggtgtgatgatgacaatcacatacacagtaatatttgtatttaatgcaagagagagataaacacaccatttgaagcaggttacccctgacttggggggacactgggaggaccaccaagagcatccacagctattggtgctggctttcttttcatttttttcattccataactttatattctatacatttgtttttctatacaaacaattcataaaaatacccctgcactcctttcccccgatttgaatcttccctcaagccctttgctgacgtttgtcatctccccagcatctgctgccccaaatctctttggctttccccacctccctgagaatagcaattagtggatggttgtctgagaatcccatttgcttatctccagacggcagcaggaaacaaatactcatttgcacagatcatttgtgctaaatgccgtggtggttctgagctgaaargyacttaggaaaaagtactaaattaggaacattcagtcaagggtatcttataactrtaggaatatcattttattacaagggtgcaattaactaatatctatgtactccacaatatacgtagtattattgcagagttgatagtgctttgtgttgtacctgcagatggattgtttaagtaaagagaaacgtggcattttaccctcatcttataggtctaccaggaagaggattcccagggtttccaggggccaaaggagacaaaggtaatctttgctcactgtgctcttccttttcaaccaaccgctgctgcctgattagcagaacaaggggcagtgtcttcaggatgaagccccatscctgttggccaggcagcaacgggatggaggatgggtgctgagcccagagggcaatgcctgcaagacacatgtggttcccttctaattaatggatcaaaatggcgtgcagtacactcatgatcagaattatcttttacttggactaattttrtaaaaatccagcagagaggcgagacccctgtcatttttatgcctagaaggtcatcagaatattgaaattctgactttctagaactggttatacttatgtgaatgcaggacagtatgtagcacacaccacgagacaaaaacatgccctgcgcagccacgatgtgctcagtactaagtgcagctgagagttggccaggagcttgggaaggcagtctcttctctcagagagctgagcatttcatgggaaagcaaaggggacacagaaaatacaaggcatgtgagctgcacgacactgaagagaagccacaggtggccgcagccaggagctcacacacagcatccatgggcatgcttatggcccgtggctgggctggctgagtgatcccactcagtgggaggattcagaaagccctggaaggccttggacttcagctgagaaggagcaggggcacggaggtgttgtttctcccaccccctggttctccccgagaccagcccagagtgtttccttggcaggcatgtagtctgacactgggaacccctgggttgagaaggatggcctggtgccgggtgggctgccttgggaatggacacttccctctcccttaactcacagaatccctcaaacacagagccccttgcaaatgcacctgctcaaggggtcgctgtgggctgttcctgccctgcctttcctaccttgccatgtgatcccgcacactcctttggacatgctgcactgcccttgcacaaactctacgcagcaccttgcgttttccactcattgctgtgtgaaatagcagggagaatccccaggagaagagaatcccaaatgaccactttaggtcttgaccctatttcattcccttttcctttgttttggaaataaccttagaattttggcatttttattggtaagatttggatactatgtttaaaactaaacatagaatttctttttcctacaagctgttactttttaattttttaaacctgctctattgaagtttcactgacaggtcataaactacaaatatttaaagtggacaatttgataaggctgacataggtctacaccatgaaaacatccccacattctagatagcaggcaaagccttcccccaaaagtctcctccgtggcttcataatccccccctcctgccctctccccattccccaagcaaccgtccatctgccttctggtcctctaggttagtttgcattttccagcagttkacaaaaataaaaccatacacttcgtagtcttttcagcctgactactctcccacgacataattcgtttgagatccagcccagtggttgctcacttctttctatggctgagtagtgtcccactgcatggatataacatgattggcttgtccagcccattcatgtgctgatggagtgaggctttcgtttagcagtgcagttgctgckgatgtctttaaacacaattcagatgcctttgccatagaacacgtctcgtgagaagtatgaaaacgatagctgggttcctagcattctgagctctttttccagccaggccatggtcggattctagtgtgttattaaagagaaggagggatcggagcccttgctgcagtttcctgtggtgtccctggaagctccctctgagcggtacctayaggatgaggcacgcctcatcccatctctgccgtccacgctggagattactgttctgctgctgcgtttcccatcacctcaaactgtttttcttgttcaggttcaaagggtgaggtgggtttcccaggattagccgggagcccaggaattcctggatccaaaggagagcaaggattcatgggtcctccggggccccagggacagccggggttaccgggatccccaggccatgccacggaggggcccaaaggagaccgcggacctcagggccagcctggcctgccaggtaagggcatctcgccaggggccagggctgaggactgggacagaattcacaaaaggaaatagcgtaaaagaaatagttaaattctcaattgggcttttttatttagaagtctgcagcatttattacagcttgaaattgtgtttggcccccatcgagtcaaagcttttcttgtatcctttctgtcaaggaatttaagtaattagggagatgcaagaaaggaaatgattggacaagcctggactcgtgccccgtcggtggcgttggacttaaaccagcgcagcacttgggcccacttgtgggttctggtgaagacccccgtagtggtagcacagatgcccgggcaccactgaccgcaggccattttggacacggagacagtggcatttctatgtctgtccttccttccttccttccttccttccttccttccttctttcctcccttcctctctccctccctccttcccctcccctcccctcctccctcccctccttcctccctccttccctcccttccttccttcccagaccttcctcaatttctgtctcaagggttcacattgtcggtccagtgttttatcagagatagtagtgtttctattccctccctccctccctccttccttccttcctggacctgcctcgatttctgtctcaagggttgtcactgttggtccagtgttgtatcagtgaggggccgtgggtggcagtattgatagccccacagcccagggacacttgtgcatatttaaccccaaatgtgtggctttcttctcttccattaggacttccgggacccatggggcctccagggcttcctgggattgatggagttaaaggtgacaaaggaaatccaggctggccaggagcacccggtgtcccagggcccaagggagaccctggattccagggcatgcctgtgagttattgatttgtagatttttatttttaaaggagtcttttctggccagaagtattcatatgtgtctatgtgtgtatgtattttgtgtatgtatatatatgtgtgtgtgtgtgtgtgtgtgtgtgtgttacactcccayatccccactaaatcagttctttctttctttcttgccagtaacccacatctttattggcatcagagtaggaaactattgtaacatttttttacaatccagttttccaagaaccataaaagggaaatgttatactgctggaaattatggctcaatgcctaaatttaagacctatttacaaactcaatgtaaaaagcaagccaatgttgttttgcagagaacaattctgtaaaactagcccagccatctcttaggactggcaggaggacagggaattgcagttgaacagttcaagtcataaaagataaccagcaatattccatctttytttactgacctgatccagatacagagtctaagtggtgacttagacaagccttcagaagagcacatctcagggtgcaataagtgaccagcagccttgtgtatttctgtgtgtgtgtgtgtgactttggctctttgctgcacctgaatatatagcccttcttagtggtggtcatggatctttggtttgatttttagcttaaccaygtccatggctaaaggattgtgtttacgtggctcgctcattcaaatagctggattagcagagctttattctctgtgtctgtctctctgtttcctctatctgtctccatctgtctgtctctctgtctctctctaacacacrttaggagaaagagagagtatatcaggggagatcaggaataggagggatttgagacagacctctgcagttatgttggagcaagtggggttcttctgtaagtcaacacatgttctcccttaaagggaaagctttgaactgctcatcagcagcagagacatatcttagagtcatcagactactttctcaaggatggatacagaatagctaagcttgctgggtgcaaaacaatacgtggtgctgatttacttctgaatcagtaagttatgaaatgcttataaataattatgcagaactggctataaggagtagcaacagtcatgtttacccattccttgtcctcaaagctgtgtatatctccacagtatagcaaatgtgtatgtgaatgtatttttgggcccctattgctatattgcagttttccagtaatgtaagcctaggtaatttgtcaaatatttatgtattctcatttttattcctcagtaacatagaaatataccccattcccggctgggcctggtagctcacgcctgtaatcctagcactttgggaggccgaggtgggcagatcacctgaggtggggagttcgagaccagcctggccaacatggcaaaaccctgtctctactaaaaatgcacaagttagcatggtggctyatgcctgtaatcccagccacttggaaggctgaagcaggagaattgcttgaacctaggaggcagagattgaagtgagccgagatggtgccactgcactccagcctggatgacagagcgagactctgtctcaaaaaaaaaagaggaagaaaaagaaatacaccccattcctggtgccagtcagtgtctgtctgtctctgtatacatacttatgtataaatatgtgtttgtatatatgtttatatacatatatatttgttcmtgttattttggtttgacacttttaaaataaggctaagaaacaaatctacgtaagaaataaaacaacttgttacatgttgctgtccacgacttgaraaaggaacgacttgttgaaatggaaagaaaatgakcccctattttaaaatacacgaatattgccacagtataaaggaaaatactcgttccttagcatttcttaattttctttgcatatttaaaatcagttttcagataagacatgaaactaattctaaagaaaactgaytgcacttgaggattaaggggaaagttttcagaaaakctygttggctggtgctggatggctatgttgccgtcacaggtgttgagggggccctggctctgtctatggcatcgtgctgtgagctggaggtggcaagggcrggacatttgcctgctcctcaggcgcttcccctgtggatggacaagcagaggagatacatgggagggaaacaaatgcttctactttccagcttcccgattgaggcacatgcaaaggtgttgttattctgtcatttaagaaaccacaaggcaccatttgttcacaaatgtgctttccagaacattgaggggctgtttccattttccaactagcaggttactggagagacttaacctacatatcctgagcaattcccaacctcctctttgygtgtctagggtattggtggctctccaggaatcacaggctctaagggtgatatggggcctccaggagttccaggatttcaaggtaagacagcacagaccttgctgcacagcctttgcagcagcagaygcygtgtgaagagcttgctaacctcgggcaccttagcactgatagcaccgctgccattatagcacgagatactgttctcttcaaattaaaaatggcayttctgtgtggcagcccaatttgtataatcttatggatgccagtgtaaagacattctgattttcttattaagaatcagtggatcattaatatctcaataagaagtcatggatttgggctattcattaatttattcatatattaaacacacatttttgggctgcttaccagctccccaggcactgcagtttttactgctgagtcagatacacgtgaaaggygaataaaacaggtcgcagcctcaaggtgtcttgtggtccaactggggacatgtgtgaatcagatcgggaccaaaaacagtgccctatgcccctccactagttggatcattttacagttggctgcatgcttataaaaatgtagcttctgggttctagaaaaaagagtttcattaaaagttttacacacgtgaccagaaataatgctgttttcttccttgaagataaattggaaatttgttcactgtctatgtgtgcatatatgtgtatatatgcatatatgtgtgtatatgtatgtgtatatgtatgcatgcataagcaggtgtatgaatgtgtatatatgggtatgcatatatgagtatatgtgtgtgtatatgcatttatctatacatttgtgtacatgtatgtgtgtgcactagagagagatatatacacacacatatttgtatatcattgggaattctgtgcaagacagtgctttccctctgcttttaggtccaaaaggtcttcctggcctccagggaattaaaggtgatcaaggcgatcamggcgtcccgggagctaaaggtaggagagtttgttgatctgtggacaccttactggtgctttgtgaaaatgtaaaagccaggaatgcacagaattggggtgtttggtttttcatatgtgaaatgactcaaaaatcattaaaaacaattgatagggaattctttgcagcaagtcaagattcctgtagttgacattttaaccagcgacttgtctgaaagtagaatctgataaatccaggactgagggaactccaggggaggggtggccsaggttctcactgacaggctcagaattcagaaacttcccaaggctctcaagttagcctgaaatcaaccactgaaagttataataggaaagaaaatcaatcttgcacttagagacggagtgcattcctgctgcacagtaaagaattcttcctgggaaaggtgctgttggcttctccaccggtgggagcctacagcatgaaagtcgccgaaaaccacatcatctcaaaagggwatggtttaagcacagtattcatcctgcttcctctttacagcagaccatacttctagggcatcatttaattttycaaaccatgttttgggagagagaatgagaaaccacatgccctgagaagtggaacccaaggaaggagaggggagggagggtgtgtggaaggtgagggagggtgtgtggaaggggagggagggtatgtggaaggggagggagagttgagggtattgggctgaaaacggggaggctgaggggaactcgcactttgtgtggttcttaccacatgccaagacttgccatgcagaagaaggattaagttcattcgtcactcaaagatcaggaccagtgtgatactatacagtaaggcaggtttcagatgagtgtgggaaaaatgtcctaatcgcagagtggcactctccacgtcagaagcgggggctgcytgggaagaacaagcttctctccctgctgggagggctggcatgaggctgcagggcagttgtcaggggtcccagagcccagaatgcagtgggaagttacgctgatgccccaatgcctttgcccgagagttcaggatttcaggttaaataataaagatgtgcagattggacatgttttgtgaagatctgattacctgggttttgataatgactttacctttgagaagtacgttccatttggatagcttcacccgggattctccttctaaagttgtttccgccccagtatgtggacagtgaaattgatcaatgccttccctattcccacaggtctcccgggtcctcctggccccccaggtccttacgacatcatcaaaggggagcccgggctccctggtcctgagggccccccagggctgaaagggcttcagggactgccaggcccgaaaggccagcaaggtgagaaggcttggcctgtgcagggcggtatggggagsccagaggggcagtggtcagagttcctcctcacccatgtatctaaaataagtttctgggtaatgattatacacacacatatgaatatgagtttcttacctcccttcaatgcatatcaaaacctatgacatttttaaagggacctaaaaaaaatccagaagaaaacccaggaaaagctagaggaacacataacaacacatctgtgttcagttagaaaaacatgggctcaaagaaccagatcattacctttccccctcctgcctccygctccagatgggggtggcatgtagcaatctggaatggtaaaaatcggtgctctccatccatgcccscaggagcgctgcctgattggcactgtctgtacaattctctgttatttccygaaaccctaacatagtcttctgcttatttgagtgaaacatctcctatttgaagagctactgataaggagtgggtgggaagtaaaggagaatgaaaacattttaaagttgaaagcatcaaagaaaatttaatgatacttaagaataagctagccaggctcactgggtcacacctatgtaatgccggctttttgggaggctgaggtgggaggatcacttgagcccaggagttcaagaccagcctgggcaacatagggagagtctgtctctacaaaataataatgataaaattagccaggtgtggtagtgcatacctgtagtcccagctactcgagaggctgaggtaggagaatcgcttgagcccgggaggtcgaggctgcagtgagcggtggtcacaccactgcactccagcctgggtgacagagcgagaccctgtctcaaaaaaaaaaaaaaaaaaaaaaaagagagagagaaagaaagaagaagaacaagctatgtacatgaaaacaaaaaaactatccatgttggtatatctgttgcctaaaaattgagaccccagtatatggctgagagggaaagttatccagtctctcattccctccacatcacctgccttttccaaaccaatctgccaaacagcaagaaaccagggagaactcagaacgaggtgcccaaacacacacccccttatgaatatscagctgcttctgcaaagtctgtactcgactttgtgggaagcaactcctggctgtccgagaaaacgttctcatctgcagtgagactttatgcttggctccttgaacactgaaaaggacatttaagaagggaagaaagagatacagcttactgccatacaggatcataaattatttttcctctgcctcaggtgttacaggattggtgggtatacctggacctccaggtattcctgggtttgacggtgcccctggccagaaaggagagatgggacctgccgggcctactggtaggttgcgaaacttccaacgtaattacccttgaccaggatctttgggatagaaggagcagaaccaggcatggggaaacagcagaatgaagttggatatatcacttgacagatttccgaagaagtctgtttcttasaagaaatagaatcaaatagaagagctgaagaagtgttcttttttctgtgtagagacagatattgatcaaagtgtacgtttcccagatgttgttgaaaggcagccaatagtggtggcccatgtggtttcctaagtgggatgtgagctgcagctgtgaaaattctatttcagcaaaggacaagggaagtagaaatgaaaataatgccagcattggcccaaaggcatgggatgaacttgatctgcttccttaggagaaggcacactcgagtgtccrgtgaaggctatgatgcaaaaggctgaggccactgactaattgaacaaagagctcagcccagcagacctgggcacagtttggcacgtggcacagttagagaggggacagaagcaggccttgcctgcgaggtcccttactgctccatttccatacgcaggctttgggctgctatggaggaagaaacaccttaagatgaggttgtttaataattctatgatagtcctccccaacaggagccccacgattccgtgtgaatgacatgcacagagtcacgtcattmatttattttcatttattcatatatccattttcatatgtgtcatatattcattgaactaaattgttcaagcatctgctctgcaccgagaactgtgcttataaaaatatcttgaggtggcaggtaaaaagaaaaagttaagacaccatgaaggaggtaggctgctgtatttagttagccatgcattctttttagacttttttggtaacatgaataggtaggatactttgtggaaatataaaatattaaaaactctttggagaaaatgattttgaaagcctttaggggagcgtgtttgtaattagggaaactaatttgtctcctatcttccaggtccaagaggatttccaggtccaccaggccccgatgggttgccaggatccatggggcccccaggcaccccatctgttgatcacggcttccttgtgaccaggcatagtcaaacaatagatgacccacagtgtccttctgggaccaaaattctttaccacgggtactctttgctctacgtgcaaggcaatgaacgggcccatggccaggacttgggtaagaagcctgcagatccatgcattcattcagtgtaggtgtgttgagtgccttcggtgtgcagtgctggactcgcctctgctgctgcagtgagggcagtagcgagtgaaacactgcgccatgagggcggtagccagtgaaaaagcagccyggccccatttccctccattgattacaaataatcggttcaacagctgctgtattactaatgrcaagccaagaaatgtggagactgaatcttcgaaaatctttaaattaataaaactttagatctcatcttcaaattatcaagtaggatcaagattcctggagtgcacttaacaatttgcattgatgcggcttaaccattgctctttgtaaaaaaaaaggtccatgttatcctgtctgaaattctctacagctgctgagctctgctcctctagtttagatcagcagaaagctacatatctgtcctcattatcttaatctgacccagatatcctccaccaaactgtgttttaattttctctgcctttaacttttatcagggttagaatcagcaagctgctatagaaagagcatctgcattttctgcaaaactgttgtgaaagacattgcccaatttgttactatccatcgtataacgaaccatgtgttaagttccttctagaattcagctttaggaaaaggtttctttgtgctggtaaactggttttgtttcctttcatcaaaaatgtcctacataatcctttatacatttccatttcagtgattatgttgattatatgtttttgcttgttgtccagctgaaatccactttacatagagatagattgtgaattataaaggaaacatctcacattgtcttcttccttgtctaggcacggcyggcagctgcctgcgcaagttcagcacaatgcccttcctgttctgcaatattaacaacgtgtgcaactttgcatcacgaaatgactactcgtactggctgtccacccctgagcccatgcccatgtcaatggcacccatcacgggggaaaacataagaccatttattagtaggtgagtygagcatctrtaggaacaaatgcaaaattgaagaggaaaagtctytagtctggacaagcatatgttttctatttttctccaaaacgttgaatccattgccatttagcttattatttgtgatattcgagttttgtaatggaaatctaccataaaaattatttgacataaaagtcagttggctgggcacagtggctcatgcccgtaatcccaacactttgggaagccgaggcgagagggttgcttgagctcaggagttcaagaccagcctgggcaagatgacgagacttcatctccacaaaaaatacaaaagttagctgggcgtggtggtgtgagcctgtggtcccagctacgagggaggctgaggtgggaggatcacttaagcctgggatgttgaggctgtagtgaactgagaccacaccactgcactcctgcctgagcaacagagtgagaacctgtctcaaaaagaaaaaagagtcagctattctcttttaaaattgtggtgcaaaaccatggtgagataatgccaggcttgcagagataatttatattttgcctgactcactgtggtggttgcctttcctcctgtgagcaaggtgatgccactcgattcttcagcaagcgttggaacagtgttgctcaatctttctttttaaaaagtaacagcttccccaaggagccttttaagacattgttttctgaatcatccctgcccctatgaatttttttttttttttttgagacggagtctcgctctgtcacccaggccggactgcggactgcagtggcgcaatctcggctcactgcaagctccgcttcccgggttcacgccattctcctgcctcagcctcccgagtagctgggactacaggcgcccgccaccgcgcccggctaattttttgtatttttagtagagacggggtttcaccttgttagccaggatggtctcgatctcctgacctcatgatccacccgcctcggcctcccaaagtgctgggattacaggcgtgagccaccgcgcccggccccctatgaatttttttaaaagttatttttaattttggtaaaatggacataacataacatttaccatcttaataatttttcagtgcacagtgtagtggcattaagtacatttgcagtgttgtttwaccatcaccgccatccgtctcctgaacttttttattttcccaaactcaaactctgtccctgttaaacactgactccacatccctcctgccagcctctggtgaccccccattctactttctgtccctgtgaatttgacccccrtagacacctcatgtaagtggaatcatacagtatttttccttttgtcactggcctgtttcactcagcataatgtcctcagggttcatctatattatagcatgtgataggatttctttcctacttagggccaaataatatttcattgtgcataggtgccacgttttgtttctccattcctctgtcactggacacttaggttttgtccacacctcagctattgtgaacaatgctgctatgaacatgggtgtgaaaatatttctttgagagcctgcttttaattgttctggaggtacacccagaartagaattgtgggatcatgtggtaattctatttttagttatttgagaaacctccatgctgttttccacagtggccacaccctttacattcctgccacagcgcacagggtcccagttgctccacgtcctcaccagcatgcgttgttttctgcgtttttgatagtagccatcccaatgggtgtgagggggcccctatgaaatcgtaataccgcagacatactgtgtatctcctctgtttgtgtattgtatgtatatctgtgctttatacataaaattatacagatttatacataaaaagttatacaataatacacacactcccagttccaccartttttgctcccttgggtgatattgtacccrtcgaaaatgcatgtgttggactgagcgatctcccttgagtgtttatccgcactaatatctgaagtacgttttcaggccccaggagcctccctgataggaagtaagatggaaaactgaaattattaccactgaaaataacatgactgtcctctctttgcctctttccttctaattaaaagtttattgctggccaggcacagtggctcacgcctgtaatcccagcactttgggaggccaaggcaggtgaatcacctgaggtcaggagttcgagaccagcctggccagcatggygaaatcccatctctactaaaaatacaaaaattagctgggtgtggtgttacatgcctgtaatcccagctactcaggaggctgaggcaggagaattgcttgaacccagcaggcggaggttgcagtgagccaggatcgcaccattgcactccagcctaggcgacaagagcaaaactctgtctcaaaaaaaaaaaaaaaaaaaagtttatttcttagaaataytcagaaataataggaaagtggccagtgaacaaattcatttgactaagaagctattccgtaattttactttttacatattaagataatgataaaaaaagatacaaagttttttatattccctttaaagaaatcagcagtctttgaatatgaagaaagatgtagcagtatcaggtaggaagtgccctacattcaacagaaaagggaaaagggaagcaaatgcttggagtcacccctggagctcctgcccagctgccccaggctgtgcctttagcccaactcctttcattagatgaacatgycctgtttgggggaagaccagggttacgtgccaggcaattcctggcagatgacaatttagtgagagagctatgccacgtgggaccatggaccagagggctggaaggtgcctyctatgtaggaaaatcttagatctttgatccccttacattaaaatatctactgacagttttctttgattttttttgagctataagaaaacttattttataggtcttaaaatggagaatatcattcattacacttccagaatggcacttttcagaatgcaggcaatacttcacctgtgtgagtggctgccagatattgactgttttgagacttttcttgctcagaaccatgcctgataactagaaggaaaagtaacaacttttgtgggtttctttttttagcttcktttacacaacaggtagaaaaagactattcattgataggtttcctgtttactttcttggcaatgttgacatttgaccttgattcagagctccttgacaggagctctggcatgccctggtggtagtccaaaaacaggtctcagagaagctgtgtgtctgagaccagcatttctgtgtgatgcattcctctcagtaaaacacccctggtctttgagcaccaagagtctaagtctctgtrtgttttgatcctgagatgagcttctaaagccaacggggaggtgctaaaccttagagtctaagcaatggggcacagcatttcccacttaacatgtcattggaccagaaagtcctgaaatgtcccaggactttacatttccagatttttatgtcttcctgttagttgacacatcgaagctcagcatgaagggaccttcccaggcatgtacttgaagctgctgcttttgcatcaagtctgcctctacttccctctcgtagagaggctgcccctttgtycctgtctctgagcaagcaggtttccacggttactgaacttagtggtttccacgacttctcaggacttacaggttccttctcagctcttccctttagggaggtccgaaagctaaattttagaaacagcaaatgacacaaaagccttcgttttgagcagaaaaggtggcagttttccagctttcatccgatagtagggcacaattttctaagtactttctagctttctgcagacaagactcacgaaataaatactgattgctaattgctctgacgaaaagaccgctggattragagcaaggagaactgcattttcgttctgtcttggacacarctaaccctggccttagtttcttcatatgcaatatggagaatttggccatgtgaattttaaggaatcacacagctctttaagcctgcaatggggcaggacccttgaatccctcagcccagagacagtctgaaaaagacaaaacccttccctccaggctgtatttctaggtctcgtgtctagcaaacagatggtggcagatgtataaggccaatttcagtcactgttgtttaactgaaccttttaattcatctgcatttgggtgaataaaatagaaaattgcacacaccacacatacacacacacacagacagacacacacacaagtccatggaaaatcaaatgactcattcagccctattcccccttctgatccacgttcatgcaaatgtcccagtataactaggtgtaattattgacaccatttatagtcatttatcagcattgttaacactctgttcattttgtgacttgaatgtaattattcactgttgrcgtttaatttttttttaaacaaagcattatcccaccatcaagggttcccttcattgagagggtcttagtcagaacactgtgctgttttaatgtgtttctggtgcagtcccaaggctgagctgaatcagcctggcttgggaggcatcctgtccttgggagggtcctctggaggtcacttcagcggcagtggatgctgacagccttggaccttggacakctgagccaagagggcagaccaaaaagacaagtttcccgcaggaggcccatgtggacattcagccttaagttcattaaagcatgcattatttgtcttagttactcaactcactaagtgcatttcttatactaaagattattartagcttcaaactgttgcattccagaaggagtagctcttggatttcaccagcattttttctgaagcatttattgtgcttgtggaaatacgtatgcattgttgaaagattggaaaacactcaaatgcccaaagaagaaaagttgcctgtaaccccagcccctccaggagagccactgttagagctttgccttcctattttccccttctacaagacagacagttaaataactcgtgttggatctattttttaaacaatattttaggggcaggtctcgctatgttgcccaggccgkagagcagtggcccacaggcaggccgagcatagctccctgcagccttgaactcctggcctcaggcagtcctgcctcagcctccccagtagccaggactacaggcctgtgtcctgctctaattttttttttgagacggagtttcactcttgttgcccaggctggagtgcattgacacaatctcggctcactgcaacctccgcctcccaggttcaagtgattctcctgcctcagcctcccgagtagctgggattacaggcatgtgccaccacrcccrgctaattttttgtatttttagtagagacagcgtttctccatgttggtcaggctggacttgaactcctgacctcaggtgatccacccgcctcggcctcccaaagtgctgggattatagacatgagccaccgcccccagccatcctgctctatttttgaattgaatgttttaatactgagayaggcttataaaaccaacggggaggtactaaacctcagagtctaagcaatgggcacaatgttttctacttaatatgtaattggaccagaaagactgagtgaggatgttgagtgtaggtaacggggcagtgcatggagggcggcctctgccctgcaccccrgctgtgctgagtgtctctgctccacttccaggtgtgctgtgtgtgaggcgcctgccatggtgatggccgtgcacagccagaccattcagatcccaccgtgccccagcgggtggtcctcgctgtggatcggctactcttttgtgatggtaagtgtctggggagacgccatatttcccgggaagagccccactcacgccccatagtcscctctgtctggtgcctccacaccttggagttctctgcatctcgctgcttaagcccctccttcttcctccaaccrtccccttccaaagcatgcctcraagcctggcctgccctgcctggtgacagcaggggtctccagcaccagccagaaccctcccctgctcacagccaaggtagctgggatgagcatcttcctggaaatgcaggcccaggcctctgcttccctgtggctgctccactcaggtgctctacgggtctgttccagcaccagcaatatgaacagcttctctatacaaccagcttctccatacaaccagcttccctatatgagcagcttcttcatatgaccagcttctccatatgactagcttctctgtatgaccagcttgttcatatgaccagtttctctatatgaccagcttccatctttgagcagcttctctatatgaccagcttctccatatgactagcttctctgtatgaccagcttctccatatgactagcttctctgtatgaccagcttctccatatgactagcttctctgtatgaccagcttctctctatgagcagcttctgtatatgaccggtttctctatatgagcagcttctccatgtgaccaacttctctatatgaccagcctctttacatggagtggaggcctctttcagggaaaggaggaagagagcctccacgtggggagtacacattctactacarcatgcacgagcttgaaagcagaagcttgagttagggagagaacacccgagggctggccgtggmctccacgaaggccctcctggggcagtgccrcctgggacccttcccasagggcaaggactgctctcctagccccagggcttccctttcccrcaaaagccarctgaaacagaaaacaaggcccctgtttgatacactcattgtagcttattttattctattaccccagttggcagtattgattgaatatatacaagccgtgaacttgtaagatcagagttatcccggaatttgccwattcccagtaaatgaccctacacatacatckgcaccatcattggaagtcytagtcccatcttcayactgtcaggaatgggcaagttgtacatttgacccacagatgaacattatttattatctgattgacaggcttcatagctattttcttctgtaaattattccaattgtagaaaaaattggcgggaaagcatttttttaatgtttgagtgaggacgctgagggtagataacaaggtaactcacggatggtgtggcgtctgccctgcgccccagccgtgtggagggtctctgttccaccttccagacgtgctgtgtgcgaggcgcccaccattgccatttccttctactggttttttcttgtgcttttctacacatttttccaagtgtagaaaaagttggcaggaaagcaatttttaaaatgttcgtgcacgtgtacaagtttgattgtatgatttgctgggttgattgtactgcagctacactcttcatgttgcaaccaccagattaacaggttgttgcaataattcgaagtgctgcattgtaactactttatcgagagagccagaaaggttgaaaatgctgtatagagaaatcaggacactaacaatgatgtaagcttgccatgttcattaaaaggtagattggattcgccactccataatcataagaaatactgagtggaatctctgtgtgtcagagaaagcccacagttgcattgaggacccacaggaaagctgttgtcaccaccaacccttgtccgggtgtcaaaaggcctgaaacartgattgcccataatttgtctaaatcaggagcaaacgaaaatagtgacgttctagaraacagtgtcttccagcacctcctctgagttctcaggacggtggctctgatctggaggtctggagaccccgtccttgcctctgctccgccttgaagctatgtgatcctggtcagatccgagaatgtcctcagctgggaatcagtggagttagccttgtcctcaaaggtcccttgtgtctccaaaattctagagttcacatttcctatatctgaaataatagtcacggggctctgttgtaatgtcttagtcaagtttgtatgtcattcattttaaggtcttgatttctgagtacaggaaggtcctacttaaacctgctagaccaaaatgcaatttgatatagtagtagctatttttttctctttctcttgtttttctctctttttaaagaaaaaaaattgaatgattattctttaccttattataagataaatagcatctaatatagcaaatacaggaatgcatttgtaaagtctgattccacatcagttgtttacaacattatttgaacattttggctattgtctcatgacccatgttagaatgggttggagtgtttcaaatctaatacacagtgagctcttctttaaactctaatgaagctgggctggtcacctatttgggaagcagccattagacgatccctggggccatgytgagcaccatggggccccagccatgcaggcactggcttgcgggccagcccgataatttgggcacagagtgtgtcctgtggtgaccacatgaggctgcagtgtgtggctttccagagggaacaccctggcgccttcctgggaaggatcgatctctttcctggtgtttggggagggaacctctgactcacggctcgcatctgttctgcagcacaccagcgctggtgcagaaggctctggccaagccctggcgtcycccggctcctgcctggaggagtttagaagtgcgccattcatcgagtgtcacggccgtgggacctgcaattactacgcaaacgcttacagcttttggctcgccaccatagagaggagcgagatgttcaagtaagtgggagcactgcttttttgcaggctgctggcccctttgtgactttattttttaatcatccgcratccgtaacaccttccaatgcaaagtctcaaagatggttagcaatgaatatttgatgctgttcgacatgggcagatgaccgagacgattttcaaaggcagaccttcagtcacaggtttaattttttcatttaccgargaaccatgaaagaaaaaggtyattttccattttttctaggtgagtgtactaaaatgtaattaaagcaactgaaatctccaaacagagcatgtttgaaatacagtatatttaacaatcccggggagaagaagtgagcagcgttcattttcatgccattcataacactgatcgtaatgtacactttgtgtaagttctgagtgacttcacaaggtatttttttagacctgtgcaaataaaaattaatttcagcacaaattcagctgaaactgagagggaagacccttccttccttttccattaccaaaatctcacctttaaaatgactggcccaagtggctactaaccttgctggagttgactgggagccgggccggtccccgaaggccaggaacgcataatgaaccctctatcccgagccccagctgcagccccgctggagccaatgcaggaggctgacggagctggcacagctgcttactgttcatttccaaaacaagcgcttctcacccctggagatgagcctttccatcttcacctttttggagagaattatatggaaccctgctatgatcctgtctctttccagcttagatagtaagaggcagaacaacatacacgcttctctaattcgttactcatccaaaaagtgccgygtgcctaactggtggtttattggagcctttcaaggaactggaaacttgacatccatgctgcagatagagtttaaccattcactaccaaaatgagcgcactttgttcatgcctcagcccttgcggtgtcctcttataaggttgataggtaatgatgggttttttttttttaaccagcagcctgatacaataaactaaaatgttttcccaaagcaaattaggtaagatcccattaatttaaataataaacttgagggtactagaatttgcaccaaaagttaataaaataagcagcctcaattttaggatgaggcactctcataaatggctattttaatttagtttaattaatttatttattttaatagaattttctcagtaacaattttagttcagattttaccttttcaacaatcaaaataatgtagagtttctaagcttgagaaacacttgggacattgaatgtctttccctctttttggtctcaaagcagaccatctgcatagaaatccttcaaaagttataaaagtatttcgaggtctagggaattactccagatttattactcatcacatcattccacaaatatttaatgaatacttactgtgtgtgtaaagtgttgcagagaagaataatatcttcttcttaccctggaggagtttatgatctagtggaggagaatggaaaaaaagtgaaattgtagtacgaggaggcagggtggcacagaggggaatggccaaggcttcggagccagactgatgtggcgggacttcagctgtgccctatggggctgtgggcactggggcaggtgccagggcctgggtgtgcagctggtaacctgcagtgttctgtgtgcgtgggaccgtgtgtgcactgcacccagcacctgcctgctcactgggtggtaccaggttgaggcctgatgccaggggctgggctgatcccttagagatttccgagcagggcaggagtgccatgtttctgacgtgctgtgagatgatggccaatggtctgtctctgtgtcgtgttttaggaagcctacgccgtccaccttgaaggcaggggagctgcgcacgcacgtcagccgctgccaagtctgtatgagaagaacataatgaagcctgactcagctaatgtcacaacatggtgctacttcttcttctttttgttaacagcaacgaaccctagaaatatatcctgtgtacctcactgtccaatatgaaaaccgtaaagtgccttataggaatttgcgtaactaacacaccctgcttcattgacctctacttgctgaaggagaaaaagacagcgataagctttcaatagtggcataccaaatggcacttttgatgaaataaaatatcaatattttctgcaatccaatgcactgatgtgtgaagtgagaactccatcagaaaaccaaagggtgctaggaggtgtgggtgccttccatactgtttgcccattttcattcttgtattataattaattttctacccccagagataaatgtttgtttatatcactgtctagctgtttcaaaatttaggtcccttggtctgtacaaataatagcaatgtaaaaatggttttttgaacctccaaatggaattacagactcagtagccatatcttccaaccccccagtataaatttctgtctttctgctatgtgtggtactttgcagctgcttttgcagaaatcamaattttcctgtggaataaagatggtccaaaaatagtcaaaaattaaatatatatatatattagtaatttatatagatgtcagcaattaggcagatcaaggtttagtttaacttccactgttaaaataaagcttacatagttttcttcctttgaaagactgtgctgtcctttaacataggtttttaaagactaggatattgaatgtgaaacatccgttttcattgttcacttctaaaccaaaaattatgtgttgccaaaaccaaacccaggttcatgaatatggtgtctattatagtgaaacatgtactttgagcttattgtttttattctgtattaaatattttcagggttttaaacactaatcacaaactgaatgacttgacttcaaaagcaacaaccttaaaggccgtcatttcattagtattcctcattctgcatcctggcttgaaaaacagctctgttgaatcacagtatcagtattttcacacgtaagcacattcgggccatttccgtggtttctcatgagctgtgttcacagacctcarcagggcatcgcatggaccgcaggagggcagattcggaccactaggcctgaaatgacatttcactaaaagtctccaaaacatttctaagactactaaggccttttatgtaatttctttaaatgtgtatttcttaagaattcaaatttgtaataaaactatttgtataaaaattaagcttttattaatttgttgctagtattgccacagacgcattaaaagaaacttactgcacaagctgctaataaatttgtaagctttgcataccttagattatttttattttgcacttcttccaaatgagagtcacagactgggggtgatttatagtgactacaacaaggaaaaaaagattggtgttctccatctcttcctctttcgtcgcctcctcactccctcctttgcatccttccatctgtccccccagagagctgtcatctatctctccatccttccattcattcactctacaaatgccacttcccaggcattggttaagtagaagataaacagcgatgaatagcacacatatatagccattaagtgtgaatccactgggggttagagctgagattttagttatattaggagtggagtagagggctggattccaagtattacttgatataggaaaaaaaaatagatggctgatttcttttccctaatgacttaagcttcagtctgagctggatcagaatatagtccacggagaatgagtgagttactgaatactcagaaaaaagctctcaatacgatgatgctctcagttaactcacccaccagagccattgtgaagacgaaggacagaatgtgaacacgcagcacagtgctccaggcaggccatgcggcagggacccgattcgccaccttttcaccacttttgacaaaaccattgaaaagcgttcttttgctctccttagtatatagaagggtagagaagaaaattaaaatcattagacttagtttctactgaagttactgagaggtattaagagccacttcagagcatttcgtacatgtacatatattttgtgtacaaaattttgtacacatatatacatatatatgtataaagttcatttatcatgtttattatatacaatttagtatccctaggaaagtacaaagaagataatataacactgtggatcccaacattcaaatcccatgcatcttataccagttattctgaaagcagtttttatgttttttaaattaacttacagtaaaactgacttatttggatgtacatttctatgaattgtgaacttataaataggttcacatacccataaccaaatcagcacgcagaacagtttcatcacctaaaaaccttcaaacctgtactatgtataacacgcccaggcaccctaacctggtcttcaaccatggaactctcccccatcatagatcatctattcaggaatggaataatagacttgaaactgtcttctttcactcagcataatgtatttgacattcctccaagtcgttatgtgtatcaatagttcgttcctttttattgctgagcgggatggcattttatagacataccacccttcacttatctattcacctgttgaaggatatttggttgtttctgggttttggtggttataaataggaataaacattcacattcaggtttgcatgtgaatgtaagtcttcattacttcattactttaggataaatgcccagtactaagacagctgtgccataggggaagtgtgtgtttaatgttctaaggagctgccaaaccatcttccaggatggctgcaccatgctgccttccaccagcaaccaatgggagccccagtggctccacatcccctccagtatttgactttgccagcaattgttctgtgtgtgcgtggtcttctcacaagtatgtagtggcattaactatggttaatttgcatttctctaatggttaatgatgttgaacagtttttggctgcctgtatatcttgtatatcctttttttaaagtgtttgttaagcctttgctcagtctttttaaaacctttattttattttattttatttttagatggggtcttactctgttgcccaggctggactgcagtggcctaatctcggctggctgttaacctccacctcctgggctcaagtggtcctcccacctcagccttctgagtagctgggactgcaggtgtgtgccactcacccagctaattttttttgtatttttgtaaagactgggtttcaccatgttgtctaggctggcctcaaactcctagactcaggtgatctgcccacctcggcctcccaaagtgctgggattacaggcgtgagccatcgtatccagcccctttgctcaggttttcagttgggttgctcgttttcatactgctgcattctgaaagtttttcgcatattctggttacaagtccatttttggataagtgatttgcaaattcatccacttaatgatgtctttcacagagctaaacttttttgctttttaaaatttcagcttttattttagatacagtggtgtatatgcaggattgttatgcaggtgtatagtaccaggtggcgagcgtggtacccagtaggtagcttttcaacccaggccccgtcctccctccccgctctagtattctgcagtgttgattgttcccatgtttatgtccatgaatagagctaaactttttaattttgatgatatccaatttatcaatttttgttttcttccattggacatgcttttgctattatggttaagaacccgttgatataccctcgctcacgaatattttctcttgcattttcttctcaaagttttatggttttacttactacatttcgatttgtaatcattttttaattgatgaaattcacataacgtaaaattcaccatgttaaggtgaacaattcagtggcatgtagtacattcacaatgctgtgccaccgcctgcgtctagttctaagccacctgcttctagtactaaaccagcttcatctagcactaaaccacctgaatctagcactaaaccacctacatctagttgtaaaccagctgcatctagctctaaaccacctgcatctagttctaaatcagatgcatctagtactaaaccgtctgcatgtagttctaaatcagctgcacctacttctaaaccacctgcatctagttctaaatcagctgcacctacttctaaaccacctgcacctacttctaaactaccttcatctagttctaaaccagctgcatctagtattaaaccacctgcatctagttctaaaccatccgcattcagttctaaatcagttgcatctcatactaaaccacctccatctagtactaaaccacctgcatctagtactaaaccacttgtatctagtactaaaccacttgtatctagtactaaaccacttgtatctagtactaaaccacttgtgtctagttccaaaactagttctatcacaccaaagccccatgcccattcagaagtcacaccccattccctccctacccctccgtccctgataaacacctgtctgctttctgcctctatacatttgcctactttggatatttcatacagtgcatgactttcgtgtgtgctttctttcacttagcatgaccttctcaaggttatccacattgtggcatgccagtacttcgatcacttttatggctgtataacttccatcatgtaaatatgctacattttctgtatcgactcacccattcatgaacatgtggactatcttgatgtttggctactgtgaatagtgttgctgtgcacatgcatttgtttgagctcctgttttcttttctttttctttttctttctttctttttttttttttttttttttttttttgagaaacagtcttgctgtgtcgcccaggctggagtgcagtgagtggtgtgatctcagctcactgcaagctctgccttctgggttcaggccattctcctgcctcagcctcccaagtagctgggactacaggtgcccgccaccatgcccggctaatttttcgtatttttagtagagacggggtttcaccatgttagccaggatggtctcgatctcctgacctcgtgatccacccacctcaattctttagggtatccacctaggaatggaattgctgagtctgtgtttaactttttgaggaactgccaaactcttttccacagaggctgaactgttttacactcccaccaacagtgctgtgggctccaattcctctatgtccttgtccacacttacgattttccaatttttgattataaccatcttagtgggtatgaaggggtcacggtttggtttgcattttcctaattgttcatgatgctgtgcatcttttcaatgtgcttcttggccatttatatattgagtagacatttgaaatgtttactcaatttcttttccattttaaattaggttgtttgtctttttgttatttatttacttttgagacaggttctcactctttcacccaggctggagtgcaatggcacaatcatggctcactgcagcctcaacctcccaggttccagtgatcctcccacctcaacctcctgaatagctaggactgtagggatgcgccaccacactcagctaatttctctaattttttttagagatggggtctcactatgctgccaggaatggtctcaaactcctgggcttaagcgatcctcctgcctgggcctcccaaactattgggattacagttgtgcaccaccgtgcctgacccgtctttttgttgtttacttgtaaacattcctcatatattctgaatagtagacccttatcagatatatgatttgcaaatatattttctattatgaagattgtctttttacttttttaataatgtacgttagtgcacaaaggtttttaatgttgatgaagtacaatttatctatttttcatatgttgctcatgcctttagtgtcatatctaagaatccattgccagatccaaggtcatgaatatttactcctatgttttcctctgtctatttcttccttttcttatttcagccctcctacacacacacctctttttctttttcttgcctctttgtactctccagaattttaagtacaatgttaaataggagtggtgaatatgggcattcttcccttgtgcttgatctgaagaaaaaagcatttagtctttcatcattaaatatgatgttaactatagggtttaaaaaaaaaaccagatacctttatccctgtaagtatcatgagtggatatcaaatgttgttgaatgccttttctgcatcaacggcaatcccatatgcaatcccctatgatatgattatatggcctttcttcttcagcttgttgaaacagtggataatagtgattgataatcaaagatcagaccagttttatatttctgggataaagcccacttggtcatgatatgttattctttttatatattgagcatttgatttgctagtacttactagagttccttgtgtctgtgttagtgaggaaaattgcttttaactttattttcttatattacctttggcttttctatcaaataatgccatttgcaaaaaaaaagaaaaatgagccaggaaatgttcccatctcttctgttttctggaagacattatgtagagttgtttttttgtttgtttgttttgttttttagatatttaatagaatttgtcaataaaaccgtttggtcctgcaaatttcctttcttggtaggttttgaactataaatttaagttacaaatagttataggactattcaggatatctatttcatcttggatgagttagataactttttctttcaaggattagttcatagtaagttgtcaaatttgtgtgtgtagagttattcctagtattctattatctccatgtctgtgaagcctgtagcagcatttattatttctttcctgatattgaacattttcatcttccatctttttctttgtcaaattctttagaagtttgtcaatattattgatcttttcagagaaccagcttttggatttattgatttttttctattttttctgccttcaatttcatcaattttttctcttatctttattatttcctttcatgttcttattttgtgtttattttgctcttctttttctagtttcttaaggtgtaagcatacatgattaatttgagacttttttctttttaagcataagcatttgatgctatatatttccctctaagcactgatttacctgcatcccatgaattgtgttatgttgtattttcatttacattcaattca

SEQ ID NO: 8918 - DNA, 89262 bp, Homo sapiens
  misc_feature (1)...(89262): n = A,T,C or G, or insertion/deletion polymorphism (see Tables 1-2)
ctccagcctgggcgacagagcgagaccccgtctctaaataaataaataaatacatgcttttaaatggcagtgtgaggactcaggccactgcacagccttgtaaaccttggtgggaagcccagcttgagggcactggcagtatctgaatggccacaaaacatgcagcccagcagtgatccccgcagggagtcagcagcggtccccggagggagtcagcagtggtccctggagggagttagcctgaggacactgtacatgcaaagatgaagcactgctctccaatccaccctcatacagcggccaacctggatttgttatgaaaacataaatcagctcaaacaaacactcagtcacagacattcacagcagccaattcacaattgccaaaaggtggaaagaacccaagtatccttcaacagataaatggatacaaatgtggtggatgttactcagccacagaaggcaggctgggcacagtggctcacgcctataatcccagcaccttggaaggccgaggtgggcagatcacctgaggtcaggagttcaagaccagcccggccaacatggtgaaaccccatctctactaaaaatacaaaaattagccggatatggtggtgggcgcctgtaatcccagctactcgggaggctgaggcagggcaatcacttgaacccaggaggtggaggtttcagtgagcccagatcgcaccactgtactccagcctgggagacagagcaagattctatctcaaaaaaataaataaatggctgggcgcggtggctcacgcctgtaatcccagcattttgggaggccgaggcaggtggatcacgaggtcaggagatcgaaaccatcctggctaaaacggtgaaaccccatctctactaaaaacacaaaaaattagccgggcatggcggctggtgcctgtagtcccagctactcgggaggctgaggcaggagaatggtgtgaacccaggaggcggagcttgcagtgagccgagatcacgccattgcactctagcctgggcaatagagtgaaaaaataaataaataataaataaataaaagaaggcatggggctctgaggcaggctgggcatggatgggcctcaaaaacacatgcttgggtggaagctgccaggcataaaaagccacatacagtgtgagtccgtggatgcaaaatgtccacaacagtcagggacagagctgggacgcaggctcacggctggcagtgggcgaggggtggggaatggcggtggcggccacgggcacaggcattctggggtgataaagacctcctgagactagtagctggtggctgctccacactgggaatgtggcagatgctgctgaattgcacacttttaagtggataattatgtcatgtgagtttaacgtcaattaaaagaaatggggaaaaacacaactcagaccatgtcactcccctgcataaagctctcgtgttgctgtgacttcccgtgtccttcaaagtaaacccaagtttgaattcccagctgagctggcccctggcagactccagcccttttcctgccaccccaacctcgaaggtgcccttgtcattggtgggatgcgcacacccggcacagcccctgctctacccgctgcacttccccagcacgtggggctgttcctccttcaagggcacggccatgcggggagcggagcctgatgtcagcactgcgtgtggcttgcgggacaacctgttctgaggtgtccggttccatcagaacagtgcattccacgctgggtgcggtggctcatgcctataatcctagcacttggggaggctgaggcagacggatcacctgaggtcaggagttcaagatcagcctggccaacatggtgaaaccccatctctactaaaaatacaaacattagccaagcatggtggcgggtgcctgtaatcccagctactcaggagggtgaagcaggagaatcgcttgaacccgggtggcggaggttgcaagatcacaactcttcattccagcctcggcaaaagagcaaaaattaaaaaaaaaaaaaagaacatactatgttccgagtgatggcaacatttccactccagaggggtggatgggaaagaaagacaggaagacaggagtccggaggcaccagcctcggcgtccactgtgtccttccagctcttctgtgtctttttaactgatataattccattaccataaaattaatcttttaaaagtgggatatctttgagcatattcacaaagctgtgcaaccatcacctctatctaattctagaacattttcatcatcccacgagaaaccccatgcccactagcagtcactccctatttcaccgacagcccctggcagccactcatcttactttctgtctctgtagatttacctaccctgaaaatttcacataagtgtaatcacacggcttgttcattttgtgtctggcgtatttcacaggttgaggtggcaggaaaagggctggagtctgccaggggccagctcagctgggaattcaaacttaggtttactttgaaagacacgggaagtcacagcaacacgagaactttatgcagggaagtgacatggtctgatttgtgttttttcccagcctggttgggaggccgaagtgggtggatcannnnnnnnnnnnnnnnnnnnnnnnnnnnnnnnnnnnnnnnnnnnnnnnnnnnnnnnnnnnnnnnnnnnnnnnnnnnnnnnnnnnnnnnnnnnnnnnnnnnnnnnnnnnnnnnnnnnnnnnnnnnnnnnnnnnnnnnnnnnnnnnnnnnnnnnnnnnnnnnnnnnnnnnnnnnnnnnnnnnnnnnnnnnnnnnnnnnnnnnnnnnnnnnnnnnnnnnnnnnnnnnnnnnnnnnnnnnnnnnnnnnnnnnnnnnnnnnnnnnnnnnnnnnnnnnnnnnnnnnnnnnnnnnnnnnnnnnnnnnnnnnnnnnnnnnnnnnnnnnnnnnnnnnnnnnnnnnnnnnnnnnnnnnnnnnnnnnnnnagcagtggcacaatctcggctcaccgcaacctgcgcctcccgggttcaagcgattctcctgtctcagcctcccgagtagctgagattacaggcatgtgccaccaaacctggccaattttgtatttttattagagacagggtttcttctttttggtcaggctggtctcaaactcccgacctcaggtgatccacccacctcggcctcccaaagtgctgggattacaggcgtgagtcactgcacccagccatttttatttttcttataataaaactataattagaagaattatataaaattacatatgtatttatagaaaatacaattcaaattcaaagaaaaaaataaacactattgccaacttttaaatggggaggaaaattgagttctaccactttggagatgagtttttccaaagtcctgagcaggaactttgaagccctaaatgaaaacagccagaaacaacatttgttggcctctgccttcgtgggagtctcctggggctggagacttggagacccccacggagccctgccctgcagccctcacacggctcacaacactagccaaggccccagccctgaggtgcgggctgtgcagcttgcctgcagtggaggggctgggcagggcgcacaccctcaagggcgcctgctaagaggaggagagggaggaagaccgggggtcagagcgtgcagggatggctggcgtgggaggggcctcaggcagggaggcaaggatgtgtaaagcacttggaggctggaggctcgccctgtagacaaaagggcccaagaggactgggatggacaaaggtgaagggggctgggggtgcaactgccagtgggcctgaggggcagaaggggcggccctgccctagctccctagtcaggtggctctggttcagggaggttcagaaacccgttgcaggtcacgaggctcttgggcttcaacctgcgtggctcccctcgggcagggccgcctcagagtagcagcaggtgggggtgtgggggctgccacatggccagagccgggcctgcgtgggacaagcctggggcgctgggtggggtgggggatgctgaccacaggggagtgggctccggttttccagtgaaaacaagacttaaactgaactctacacatagcccgggccacctggccggtgccgcccacattccccgtcagctgtgtgcccgctcgtccagccatccccttcccctcagccctccctggcccccaggtgccctcccagaaccaaccagagccttcctaggcaccgcccccacctcaggccaggccctgctcaagcaaggccgggcgggtaggggcatcctggccccatcctctctccctgccgaagggggaggcgccccacctctgggcaggctgctgcattctcagaaatgactgttccttttaaagccagcctgcagctcgtaaaaaccccccaagccggccccgagacagacacccgggtggcccaccnnnnnnnnnnnnnnnnnnnntggccacccacgcgccggcgtcggccaaggggagggctgagagtggtcgtcagcccaggatgccttccacccctggcttccttccggggccccacccactgcctgccccgtgcctgcctgggtcaccctggcggcaggaggggcgggcaccagcttgccagctcctgccaccatgcttccgctgcccactgtgccgtgaaccctgccccctgcccacccggcccctgagccacaccacctgcccactccccagcccctacccatatgcacccccagccgactcaggtctgccccatgacacgcctcagcctggcctgggcccggccccccaccctcagctgccacgtgggggccttggagccaaactgccaatgaggattcatttacgatctcccaaaggaacacaggagcagtgacagagtccaggctctgaggccaccccaggagcgccagacagggagtctcgcccgcacccagcttggttccgcctcctgaccccacaccacagcctgaggtcactgcccctccccaggtgtggtctgaggcactccagcacatgctgtggcaacaagacaagcccggaggcaggaccagaccccgcctggactcccatccctggactcagccttcccgctccagcagcctgccaggtcgccgctgcatcccagccacagtaacttctgtccagggaggtcagcagtgagcaagcgtggcactggagaggccggattctgtcagaaaatgctcgcagcccccgccgccttggcctccagccgagggtgtcagccccgctctgtccccatctggctggcccaccaggggtcggaggagacgtctgggagaggagctggaggacaccccacaaaggtggggtctgcctgagcgagaggcagtggtcctcacactcctggcctcttccccttgccctccggtgggtggaggtcccgaggccatctgaagacccctggctctgagggtcaccccgtggcgtgggatgcatctcccacagcgagggtgtggcttcctctggcgcctgatgcctggctcctgctgctgtcaggactgcctggagacaaggcagctgaggccacagagatgacagcaggccacagtcacacagctgactggccacggacccacaccagctcccagacaagagtgtgcaaggcctccctgctgtcaggggtcttccaaaaaactgccccaggggaacagcatgcccctcctccaagcttcagggaatcctgcacaccccggggttcactggcccagagctgtgcccagcacctggacagcacttggaaaacagctgaggaatgtgccaatcagggaggtgccacatcagggccggcgcaccactcaccccaacagcagcacccagcgcctgccacacccaggggcagctcatagcacggggtgccaggacaggacccaaggtcacagaggtcaaaggcagggggctgaggtctgcagggccagacctgatgacatggggcaagcggacagaagccacactgggcaaatccaggccaaggcagctggacaagtggacagcgggcaccragtaggggagacaagccctaagcctcccgtgggcctagaagcatgtggacagccgggagcagcaggagcagggaggcagggccaggagatgcctctccagggcagagatgggagcgcmcaggagggtcacaggtgaggcaggcacagccaggtgagatgcgctgctgttctccggatgccctccgggagccagtctgcttggacccccatgctctcccctctcctggacgctggagccctgaggctcgcttctgaccatcagaatccagcagagttacccgtgacttctgagggtatatcctaacagcctggcagcatctactcgggagctgtctgggaaacctgctccttgccactcctccttgggacacagcaccatgctgtgagaagcccaagccccgctcgggggcccctgcaggaaaccaggcagccctaggacgtgccaccccacaggactgcaggtcacgcggccccacggatgctggaccacaactacaaccaatcaagaagcctgtgccagctgctcagcatgcccaccagcctgcagaaccacaagagaccctgaatgctgtggtttgagcccacgctggtggctgggcagctcctgacacctgcagcagtgagatggcaccggtgggcactgggcagcgccaggatgggtgggggccagctcgtggggtccctgtgagcctgagccacagaccctggatccctccctgaggtcccatgggacgggcaggctgggcatacctgcagagaagatgtggccagccacggccaggaacgcatcsgtcaccacaggctcagactgcagggagatgtgcagctgacgcgccacgttgcggtagacgctgggccggatcatctccagctcatcgcctgtgtggtcacaagagcaggtgagaggcagcccacgtcccagcttcctgggacacgactggcttggggcacaccctgcacctgacccccacctgaccatgcttgaattccagcctgttcctcacttgtctgaytcccacctccacttgaccccatctgacctcccttgggccatcccccaaccttggcccctagggaccagaagaccaaggaagtactgaaggcgcccccagtcccgcccctctgacgagccagcccctaagcctagccggccaagccggtggggcgggaatcctgcgagagcgtgggccgtgcctgctggtgactcacagccgacaggcagccgagctgcccagagcaggagggaccaggcagacggccagaccccgacgtggggaggggctgggcagagaaagcactggggtgagagcaggggagcccgacgtggggaggggctgggcagagaaagcattggggtgagagcaggggacagcccgagagcccggctcaggccctagcatggctcagggaccactcagatgcagaggctgagccgctgtcctgggccacccgcactgccacgctcccacctgggctggctgggccgctgtcctgggccacccgcactgccacgctcccacctgggctggctgggcccctgtcctgggccacccgcactgccacgctcccacctgggctggctgggccgctgtcctgggccacccgcactgccacgctcccacctgggctggctgggcccctgtcctgggccacccgcactgccacgctcccacctgggctggctgggccgctgtcctgggccacccgcactgccacgctcccacctgggctggctgggcccctgtcctgggccacccgcactgccacgctcccacctgggctggctgggccgctgtcctgggccaccctcactgccacgctcccacctgggctcttgctgccaaggggatgtgcttggaggtggcactgcatcagccctgcccctggcagccgaggatggcccctacaggcccaccgccccagtgctgcctgtggcacccttggcagcagcagcgcacaggcacggggcagatggtgccragaatgccacagggccctgggattgggagtccgcagcccggccagttctccagccaaagcaaacagggtaatgctgctgaccggaccatcccagctgatamaggcwgctctktatctcattaattaagatctggaagcagagcagagcccatgagaggctggctgggggcgggggacgacatggaaattcccaggactgacccggcagctcccaaacacagatctccggggctgctgcaggctggccccagactgaaggtggggacacaacccgggcttcttcctgtctgcactgcccaagggcagggagacagcgctggcctcaagggactgaccctgagcagccgtgagggcagatgcaggtctgagctgtgtccctctggggtccccctagacatctgggacttcttcccagccattccaggggtctggcatcatcttttcagaaggccactaaaaggatcccctagggtcattctcagagcccgactagaggcagcagcaggcggcggatctcatggagccccaccaaccccctagctcccacccagagacctctccctccttctgaacttctcagatgggactccacctcctcctggaggctctgtgctggtccccatggattctgtctgcaccccacacacactcctgggcaggccaggtctacacagctttgctctctgggcccagcccaccacgtaagggcaggggccacctagagcccatgccagcgccagcctgagaggaggcagcgtgtcccctcacggggtcgtgccctccgactccaaccccctgcctggagagccaccgattcagtttcacctatgctgtcacctccccttcccgggctcagccacaggcgccccatgtgccctcttcgggcatcacataaacattcccaggtgacggccacagcccagctgtggtgaggggactggacagtcacagtggggctggtccctccctcttgggtccagaccttggagacggtgggggcagccagtggaccgtgtgtgaccccagaaccgagcacccccagatgtcctcacagcaccaacgaatactgaggttttggctacccagcccggtgggcgcagtttccaatgggggggcctcggaggcctcggaatccagagggcagcgggcgggatctcggccagtaacagcaagaatctgttttccaaaataaacatcgggacacgtgctcctacaaagggtttctgtgcccagctgagaacaagggtcactgtggaagcttagccacccactaatagattattctttctggagctttctattgtttatggccagcatgactgaaatctgggctgagcaggcagctgatgggggggcctgtggcgtgggaggcctgagagggcagatccgggagcacccgcctgggtggccctgtcccgagcgcctggccgtcccaggcagggggtgggcgcccctgggccggacccccatctcggcctcggagggaggctgcggcccagcaggggaggaggcgcagctggggatcccaccagggcgcactcacccaggcgcagcagcaccgcgcacacctcagccaggcgtcccgggaccggcgcggcacgctcgggcgcgctccaggagaggccggcgcgcagcagccgcgcgtgcacgtactcccggcccagcgccttggcctgggccaccagctccttgtctgtgggcgagcggtcaaaggcgtccatgatctcggcggcgaagaccgaggagcgccgcagcacctccatggcggcgacgcgggtggggggcgccgcacctgcgggcacaagcgctcagccgggtggagggaggcggcgcggggaacggggcgcgcggggcgccgggctgggcgtggccctcgggaagggccgtagccggcgccgggtccgctctcgttttttgtgccccaaatctttaaaaacccagcgccaccttctttcagagcccgaattcagctacagacattccccgaggctgccagggaccggtggggccgcggggagacggcggtttgctccggggccgccgggcccgccctcgaagacgagtgcgtgggcggcgggggcggagggcacagcccagcgcgtcccccacggcgactgccaggacccggccctccccgccccggcccggggccgcccacctccgccgctggcgtcctgcgcgcgtgtccccggcctcgccgttcccgtggcaccccgggcaccccggcacggacgccacgcccgccgcgctcacctctcccgccgcatggcgcgggcgccggggtggagttctggcttcaggatctgctcgccgccgacgacgacctcgacccttccattcagacccgcgaggacgcgcgccccgccccggcgcccgccccgtccacgcccgagccgggagcgccaggtccacggggcttcccgcgctcttggggggctcctgccgcggcgtcgggggcctgggcagcgaggtgggcagcgcgcgactcccagctggcgagaggctgggcttggggcttggccttctaagggaaaggcaaccctgggggcggagtcggggagacgctttccgagcttccccgcttaaggaggaccgagcgagttccctggatgcgcccggagaaggcgaccaggccggagcggcccccgcaaggcagagcagtggggacctagagccagccccagccgcctgggtgttccccggggtccatttgaaaattgggttgtcttcttcgttcgtagaggttctttccagagtctggagacgtgttcttggtccggacgcatgccctttgtattgtagatggattattggattcgcatttattgaagttattgcaaatatcttcctctattttgtggtttacttttgctttggatgaacaggagttactcttagtgatgtccaatttatcaatattttctttatggttagtacctttttattgggatatcctcctgtatttccttttagaagcttgttttagggctcatatttagatctatgattgattacatattaattattgtgaatggtgtggtacggggctagagctcattttttttcgtgtagatatccaattgacctggcatcatttattgaaaagcatcattttttttccaccgaattggaggagtccccaacatctcaacataaatcagctgaagagtgtgtgtgtgtgtgtgtgtgtgtctcggaactctatcccactggtttatttctttatccttgaatcaacctcacacagtttgaacaataggattaaccaacttggcctaattcacgtgtgtacaacactataaaatacttattcttcccatgtgcacataggatgtttatcgaaatagaccatatcatggaccttatacaagtctcagcaaatctcaacggattgaaatcttacagtgtgtcctctctgaattaaaagtcaataacagaaaaattactggaaaatctgcaaatgcttggaaattacatgtcacacttctaaataatcaatgggtcaataatcacagtggaagattaaaatatgttgacaagaacagtgaaaaataagacatatcaaatgctgtacagtgcaactaaaacactgcttagaggaaatttgatagctttagaagaaggattgaaaattaggccaggtgaaatgactcagacctgtaatcccagcattttgggaggcctaggtgggcagatcacctgagctcaggagtttgagaccagccgggtcaaaatggtgaaaaccccgtctctactagagatacaaaaaatgagttgggtgtggtggcaggtgtctgtaatcccagctactaaggaggctgaggcaggagaattgcttgaacctgggaggcgaaggttgcagtgagcagagatcatcccacctgcactccagcctggacaacagagtgtgattccatctcaaaaaaaaaaaaaaaaaaggaaaaagaaaaataaaattactgctctaagcttccactcaagaagctagaaaagaacaataaaactaaagatgaaaggaaataataaaaataagagcagaaattaatggaataaagcaaaaaatagagaaaatcaacaaagccaaaaattggttctttgaagagattaatagaactgataaatccccagaaagattgagtaagaaaaaagataacacaaatttcactatcaagaatgaaaaagaggacatcactgtagatactacaagcattaaagggataaaaagatagtatggaggactttttgacagtgcatttgaaattttagatgatacacaacttaccaaaactgacactaaaagaaatagaaaatctggatagtcctacaccaattaaatgcattgaatctgtaatttaaaatcttcccacaaagaaaattctaggttcagatggtttcattgagaaattcttctcaacagttaaaaaaataccaccagtctcatacaaacctgcacagagactaaaaatgagggagtatttcccaactcattttatgaggtcaatgtaattttaataccgaaacctgtcaggaacattaccagaagctaggaaagctatggaacttctatctgctatgactttcctgtctgggaagtaggaagaataataatacctacctcctaggattgttgagaggactgaattctttttttttttttttttttttgagacggagtctcgctctgttgccaggctggagtgcaatggcgtaaactcggctcactgcaaccccgcctcctgggctccagcgattctcctgcctcagcctcccgagtagctgggactacaggcacctgacaccacgcccggctaattrtttgtatttttggtagagagggggtttcaccatgttggccaggatggtctcgatctcttgacctcgtgatctacctgccttggcatcacaaagttctgggattataggcgtaagccacagcgcccagcctgggaggactgaattcttaatccatgtcatgtagtaagtgctcagtcattgttagctgctttttcagaaaagctgtagtacagtaaaatctgagggtgcattttaatgaactctttaatgtagagtctagagctccttggacagtgtgcgcctcagatttctgaagagcagtcaggtttgggattccctgtagatagcattacagaaatgcagagagggaaaagatctcgcccaaggagtcactgcaagactgggcatggccagactgtaaaccttggggtctaactccatggttcctgaagtacctctgtcaggggaagagcctrtacttgcaggcaggagaccaggaagctcacacctgcaaccttcccgctgtgtagcctcaggcaacttcctgccccattcacaggctcagtttcctcctgtgcagaatgaactcatacttcctgcttcctgtctcctgttggagccgtctcctgggctctgacatggggrtagtgggccactgggcataattgatagacatgttctgcatcccaggagctgcagaaaccaggtaaagctgtgtctctggatgttcaatatggaacattgctagcagtaaggaactgaaaatgacctaagtgtgccaggcgtggtggctcatgcctgtaatcccagcactttgggaggctgaggcatgtggatcacctgaggttaggagttcgagaccagcttgaccaacaaggtgagactccgtttctactaaaaatacaaaaaattagccaggcgtggtggcgcatgtctgtaatcccagctactcgggaggctgagacaggagaattgcttgaacccaggagtcggaggttgcggtgagccgagctcatgccactgcactccagcctgggcaacagaacgagactttgtctcaaaaaaaaaaaaaaatgacctcagtgtttatgaagagatcaagcccagcatggtgacaccgcactagtagtcccagctccttgggagactgaagcaagaggattgcttgagcccaggagttcagggctgtagtgcctgtgaatagccactgcactcagcctgggcaacttagcaaagacgggtttctaaaacaaattttaaaaagagagcagatgaggagattaagcaatctggagtacctagaccgcaaacccttattcagaccttaaaaaacttgggtcatgctggagttagctgaggtcttcctgtccactgagacctggaggaggcccagtcccagccctcaatttcccaagagtgctttgacttcttgggagcctacatttctccggtcacctttggccctgattttctgtctctgcagaactcttacatccactcttgccatgcaactgactcctctctctgccccagtgttgacctagcatggaactcggtccctggttggtgagtgggcttctgagcgctgataccagcccaccagactggcttaagcacagggcagtttgttgatttgtgtgaccagagagaggtcggttggtttcaggcatagctggatccaggagtctctttccatctgtgctcccctgtgatggctccactctcagacagactgtcctggtgtaattgcaggataaagcccacagctccctgtatatacctcacaagttcaggctttgccagtggaaaaaagtcgggctgtccaggtagctctgggagatcccttggggtgggcagcttctgtactctgtccatttccaagccagctgtggctggacatggggaaggtgttaagcagtcaggcctgggtctcatacctggccctggatggtgtggaagcgggtgggcccccatcagctcctgtggaatgtgacctggaggatgctggatttccataagagcctgctcactcaaggctgctgtgtggtcacagagtggggcgcagaggggtccataacccagtgatgcccacattcaacattgcaaattcaagccagccctcaggcttgggattctcccagcctagccattcacctcctcatggctcctctctatctcatctctcatgtgacggctgcttgcctcccccaccctggtcctctctcctccttggctcaggccctgccatacagagccagcccctgacggcacagaacgggagcatcctggttgtcctcctggaaggctgctgtggccttgtgccgccttggagactgagctgagccctccctcccacrgtgacaaatgtgtggtgccccccagaagcagggcaccttcctctgtgcagccacctgccctggccggctgcaaatctcagatgctgtgagtagatctgtcatccatttcctttgcccagtgggtctgaggcagatctgagactctacccctagcatggagtggggagggaggtctgccggtcttggaaggcttccagagcccccctccctgtctccagtgacttccctcactgaggggtaccccttggggtagaggccactctaccccgttgcccttggcaacgctagaccctgaagtgagttgtgtgggtgatacagcttggatctgtgtcccagctcaaatctcccgtcaaattgtaaaccccagtgttgggggaggggcctggtgggagatgattggatgatgggggctgatttgcagtgctcgtgatagtgagtgagttctcacgagatctgcctctttaaaagcgtgtggcaccttccgcttcactctcttcctccttccgcctcgtaagacacgtctctttcctcttcgccctccgccatgattgtaagtttcctgaggcctcccagccatgcttcctgtacagcctgtggaaccgtgagccaattaaatctcttttctttataaattacccagtctcggctggatgcggtggctcacacctgtaatcccagcactttgggaggctgaggcgggtggatcacctgaagtcaggagttggagaccaccctggccaacatggtgaaaccccgtctctactaaaaatacaaaaaattagctgggtgtggtagcgggcacctgtaatcccagctgctccggaggctgaggcaggagaattgcttgaacccaggaggcggaggttgcagtgagctgagatcgtgccactgcactgcagcctgggctacaagggtgaaactccatctcagaataaataaataaataacccagtctcaggtacactggggaygccatgccgggggtgggtgggactgggcgggcgttcagcctgcaggccacgggggtcggtggcagcagagtccttggactttgtgccggccacctcactctggactggcctctccacccactacccggtggccttcagatggtcctttttttgcaaaaccaggcagagggttgtgtggcgagccgcccggaatctttctgctgggtagtgtgtgtctgcacgtgccccaggctggcacccctccgtcacctcccggtcactgcaggctgcctctgaggagggcagtacctgcccacaaaggcccacggagccatggcttcttcccagtggtgatccctgatgggctggaaggtgaccgaaccgcttgtcctttataagctgggcttgctgcttgccgttgaggaagagcttgtcatgggtgtcagcgtttaaaagtggaatgtgagtttctgaacgcgctggcattgcaggggaaagtacatacttgcagggaaaaagacacgaaggagacacaggagacgggggcggggaacggagggttcagcagcggcggcagcctcaggcataggtgggtcctgcctggccctaccactccggcctcattctttagagggtctgttctgagcccagcccctaaggggtactgagctgtcagtatgtgcaggggygtggatggtatgagtgggccggacagggtgtggaccrgcatggcrcggcgtggagaggccagagggactgggtggggccgaacacaagcggctcgcaggaagcctctggagtgcagggcgtgctgcgggtgcaagagacaggctgcagcgctctgagggagtcccgcattctgagttggatcagagcctggtgtctctggtggggccaggacattctcattggccagttcctgtgcatggggtgacccaggctgcatggagggagccgcttgtgggtgggccacacctctcgttctcctttcaaaatgctcctgaggtagcagctgcctggctgcttcgccattgccaccccgtcccagccgcgccacctccttccggacagccccagcaccctcagtgagaccagagcccctcctgcctctgcagcctcctctcccgctcctcgaagattactttccttcttcctggaacattcttcccccatcttcaaactctgccacccggcrtttcctcagagaacgccccccaccccaccccacgggtcacccccactccaggttcaagtggccgaggtgaatactgggtgggcagggcaggaagtgggcggcaagacacctccaccatcccagcccaccctcgctgcggtcgaaccttcccactagaactaaaatgagattcctgtgttttcacttggccagcgcaagccttcctcctgggcggagggacccccctgaggtctccccacctcccktggggggtttccctgtgcctgggaggcagatgggctgtggtgagccctgagtggactcagccaacagcaggggctgctgctattgtgccccccacccccttagtgggtccccccaagtcatctgcggcagtgagaccagcttattctaaacctcggagtccttccttccccttctgtctcgtggcccagaatgtctacttcttcatgaagcaacgaaatgcttcctacctgcagtgagygatggggtgcgctggttccgagtcacagaaaagcagcctcacgctgcttctagaaggaagggaatgtatgatctgcgcctccagaaaaggcacccccaggccccggcctctctctgggaggtctagggctgggccatgtgaccgatgctggcatagtgaggctgccagaggatccttgaccaaaaatttatagcatcctcaagccctggagatgttttaagaggaccagcagcagaagctaataaagtggttaagtgggcatcaatttgcaaaccctctcggcttggcccaggcccctggatgaggtcattgccctggtttccagatcagaaccctccaaggagaggcttcgaggtgatgggcagagtctgcagtgggccagttccagggagggtcccttgggtgcttctgcaagcaccccatcccaccatgggcagaaagccagggactgtttgcaccccaggaggcgcagcactgcacaataacccctacagtttgcacgggctgaacgaggtyccgtgagagctgctgtcagggcaggtgacccgggttgccccctcgggagaggtgtgtggtgcagagacagagggacaggagctccctgggctggaggctctcctcccacaagctgcctggacccccttccccatctggaaggggggaygcgcccctggtctgctgctcatgccgggatctgtggtgacagatgatcagatgggatgtacctgaccaagggggcaccatacactttctgtgccaaggcctgtgggcctgttgccccatttgcccagayggctccctgagcaaacagcccctccccattcacttttcccagaagctcattcctcttactaatgaaggatcagagcttggaccagaagggttttgtataaactcagatgagtgctaagtaaacagccgggaacccgcacggctggagagtttgtccactagcctggcagccrggcaagggcaagtgaccacaggccaagcaggggccacagtctcctgcttttagcaccccccatgcaccgacccccttccctccctggcagggtctggaagagtgggcttcagccaggccagggggtcctgatgcagcctcatgtccaggctcagccaggccagccacatcctcttccactgtggatagagctgccccggctggaacctaccccctctggcagcaacctgccaaccccttgatattacaaaatcttttttttttttttttttttttgagacggagtctcgctctttcacccaggctgggctgcagtggtgctatctcggctcactgcaagctccgcctcccgggttcatgccattctcctgcctcagcctcccgagtagctgggattacagacgcccgccactgcgcccggctaattttttgtatttttagtagagacggggtttcaccgtgttggccaggatggtctccatctcttgacgtcgtgatccacccgcctcggcctcccaaagtgctgggattacaggcgtgagccaccgcacccggccgatattacaaaatctgtaagtattgctgatccggcagatgaatggtgacaccaggtggctgtactgtgcacatcccaggccacctgtaaggccaagcgtgtttcatccccctgttgctcattggactcttgggatctctaggtagagaatttgcccatttctctgggaattttttttttgttggttataaatgctacagatatttctcaccagactttcactgcaaactctttctcttcctgtgcagagattgcgcattttgtcagagtcaaatgtacccatcctccgcagcctcggcctgaacggggcttccccgccccgagaccaggcactgctcgcccaggctctgtcctgaccttctcggtgttttgttgttttggtgtttcatgttggcctcattttacttttatgtggtatttggaaaggacgtatatcaggactcaggaactgaagtgttttttttgtttttatctttattttttttgagacgggatctctgcaacccaggctggagtgcagtggcgcgatctcagctcactgcaatctctgcctcccaagttcaagcaattctcctgcctcagcctccaagtagctggattacaggtgtgcaccaccatacccagctaatttttgtatttttagtagagatggggtttcaccatgttgtccaggctggtctcaaaatccagacctcaggtgattcacccacctcagcctcccaaagtgctgggattacaggtgtgagtcattgtgcccagccgggaactgaagtggtttttatttttattttgtttctgtatttattttagagacagggtcttgctctatcaccgtggctaaagtgcattggtgccatcacaggtcgctgcagcctcaagctcctgggctcaagcaatcctcttgcctcagtctcccgagtagctgggactacaggcatgagccaccacacccagcttgaagtggttttcagaaccatttttgtgaatgtgagaaagcatttacctttttttcttccccagattggcttggctgtgggtccaaggtgtcatctcttatctctctgaggattgtcatgttagggacctttttggtaggtggcattttcactgctccttgctgtgcctcagtttcccccaggtactcctctgtgtgctttggtccttcctttttggggggaaggcctgcctttccataggaggagcaagactagcaactccttgtggggtgtccaggtagagcctgggggctggcctgcttctttctcggggaccccaaaaggaggtcttttccccaggcagttcagcatctcccaggaaggcccctgaggtctcctgcttggggttgggggtccctgtctagcyaatggcagcctgagccgagtgcaggaagggttccaggggccacaagtcaggaggcagcccctcctccaccttctccccagaccttagccatcccgtgtccctcagctgtaaccccttagatccagtttctccagagaagaccttgttttgtcagctttggaagggccatcgggcctggctgtgggaggcagggaaggggtgtgggtcccccatagcaacctgggctcccagccccagccccgccattcatccatgctgtggtcacagtgctcgtcatccacgcctgtgggaggaggacagtgtcctgcaggtgggcctggggctgggcctcctgatgtgcctcagccagtgcggcatgggcaggtgatgacaatccctcccagcagacgtttgaggagctgtgcccctttccggcacaggacggctctgtctcagggagggctgctggcttctggggtaaagtgggaggaggatggggtgtgagacagcagcagagcatctgggataggcgtgtgcctgcgtgaggaagcagcctgggctgccggagccactgggattccagggctgtttgttaccacagcagagctccaccgaggctgacagctacacctgctaagtcagtcaccctcctcagctttgggctaaaatgtgggggacatcaaaatctctcatcttgccaagtgcggtggctcacacctgtaatcccaacactttgggaggccgatgtgggtggaccacttgaggtcaggagttcgaggccagcctgggcaacgtggtgaaatcccatctctactaaaaatacaaaaattagctgggcatggtggcacacacctgtcatcccagctactcaggaggcttaggcaggagaatcacttgaacccaggaggcaaaggtttgcccggcctgggcaacagagagagactcgatctcccaccaaaaaaaaaaaaaaaaaatctctcatctactgttgtctcctccccagctttttttctttttcttgtgggcttttctcctttagagggaagtttttaaaattcctttcctgttattgtaggagggtttgggagggagagagggctaaggagacacagataacagggatcgtggctgccctgcgctctttggtttacgatcagcgcctgtggactccagtgcatgctttgctggcctctgcctgctgtgtggcttcattccagggccttttgttttctcgtggacagtgttgtcccgtcattccttcccttaagcaggcttgtgggggcaaactccctgagtccgggtgggtttgcaaatgcctggaattcctctcatgcttgaaagatgatgactgcggatagatttgaagctgtcacccattggtctttatactgccagttgtacgtgtcaatctgatttgtgttccttctttacctcatagcctttctctccccctcctcctcctccctccctcccgcattagtttcctgacacgaacctggcrgcttaggacaacacacacttactctctcacagttcctgaggctggaagtccagaagtcggggtgctggcaggacgtgctcttctgaagcctccagggcagggccagccgcatgcccgtctcctcgcttgggcacctgccagcggtccccggcggtccccggctcattgctgcatggctccaacgtccgcctctcccaccatgtggcctcctcctggtgtctctgtgtccaaatctcccgctctgtctaaggayaacagtcactggtcatgggacccatcctaatccagggtgacctcgtattaacctcatcacatctgcaaagactatttccaagtcaagccacactcccagctgctgggggcgggacttgaacatattttttgtggggacacaattcccctctcaggttttaagatttgtctttatcattaaagttttcaaaactaactatcatgtgtcaggtcaacattttgttttccccttttcacctgaaaacttacatttctcttcaatttggggaaatttttcctgtgtgtgtctgtgtctgtgtctgtgtgtgtctatgtggtgtgtctgtgttttctgtgtgggtatgtgtggtatgtgtgttttctgtgtacgtgtggtgtgcgtgtgtaggtgggtggtctctggtatttgtgtatgtctgggttttctgtgtatgtgtggtatgtgtctgtgtgtgtgcttgtgtatctgtgtgtgtgttcatctgtgtgtacgtgtggtgtgtatctctgtgtgtgtgcttgtgtatctgtgtgtgtgttcatccgtttgtgtggtatgtgtctctgtgtgtgtgtatgacttgtgtatactctgttcatctgtatgtgtggtgtttgcttgtgtatactgtatgtgtgtgttcatctgtatgtgtggtatnnnnnnnnnnnnnnnnnnnntgggtggtgcctcctctctgccctcctccctctctgtcctccttctggaaagcctgctggatggctacgacgacttgtggatctcacctccgtgtttctcagcttttccttgacaatttatttctaggtccacaatctgcggagtcgccttcctgggctcagtcttcatcctgtcaatgttttcatcttcatccattttgctactcagtcccttcacggtggcgttttatttgaattcatgtttgtactgttccttttctttctccagctgatccctctctgcacacacagcattctcctggctctcgccgagatgtctacacacattccggagtctcctaattgctttctcagttatgtttcccaggggcgggagtggggtgactccttccctcggttgcgctgccgtttcctttctgtcttggctgtcttccatgcttggtgtggtagctgaataacggcccccaaagatgtcctggtcctgatccctggcacctgtgaatatgggaccaaaagggacactgatgatatgagtaagttgaggctctggagatgggagattatctcggattatctaggtggtcctaatgtcatcacagactccttataatatggaagcaagtgcttaacgatgggaatacattaaaaaaggaaaaaatgaaaacggaagcaagagggtcagagagatacgccgcagtgggagcaggccggagagaggctctgctgctggctttgtaggtggagagggggccatgagccgagggatgcaggtggcttctggaagctgaaaaagacaaggaaaccaattctctcctagggcctccagaggaaccagcgctgccgactccttgattctaacccactgaggcctattttggatttctgcaccccagaactgtgggagagtaaattgtgctgttgaagccaccacatttgtggtgatctgttccagctgcagtaggaagctcgtatgcttggcagttctgattgtgaactcacctttatgttggagattcctttacacataagtccccttatccacagcggacaaattccatgacccccagtggatgcctgaaatcgcggagagtactgaatcctacatataatgtgttctttcctatatgtatatatctatatctatgatacagtctaatttataaattaggcacagtgagagattaacaacaataactaatagtaaaataggacaatgatgacaatataatgtaataaaagttttgtgaatatggtctctcttctctctcaaaatatcttactgtaaaattagctggccatggtggcgtgtgcctgtagtcccagctactcaggagtgtgagaagggaggatcacttaagcctaggaggtgggggctgcagtgagccaaagattgtgccattgcacaccagcctgggcaacagagtgagatcctgtttctaaaaacaaacaaacaaaaaacaaacttactgaacttattgtactgatatttttgaaccatggtcgactgtgggtaactgaaaccatgaaaaagtgaaaccactgataagggggattgctgtactccctgctgtgtcagtgactcagcctccctggtggagggaacggctgctggggaacacattggaagctggtcttctgggtccccaggaggcaacctattcatgaaaataatatgttcattttatacaagttggaaaatatagaataatataaataatttgcataagactcataatctggttcacaggcaaccattataaatatttgaaaaaaawttttttttttttttagacaagagtttcgctcttgttgcccaagctggagcgcaatggcgcgatctcggctcactgcaacctccgcttcccaggttcaagcgattctcctgcctcagcctcccgagtagctgggattacaggcacccgccatgacatctggctaattttttgtatttttagtagaaacggggtttcaccatgttaaccaggctggtctcgaactcctgacctcaggtgatccacctgcctgggcctcccaaagtgctgggattgcaggtgtgagccaccgcacccggccaaatgtttgaaatatttttatgcaactacaggagggaagagagaaagaaagagggagaaggggaagggggaagttgggacctaataggagcactttttctgtctgttttccccacttacattgtagcttgtgagcaccttgctaagccattaccatgttttatgcacaatagtttgatggctgcgccatactccatgggatggatgtcttatataaattgttcatgtcattgcgtatttaagttgaaacagcccagtgacatttgagctacatcattgtgcatctctgacattttctcagcactaacactcaaaagtggagccgctggctcagtgggaaggggcgtttttaaagctctgcatttggaacaagttacaaaggagagtgccatcctgcgcaagcccacagccagggtctgcatgccagagagggccaaggagtctaggctcagaaggtaaagccagtgtttggtctggggtctgatgcagtccagttagtgacsagggttggtgttggctgcctccaggaggctgggcgggagccagaggctgggcagccagttaggaggcacccgaaggcacctgggcatcaccaaaacgggtttgaatgttcccaaaacttaaattcagcttcagggctgggtgtggtggctcacgcctgtaaccccggcactttgggaggccgaggtcaggagttcgagaccagcctggccaacagggtgaaaccctgtctctgctaaaaataccagaaaaattagccaggcgtggtggtgcatgcctgtagtcccagctactcgggaggctgagrcaggaggatttcttaacctggaaagcggaggttgcagtgagctgaggacacaccactgcacaccagcctgggcgacaaagcaagactgtctccaaaaatagaaaaaaaaaatcatcttcatcagatgaagagctgcctctggtgaggacagagaagtgaccgaatccctggggtgctgcccagcactgcaacctcttgggatatgtgggccaggctgcttggcccaagtccaggcgggcacagggtgagtcccggctcaggagggttttgtgaaggacactgagggacgctgttgccatccacttggaaacgctgagtgccccagagtggcagacacagtgtccagtcctggcactgaagagcttgactcccgtccgtcccagcagccgtctcccatagtctggcgaggccgggaggcccaggctgccacaccgcacgcgccttccctgtgtccttcacccatctcgcccctgaacgggatgcccactctacgcccagctggccaggcgccggagacagtggtgggcacactggacagagctgggcgtccccttggggcagactcttgtccctgggttacacagcttcgggggttgggttgggtggggttggggcggacgtcccgtgcagggcaggacaggtcagggcgcactggtcggagctggggcctgaggctaccgrgcgctgaggacgggcggcaggtgtccgcgcacacaccgggcgcagccctgtccccgctgccaaaccctccgcagcggccgcgcttactcctcggccaagcctgctctgcagagggggaaacggaggctccggccagcggggccccagctggtcagcgcgtctcagcctagcggaagcctgcgtccctgggcttccctggtgccgcttccccgctgtccgcgcctggcgccctgggagcgggggtcagagtcgtgacccgaggaatcttggggccgatgaagcaggaggacaggaccctcctggagccgggggacgacggtgcccggtgcccggcaggtcaggtggcgccggaatcgcggggcaggggtccctccggccgcgccccttcccttccgcggcacattctgaaggttctgccgatggagagagtggggctggagagcgagatgctggacggggccgagggacagggatctgctgttggggaacggagggctgcgcggaccacgcaccggccccaatcccccaatcgtccacacccctccttgtggctggaaaccctcgggtacccccacctgccccaggcacccgtctccaacaagggcacttctgccctgtggggccgctactgcgctcttgaagccgggagcttcgcacctgtgcgcagagaagccccgcccctcccagcggccacgccccaacaaccacgcccccacgcgtggccccgcacggtcctcgcctcggaggcagccccacccctctcttcggtcctctcatgaccacgccccttctcaccccgcccctggtgacaggccccgcccccgccgcggccccgccccacacgaccacacccgcctcggccccgcccctcgcctggccccgcctttcatggccgcgccccgcccctggccgcggccggtgtcgtcctccgtgggcgccggggctgctgctttccttggcgtcgcgagcgagcggtggacttgccggctgggtgcaagcagggcgggcgcggagcggggctcatctggggcggccgggccccacctgcagccgagcgacggacggcaggccctgtcctcccacagggacacctgtcctttcccttcgcaggcgttctttttcttcagctgtttcccgcttcctgagatctggaggccttctttttgcacaaatatgttgttttgaaacactgggcattgttctgaggcttcagtcacggcctgcagcsaaacgcaactcgcatttcaaccgagcgccccggcactctggggaattaggggagcggatgaaagatttaaaaatccacggtcactgtgcagagataaggaaatgtgattcgtgtgtggctctgaaacatgacttttcactgaacgtcgcgtcctgggcatgttcccaggygatccttcacattcctaaaggcctggtaatgcacccatacctggaacccyrggccaccctccagagtgacctcatcctcagcactgcctcagactcagacacccgaagctgcagaggtgggaccccgcatcacaagtgggaaggcgaggcctgcctggggtgtggactcccagctgctggaggaacattgtcctttggctcaraagagaaagccagtttctcttccggcctttccagttccagaggagcccccagggtgtccctggtttggggacagttcccacttacaagctgaaggagaatcccactcaccattggacagaggagaaacaggcccagcgaggggagtgcttgcctgtacagagtgagttggtggggaggtggataaaagtctcggggtgggagagacccccaggggtccagactgagcccacaccaggatggtcggacgacccagggccacctctgccccaggagctcacctgacaacccagggggcggtgagacctccttgttgggggcatcctccttgatgatgcaaagctgccagagcatcccagggacacccccaggggctctgacacctgctgtcagagtcactttccccaaaaggaccttctcctgtascccccaatgttgtcctcagctcccccacttctcttgatccaccaggcttcatggccaagatgggtgggcccactgtgtgactgggggtcccctgggggagagtcagcagtctaccccacccctctttgagggcccatggaacctggggattcccttctggaacccactcccagggagaaagcaaagtacctggccaggaaggtgaagcccaaagacagcccgagccgctcaccgcccccgccccgtgttctcygtgagggagccccctggaagggggtgcttctctgactcycccaaagtgggagaagcccactgggtggcacagaggcctccagcctaggcccagagcaggggtggctggcagaattctattcccagcacccaggtcacagcatcactgctgccactcaaatgccacaggacagactggacaggcggagagagacaacagcttcacctcccctcctcctctaggcccctgggaccccaagggagaatctgaactctagcagacgagcctctgtctttggcctaatcatctacccacctgggagaccgttgccctcacacagcatggcctggcaaggagagaggtgtgggccacatcccagccttcttgttaagtgtgaagtccaggtcctcctcccccagcacctttctttcccactcagcacattcagagcctggctacggccacttcctttctgttccaggtatgggggacgtcacacggcctttaggaacgtgaagaaacacctgggaacacatccagggcacgatgtttggcaaaaacacgtttcagagccgcacgtgaattttgtacaaatgtgaattctctcacaagcatggatttttaaatctctcatccactctcctaattcctcagagtgcttgagcgctcagttgaaatgcatgttacgtttggctgtgggccgtgactgaaayctcagaacaatgcccagtctctgcccccctccccctgcccctctcttgaagtggcctctgccctgtgtggtgacccccaacctcagcttctgggtgggcctctggctaagttggaagtggctgccaccccacacctcagagtgtttctgacaacactgaaattgcaccttcgtttacgctgaaccttgcagcctaaatcagcagcccctttctgactcctttaaatttggtggaaagattttctctccccatgggacatctttcctgcctctggcttggccactcctccctccaggaggctcacctgggccctcctggctttcacctctctccttgtcagcccagtgtctgcacatccgctttgcttttccttcgcctctgggcctgacatgtgtgtttctggcgtgttccttcagtgagtctcgtatcacgtcacggattctgcatctgccaacagcttccatgacttaagcatacctccctccctactccccaggcggttgatcctcatccttccaggggtgtcccccatcagacccacagccaggactccccattagggacacagatgtaatcgcagtgaattcatatcattttatgttgccccagctttcaattttaaatacttttattttacttttttttggagacagagtcttgctctgtcacccaggctggagtgcgtggtgccatcttggctcactgcaacctccacctcccaggttcaagcagttctcctgccgcagcctcccaagtagctgagactacaggcatgcaccaccatgcccagctaatttttatatgtttagtagaaactgggtttcaccctgttgaccaggctggtcttgaactcatgamctcaggtgatccacctgcctcggcctcccaaagtgatgggattacaagcgtgagctaccgtgcctggcatattttactttattttttaattgatacaataattgtataaatttatggggtacataatgatgtttccatacatatatagtgattagatcagggtaattagcttatcatctcaaacatttatcattttttcatgttggaaacattcagtattctmyttctggctatttgaagctataggagatattattgttaactataaagcatccattttgcatacagatgctcctggacttamgatgaagctgcatcccaataaacacatcataagttgaaaatatcgcaagtmaaaaatgcattgaatacacataacctaccaaacatcatagcttagcctggctttccataaacgtgttcagaacactaacatcagcctgcagctgggcaaactcacctggggacacagtggcctgcagagtgagtcgcttaccctccgcctggtgcggctgacccggagcttcagcttcctgccatgggtatggtaggacgtatggctagcccaggaaagatcaaaattcaaagtacagtttctactgaatgcatattgctttagcatcattgtaaagctgaaaattcctaaattgaaccaycataagtcrgatmctctcggcatgagttcaactttctygtatctgaagcaggacaggctccgacagttcatgaaacttggccactcgctttaacctttttccattttagaaaaaaaaaaattcagctccctgctagcgctcatttaattttacataaacatactctttgaggctgaagcaaatctgactaatttttaatgtgaaaataaaatataaatctattcttggaggccaggagtggtggtgcacacctgtggtcccagctactcagggggctgaggtgggaggatcgcttgagcctagggggtcaaggtggcagtgagctgtgttcgtgccatcccactccggcctaggtgacagagtgagacactgcctcaaaaaaaagaaaagaaaaaactgttcttggagttatttctaaacagaactaacgtcaaaatcatctgaatcattagaatgatccatctggggctgggcgtggtggctcacgcctgtaatcccagcactttgggaggccgaggtgggtggatcacttgaggtcaggagttgaagaccagcctggccaacactgtaaaaccccgtctctactaaaaatacaaaaattggccaggtgtggtggtgcatgcctttagtcccagctactcgggaggctgaggcaggagaactgcttgaacccaggaggcggaggttgtagtgagccgagctggtgccactgcactccagcctgggtgacagagtgagactccatctccaaaaaaaaaaaagtaatctatttgtgaaaaatttatcaaacggatcttcagccaacaactgtttgaggacaatattaacatcacgtgtaggaatgctgtgttttctaggacttgaggttttcagccatagagaatgactatattttgtgaatggaaacatcactactaaagccagaatgctatgaatcgtgacgtcttttgtttccgaagtcaatataccagagtgatgtgaaaataatgaaagtgagatattgtgtggcaaagttatctctgggtaaatgctgcagccgcaagcgctgttggtgactattcttggggcaaatgggaaaagggttaaacctgctagttggaactccccaaggggagcctgcctgggtaggaccctggggcccaggaaagggctcagccacagcccctcccgcgctgtccggctcccacctgctggctgacatgtgtgtccyggaaggcttcctccttcccactggccctgcgaggtttgctgccctgttccctctgggatctgagtcacgaaactgcttctgtagcttcacgtgttagtggggccagctcctctgtgtctcccctgactgacacacctgaacctaacttctttcccagttagggctctcctagagagtggaccacttagcaggaataaacccaacacaggtcagaccagagccacaagggcacctgctggtgtaaacaagcccctggtcacaggtcaggcccccaggcattaagccgtctgccaggataaagaagtgtccctgaaagctcactgtgcccacccaccaccaccagctcccccggagctagattttatgtccactctccagagagagcaaccctagaccaaactagagtaaaacacaacaagagtagaaaaatgtagtaaaataattaggaagtgatgagtttccagtatttattatccatgtttgtatttgtgtgtgtgtttgagacagcgtctcagctgacttagctagactcccaggctagaatgcagcggtaccatcacggcttactgcagtctctgactcctgggctcaagtgatcctcccacctcagcctcctgagtagctgggactacaggcatgaactgctatgctctgataatttattgtttaagagatggggttttactatgttgtccaggctggtctcaaactcctgggttcaaatgatccactcaccttggcctcccaaagtgccgggattacaggtatgagtcactgcacccacctcttattatctgtgtttttaaaatataactcatttggttataagtgtttataattaatttttaataatgactgtgttttaacaaccagctcagaattcctgtaaatttaaggctgggctcccgagacccccgggaattggctccagcacatctcgaggccctgcagctcctacagtgtttcttgggttcccttttgcagtctgaaccccacgaccttgggatgcagacaacagcagcctccgcacctccaaaactgtcaccccaaactctcaacccagtgccttttccagtgcctgcctgatctacgtgtggccacattttctctggaattgtccaaggttgggggacccagttgctgtcataggccctctgtgaatatctcaggaagtgccccccagcagtctctgggcgtctgtcctggagtgagatgagactgtctgtaagccaccctgggcctcctggtgcccgggctaatggtgattctccaagccagttacccaggcacaggcctcagatttgggtcagtctcccagctgtggccacttccgcagaggaagagaggggcccagaagtgcttcttgttccatcctgaggtcagtgaccctccctgggtgaagcaaggtcaggaccctgccatttaaagccagtccaggctgatgggcttgaccgacccgaggtggcctgagagcactgtctggagggggatgggtcgactcaggatgcagcggggcagagtgaagttcacagcagtacactgtgggtggcaagcagccccgacccgcaccagctcacctgcgtctggtcccagcgtccctggggtctcagtctgcgcactgagagacgcccactcagaacctctggggctgcacccgttggctcctgccacctttcccggggccctacccctcattctacmctgcagaccccaccagggagtgtccacctggtcccgtctggccctgtccagggagcaagtcctaccactgagctcaccaagactgaagcaatttcaattccagttcctgctggctctgacttaataccttcattcattgcttggcttttcagcctcatctctgcagtggggcttgaaccccgtcctcctgtgggacattggtccccgccggctgaggctggacgccaggccactgtcgcctgcttccagacacagagcacagcaatcccagcccactgctttgagttcctcatccgtttctataccagagtccagccatgtcttctttctagtttatccctcattgatgtagttggagctagaagaatgccctgtgaattcacagtcatttggggctgagattaaagaatagaagttgacattgggtgggccgggactcttggccgggtgctggggagggattcccatcatctgccccgttgctgctggcacctggatccaaaggtggcacattctaaatgaggtcaaaatggctaaaatgccatatggcatgatgcagaaaaggaatgcaaagactgagagagacaagcatattatagcagataacactgcaccctactctacctaggcccccagagggacccaaagaccctcccttcccaaggggcttagaaatactctggtggggctgggcgtggtggctcatgccacccagcactttgggaggccgaggcgggcggatcacgaggtcaggagatcgagaccatcctggctaacacggkgaaaccccgtctgtactgaaaatacaaaaaattagccgggtgtggtggcgggtgcctgtagtcccagctrcttggcaggctgaggcaggagaatcgcttgaacccaggagtcggagcttgcagtgagctgagaccacrccagctgactccagctgactccagcctgggcgacagtgcaagactcygtctaaaaaaaaaaaaaaagaaagaaaaaagacttactctggtggggggatgccaccctgggccagctcttaaggacagaaggtgcacaggggcaccctgcagctggcatggataccttgatgaagcaggtgcattgagtagctactccctgactggcagcaagagggagaggtggcaggggctgggggggggcctgcagagatccctggtgccttccggtggttgtgggatccgctggaccacacaaagggcagccactaaggttaacaattggtgagggcagtgggctgagaaaacccaggtctggagcagccctggggaagtcctcgccctcacccagctcccaggcctgagtcattctgtgacctggggccctgtgctaaggaggaaggtgggcgacctggaggaagagcatggtcgtagtcccagaagtgagacccccaggcctgcccccacacctcggggtggccttccttgtgtcgtgggggagtgatctgtcctccctgcgatggggtctgcactcctggctgcagcacctctcagccatggcctcctggaacccctcaagggacagtgagtgaaggggctggggagctgatggtggccttccagaagcagctgccgaacggacggaccggcggagctgatgatggccttccagaagcagctgctgagcggacggaccggtgggacccattggaggctccgtcacggggccctggctggagtcacacctggaggtctgcaaaagggcaaggtcctcatccgtgaggcctacagccaaatgtgcagcccagggcagtgacagagctgctgccaccctgcggccgtgcccctctgacttgggggtttgtactggaggggtggcttgcccagtcgtggcactccggtgggactgaggctgaacttgctttggcgtggtgggtcagctggctctgggccctcagctcccccgggcgaggcagccctgcttgttgtctccacatctcctcttccctccgtttccgtggcccctggttggagggtggtgctcacccatcctgggggctttgccctcctccagcccctccccaaggccaagctgcagcttctgcaggagacggggctgggggcctggtggggtgtccttagacaccctggggtatgggactttccaggaagatgtgccaccatcacaccactgtaccccaacttgagggagtgtgcagtctgataaagaccacctgggcttgcgggagaggaggtgggcttcccacagaagccaagaagcccacgagccttgccacctactgccaagcgcaggagaagggcgctgaggaacagggaggtggcaccgggtccaaaggccagtttgtggcctccacagactggaggctcgatatcctccgctgctccgttgcaggggcaaaaagagagttaagagacaaggaaacaggtgtggagggatggaagtgtgaaccaatggtatgcagttgctcttgggaaatcctatgtacagataggaaatctggacactgactccatatgggatgacatttaggaattattaatttaaaagctttcatttaaaaattaacatacagggccgggcatggtggctcacgcctgtaatcccagcattttggaaggctgaggagggcgcatcatttgaggtcaggagtttgagatcagcctggccaacatggtgagaccccatctctactaaaaatataaaaattagcgagtatgatggtgcatgcctgtaatcccagctactcgggaggctgaggcagaactgcttgaacctgggagatggaggctgcagtgagccaagagcatgccactgtgctccatcctgggcttcagagtgagactccgtctcaaaaataaataaaataaaacaaaattaacgtacagcagaayggacttttttagtgtggagttctagcaatgttcctgcctgtatgggtttgtgcgatgctcccctctgcacacaccatccacacgcagcrtgatcccatcaccccagaaagcccctcatggcgctcctctgcaggaccaggcttcctgacccctggaagccgccggttacttctccatggcttgtgtccttttgacaacattggacaaatggaatcatagccagatgtggtggctagagcctgtaatcccagccactctggaggctgaggcgggaggatcactccagtccaggagctggagatcagcctgggcaacacagtgagaccctgtctcaaaaaactaatcatacataataataagtaaatggaatcctacagtatgtaatgtttgaggctggcttctttctctccaacgtgcctccaaggctcaccctttccactcgggagcgtgatctgctgcatgcgtgccccgcagcctggccgctgctcacttgatcagatcttgaaggacgtctgtgtcatttccaggttctggctgtcacaagcagtcatgctctagacatttatgtatgggttttcgtgtgaggacaggtttccgtttctccaggataaacacctggtagtgagaatgctcaatattcagtttgtaggtaactgcctggctgttgtccagagtggccacactatctcgcatggccacygtcccaacgtgtgagctccagatgctgcccgtgctcgcccagagtgaccaatcactgcactttgtccrggtctgaggagtttcctgggatttgagactttccatgcaaaaatcaggaaactcctggacaaactaggacatgggtcacctttctctttgatggttaattttacgtcagctcgactgggctgagggatgcctggatgctggggagacactgtttctgagggtgtctgtgaaggggtttctggaggagatgagcatttgagcctcctacttagtaaactggatctgccctcaccatgcaggcagccagcatccaatccactcagggctcgggtagaacaaaaaggcaagggagggtgaattttctctccgagctgggacctccatcttctcctgcccgcagcatcagcccaccggttcctgggccttcggacctggactgggtcagactgctggctttcctggtgtgccagcttgcagacaacactgtgggacttctcagcctccgtttggatgagtcaattcctataataaatctctctctctctctgtctccaccccatatagatatagatacagagagacagatacatagatagatacagatatatctcctgttggtcagtttctatggagaaccctgacttatatacttgtcaacacttggtattatcagtggtttgttaaattttagccattctaattgttgtgtagttgggatctcatcgtggtcttagtttgcgtttccctgggggctaaaggtgttgagcagctgttcatgtgtctcttagccacttgtaggcctcctttgatggagtgtctattccaatctcttctcaatttttttcttattgggttgttggttgttttttttttttttttttctttgagacggagtctcgtttgtatcacccaggctggagtgcagtggctcaatctcggctcactgcaacctctgcctcccgggttcaagcaattctcctgtctcagccccctgagtagctgggattacaggcacacgccaccacacctggctaatttttgtatttttagtagagacagggtttcaccatgttggccaggctggtcttgaactcctgacctcaggtgatccacctgccttggcctcccaaactgctgggactacaggcgtgagccatcatgcctggccttgattttcttactgttgagctttgggagttctttatacatttttgagacatatcctttgatggatatgtgacgtgtcattttttttctcccagtctttagttaattttagtttttttgagacagagtctcactctgtcacccaggctggagtgcagtggcacaatctcagctcactgcaacctctgcctcccaggttcaactgattctcctgcctcagcctcccaagtagctgagactacaggtgcccgccaccatgcctagctaatttttgttttttttagtagagatggggttttatcatgttggccaggctggtctcgaactcctgatctcaagtgatccgcctgcctcagcctcccaaagtgctagggttacaggcgtgagccactgcacctggactagtttgtcttttgtcttaacagtgtctttctcaaaacaaaacttaaaaatgttcataaagtccaatttatcactacttttttatggtaaaatatacataatgtaaaatgtaccatgttaaccattgtttttgagacggagtcttgctctgtcgcccaggctggattgcagtggtgccatctccgctcacccacgtgccaccacacccagttaatttttgtatttttagtagagatgaggtttcaccttgttggccaggctggtctcgaactcctgatctcgtgatcygcctgcctcagcctcccaaagtgctgggattacaggtgtaattacagtttgcagtggtgcgatctccgctcacccgcgtgccaccacacccaacctacgttaaccatttttaagtgtacagtggcgttaagtaaattcacaatgttgtgtcactatcaccactatctagttcccgaactttttcatcaccccaaacagaagctctgtactcattcagcarcatctgctggtcccctccccaygtaactttgattccactttctgttgctgtgaacttgcctattcctgctgctagtataagtggaatcgcacaatgtttggccttttgtgtttggcttatttcactcagcatgtttccaaggttcatctatgctgtagcatgcatctgagcatyattaattatattacattatattatattgtacgtatgtatttatttattttgagatggagtcttgctttatcacccaggctggagtggagtggtgccatctcagctcactgcaacgtctgcctcccgggtttgagcgatttcacctgcctcagcctcccaagtagctaggaccacaggcktgtgccaccatgcccggctttttgtttgtttatttgttttttgagacagtatctcattctgttgcccagactggaatgactgctcaccacaacctccacctctcaggctcaagagattctcctgcctcagcctccctagtagctgggattacaggcgtgtgccaccatgtccagctaatttttgtgtttttagtagagatggggtttyaccatgttggccaggctggtctcgaactcctgtcctcaagtgatctgcccacctttgcctcccaaagtgctgggattacaggtgtgagccacccggcccagcctattatatttaactgtggtaaagtacacataacataaatgttaccatcttaaccatttttgtacagttcaatggcgttatgtttacattgttgcgcaaccagtctccagaagtcttttcatctttcagaactgaaaccctttatccattaaagaacagcttcccagccccctcccagcccctcgcaaccacctttctgctttttgtttctatgaatttgactagatttcctcatataaaaggaatcaatcatgcagcatttgtccctttgtgactggcttatttcactgagcataaagtcctttcggtttatccatgttgtggtcaggaattctgtccttttaaggctaataatattccagtgcatggataggccacattttatatatccattcgttgatggacttcgggtttttccccacctcttggctattgcgcataatgctgctatgaacatggmatacaaatatctctttaaaggggccgggtgcagtgtctcatgcctgtaatcccagcactttgggaggccaaggcaggagtattgcttgagtccaggagtttgagaccaacctgagcaacatagtgagaccttatctctaatttaaaaaataagaggctgggcctgtaatcccagcactctgggaggccgaggtgggtggatcacctgaggtcaggaggtcgagaccagcctgatcaacatggagaaaccctgtctctaccaaaaattcaaaattagcccrgcgtggtagcgcatgcctgtaatcccagctactcgggaggctgaggcaagagaatcacttttacccaggaggcggaggtttcagtgagccgagatggtgccattgcactccagcctgggcaataagagtgaaactccgtcttaaaaaaaaaaaaagaaagaaagaaaagaaggccgggcacggtggctcacgcctgtaatcccatcactttgggaggctgaggcaggtggatgacaaggtctaggagtttgagaccagcctggtcagtatgttgacaccatgtctctattaaaaatacaaaaattatctgggcatggtggcctcgcgcctgtagtcccagctactcgggaggctgaggcagaagaatcgcttgaacccaggaggcggacgttgcagtgagctgagatggtgccactgcactccggctgaggtgggtggatcacgaggtcaggagatcaagaccatcctggccaatatggtgaaaccttgtctctactaaaaatacaaaaattagctgggcatggtggtgtgcacctgtagtccaagctattcaggaggctgaggcaggacaactgcttgaacccaggaggcacaggctgcagtgagcagagatcgcrccactgcactccagcctgggtgacagagcaagactctgtctcaaaaaaaaaaaagaaaaaaaaagaaaaagaaaagaaaacaaatatctctttaagctcctgtttttaatttgtggggagtatatgcccagaagtgggattcctggatcatacagggctacggtttgaatgtgtgcagcaaagttcatgtgttgaaaacctaatcctcaaaatgcagtggtgtcgggaggtggggcctagtaagagccatttagggcacgaggactctgccaccatgaatggtttcatgctgttatcgcgtgagtgtgtcagttagctcacaagtggctttgttataagtgaatacggcccctcttgctctcgtgccctttcgctgtctctctctcttgcccttccaccttccactacagacgacgcaggaaggccctcaccagatgctggtgccctgcccttggacctctcagcctccagaaccatgagtcaaataaacatctattgcttatcaattacccagttatcaggggaacccgctcctaatatttcaacgtaggttctattttccataagtgtcggctggtctgagaaatagagaaagagtacaaagagaggaatgttacagctgggccgccgggggtgacatcacatatcggtaggaccgtgatgcctgcctgagcmacaaaaccagcaggttttattaaggatttcaaaaggcggggcgggggggtatgaacagggagtaggaacaaagatcacatgcttcaaagggcaaaaggcagaacaaagatcgcatgcttctgaggaaacgggacaaggcaaaacagaactactgataagggtccatgttcagcggtgcacgtattatcttgataaacgtcttaaacaacagaaaacagggttcgagagcagagaaccggtctgacctcaaatttaccagggtggggtttttctctaccctagtaaacctgagggtactgcaggagaccagggcgtatctcagtccttatctcaaccgcataggacagacattctcagagcggccgtttatagacctccccccaggaatgcaattcttttcccagagtattaatatcaatattccttgctaggaaaagaatttagcgatatcttccctacttgcacatcygtttataggctgtctgcaagaagaaaaatatggctctttttgcccgaccccgcaggcagtcaggccttatggttgtcttcccttgttccctaaaatcgctgttattctgttttttcaaggtgcactgatttcatattgttcaaacacacattttacaatcaatttgtacagttaacacaattatcacagggtcctgaggtgacgtactttcccagtttacgaagataacaggattaagagattaaagtaagacaggtgtaagaaattataagagtattatttgggaagtgataaatgtccatgaaatcttcacaatttatgttcctctatcgcagctccagctggtccctccgttcggggtccctgaattcccgcaacacctgtcttaggtattctgctatagcaacacacagtgagctatgatgtatgggaattctgtttttagttttttgaggaaccaccattctgttttccacagcagctataccattttacaatcccaccaacagtgcacaggttccaattttcccacagctgtgccaacactggttattttatgtttctttgatagtaaccatcctgatgggtgtaaagtggtatctcagtgggattttgatctgtttccctaatgattagtgatggcgggcatctttttgtgtgcttcttggccatttgtatgttttctttgggaaaatgtctattaaagttgtctattcttcaattgagttgtttgatgttgctgagttgtaggagttccttatatattctggatattaaactcttatcagatatataatttgcaagcattttcttccacggattctcttttcactctcttgagagtgtcctttgatgtacacaagttttaattttgatgcagttcaatttaatttttcttttgctgcttgtccttttggtgtcacatttcagaaaccatcaccaaatccaagatcacaaagatttttttctgatgttttcttctgggagttttatagctttagcatggttttggttctatggattgtgctttggtattatatctaagaactcttttcccaggtcacaaggattttagatattttcacctaaaaattttataatgttatattttttacatttagacctatgacccatttatatcaatttttgtataaagcttgtggtttaagttgagattacctctttttttggtatatgaatgtccaattgttccagcgcccttcattgaaaagactattcttctctctgttgacttgtttttgcaccttgtcagaaatcagttagctgtatgtgtgtggcctactgctggatcctattgttcaaatgacctgtgtatatatccctttacccaaactacactgcttataggaaggcttaaaagyggggagtaygatttaactttatttttctgtttgaaaattgtttagagtattatagtgtctttgcttttccatatgcattttagaatcagcttgtctatgtcttgtcatagcttgtccagaccgagagacatctggggacaaccaatgggtaactcatagccattcagtggtactttgaattctggttgtattagtccattttcacactgctgataaagacatatctgagactgggtaatttataaagaaaaagaggtttaatggactcacagttccacatggctggggaggcctcacaatcgtggcagaaggcaaagacatgtcttacatggtgacaggcaagagagaaaatgagaaccaagcaaaagtggtttcccccttttataaaaccgttagatctcgtgagacttactagttaccatgagaacagtatgggaggaaccgcccccgtgattcaattatctcccaccaggtccctcccacaacacgtgggaattatgggagctacaattcaagatgagatttgggtggggacacagccaaaccatatcactggtctttcctaatccacctgctgctatttcctgctcagaaacctcaagtatctgctccattagttgcgtccagattttatagctgcattccacaggagaggcaggtggaacttgcttactccatcttacctggaattgaaaccctcttgttaatttttaatagtgtgataatggcattgtagttatatttttaaagcccttatcttttatttatttatttatttatttatttattttttgagtcggagtctcgctctgtctcccaggctagagtgcagtggcgcgatctcggctcactgcaaactccgcctcccaggttcacgctattctcctgcctcagcctcccgagtagctgggactacaggcacccaccaccacgcccgtctaatttttttgtatttttagtagagacggggtttcaccatgttagccaggatggtctcgatctcctgaccttgtgatccacccgcctcggcctcccaaagtgctgggattacaggcgtgagccaccgcgcctggccttaaagcccttatcttttagagatgtaaacagaaatatatatggattaaataattatttaattatttatttatttttatttttttgagacagagtctcgccctgttgcccaggcaggagtgcagtagcattatcggctcattgcaacctccacctccaggtacaagcgattctcctgcctcagcctcccaagtagctgagattacaggcatgtgccaccacgccctgctaattttcgtattgttagtagagatggggtttcactgtgctgggcaggctggtcttgaactcctgacctctagcgatccgcctgcctcggcctcccaaagtactgggattataggcatgagccaccgcacctggcctggattaaatgatttttttaagccacaatgagaactatttttaaaaaatatatcagattagcaaggataaaaaagtttgttaatggaaaagcagcaggaggcagtcgtgtggacactgcagccaggcttcctgggttccaaccctagcccctcaccttcacaaacgtggccttgagctgctgctagcctccctcagctgtaatggggacaatcatagacccttctcccagggtgtggggtggacaaaatgagttgaaaggcggaatcacttacaacctgcgagtgaatctgagctgtttgttacttaccccaggggtggggagaagtgtcagaagggtgcagccccatggagggcagtctcctgtgtcagcattttcaacacttgtccctgttgactcagcaactctccttctaggaatcgtgcctgtatgctctcataggggaggccacttcagggttcgtggtaacagcaaaggtcaggagacccctaaatattcatccacagggacacgttccattatggctgagtgctaatttgtttagaatagaatcctatagatgtctattgttctgttgtgggaagttaggtctatgttgtggtgcagagggaagggcacagccggctaccatttgtataaaaatagaagaatacacacgtaggtgtgtctgcctctccacacacagatgctccacaaaggccccgagggcccagcagtggtgtccctcagagaggagagctgcagacaggtagtgtgcgagggcaactcagttttcaccgagtatcttctcttacttttttttttttttgagacggagtctcgctctgtcgcccaggctggagtgcaggggcgcgatctcggctcactgcaagctctgcctcccgggttcacgccattctcctggctcagcctcccgagtagctgggaccacaggcgcccaccaccacacccggctaatttttttgtatttttagtagagacggggtttcaccatgttaaccaggatggtctcgatctgccgacctcatgatccgctcgcctcggcctcccaaagcgttgcaattacaggcgtgagccaccgtgcccggcctttctcttactttttaactattataacatctacatatattatcttctcaaaagaagttgaaaataatagtaaaaaggaaataattcatactattgatctatagattccatgcaattcctctccaaattccaatgacattcttcaacgaaatagaaaaaaaatcctaaaattgtttagaatcacagaagaggctaggcctggtggctcatgcttgtaatctcagcactttcccgattaactgggaaaggtttctggagaaaacaagagttgagtgggctttctcacctccgtgcctttccttcagtcacagtacaggaccgacgggaggaagtggggggccgaggtgggasgatcagcaacatagggagaccccatccctacaaaaaatgtaaaaattagtggggcgtgggtggcaccgtggtcccagctgctcaggaggctgaggtgggaggattgcttgagcattggaggttgcagctgcagtgagctaggatcatgccgctgtacttcagccggagccatagagcaagaccctgttttaaacaagccaaccaaccaaaaaatgtgatacacacacacacaaatattattcagtcttcaaaaagaaggaaatgatcctgtcatttgtgacagacaacatggatgaaactggaggacactgtgcccagtgaaacaagccaggcatcaacagacaaatactgcattatttcacttattacggaaagcaaaaagggtgaactcacggcaacaaggaacagaaggggtagtcaccaggtcctgggaggtaggataaacagggaaacgttggtagaagggtacaaactgtcagctataagatgaataatcacgtctcgtacacttgatattggctaagagagatcttgtatcctaaccacgcacacacacacacacgcacacacacacacaaacgtaactctgtgaggtgaggaacatgttagctcaattgtggtaatcattttaaagtacgtatgtgcatcaaatcatcatgttgcatgccctaagtacatacagttttaaattttgaattgtacctgaataaagctggaaaaaaataaaaattaactgggaaaggtttctggaggaaacaagggttgagtggactttctcacctcagagccttgccctcagtcacagttcaggactgtgggaggaagtggggtgaggcccctcccttcttttgatttaacttttttttttcgagatagggtctttctccatcatccaggctggagtgcagtggcaaaatcacagctcactgcagcctcgacctcctgggttcaagtgatcccccccacctcagtcttacaagtaaatgggaccacaggcagctgccaccatgcccagctaatttgtaaattttgtgtaaaggcagggtctccttatgttgcccaggttggtctcaaactcctgggctcaaacagtcctcttactgtgacctccccaagtgctggatcataggcatgagccaccatacccggtctttttattttattttattttgtgggttcaagcaatcctcccacctcagccacctaagaagctgggactacaggcataccccatgcctggctaattttttaaattttttgtatagactgggtcttgctatgttgcccagggctggtctttaacccctggcctcaagcagtcctcccgcgtcagcctcctgagtagccaggattacaggtatgagccaccatgcccggcaggggccttcttcagcaagttttcttcattttttcattgaattattacccccatatactccaaataaacagcctccacaagcgtttatcactcctatttagaaataaagaaattttaattcaaaaaggttaagtaacttgcccaaggccacacagggacgtgtgcctgacgctaccgcacacatccgtcttcctggggagaagtgagtatgtgggaataggaggcagcagtctggggacttggattttagctctactctactagggaacctggagcaaccaacctccgtgagttaaactcagagtccaggcagctgtggctgaagcctcccttctgcctgaggccaggaggggctgctggaggctcagatgtgttgcttttccccagggagggtttatgtcctgagtaagtgcagctacctgcggtttttcactcactccatgcgaacacatcctagatcgtcgcatggctcaatggcactctttgtttatagaaattcttctttctgccgggcgcagtgcctcacgcctgtaatcccaacattttgggaggctgaggtgggtggatcacgagatcaggatttcgagaccagcctgaccaacatagtgaaaccccatctctattaaaaatacaaaaattagccgggcgtggtggcacacgcctgtaattctagctactcaggaggctgaggcaagagacttgtttgaacctgggaggcggaggttgcagtgagccgagatggtgccattgcactccagactgggtgacagagcgcaactctgtctcaaaaaataaaaataaaaaagtaattcttctttctgtttcattttgcatatttctatcactatgttttcaaattatctaaacttttaaaaaaatttttttttattgagatggggtctcattatgttgcccaggttggtcccaaactgctggcctcaaatgctcctcccgccttggcctcccagaatgctgggattacaggcgagggccacactcactaggctcttcctctgcggtgtcttgtctgctgtgaatcccgtcctgtgtatctttcatatcacacattgcagtttcaactctagaaaattactttcgggcgtttttataaggtccatgtttctacttaacttttctcatatgtaaaatacagttataataacttttaatatacttgtctgttaattctaacattcgtgttaactacgagttgtttttgattggttgatttttctcctcaaggctaatatatatatattttgagatggagtctcgctctgttgccaggatggagtgcagtgctgtgaacttggctcactgcaacctccgcctaccgggttcaagagattctcctgcctcagccccctgagtagctgggactacaggcgcgcrccaccacacccagctaatttttgtatttttagtagagacgaggtttcaccgtgttggccaggatggtctcgatctcttgacctcgtgatctgcctgccttggcctcccaaagtgctgggattacaggcgtgagccactgcacccaaccaaggctaacattttcctgctgtttgcatgcctgctaactttccatgagattatcatygtcatgtaatttacttggttgggtgctgcatatttttgtattcctataaatattcctgagctttgttctttgatgcaattaagttacttggaaacggttggatcttttcaggtcttggtctaatatttgttatgcaggaatgagtagttttcagttgatgggtaattgttcctttagggtgctaggtaaaatacaraacacacagtggaattttaatttcagataaacaacgttttaatataaatattaatatatcccctgctttttttttttttttttttttttgagacagggtcttgctctactcccctcgctggagtggagcaagctcacggctcactgctgcctctaccttccaagctcaagtgatcctctaacctcagcctcctgagtaactgggaccacaggcatgtacaaccacgcctggctaattttcttaattatttgtagagatgagatcttgctctgctgcccaggctggtctcacacttcygggctcaagccatccttccacctcagcttcccaaagtgctggggttagaggtgtgagccaccatgcctagccctgcccatttttaaattgggttatttatatttttattattgcattgtaagaactttttaaaatatatatcttggatacaagtcccttatcagacagatgatttgcagatactttctcccatttggtaggttgccttttcactttcttgatggtgtcctttgaagcatacaagttttcaatttggtgaatttgaattaatctatttttaaattttgtctcttgtgcatttgtcatatctaataagctattttatagttttagcgcttacattcaaattcatgatccgtttttagttgattgggtctaacttcattcttttgcatgtggatatccagttgtgtgtgtgtgtgttggatgtgtgtgttggggtttgtgtgttggggtgtgtgtacgtgtatgtgttgtgtatgtttgtgtgttggtgtggggtgttgtgtgtattagtgtattagtgtgtgtgttgggtatgtgtgttgtgtgtgtgttgaggtgtactacgtgttgtgtgttgggtatgtgtattgtgtgtgttgaggtatctgacgtgttgtgtgttggtgtgtgtgtgttttgtgtgtgtttcgtgtgtgttgggtatgtgtatgttgtatgtnnnnnnnnnnnnnnnnnnnnnnnnnnnnnnnnnnnnnnnnnnnnnnnnnnnnnnnnnnnnnnnnnnnnnnnnnnnnnnnnnnnnnnnnnnnnnnnnnnnnnnnnnnnnnnnnnnngtaatgaatttgatttcattaatctacgtatctttttttgtttgttgtttgagatggagtctcactctgtcacccaggctggagtgcagtggcacagtctcagctcactgcaacctccacctcccaggttcaaaagattctcccgcttcagcttccggagtagctgggactacaggcgcccgccaccaggcccagttaattttttttttttttcccgagacgtagtctagctctgtcacccagtttggagtgcaatgacacaatctcagctcactgcaacctccgcctcctgggttcaagtgattcttgtgcctcagcctcctgagtagctcacatcacagacgtgtgccaccatacccagctaattttttgtatttttartagagatggggtttcactatgttggtcaggctggtttcaaactcctgacctcaaatgatccgcccgcctcggcctcccagtgttggaattacaggcatgagccaccttgccctgctgtactcactcttaattattatatggtacatatgtaaacgtcccgtagacttggagttttaaaacattctttacccaccgaagtgtcctatgctttcttctcacaccaaaaaaaccttagcttttgtggccaggcagcagttcatattgttgtctttgctctcggtggcttgaaactaaaagtgattctgacattttctgaactaagactgaagtgcagtttccctttctcttctcctacttctagatgccatttttctatcttcttccttacttctacttctacatggttaaagtggaaaaccttcacgttctatagagaataattataaatgttaaaaatcaacatatgggaattacattattaagcctaagacattactgctgagcctgtgacagctataattccctcatctttgtgttttccaaagatggcctcaacattacctccctcctctatgtttgtctcacaatgtgagttacatgctttccccccttaaatctgggtgagccatgacgatggtggaagtggtgctaaccagctgccaggtcattacgaagccatgcactgtgccaggtcattacgaagccatgcactggcaccttttccttccagaatgctagcctttggaatctcctgctgcagactcatttgtgtctcttctactccaaagttcatatgctgaagccctaaccgtcaatgtatttggagataaagcttacaaggagttaatgcaagttaaatgagttcataagggtggatccctgatccaacaggatcgggccctcatgaaaagagacaccagagagctctctgtctgccatgtgaggacacagtgagaaggcagccatttgcaagccaggaagagggcctcaccaggaactgaatcagccagcatcttaatctcagacttcctagcctccaaaaccgtcagaaataaatgtctattgtcatagtcataggctggtattttgttatagcagcctgagcagactaatgcaaccttctcatcccctctcctgcctaccacactgtgagaaagctcgagaagccagtgagaagaatggaggccccaggctcacagccctggatgagctccagccttcaaccagtacagaccgagtggccacataagcgagttttcttcaacttggatcctccagccccagctggcacatgtgaagcagaaaagaggtgccccatcaagacctgtccaaattgcagattcttgagcaaaacaaagtattgtttttagccgctgagttttggagttgtcatgcagcaacagacacctgatacatttgcttgtaaactttttgctttcccaagtagtgcaaatctgaaaatgtctttattacattcttatacttggtaaccaattctgtgttgacaactgtttcacctctacattttgaatgtatttttccactattttctagcatcccatgttgctgatgagaagtgatgccctctgatttttcatcccttgaaggaattcttttttttttttttttttttttgaggcagagtctcgctttgttgcccaggctggagtgcagtggcaccatctcggctcactgcaagctccgcctcccaggttcacgccattctcctgcctcagcctcccgagtagctgggactacaggtgcccgccaccatgcccagctaattttttttgtatttttagtagagacggggtttcacgctgttagccaggatggtcttgatctcctgacctcgtgatccacccgcctcggcctcccaaagtgnnnnnnnnnnnnnnnnnnnnnnnnnnnnnnnnnnnnnnnnnnnnnnnnnnnnnnnnnnnnnnnnnnnnnnnnnnnnnnnnnnttttcctcttggaacttttagggggggctgctgatccttgctctcttggtttttcataccaatgtgtcttggtttggtcctctcctattcaccatggggggagctcagtgcctccttttacccagagaccaaaatccttgaactctgggaaatgaagatttcttggccggacacggtggctcacgcctgtaatcccagcactctgggaggaggaggcccgtggatcacgaggtcaagagatcaagaccatcctggccaacatggtgaaaccctgtctctactaaaaatacaaaaattagctgggtgtggtggcgcatgcctgtagtcccagctactcaggaggctgaggcagaattgcttgaacctgggagacggtggttgcagtgagctgaaatcatgccactgcactccagcctggtgacagagcaagactcaaaaaaaaaaaaaaaaaaaaaaaaggaatttttggcactttcttcctctctggaattcccattagtttggtactggacttgaacttctaagcttatcttacttcctgagttccttaattttatcttccaactaaacttttcttttctctttttggagacagggtctcactctgttgcccagactggagtgcagtggtatgatcgcagctcactgcagcctccacttccccgagttcaagcaatcctcccacctgagcctcccaactagctgggaccataggtacacactaccacatccagctaatttttttgcattttttgcatacatagtgctttgccatgttgcccaggctggtctcaaactcctggacacaggtgattctcccaccttgaccttccaacatgctgaaattataaactttttcttttttttttgagacaaagtcttgctctgtcgcccaggctggagtgcaatggcatgatctcagctcactgcaacctccacctcccaggttcaggcaattcttctgcttcagcctcccaagtagctgggactataggcgtgtgccaccatgcccagctaatttttgtatttttagtagagacggggtttcaccatgttggccaggctggtctcaaactcctgacctcaagtgatccaccagcctgagcctcccaaagtgctgggattacaggcgtgagccaccgcgcccagtctaaactttacttttcttaaaacatgttatcaatgtctttggttctgtgggttcactgagcccagctgagtggctcctcctaagagttgtggtgacagaacctaggggtggtgctgtctgaaggctcacctaggctggaattccatttccattcatgtgtctgacattggggtggccacacagctcagggctggctctgcatctacctttgtgtgtcttttccacatgagtttctgggtagatttcttaggctgacttctccaaaagtaagaatccaagagcctgcggtaattttaatctattgtcattttatctcctgatagccttttcttgggctgtttcttgaagcattctgtgtttgttctaggaatgttctaacgaggttccagaatgctcttcatttctctgtgtttctrtttcttctcacgtcatctttctaatttacgttggtctctattgttcatgttgaaagtcttcccaaatacccaatatccttagcagtcttaaagagactaagactgaggtgttaggaagctcacaaggagtttgcattcaaaagcaggacttgtcaagcgctgggctttgctgtagagactgtgtaggaagcccactctcaggccagcctaaatcccaccttacaggggtgtctttttctggaatacccccacattatttatgctaggaaaccctgttgctgtatgatttgtgtstgtgaggggatggagggatgaggagtgggaagctgttgactcatgcacatacctgtctccatggtgtctctgctgtcgacctcctctcccccagctccagcccctcacctttccagggctctgtatccaatggagggggctcaagtgaaggcttcttccccccatttcactgtcaccaagctttacctctggacatttgtggcactcacctgctgggaacccactcctttctctgaacagtttcagggtttagcctcccttcctgagccccttttgacaagttatcaggtccctggtagggaaagaagaacaagctcaagtgcccgatctcttatcttaatcagaaggggaacccagttctaatccagatgctgctatgctgtcctctttctgggtttcatttccttgtctgtcaaaccagagggtggcttggccaactcacacctgacccaggttgacacaaagtccaactccagcttctctccactcctacctgaattcccagcagcatacaaacaggactcaggagacctgggttcaatcctgtctttgccatattctggttgtggccttgggcacgtccctttacctcttagttatcccttgcctgcctcggagggctgttgcagtcaccaagtgactggacctgaaggtaagctgcccaaggggctcaattgtgagtgttccctcctcccacccaaggtcagccttgtcaataataaacacagtgactctctgagcacctgccaagggccaggcccgccamatacggtgttattctcacaatctacaagaaaagtactattagcgccatattcccaaggaagaaagtgagtgcccagagaaaaaactaaaatttcttggaggtgaaaaatagagaccaggctcagtggctcacacctgtactctgaaagcactttggaaggctgaggcggaaggatcacttgagctcaggagtttgagaacagcctggacagcatggggagaccccgtctccacaaaaattagctgggtgtggtgacatgtgcctgtggacccagctacatggggagctgaggtgggagaactgcttgagcctgggaggtcgaggttgcagtaagccaaaattgccgcactgcattccagcctgggtggcagagtaagaccttatctgggaaaaaaaaagaaagaatcactgaaaagaaaatttttatatgaaagttgaaagataaaaccgaagaataaggccgagcgtggtggctcatgcctgtaatcccagcactttgggaggcagaggtgggcagatcacgaggtcaggagtttgagactagcctgaccaacatgaccaacatgatgaaaccccgtctctactcaaaatacaaaaattagccgggggtggtggcgcacgcctataatcccagctactcaggacgctgaggcaggagaatcgcttgaacctgggaagcggaggttacagtgagccaagatcgcaccactgcactccagcctgggagacagagtgagactccgtctcaaaacaaacacacaaacaaacaaaaaccccgaagaataacagaagtatacaacaacaaaaaagaaatggaaaacaagagaaacgggatgaagggcctggaaggtcaatgcaggaaaagacatggtgatgatcacgtccggacggcagcttagcaagacagcagccaggagcaaagggttaacaattggccaaaagcaggcaaaggctgaaaaactcttctaggcacttttattaatttgttttttgaggcagagccttgctcggtctcccaggctggagtactgtggcatgatcttgactcacagcaacctccaactcccaggttcaagcgattctcctgactcagcctccctagtagctgggactacaggcacgcactaccatgcctggctaatttttgtatttttagtagagatgaagtttcaccatgttggctaggctggccccgaactcccaacctcaagtgatctgcctgcctcagcctcccaaagtgctgggattacaggtgtgagccactgctcccagcctcttctaggcacttcggaaaagtgcagcgattactgaccacacgaaggccagagatgcagcaggcatctatttacatgcattaaatacatatattatcttcatgcatttacacattcattcaacaaacattactgagcgcctgccgtgggctggcatggtcctgggcacagctccgcttgcaggaagcccactttctcctggggagtcaaagcacaaacaaagccaagtcagtacgtaaagaagcaggggtgatgagagatgcggacccaggaggggttcaaggggctgtcctggacgcatgacagggaagcatagcttcttaaaggactcggcagtgcaccatgagaagacacgcaccaggggagcagagagaaacgccagaaccctctcgaagaaggagggatgtgaggaggtcaggatagtcacctgtgctgagccatcatggagagtgagggcctgtaagggtggacacagtatgcaggagggacaaatcttcctcaccggacaggtggggatccctgcggtgcactaggggaatgcacacagggggcactatgacctggcggcccacggggcacggggacgcaccaggtagccttgggatctgcaagtccctcccggaccctggggagtgccatgacggcttccagcagcagtcactgtcctgggcgcgtcccgcgctctagcccaggtgggtcccacaacggtgtgaccaaggacgtcctatgaccaccccttkacaggtaaggaaactgaggcaggagaggcgaagcaactcgcccaaggaatgggctgtgccggtagcttctccaaggcctggtgcgccctggcctgtgcgcgtgatcccgggcggggtctcagtrcgaacaggggcttcgcgatgtggccagcgcgggcttatctccgtgccgtgacgacaaggctagaagcctgggcggccgcggtggatcctcgtggcgaggcggggagggcgccgggcctcactggcccgctcgaaccagggctgcgcagggcagagcccaagggagagggccgcgcggccgccgtaacgtcggagacgacgcctggcaggcgccagcaaacgcagaagacccgcgagggcgaggcagggagggcgcgacgcgacaacgaccacgtgccccgcccgcccaggcgcgcggcctgccgggagacgcagtccaaacctttcgggagcaggactaggggtcccagagagcctcgcggcgcgcatgcgagccccggccccctctcgcgcagcctgccgggacttgtagtccaacgccagcaggcttccgggcccggagtgggcggtgggactcggggtcccagagagccgtgcgcgggccgcgacgccgagcaccgccctcgccgtcgcctccgggctttctccggtcgctgccgccaccaccgttgcttcgcgggctgggaggcccggggtccccgggcgaacagaggctgcgggtgggagccttcgcgggcgctgcagagcgggccgggggaggccgggatggagccccgcggaggtgggcgcgctgccgggcggggcgcttgcggcgattggggagggggcagagggaggggcccggggcggggctcggtggcggggacaccggggcgggggcaccgggaggaagctgccttggaagaggtgggggcggcgacgggaggggcggcgagcccccgggagcctgggcgttaggcccgggcgtggcggggccccggcggcctggggggtctcctgggccccccccccacccatggagcccgccgccccggaggtcggtctcagatgactgaactgggcaccgagcgcccctggtgtccctcgcagtggactgacgccgcaggggcgagctagccggctccgcgcctctccgcgggatccagacgcctcctggggctgctggcggagggtctgaggcggcgcggccatggctcacctccggggatttgccaaccaggtgagaagggtgcaggtcaggaagactagcggcctctcaccgaggggctccagagtctcctrggggttcagaggggagcgccacgccggagcgggcagtggggtgagggaaggagcgcgcgtcgtgcgaccagcggagccgtcctgaggtgggcgcagggcggycccggggctctgccgtgtgcctgtggcgttttgcgtggcagaagctcgcaggcctytagaaaccgagcccctggtggctccgcctgtgcgagggcggtggaggtgcgtgaagagacaccggcgcagggacggggcgctgcccccagcgcggggcgggaacctcatgtcagcatccgaaggcagtggaaggtcgggggccaccctgcggcctcggcctgggccgcgggtcattctggccgtgttgggctgggcaggggctgtaggggagaccctggcgggcgctgaggggctgagattgtggagaagcagatctgagtggccggtgtgcagggaaagcagagaacacgtgtgtgctttggcccaggggagggtgaaaaggctgctctgtcaggaccgtttaacccctgcgacgggcggttgcccgaacatgagactcatctttcttctttaaagaagtcgtttccactatggagccacctttaagcgtctggtgggacagcctcggagggagccactacggcgagcccttagcctggaatgaggaccagctgctggtgccaaagggcttgccggggaaggagggtggggtcagccaacctggggcctggggacttgcattctctacccctccccacttttttgactctggccgctgggttttcttacatcttagctgttcggttttattctccttgatgccttggctctacctaaggygttggaatcgccgctaaaatgtgtggccctccttgttcactcctatgtgctgaatggagagttgggcctgcagtggaacaggaagggcgtctgttcgcgtaggggcaggaactggagtcagggctgctttggaggaaaccggaccagcctagagacccggaacaccatgtgcagctgttgggccaggcaacctggacctgcgtggtcacagatgagactggggcttgctgactgttgctgaattaagctaacagatttttggtttgcttttggcattctgtatctggtaacttacatgactaaggtgctgggagaaaaatctgccaccagtttattttactttatttttatttttttgagacggagtttcgcttttgttgcccaggttggagtgcaatggtgcaatctcagctcactgcaccctctgcctcccaagtacaagcgattctcctgtcttggcctcccaagtagcttggattacaggcatgcgccaccatgcccagctaattttgtatttttagtagagacggagtttcaccatgttggtcaggctggtctcaaactcctgacctcaggtgatctgcttgccctggcctcccaacgtgctgggattacaggcatgagccaccgcgctcggccaccagtttatttttaagaactgcagaaataactcctttgggtcacaggatgagaaattggagctccgaggtgccctgtaactgtgtgctattggttcttggtgcgatcgcacacagggaagggagtgcgggcacattggagaagggattccaaaggtaggaagctccttttgtccttttagggatccctttgtcccagcctggatgatgagagacttgacttcatatagtggcagaaaacctgaggggctgtggttttctcctgagatggttgccatggtgtcctgtggacctgtggggcagcccctttgtgggagagtggggcgcgttccccccatagcctgtgctcctgccttagacttctcccctctacctggccagttcctgcctggccctggagggcccgaatggctgtggggtgccagagcactgtatcaccactcagctatgtgtgctgggtcattccccttgttttgtggggcaacactgacagcagacacattggcaagtggaggccccagacctggcagccccagggctaatgtggagaacaggtgtccaccgcycgagtcagctgagtggcccgagtgatcatccaggccacagctgctgctacatccaaaagaggattcgcagcctccaggccaggggcccacttaccctttcttctccaggtgggggtggggatggcttgccttggcttggcctgcgatgtcattgtagggccaggatcacagccaagagggttcctgtcacacagtttctgcttgggctgatgagccctggctctggcttaggggtccgctgtgctcccctgctgtgaagcagtagaggtctgagtgcccacccaggggtttccctwccggggctgctgtgatggagcagattcagctccaggccctgtgtggagagcagcatggcctcagcagggagcagggagtagagcagggcgggaggacgcgtcatccagagaggcctgaagagtcggaggggtggtggtgctgggtaatgctgccaggtcatggccctgctttctccaggccctctctcaggccaccttagacaggagtagatgggaggacacaagctcagggcaccaacagacctctggaatccccaggaggactcccttggggtctttccrggtgcttgggcagggttgggttgaggctgaggccaggcctacaggctaayggctcggtggagcagcgtcccagggccccgagtaagcgttgatgggctgagcaaacagggaggatttgacaaggtggcgttgggcctgctggaggaggagcaggcagaagaggggctgcttctgcagatcacctgaggtcaggagttcgagactagcctggccaacatggtgaaaccctgtctctacaaaaattcaaaaaaaaaaaaattaacggggcatgatggcgggtgcctgtaagtccggctactcgggaggctgaggtggaagaatcgcttgaacctgggaggcggaggttgcagtgagccgagatcacrccactgcactccagcctgggcaacagagtgagactctatctcaaaaaaaaaaagaaaaagaagaggggctgcttcttaaccttgtcctgcacctggcatccaggactgggctaggaacgggtggtcctccaccagaaatggagcaaacagggaggaggaaacggagatgatgctctctatggcaggagggtgatattttaacactgactgcttacctaygacagccagtgggctgatgagcttatgctttgacatgcacttgtggkcccagctactcaggaggctgaggagaccagcctgggcacacagcgagaccccccatctcaaaaaaagattgcatgttctgggttgactttcctttcagataggggctggttctcacctcatctgtgccacccaccctcaaccyggagacagctgagcacctgtgacttgtcagctttgaatttttcctggcttctctttagaacacatggtcagcagcagtgatggggctgggggcagacacagctcaccttgaccggaatgaccccaggcagtactcagctctctctatcctgccgagtttcttgaccttggctttggggactcctggtagcaggtgggctcaaggcaccccctgctgtttcctccatgggtactggctttaggactgggctgctgtactgatgagagaatgagaaaggtcacttttgactcgaccagctgtctcaactggccagacctttgggctaagcaagggtctgtgtgtacactgcagctggcctgctctagctgctgcatggaggccacctgcacacccccgggccttgacaagccagccttgcagggaaaggttaggtggcctctggccctcccctaactgcctttccttccccagagttccagtcacctcgaggtctggcactcaaaaagggatgtgcagcggcatgtttcaaggtgggggcctgtgtgccgccccttccaccctcctggttaggaaccctgggaggtcagctaattggcagtttcacacggaagtgtcgcctcaggctggtgcgatgtccagttggcttcagccagctcctccgctgggcttaggcctggggtggacccagcacacaggtgtccagggggtgagtgtgagggctgtgtgtggtgtaccccatccttcttggtgggcacggtctccgcaggcccaggaacgtgcagggcacccccacccaaggacctgtcctgtcttcagtgtttttttttgtggcataattagtcgttttgcctttttttttttgagacggagtcttgctctgttgcccaggctggagtgcagtggcacgatctccgcctcctgggttcatgatattatcctgcctcagcctcccgagtagctgggactgcaggcgcccaccaccacacccggctaattttttgtattttttagtagagacggggtttcaccatgttagccagggtggtcttgatctcctgacctcgtgatctgcccgcctcggcctcccaaagtgttgggattacaggcgtgaaccactgcgcccagcctgttttgcctttttatgctctgccacactaaattggcatcaagacccttgatgttgtaggggagnnnnnnnnnnnnnnnnnnnnnnnnnnnnnnnnnnnnnnnnnnnnntgtaatcccagcactttgggaggctgaggtgggcagatcacctgaagtcaggagttcgagaccagcctggccaacatggtgaaaccttatctctactaaaaatacaaaaaattaactgggagtggtggtgcatgcctgtaattccagctacttgggaggctgaggcagaagaatcgcttgaacccaggaggcagaggttgcagtgagccaagattgcaccactacactccagcctgggtgacagagygagaagccatctcaaaaacatttaaaaaagggtcgaggcttgaggacacacctctgctggcttcccctggactctgggcctgggccacagaccccaggcaccttccacaccactggctcagaaacttttaggcattgcttctttaaatctgaggactgtgtgaggcagctttctgcatcaagaaagcatcaagtttctaactccgcgctggtgtagctgtcaggaggacttatggaggggtgagggaagccctttctaaatacrtgactttcasgagtggaggagaacttggttaacacatactgaggttttttgtttttgatgaggtttttttttttaaattttttatttttttgagacctagtttcgctcttgttgcccaggctggagtgcgatggtgcgatctcggctcaccgcaacctccgcttccctgattcaagtgattcttctgtcttggactctcaagtagctcggatcacaggcatacgcaacctcgcccggctaattttttttgtattcagtagagatggggttttaccatgttagtcaggctggttgcgaactcctgacttcaggtgatcaacccgccttggcctcccagagtgctgggatttcaggtgtgcaccaccaagcctggcctgatgagtttattttttagtaatttcagatttataacaaattaagtaagagctcccaaatcccccctcacccccaggggccattcacctattaacatctgtcacggggctggcatgttgttcgggttagatgaggcaaccttcatgccgtgtcatcacctaaagctcctgtttccagcagggttcatcgagttggcctggcctctttatactttctggggactttttcccttgcatggaaagttcagtttaggtttttttgttgttgttatttgtttgtttgtttgtttttttaatggagtttgattcttgttgcccaggttggagtgcaatggtgcggtcttggctcactgcaacctccgcctcccgggttcaagcaattctcctgcctcagcctcctgagtagctgggattacaggcatgagccgccacgcccagataatttttttgtattagagatggggtttcaccatgctggccaggctggtctcgaactcctgacctcaagtgatccacctgcctcggcctcccaaagtgctagaattacaggcgtgagccaccacgcccggccaagtttagtttttgaacaaaaagggagaaaggaagaaaccagagaagaattgaggtgcgctcccttggactcccccttccctacaggtcccttcctccccagcagggcagcctctgcctgtcccccgcctcttgtgaccggcgctgtctgccctctgtccccgccctggccccacagcactctcgagtggaccctgaggagctcttcaccaagctcgaccgcattggcaagggctcgtttggggaggtctacaagggcatcgataaccacacaaaggaggtggtggccatcaagatcatcgacctggaggaggccgaggatgagatcgaggacatccascaggagatcactgtcctcagtcagtgcgacagcccctacatcacccgctactttggctcctacctaaaggtgcctgttgtggggaggcggggaccctgctggtgctgtgcccggctctcttccatgtcagagggactgagtgacatgccagagggtgcaaggcggtcttgacggttcagtgcatgccctccgggaaactgccctgggcaggcagggtgtgagccctcgtccacgagggtcagttggctctaaatggccattgggacccacttgcctgcctgtggtaatgcagtgagggygctgctaggagcactctggggggcccctactggcagtggtgagtgggcctgtgaggagcaggtggctggtggtgccagtgtctggggtgtagggaacrctgtggccatcctgcccaggagggtgatgggtgtgtcgggtcacatgcttgccagccatgccctcttcccagccctgtaggactggatcagcagcctggtttttgatggggtcttggtgaagtggagtcagccactgctgtgtgtactcaacctgtcctctgagcatctgtagcagtagtgtggcaggaggggaagatgggcaaggccgagagagccctttcctgttcagggttcttggcagggatgggaccggtggggcctgggccctggctgactccggcctgtgactcccaccctggagcatgcccttcctcttgctgccaaatgctgatgggtttgtctycggtcccagagcaccaagctatggatcatcatggagtacctgggcggcggctcagcactggacttggtgaggcataggccatggcagtggggggtcatgcagtgtccgagtcccctgcccctcagactcatgggctccaggggccacctctcgtttggtgtcatggcacgttaggtgttaattaggaatcgtctaaagcaaaaatgaactgccatctgcacgtctgcccagttggtgctgaaaggggtcctggcctgtgggagtgggcgggggcaggcctgctgggagatggctgggagcctatttttctgttacatgacagtaaggtgaggctggtttatatgctttagaaagagcctccaccaccccactcccatctgaaacttagttctgtttgggaagtaaaggaacacgaagcccccagctatctgcagggacagcccttccctgtgagagaggcagagaactcaggcattgggcctgggacaggagctgaggccctgctgtcgcaccttcctctccagcttaaaccaggtcccctggaggagacatacattgccacgatcctgcgggagattctgaagggsctggattatctgcactccgaacgcaagatccaccgagayatcaaaggtcctgctgggggtggatgtggctcttgtaacgtcctgagccccactgaccttagagaggccggggcctgtgaggggcaagtggctagtggtgcccagggtctggagtatagagaaccttgtggccaccctgaaactsagcagtcctgtctcrctccctttccagaagatactacttgtaacggtttccttgtacgctgaggaaaccagctgtggactgagtgtaggaaagggccacacttggctggagttgttggttccctgtggtgcacggcacagcagcaggtgtagaattgagtagccccagcgtgtggtctggccctgctgagagcagacgggaggctgggccagcccatggggagggacttgccactggcaacgagccatctctgtcatgtaggggacgattctggtggagcagggggcttcctggcaggcccgtgttggctacacccttggtcagggtcacctctgcggtagcccccagtgggcgaagtcgcttgtcgttgggatttgtygtaaaagccaaatgcaggaagagccctggagctcggagtggagccgttgggctcctgctggcagtgcccctgtggccctaggtggccctgggtttgagagtggcaaggagggctgaggtcctgaggacagccctgctgtgccctaggaggccaggtggatggtaccctggcccttctcagggggcccggggtggagccacgtggagcctgggatgacgcctgcctgtcctgtgtcaagcagctgccaacgtgctactctcggagcagggtgacgtgaagctggcggactttggggtagcagggcagctcacagacacgcagattaagaggaacacattcgtgggcacccccttctggatggcacctgaggtcatcaagcagtcggcctacgacttcaaggtgggtgcagcgggcgggcaggtgcgggcaccatgcctggctcgggtgctcagggcagcaacagtccttgtgttctgtccaggctgacatctggtccctggggatcacagccatcgagctggccaagggggagcctccaaactctgacctccaccccatgcgcgtcctgttcctgattcccaagaacagcccacccacactggagggccagcacagcaagcccttcaaggagttcgtggaggcctgcctcaacaaagacccccgattcgtaaggcccgcctctggcccggtcccttctagacaggacgtggagggagggcgttcgcttggggtgggcggcacagcccggaggcccaggcccaccagccttgtagctgtgagggcccgccccggtccaggctgcctcacgtttgcttcccttaggcagagcttggctgggcccagtgactagtgttcccctgaccccctgcagcggcccacggccaaggagctcctgaagcacaagttcatcacacgctacaccaagaagacctccttcctcacggagctcatcgaccgctataagcgctggaagtcagaggggcatggcgaggagtccagctctgaggactctgacatgtagggacctggtttatcctcatggtgaccctaggtgctgtgacrtgggtggtccccactccagaagcaggggcgtgggccctgggggtgagggtgaccagatatagtgttgggcagggaccccctcaaggctgcaggacagggcctgctgaggcatcagctggaccccgtggcctggcagagccccgtctggtacctcgggtttcccttggccgtgaggtgtgccctgaggccctcatgcctcctggccctctccccactggccctggcaactcctcatcctcttcagtgatggcgaggcggaggacggggagcagggccccatctggacgttcccccctaccatccggccgagtccacacagcaagcttcacaaggggacggccctgcacagttcacagaaggtctgttcctggcctggcctttgccctctgtgcacccctggggccgtgggatgggctggatgcgggacccagctttgtccacccagtgtctggagcttggacaaggagcttgggaaaggcaggggtggtctgaagcccactgtggcactaggcctggtgtggagaccccgagccccagcatgtgccgggaagatgagggcctgtttggagccaaatttgtgaggagagggtgggagtcacaggccctcagagtcaggagagggtgggagtcacargccctcagagtcaggagagggtgggagtcacaggccctcagagtcaggagagggtgggagtcacaggccctcagagtcaggrgagggtgggagtcgccctcagagtcaggccatccgggtggcttgatggttttggggccggccctrgacatgtgccccgacaggctgctcccagcctctgtctcttcaaggctagagcctgggcagggatgggagtgccctgcctgtcacctgcactgmcctgctcaccctgggcctccactcctttgcagcctgcggagcccgtcaagaggcagccgaggtcccagtgcctgtccacgctggtccggcccgtcttcggagaggtgaggatggggctgggactgggcctggagtcccgtcaaggacaaggctgtgacaytgttgcacggagatgtctccctcacagcactgtggggtggtttcagcttctagctttcctgcagctgattgtgggctgggttttctgagtggaaggagcagaatctrctgcaatgactccttttgtactcccagacctgccaaggttctctgggttcctagggtgacttttttttcttcaggtgcaaacacagatgatccttctatagagaaagcagagaaggtttagtcggggtccatccccgggcaggtgccgccctggttagtcacgtgaccctgcatcaacgtcacctgctgatgggcagtcagcaccgtcctcagaaatgtgatacagccaggatctgtgtgcccagggcgtggccagyggscttgggcccaggtgtgccctccaggagccccacctggagcctggggagggaggatggaggatgtgggtgagaggtggtgamggcagggcctgcctgaggacggcaaagggaggagcacggtcgagggacgttggccccagcccatgtggaggccccagcgggaagcagccactcgggtccaggtcctgggcagcctgctgatccagccacagccccccgagggtgggtgacacccggtgacaggaggctcagatgctggtgtcctgatggaggtcagatctgggcctggcggtgcygtgtgctttgggggtttctgggcttcgtgtttttgggtctgattagacccattgagtggcttccatgaccctcrgctgggaggaagccatctggtcccctcctgagaaccgaggtccgagattccccggagtgtagggggaaggtaggtgctgtggggaaggaccactagggtycccgttggcagggcaggggcagaggcttccttgggccacctcacttcccggcttgctgaagggctcccgggtgtggctcctaggcgagagccctgaaggcctccggcatcactgtggccgagcaaaggagcaggctccctgaaggcctgtcctggggtccagggtcaggcgtggtggtcttttcacagctcaaagagaagcacaagcagagcggcgggagcgtgggtgcgctggaggagctggagaacgccttcagcctggccgaggagtcctgccccggcatctcagacaagctgatggtgcacctggtggagcgagtgcagaggtgagggcggccgtgccatagggtcggggagagcacccccaccaagaagctggacgtggggtgaggyccagtgctcactcgtgggtgtggctgcatttggcactacatgggctcgcttcactctgggaaggcgcggcgtggcatcctcttccttgtttggacccagctcacagggccatggagactttggggctggagagagtgggcagggcctttccagtctaagggtctgaggcagtgtctcagggtcccggcctcagtggccacatggctgtcctcagctggcctctgcccctccacctggtggctcccgggagctactctgacacgctggtggcaaaacgtcagagctgcccctgtgctgactcgagtccttagcaaagagacagggcaggacagatgctgggccctccaccgcccaacggacttagggtccaaccgccatgccgcyggcagatgcgccaagtcctggtccacacacagggaccccttcccggcgcccctgggcagcagctctgggggtggggtctgggccagtcattgctgctcctgagaccctgtgcattggggacaccttcagacccacgtggtgcggtggcttgtcagggctgccaccgcagactgcacacccaagaggccgtcaggagcctgggcacagaggtgcacgcacgcagcagtgggctcttctctctgcaggttttcacacaacagaaaccacctgacatccacccgctgaagcgcactgctgttcagataggggacggaaggtcrtttgtttttgttctgagctccataagaactgtgctgacttggaaggtgccctgtgctatgtcgtgcctgcagggacacgtcggatcccgtgggcctcacatgccaggtcaccaggtcaccgtctccttccacccctgcrgtgtgctgttgtgcacgtcagggacgctgttctctatgcccactgccctcctccctctcctggcccagcagtattgctcacgggggctccagcmgccggystggccctcatgagctacgcctgggtcttctgcagactcatgcagccctatggccgctcagaccaaggcgcagagcaactatcagggcagctctgcctcctcctcccatgaggtggggagaggcaacagggcagcccccagaggagtgtcctggccgctgtcctcccggggcccatgatggccatagatttgccttgtggygttggatcaggtactgtgtctgctcataagtacttgtgtcatccagaatgttttgttttttaagaaaattgaattacttgtttcctgaaatattctgaggttaatatgttagttttcatagaacattgagaggcccctgccactttcaataaagacctgacttggagacatgcaggtgtgtgtggtggggcccgggccatgcggggctgcagcgtccctggtcccgagtcctcatcacagcacgcagagacggcagcccagccccccttcgaaacttccctgtgacggattcctgggctctgcttggcccaccggaagaacagagcaggcagaggagaatgcaggtggggagatgctgtttgtttatttttaatcaaatgtgtgtgaacaaagcagtcgcccatctacttcccgttggaaggaatgctgggcagtaataaattagacggccccaccctcccagggcacagggggactttggtttctgcttctctagaggtacatggggaacaagcgtggcttctgccagacttgtttagctgtgacctgcagggcaggcccctggggctgccacttggttcaccagatggaaggtcagcatggctgtgccacgcttgtctgagagggtcctggcagtgggtacgcagggtgtatggcagggcctcttttccagtgcttgctctaggccagtcctcggcagggaccctgctctggggagagaggcagggtgtgcccaggctttggtccgatgccgagagcactgctcaggccttgtctgcgtctttgagccaggggcctgggagctgtggcttgagcggctccgcgctcaagactcgcacatttttcccagggccccagatagctgctggcatgcactaggtcctgggtggggggatgaagcccctcccagatgttacatgaggcccacccacactgctggtgccagtggggatccagtgagaccacagccacttcccatctgttgagaagcctcaggacagaggtcacctctgtgtcctgctgttctttgtagttgtgtccaaacctgggcaggttgagcgtcattcctccttccccctgaccatcccctccagccctgaggagggttgggggccatcctgcacgatgcttggggccctcccggctgagctgctggccccctggatcacctccatccacctggaggagagggcggccatcagaccagtgagccatcttgtgctcagacactgtcccaagaacaacccaggataygggacaagcaggacaaaagaagggttaaaaacctggggccgggtgcggtggctcatgcctataatcccagcactttgggaggctgaggcagatggatcacttgaggtcaggagttcgagaccagcctggccaacatggtgaaaccctgtctctactaaaaatacaaaaattagccaggcggcgtggcgtgcatgcctgtaatctcagttactcaggaggctgaggcagaagaatcgcttgaaccctggaggtgcaggttatagtgagccaagattgtatcactgcactccagcctgagtgacagagggagacgccatctccaaaaaaaaaaaaaacaaagcattgctgttttttggaaatgctggaagcattgctcagcccttcctttccagggcccagaaaacttgcctccaccaccatgagtagaaatgggagctgagcggacatcgaaatgggcagctgaccagggctgcctcctgcaaaattacctttcaaatgtgtacttgctctcagcccggaagaagtagacgtgggatttgaactggagcttgaaaacatagtctttgtgtatgccatcggcctccctggggatgctcacgctgtagcccagcagcgggaggctggccagtgggtagtcatcctgsaagacagcatagggacacgggttccaggggctgggttgccacagggaatgcccattcctctgctacctgcacaacggtggcacgtacaaatgcccacgggccaagggagccagtttccctgttcacacagcacagggtgtgtgggcaaagcatgggagggcagaaccaaaatacaaaagggacacaggtgagcagggttaagtgtctgtctgctagcatcacctgcattgggctccagtgaaactccagtacctgatgagttttgtagaagaacaaacagaagttggtaaagacgacccagagcttctgccagccatgactgtttttgaactttcttagcagatatcctgaaagctggttctgtcaataaaggaaaaatgcaggtgcattaaccagcacccaggaccccttgtgggagtgggtttgctccccaagactaagcctctgcatgctttctccagctgaggccttggttttacctctggactgctatgaacagcagctttatcagtacttaagtccaacagaagcatgttaaaaacctagagtgacattccaggcrccaagtaaagtgagttccctttccctgtgcacaataaagtcagtgttcagtaaccaaccatccacaaacccatccaacagccagaagagagaagataccttaagagacagtacattgagccaagtctggaaggttctttaaaatgatgggtgggggagaggcaagtaaaggcacacacaagatgccccactgcagccctgtccctaagcatgtggcatctgttctgccaggattaggcatggctttggcgctggagtggctgggctcatggggctcacatgagcctcccgccttcagggtggtattcaggggttgcactctaagatggcggagcgggcctagctaggaccctgcttagatctcaggtgtcctggactggccataagctggtgggcccaggtcagggacctgctgcaccctgacctacccagggtcatcaggggagaggctcgggctcagccccctcacgggggtgctggggtagctcctgagcccctgcccagccgattgtggctggggtgaattatggggagacagcaaaaaagacaagagctctsggtggagtaagacagcaggcttggggaagggtgtgggggcaccaggctgaggaacctggtgacccacaatggcagaccgggcccatgcagtgagatagagctgacaaccttctatggcagggtgcctgggcagagcctcgagctccaagcccgaggtgaagggttttggaggcactgggacggggggctgcaggggatgtgtctgggaaggcttttctcagctccactacacaccagctccaggccctgaggacacgccccgcctgctggacttcatcagacaccagacctgaaacacccttttcaaagagggcttgactggatgaggggcactttccataccaacttctaccaaggggagagtaagaggcagtcctctggggccaagcctgcctgctggtaccctcctgaggtcccctcctcagcagccaagtgcagagacagctgggarcattccagatgcactgaggtggtgctcatgcggtcgtacctcgacagctgcactgtggtctgccctggacacgctggtgttccggtaccagcacacgtgcattgtggtgttggcccggtgctggccatgcccctccagggagctgcggacaccccgagcatcatcttctgactcctgctccagagatacctcgttgggggatcctggggagaagtcagcagcgtctcagggggaaccccctgtggcctctgcttgccaaatacttccaccccttgggttcctctcgggggtcctggggaaatggggagcccttggtgctaggccagctgctggctgagagcaaaactacaggtgcttctgccagagcagctgattgacacctcttcccgcccaggcatgaggcgtagcctggaacattccttgtggaaggggattgtgtgggaacttagcgggccaatggggaccaaggaaaacagtttccaaaaaaagcctccttaggtgtagtggaggtctcctggggggttgtggccagcactcactggggggacgagtgcacacagtgcggcctggcagtgcaggggccgtgtcaccgccactcttggctgcttggatcgcggagttcaggtccagcatccactkctctttctccagccgagtgctgcagggagaagggcaaggctcagtggctctgctcttccttgtgtagggccccagccctcaagggagggcgagccgtcagggcacctgttctctcacattctgctttgtcctgcctggtgagaggactgggaaacgtgtcccctccagcgagaatagcagggaggagagctgggagggacctgcatcagcctgacctccagggtgctgtgacagggttgtgggtgccagggcagggccccggtcctagaacagggggtctgcaggggtatttgttcctgaaatgatgttctctacatctgtgatrctgaaatgcaagattggccctggttcatgattaagtgagcatttcctggtgggaactgagtgccctgtgctctgatgctggccagggcgctgcagagtcagagctgagactcctcacagagcacagtgtggtgctggtgaccatgcaggggcccctgcatcctggccgccaaatgagctcagtgtcatccttctgttgatcttatctggggaggagggagctgtttccacttgattctgtgccatagcctgggctgcctcatgtgagtctataccacactgggactgggaggcagtgtttggctgggctgggtgtaagctgccctgttggggctttgaccactagctgctggcacttcttgacgtgagggttggggaagcgcctgtgccctgggagaccacaggagcctgcccactcacccgtcctgtctttggaggcactgtgaaccggagggcagagggagcggctccacagcactggggcctgccacttgtggggtgttgtcaggttggcaagcagccctgcccctgacaagggcgaggctgctcctttggttgtgtgacttggaagcagagctcagagtcaaagggggcacaaccccatgaggctacatggctcctcacagctcagaggactcagaggctcatggcgaggaagtccccacccctccatccagggctgctcaggatggagacatggaagacccttacctggctgccaccacgattgttttctgagccgcrtagatggtgaaacagtgtggawcagaccactcgttatcactttcttccacctgtgggtgggagaaacggtccaagtcttgtggccaagaaggaactgacagcctaagcctgagcaggacacaaggtgactgctggcaatgctaggtggggcttggaagcccagtgctgtccaagtgcacacagactctacamgaggccaaggaggacactggtatccctgcgccatggcagctgcaccccagggggtgagccatgggccagagggcacccaaatactcaccggggggtccagcactattagctgaaaatcaagcaaaggaaaaaatgttgagcattttgattatccaaaagggarttggacaattcatttatgaaccaaagaccaaaacctaacagagctagattcaaagaaaacccactgtggattaattttaattttaagtagttagatgaaataattgcaaaataaaatattaccaaatctaatctaaaagcatgtaacaaggaattgtcccaygatcaagtaaggttgtttggggaatgcaaggatcgttcggcattagaaagctgattgataacattcatcctatcagaagtcaaagagaaaaagggaaatcmattctctacatgctgaaaatgcctttgccaaaatccaaggtgttatttctgataatacctcttagaaacagaaggaaactgtgttaacrtgataaagatgatcttttcaagccaagagccatcatccttcccttaacagtcaggaacgagggccagttctctgtccccaggaccagccagttaccaacaactccacagaatggacagcttccctgtgcagagsctgatacaccaaccaagcctctcactggacatcaaaaatctgaatcaacataagcaagggcaggcaaaacatygtccagatgttagtcttcccgtaagttaacacaaaaatttaatgcaatttcaactgaaatctccatggtgtttttgtaaggaatttgtccaatgacttagaagattacttggaagaattaaatgcttgagaatagcaaagaatcttttttaaaaggaggcagaataagggatggaatgtgttcaccaaacagtgactatctcatatgacaccactaatgagagagagtggactgatgctggacagacaggaatggagcagaatgcccagaaagaactcgagtgcaaagacacaggcttccatttgataaagtctgagatcagtgagaaaatgaaggattcaacaaataatggggagaaatgttacatctcaatctaatatctatcaaaacaaattctaggccaggcacggtggctcacacctgtaatcccagcactttgggaggccgaggcgggcggatcacaaggtcaggagatcgagaccatcctggctaacacggtgaaaccccgtctctactaaaaatacaaaaaattagccacctgtagtcccagctacttgggaggctgaggcaggagaatggtgtgaacccaggaggcggagtttgcagtgagccgagatcgtgcctgggcactccagcctgggacacagagcaagactccatctaaaaaaaaaaaaaaaaaaaccaaaaaagtaaaaaaacaaattctagggagattaattaaatgagaaaactgaaaccattaaaaggtgccaatataatattggcatggggaagaacttcctgagcccatactaaggatagaaaccctcaaggaaaagacagccagagctgaccctgataggccctgatttttcaactttatgatggtgtgaaagtgataagcattcagtagaaacggaacttcaagtgcccatacgaccattctgtttttcacttccagtttggtattcaacaaattatgtgagatattcaacactttgttataaaataggcttcatattagatgattttgcccaactgtaagctaatgtatgttctgagcacatttagagtaggctaggctggctcacgcctgtaatcccagcactttgggaggccgaggcgggtggatcacgaggtcaggagatcgagaccatcctgcctaacacggtgaaaccccgtctctactaaaaaatacaaaaaattagccaggcgtggtggcgggcgcctgtagtcccagctactcaggaagctgaggtaggagaatggcgtgaacccgggaggtggagcttgcagagagccaagatggcaccactgcactccagcctgggcgacagagcgattccatnnnnnnnnnnnnnnnnnnnnnnnnnnnnnnnnnnnnnnnnnnnnnnnnnnnnnnnnnnnnnnnnnnnnnnnnnnnnnnnnnnnnnnnnnnnnnnnnnnnnnnnnnnnnnnnnnnnnnnnnnnnnnnnnnnnnnnnnnnnnnnnnnnnnnnnnnnnnnnnnnnnnnnnnnnnnnnnnnnnnnntgcagtggtgtgatctcggctcagtgcaacctccgcctcccaggttcaagtgattcttgtgcttagcctcccgagtagttgggactacaggtgcccaccaccacgcctggctaatttttgtatttttagtagagacagggtttcgccctgttggccaggctggtcttaaactcctgaccttaggtgattcacccacctcagcctcccaaagtgctgggattacagacgtgagccaccgtgccctgttaaatgcatttttgactatactattttcctcttacaatgggtttatcagggcatagccccatcataagttgaggagtgtctgtttcaattcacaccttcaacaagcatttgctgggttccctatatgtgccagatgccattctagagtaagagaaacagaacccatcaagatggagtttaaattctacaaggtaaaactaaattgtaggcaaagtaaaaagcagttactgagaaaataatttgtgacttaatagtgttggtgagcattatcatataaacatttcactaatgtgtacaaaaaactcacagaccaatggagaccagagtgaccagcacgctgagtgattcctgagaggaaaagcatggaatgccaggacacrggccaggctggcctcaccgayagtccgcagggatgcaaagtgaaatgatggggctgctcgatggggctgcttaccttacccacttgggaagagtaagagagacaggtgcctagcactttccatggtggagggaaagatgcatgtttagacctagctcctgcaggtgggaaggtcagctggcgcaggtgctccaacagcaatttagcaggagtgcccaaggccgtaaacacctttgctcagacaaatctacattttggaattgatctgaaggacataattaaggatgtgcagaaagacagagatccaacaatgttacagtcctcaacaaccagccacagccaagcgtccagtgacaggtgactagttaagtgaactggggctgccatgaaaggaaaggaaaaccagtgtcctgacaaaacagcccgtgggtgatggcaaccatgcagcagatgcctgcagccatcactgctgagtgggtacgatgatagagttctttttcttgtttcttttctctgtgttttttttttttttttttttttttttgagacgaggtctcactctgtcactggggctggagtgcagtggtacgatcacggctcactacagccttgacctcctgggcttaagtgattctcccatctcagcctcccaagtagctgggactacaggcacacaccacttttgctcagctaattaaaaaaaaaaaaaaaaaaaaaagatttttggagatttggcttcgccatgttccccaggcaggtctcaaactctcagcttcaagcgatcctaccatcttgacctcctaaagtgctggcattacaggcgtgagccacagcamctggccagtgatgagtgatttctgtcttatactttcaattatttttttctataataaaggtgtaatttttaaaagtatactttaaaacaaatggggtctgcttccggtggtggcagatgagctaattcaaactgacctcttcttgctgagggcctgagaagtggaattaaattttacaaacacctgcctgagggttttggcgctcattgtcaggaggaggcagtgcagagggataagacccttgaagaaagaacagggaaagaggaccccagggagggaggaccccactgggggaggaaggactccagggagggaggaccccagggagagaggatctcagggaaggaggaccctactgggggagggccctgggggaggaagaccatggggagggaaaatcccagggagggaggaccacagggagcaaaggaggaccccaggaagggaagatcctagggaaggaggaccccagggagggagatcccaggaagggaagatcacagggagtgagggaggacctcagggagggaggactccagggagggaatatcccagggagagaggactacagggagcaagggaggactccaggaagggaagatcctagggaaggaggaccccagggagggaagatcccaggaaggggagatcacagggagtgagggaggacctcagggagggagggagaagccgatggagggaagatcccagggagggagggaggactctaggaagggaagatcctaggaaaggaggatcccagggagggaggaccacagggagggaagatgccagagagggagggaagatcctaggaagggaagatcccagggaatgagggaagatcccaggaagggaagatcccagggagggagggaggactctagggagggaagatcctaggaaaggaggatcccagggagggaggactacagggaggaaagacaccagagagggaagaccacagggagtgaggaaggaccttggggagggagggaggaccccagggagggaagattacaagaagggaggatctcaaggagagaagatcactgacagggaggaccacaaggagggagtgaggaccactgtagcactgtagtcaaggcaaataagccaagagggatagggcagagctggggattagagcccctgtccttggcgccctggcaggcccatggggagagacagtcactgtgacgtggtgtcctggacgaatggcacatccttatggcaagtcctggacttggctacctgtctgtaccgttctaggcctagtgcagggacacgctcagggcaagtggacatagcctctagagctgcatgaaagtctccccatgacctgagaacagtatttctattgaacacaaaaagcactaaccacaaaggacaaagttgatgaactggatcatgctaaaatgaggaatttctcttcccatcccaggcatgtgcctacatgggacagagggctggcrtggatgtcacacaggtggcacagcctgaggaagatgctgctgcagaggctgactctaagcttgcggggagcaggccttgtcctgccaggtgctgacagagaccacaggctgagtccaggtttccctagaagggaaccatggactagagacagggcagtttgagcatcaataacaacaatgaccatgagggtcagaawcaaccaacaagaaatgcccagcaggtgctgctcccagtgcggccaaatactcagcaggtgctgctctcagtgttgctgggtaaggattcgcctctgcaggagagaggtaggtggggcccagcccagcaccacgtggaaatcccaggcagggtgcaagaccactcaccagcatgccttggaggggaaggaggccccggatccggaagtggctggtccctgcaactcctttgcttgtgtacagcaacatatctgagaactgagaagcagcaagctttacatccatgaacttcacaaacaagtgtcttaatagtcagaccaacttggactctggctgctcatcatgtggacatcagatctgtgcagcttgctggagatttttggcagaaaggggacttttattcattcatttggtcgtttttgaccagaggcaggaaagggccacaggaaccagtgcatctgctgggtcagctcccagctagcttggctgagaagctggaggcagtaaggaattctggctggtgctgactcagttacctcctcatccacatgtttcaggctggaacccactaactggtaggaacaaggacatgctgggaggggcttctgagccaacagtgaaactgtcccgactggccattgggccatcagtagcaccttcttgcagccacatgtatgtggactttacaatcttttggcttctgtttgtcccatagtcaggtgctcagaacctggaatgaagaaggaggctggccctggggtgggtggggaagctgttttctgcttcttcccactctgtgaccctcccctggccctgtctgactccaacgctacccacctggaccaaagcctccaagtgctaaactacccagaggccaatgggctgccgctgcaggcgatgtccctaacagaactgctgcccatccccctcggggggaagcacagcttgagtggggagagaacctaccagaaaaaacatcctctgctgcaggcccttcttggtgagcttgtgaaggcagccctcacggatgaactcctgaaagacagagacagagtcccctttcagcgggctgagggcagctggcggatgcactagccgggctgagggtcaggaatagccttgtggccgcttgtgctcctctggctcctcccaatgagggtcctctagtggagcctcccaatggggctcctctaccctcagcagtgcccttggtcaccaggtcctgtcttggtgccaacaaattcagtcctcaaaccatctactgagcacctgctctgggctaggagccctggagccctgatacaaccaagaggtagagcccggagtattgttcttgctgaggagaagcttctggaaggttcagccacaaagatgtcatctgagatcagctttgaaaacattggacaggagcaggttcgagaatgggaggaggaaaggagggttctcctaagtattcaaattagcaccaggagcaggttcgagaatgggaggaggaaaggagggttctcctgagtattcaaattagcaccaagagcaggttcgagaatgggaggaggaaaggagggttctcctaagtattcaaattagcaccacctcgtccaccacagggcgttagataagaaaaaagaatcctgccagtatcagacacctgcgcagatagggtaagcgagagtcctgggagcccctcagattcctaacctggactgctctggagcccttccaccatctgttcctttcagacaaacaggaggagcagcaggtgtccggagaatgtgctaggggcctcctagtatgagcagtcccaacatactgcgtgaaggcagaaggaggagcacactacacagataatcctcacagaaacgcaggatgaaaaaccagcccaaacagaaacgtccaccccacacaatgaagaaggtggtcatatggatgcatttgcgttaactggatggggccggtaactaagcttgtggctctcactccacatctgcctcctagccctactctgagaggccacaggggcgtgacagggagccctggagaccgcacgccgaggtccctgtgagctgctggcaattgcttggccctgggagtggccgttccttccagccacaggtagcagcatcaccctcagagaccccagcactggctaagcagcagccccctctccagagctccctcacaggatgtgcgtcccagacccacggggcgccttctccaccatgcactggccccgctgccagctgtgaggctcagcaccgtgggcctttgaccaagctgtcaaatttgttccccagccctagggtagtaactgtggctcacagttctgccacctccctgacacttcacagttctttttaccctttggcacctcatcaactttatacctggttaacaatccttgctattacatcctctgctcaaataactggcatggtttctgtctgttgactgacacacatatttaactcaggaagacaagaaattctgggctatccagacatgactttagagattttgactaataataacaaattattatttgaatttgcacagcatctacttcatgcaaggcccagggctgagcagctgacatagattccctgttcatcctcaagacctcctgcctcagagagggggcgcagcctgcccaggccacatgggaagtgtggagagcctgagtttgatgcatggctcaagagcctacacctttgcctatgtagctactctcaactgtcttttcattgacagttccctgggccaccatctataagacccagtgacagttccctgggccaccatctataagaccctgcacagaggttactaggagaaataacactatgtaacatgagccctacttccaggagttcccagccagcagcaacagctcaaagctatgcagccaaggagagaaatgaaagagtggtggtcctagcacctgatcaaagcccagactcccaaagtggggaaggtttcctgtatattacaggctaattcatttctccaagcttgcagttccacattttcaataccttcttctaacaaggctaacacagaacatgattcatacacatgcttcaatgaacatgtgtgtgcagagacaggaaacatctccatgtaatttttaaaacaattttttatgttgagagtattgagttcaaagcaaaaagtactagtgacagaaagtaactggcccaatggacatatagaccatgggatagaatcaagagtccagaaataaatccatatgtttacagtccatttatttttttgtttttgttttcactctgttgcctaggctggagtgcagtggtacgatcacggttcactctagccttgacctcctgggctcaagtgatccacttgcctcagcctcctgggtagctgggaccacaggtgtgtgccaccatgccaggaatttttttttttttttttttttttttggtagagacaaggtatcagtatgttgcccaggctagtctcaatctcctggcctcaagtgatccttctgccgtggcctcccaaagtgctgggactataggcttgagccactatgcccagcccccattgaacttctacaagggttacatggcagacagttcaatcaatgctgccgggaaaactggacctccacatgcaaaagaatgaagttggactcctaccttccactatacacaaaaactaactcaaaatggatcaaagatttaaatggaagaggtaaaacataaaactattagaagaaaagaaacagaagggtaaatcttcataccctgggttaggctttctttctttcttcctttcttttttttcataaatacacagttttgtttgctattttcaggggaaacttaggcattcaactataagctgataaaataccatacctaaaaaagtataaaagtataaatatccccttagaataaattttagtgaattgtcttaatatctttaaatttaaaaaaaaaacacaacacaagcctatctattgtatcaaggtcaaaaatcaaacaatgctaaggggccagcagctccccagagagtacaccctgagggcccacagtggctgccttcctccagagctctgctggggaggacaggtcatcccatggctaagtctgccctctagaaaggcttttataaattgtctaagccaaacatttaacagcatacaagagaccttacaaagaggaggtggtaagtcctaatgctggagaacttggttaatcaggttattggcaaagaagaagatgaggcctaggcaagaagtctccagaagcactggaaaccagacagtgtcagagcctctgacctgcacatgggcagctggtggtcagtctgcacagtgccccttgggaagctggagttccagaaacaaagagcttggagcatgccctgcaccccaggtccccagactctgacaggtccctacaaccagctgagaaaggtctgttttcaaagcatgtgggcagtggtttctaaaagaatcctatcagctcccatgtcatgttgggtggagcccaggaaggtcgactgaagtcccaaacatcccagaaaggctgcacagttatacaaagaaaatgagagagtggtgagagaaaggcatttgtgatgctccataaacatctcgaattttcactgtgatccagaccttcagctccagaagccagcagacaggcttccagcccaacctctatgccaggagcgacatggcactgacaggcaccagctcccccgtgagcccacagagtgggggacaaggcaacactgctacctcacgctaacgggttgaacagatcagtctgaatgcagcaatccttgtgggcacttccagagtataagcactggggagtctatccacactgaaaaggggtacaaagttctctcgcctggaaaatacaaattgaaaagccttgactgtcccaggctgagtcaggcaggatcatagcctgtgtcggaaagaggcctggccttgaaacggcactcagaagtagtgatgatgcagaagccacctttgtcaggagctctgtgaggctgatagcaaccagcgatcccacctgggaggcagagcagactcctgactgagcctaaggcctggcagccagaccagaggccacggcgtgctggatgccgatgaggccgtggccgcttcctgccagtgaagcgcaggctgcttttacagactatgtgtagtaccaagaactctgtcctttacatgatcttcggggattgagtgggctgactgggagcatctgcctcagtctctggcccccctcaagagatagtacccacctggccggaatgctcctccccttggggacacctggccttggacagctggacctgtctctcaccacccacctcagaagcacaaaaggattcacacccagatctctagaaaaatgatcaaaagcaggttccttctcgcagccaagcttcctggacatggtagttcattgcatcttgggaaagagtaaatcattttttcagctgtcaatactgtgtccctcacatccttgaaccttgttcttgcaaaatcttggccttctttctgggttcactggccatactgtatggggtgttgtgaagtttcttggacaccacatagaggaacttggcctgatcttcattcccatagttgtaagaagagccattgctgaccagttgttcaaacttccagctgtcggacatggtggacaccacctgtgtgagttcctcctcctgacactgaagcacgtggtacacatgcttcatgggcacctgtgatgttttgctctcttgttctctaattttgtcctttacaagttttattaatgaagtgatactgtaaaattctgctttttccaacactccttcctccacaaggtctttgttaatcaccagcttgccacgtctcaggtagttcaacacaggcccaaaataggtggggtctctgtccattaaataggcaacagtttcatccttgtcggggttagcctgatacaaggagtacaggaagtatttcaggtcctggcacagcatctgctgggtggtgagaaagtaggtgccaccaatgttgagccagagccatttggacaagctaccgggtgc

SEQ ID NO: 8919 - DNA, 41309 bp, Homo sapiens
cacccgactattttttttttgtatttttatttttatttaatttttatttatttatattttttaattttttttttgagacggagtctcgctctgtcacccaggctggagtgcaatggcacaatctcagctcgctgcaagctctgcctcctgggttcatgccattctcctgcctcagcctcccgagtagctgggaccactggtgaccaccaccacgcctggctaattttttgtatttttagtagagatggggtttcaccatgttagccaggatggtctcaatctcctgacctcgtgatctgcccgcctcggcctcccaaagtgctgggattacaggcatgagccaccgtgcccagccgttttatttatttatttttgagacggagttttgctctcattgcccaggctggagtgcaatggtgcgatcttggctcaccacaacctccatctcctgggttcaagcaattctcctgcctcagcctcctgagtagctgggattacaggcatgtgccaccatgcccggctaattttgtatttttagtagagacggggtttctccacgttggtcaggctggtctcgaactcccaacctcaggtgatctgcctgccttggcctcccaaagtgctgggattacaggattacaggcatgagccactgcggctgaccttttttttttttttttttttttttgtatttttagtagagatggggtttcactatgttgccaggttggtcttgaactcctgacctcatgatctgctagcctcggcctcccaaagtgctgggattacaggcgtaagccaccacacccagcctgtaatttcttttacaattaggtaagtagcctgtagagtgatactttgatggcatttcccagcaatctttcatctaaaggttttgaagtccattgatagtccttgtctgagtcaattatttcattaaggtttgcatcatggttattgtctaattctatattttattttatacttattagctggcatcctatagtaaagaagagtttttcctcatcaactgggtataaaccacattctttattaaaaaaaaaaagaaaaaaaaagcagggtaggttgggagcagtggcccatgcctgtactcccagcgctttgggaggttgaggtgggagcatcacttgagcccaggagttcaagaccagcctgggcaacatagcaagaccccatctctaaaaaaacaaaaaagcaagcaaaaacacttagccaggtatggtggcaggcacctgtagtcccagcttctgacgaggcacgaggatcacttgagcccaggaggtcaagactgcagtgagccatgtttgtgccactgcactccagcctggatgacagagcaagactctgtcttaaaaacaaaaacaaatgaaacaaaaaacaaacagggtaaatgctatctccctttaataactaattttcagagtatcaaattggtgtaatagacactaccaatgatggaaaaatagtttccctcttctcattctctcttctctgtactagagagtagacttttatttattcagtatttgcaatcaattgtattcattttctttttgacgctaaaattgccctaaatttgccccctgggagatccttcaagctggctcccatgtctctaaaatttatttttgagagactgaaaatacaaatggtaaatggccagaatatacataaaaacagaattctgacccattacctacaacaactagcccagtaaaccaaccacttatttaccataagtgtactctcagcctgaaagccaaacctgctatcaaccagacttgtaggaagtcagactgctatctctggtagcaatccaggaagctaaataataacttctatgacaatcagctcaaaatggccaggacttgattaaaacttgacagcttccctactttttgtcctcacttctagcttatgcccatccagagaaagccaaatatgctcctttaaccaagaccataggatgccaacttgtagttagcttccagcttccccatgccaacagcttccaatcaggcatacctgtgaaacctttccttttgtccactgtaaagctttcccactcctctgcatgcctttgaacctctgctaaaacataagggatggtggctgactcccttgctacagcaagttctcaatcgactttgcttttctcatttggtttgcaataaaatgcattctttacagtgacacaatttgatgaattttgacaaacgtatacattcccactaaccatgacacagaacatttccatcacccccaaaagttctcccattttcctttccagtcaattccttctctcttcccctcctaaccaaccactgatctgctatctaccactatggattagtgttgtttgttctcctaactacagttggcatagcctcattggtctaagcacttcctctgcattcaggcacaacgaaatacctggctcatcttgtacctttcccgtcccagagctggaatcagccagttctccaaaggagctctggatctttttagtgggaaatggaatttagaaaccaagatctcagtgtcagatgtgctcactgttactgtagggtgcccatgcctatacatcctggttcagccaggactgttccagttttaatctgaaagtccagcatccagagaaaacccctctgtttgtggcaaactagaacaactggtcaccctagtgcttctaggccctttcagtccacagaactaggacttttttttgcagttgaaacttttttttctttttgatagggtctgttgcccaagctgtagtgcactggtgagatcacagctcattgtaactttaaactcctgggctcatttgggcctctcgcctcagcctcccaagtagctaggactataggcacaggccaccacccctggctattttattattttgtattttgtagagacaagatctcactgtgttgcccaggctggtcttgaactcctaagccactttggcttcccaaagcactgggattacaggtgtgtgccactgcacccagccctccagtttaaactcaatactacagactttttttttctgaacttcttaaaattctttatattagtttccacccccacccccggatgaatgaacgtcttaaaaattgttttaaattttttaaaaaatggagacagggtcttgctatgttgcccaggctggtctcaaactcctggactctagtgatcctcccgctttggcctatcaaagtgctgggattacaggcatcagccacccggcccttttctgaacttctttgatcttgtgtttgtatctcattctctcatacactgcacatctttgtatatagtaacattaaaatacttatgttatcctaccatatacagtacagagttttaaaaccacagtaacaatgttaccattaatcataaatcagtgaagctgaaagctcctgtgcacttttttcatccttagaatacacagttgacccttgaacaacactggtttggactgccagggtccacctatatgtggatttttttcaccccaacacagatgaaaaatacagtggggcgagggacggtggctcacacctataatcccagcattttgggaggctaggtgggaggatcacttgagcccaggagttcaagaccagcctaggcaacacagctctctactgaaaatagaaaaaaattagctagatgtgctggcacatgcctgtggtcccagctactcgggaggctgagatgggaggattgcttgagcccaggaagtcaaggctgtagtgagccatgatcgtaccactgcactccagcctggacgacagagtcagaccctgttctcaaaaaagaaaaaaaaaaagaaaagcaagagaagggaaggaagggaggggggaagagagggagggagggaagaagggagggaagaagagagggagagaaagaaaaaaagaaaagaaaaagaaaggaaagggaaggaaggaagaaaacaaaacagaagtacagtgggatgcaaaacacacctacacaaagaaccaactttccctatgctcagctccgggactttagtatgcagatttctgtatatgctcgcagaaggtcctaaatccaatctcctgcatataaggaaagactacactatcacaacacagatacactactagagtactgtgttcaaaagctcggaggggccagtggtggtggttcattcctgtaatcccagcactttgggaggccaacctgcaggcggatcacctgaggtcaggagttccagaccagcctggccaacatggtgaaatcccatctctattaaaaatacaaaaatcagcaggggatggtggcgcatgcctgtaatcccagctattcaggaggctgagctgagagaatcgcttgaacccaggagacagaggttgcagtgagctgagattgcaccactgcactccagcctgggcaacacagtgagactgtctcaaaaaaaaaaaaaaaaacccaaagaataattattttttctgtgtatcttagttatattagttaacagttaagttcatttgtttcaatttgctttcaaccttaggatttactttgtttccttttttatttacttttttggctatgtaaaactaaaagttcaaagacagagaaatcttgtctccaccccccactctttataggcaactaaaaatgttaagtttccaggatatccttccaattcctccccgaaaataagcatatacacataaatattcatattaaatataaatatatatttttatgtatttaagtaaatacataaaagcatatatgcttatttttgcttttgaatacagtgaatacttactacacttaaatatttaagtgaatacttaatacaacctgagactcattccaaagcaacacacgattatttcctgaatctttttaatggttgcattgtgttctactgtatggatgcaccattcccaatcagttccctattaacggatatttgggttatccctaacttttgctatgacaaatagcactgcaataaccttgtatacctattgtttccatgtgtggagctgcaccttcagaataaggttagggttagaagtataactgcaaggtataagaataaacacaagtaattttgtactccgtggaacttgaaccatttttccactcccaccaggaaaggtaatttcaacgtgtatttccattgtaagtgaggtggagcgactttctatgtttaaagaccattacggtattttttctgagaatcatctgttcatgtccttccccattttctcctttggcttttgcactttttgttttcaatttttgagagctcttgtgatacgagttgcaaagattttctccagaccgatctgattcactggaaatatactacgaccatctggaatgtactttaatcttatcctaataaatcaccttactacaagacactcctttggggatgaacaggtttgataaagccggctaaggacagaccaatcaaaagaattacgtgctcttctagtaagtgtttagagactgtttcacgttctccaggtaacaccgccattactcggcggtccagatggcagtcttacttcagggagtctactccacttgcaggacctctttgattgagttcactaaacctcacagggccgccttccccgtgttccagttagcaaggggccctcaacgccgcggacacagcgcaacctccgacgccagagaacaatagctcctcgatgcgtctccagagatgtcaaggaggaacgaacccagcggccaggagactgcgcctcacgactgatgagagggaaggcatcggtttctaagttctcaaaacttacaggtgagcttctgctaagagtaaacgcccgcggctcgccgcccacggcctctctcttgaggtggcacctggtcctccgacacgcggaagcatcacggatgagcgtcacgaacacagagcggccaatcacgcgccgccttcgcccagatccctccgcacgaggcagccccgcagccgcaggtggccccggcgagtacttccaccttcccttcccgtgatgccctggggctgacctccgacctcgctggcccgcccctcccctcggccgcttcccttactgagcttgctgagctccggggcccgcggagctcgcgccaggctcctgggaaaggacggggagtgttaccggggagcagctgctccattgtgcctcgaggccccgatcgggctaggccgacggcctccctcccttcacctttcctctcctggcggggttcggcggcgggcgagtgactgcggccacgcctgaaaggcgactctcctgtgagtgggccagaaggcgaacatggcggagcggggaggctggcgggaggcgggaggcgggaggcgggaggcagtggcgctggcctgcggcgcgttcggaccggctgtggggcggggcagggcggagcggagccgtgcggcggggcggggccgggcggcggggcctggtttcctccctcagcgccattttgtggcagcgagacccacaaataaaggggagcgcaggggttgcggcgggactaggagcgcggcggggccggcggcagagctgtccggctgcgcggtggcccggggggcccgggcggcagggcaagcagcgcggcctcggcctatgcgaccggtggcgccggcgcggcttctgcctggagaggtaggygcgggccggctggcgggagcggacgcgggggacctccggggcctgagggctgatgcgcagccgcccccggcgggtaaggggcgggcagggcccgaaaggccacacgggcctggtgcggcaccggtctctcgtgagccgctctaccttcccgcctgcggggaacacttccgccgcttcgaggccattttatctcygtcctccgtccccaaggcccgggttgagaggggtgctctggcggccggagagaccggccactcasggaggccggaggatgccctccccgggctgagcggcggcgctcgttttttcctcgcctcggggtcgcccccttcacctcccttgggcctctcctgaggacctggcggcactaacgagttcagcaaggaaaaaaagaaacattcgttccctacatttcatgtcacgcagtaggatgttactacgttctcttgtagacttccatttttaaatgagtataagcattctgaggaaagaaactgaattattgcagatttttgtgaaatccaagtcttaccttggatccctgtgagacagttactagatttttttttcaccgtttttcataagtctgtgtacacgtaatggaaaagcccgagttcttgttttgataagaaagtcacttggttgtttgatcccaaaggattagcttaacattatcaaggactagcataactgtgattatgtaaaaaaaacaaaacaaaacaaaaaaactattatttagtctggtagggaaatacttctatgagtatgttacaattggaagttgtatttgtgcctattttatctagttttagttaattccattgcttcggaagataagtggacgtcatagatccatcgcaagttctcgttttttggattttaaaattttgaccattaagttttctacgatagataaacatgttgtggacatttaaaaccgtaatttaaaactatgagcgaaaaatcttttcaagatggatacattttaattcattcaagtagcatctgattagccaagtcggggaaagattgcagtccgcaaagctggcttgtgataaggttgaggttacattttaagggtttgggtaggtgtgtttcttacagtgcttttatatgttaaggtatcttaagcagacacatggtttaaaagttcagtatttttagtactttttcattggcagaatttggacaagctaccagaattgctaactcctaaaggataaaagtaataataatagtgtgtcccaggcactgcttatttttacatggctcttttatgtctagcttttccaattcaacgttgagtcatgtttgctgaaaatatttttgtgtattgtttgtcagaaataagctggtagagatgaaacacaatgtgtaaaaagccctgtgatgtggagatgagcattgtcacaatttgtacagtacattaaagcgttcaaggtctcttatggtcttgtatgtagtattgaatccccttgaatatattgtttagcagttttgatcattatgtatttgcttcttgctcctcaaaattgtaygttagttagtaggtccttcagcaaaagaagactgaagatagtattttggttttattcttgtttttaatttttttagttgtctccaacttttctgcctctaaatattttgcttcttgtagttactaagcttaacacagaaaaacttttcagtatctccacaatagtaaacttcattgtgtattgtgtataacaagatgttccatctgactaaaatatattgctgtaaatattttctgcctttgaagatgtagttaatagaatttaatcttttctaagtgcacattgaagttgccttttatgttcatattatgttcatattttatttgaaaaatckatagcatttttattgtgctgaaagcattaatatttgcagcactttgtgagacaggcaaaattatctttttgctgacttggaaactgcaagagttaaaagacttgcttggaatcacacatggcagatagaggataaggaaaagatggcctttcagttcctcatcagtaccttgctactacagtgtctgcagattggtgtcttacattcagctatgatttgttygccaaggtaccgtgtcttcttactgaagttgttttggctggcgcttgcctccgttcagagggaactgagttacctaactttatgatgctaagagccaggaaggtactgggatctgggatgctaggcacctaaccagtctagactgaactccatactaagctgtttttctgtgttaaggcatcaagagtagatggtggtcctgattttctgagatatattatctctgaattatctacataaataactgaaacttttatgtaattttaaaactagtcaatcatgttaccacccttttgaggggcaccaaatttgagacccttacccccaatttattaattaatagctgttttaatcacctaatagctgatcacctaatgactaacagtcattttcatcctggaaaatgggaactaactttgactttgaaaagtgctgttattaaatgtgtgattcataagaactgaacatattttctttattattttccttcaggattcaactttaattgactccaaatgatgttatggtcattctgtttttctgatacgagaatagattgttctgagaacctagaatattcattgcctttatgaatctagaattgactttaaatttaggttattgtgtttgtcatttgcgctaaaaaaaaaattgccctggggaataccaaacttctcggtacattcgtgtggtgtgaaagtcaaaattgccaattaggttctattttgaccaaatagttgaatgttgtagacagttgtaaattttgaacctgttctaatttgccttttgccagatggcgcatttaactttgtggcatatcatcgactttcaaggaaagatttacttttcatcagattaaagttgaggaaggattttctttctaaatactgaggctctgaatttcccaagttggataccccagacagctagagtgatcttaaaagtgactctgagagttgacttaggaagtgtagacatttatccaaaatctgtatttactcctgacttacattacaaatacagagttttatttttaaagaaaatttcaataaaaagcaccatttaattaaaatctactcaccatcaaactttttaaaaagaacataagccaatgtcaggagttggagaccagcctggccaacatagtgaaacgctgtctctactagaaaaaaaaaagaaatacaaaaattagctgggcatggtggtgcgtgcctgtagttccagctccttgggaggctgaggcagtagaatcgcttgaacccgggaggcggaggttgcagtgagcccagatcatgcccgtgcactccagcctgggcaacagagagagactacgtctcaaaaaaaagaaaaaaagaaaagaaatttcaataattgcaggctgggcatggtggctcacaactgtagtcccagcacttttggaggcccaagcaggaggattcctgagcccaggagttcaagaccagcctgggcaacatagcaagacctcatctctactaccaagaaaaaaaaaacaaattagctgggcgtggtggttcatgcctgtgatcccagctacaaaggaggctgaggcaagaggatcagttgagcccaagagatggaggctgcagtgagctgtgatcgagtcactgcactccagcctgggcgacagagtgagactctgtctcaaaaaaagagaggaaaaaaagaaaatttaagtaacttctgtttagaatcctaaatattggagatgccaaagaattctgcagtaagtgttagaaacagtcgggaggacagtatgattattatcctcaacctgtggattatctcttcaggtttttcaagaaacactgagtctgtgtttttgatggggagaagaaactattaattaaatgcccattttgtgccagttaccatgctaaagattaatgtctgtcttcagaaatagcacagtatttgggcccyggttgtggtaattctttttgagatggggaaactgaggtgcagagattttgctacttttgtatttgcaaagttgacaacctgtttcagaataccaaggttatcagaactttcttcatgtgtttctcagtccttttaatgccctttaaaaacagattatcatctcattttttgctaagcttactgttaattttattttagtggaataagaatatggatacctgtctttaagaagagagtaagcaagtaaacctagggaaagtatcaggttgtagaaccacataccgatgatccttgccaaaatcctggcataggaatttgaaccctggtgtatgaaaagtctgccctttgcatactcaggtttcgcatcccgtgaatgctgtatttttgatycgagtactgtattttttaatctgagtttgattgaaaaaaatccaaatataaatggacccatgcagctaaaacctgggttggtcaaggaccaactataataacttttataagctggaatttatattgaacagcatccatgatactttagtattacaactaaagttgtacatactgagtaggtaggatgccttagtaactagataaaasgtataccacctagccatagtgataaatatagctgttttcaaactgtcattcacagatctctaccacagtacctgttacrtgaagttcctggttggttctcaaaattttatgttcgtatatacatagatacagatactgatataccggttaaatatgtacagctcaaatagctaaaattgtctttaagattttttaaattaaaaatattattggccgggygcagtagcttacacctgtaatcccaacactttgggaggccaaagcaggtggattacctgaggtgaggagttcgagaccagcctggtcaacatggtgaaactaaaaatacaaaaattagccgggcgtggtggcaggcacctgtaatctcagctactctggaggctgaggcaggagaatcgcttgaatccaggcggtggaggttgcagtgagccgagatcgcgccattgcactccagcctgggcaacagagaccgggcgcagggggagggggagtgtctctgtctgcttctttctctctctctctctctctctctgtatatatatatagtgtgtgtgtgtgtgtgtgtgtgtgtgtgtgtaaaattgatatttagctccagacaaatgggaaattacaaggaaatgccagatttgatatctgggttctaagactttgcagcctaatgcatgtgtcatgctaaaatagaagtagttagacatgtggagttaaatatggtgatggtttctsagatgattaaaatgactgccaccaggttaaggtagttacaaagcagctttctgtaatggcagcagagataataaactgggcaacaagggaggaaccaatttaaagaaaaagaataatatacattttatatcatagtaatatggtttatgtcttcataggacagagtgacttgctcagtgaaacagactgtatacaattagctcagaaacaaatactgaggtttttatctgtttgctgtatcccttgagaaagattaaagagggaaggcagggtgcagtggctcacgcctgtaatgccagcactttgggaggccaaggcagttggattgcttgcgcccaggagttcgagaccagcctgggcagcatggcgaaaccctgtctctaccaaaaaaaattacaaaaaattaactgggtgtggtggcacatgcctgtagtcccaggtactcgggaggctgaggtgggaggatcacttgagcctgggaggtcaagattgcagtgagccatcatcgcaccactgcactgtggtctaggtgacagagcgagactgtctcaaaaaaaaaaaaaagcccagcacgctggctcatgcctgtagtcccagcacttgggaggctgaggtgggcagatcacctgaggtcgggatttccagaccaccctgaccaacatggagaaaccccgtctctactaaaaatacaaggaagttagccgggcgtggtggcgcatgcctgtaatcccagctacttgggaggctgaggcaggagaattgcttgaacccaggaggcggaggttgcggtgagccgagatcgcgccgttgcactccaccccgggcaacaagagcgaaactccatctccaaaaaaaaagattaaacagagaaagaagcaagccagtaatctaagatcaatttatgatttttcctctaaattctgctttcttcaacacaatttacttaatctgaaaaccagggtttaataacagtatgattagaatgtttcatttataaagtggagttgagattgtacgtagtataaaacatgctgttggaagattatctccttttgaggaatctcaaaatcaagtgggagaaatcaagtagtcttggtgtgtgtgtgttttgtttgtttgttttaatgagagacagggtcttaccacattgcccgggctcggttcaaactcctaggctcaagcagctctcctgcctcagcctcccaaagtgctgggattacaagtgtgagccaccacaccagcctcaagtagttttcgagatgatgccacagcactccagcctggcaacagagtgagactccatctcaaaaaaaaaaaaaaaattcagtttaacataccaagcttttggtcaaatttctagtagtttagaatttataataagtatgggtaattaaaataaaccataaacactttaaagtaagggaagattcatgagtatactattagaaataataactagggctgggcgtgatccttccacaggtagttctagctacttgggaggctgagatgagagtatgacttgagcccaagagttcaagactagcctgggcactatggtgggtccccatctcttaagaaagaaagaataggaaaaactaaattagtataagaactaattacttaatttgtataagttatgaatatgccaaatgcaatttagatgctttttcaaaagagcactggtactcagaaccctgattcaattttttaatcctcatagaatttttatataaagattttatgtttgtcaggttagctcttcatgtcgtatacttttttttccaaccttgtattttaatgtggtgtttatgtttattacacattttttctttgtcttttttttgtgtgtggatttgtagtttaatgaataatacctgctattagcattcgttctaaaaaacagcataataaagtgttccctacttgaattcattaacctatctttgaaacagggttaagtgaattttgtataataaagaagctaattttgagatacaaaatatttggcataaaattaaatactgtaggaatatttttattaaggtgtgacatacatgtgtatgtgagtttttgttgtttgtttgtttgagatggagtctctgttgcccaggctggaatgcagtggcgcgccatctcggctcactgcaacctccgcctcccaggttcaggcgattcctgcctcagtctccctagtagctgggattacaggcgtgtgccactacgccgggctaatttttttaattttttggtagagaccgagtttcaccatgttggccagacttgtcttgaacttctgacctcaagtgatccacccaccagcctcccaaaatgctgagattacagtcgtgagccatcacgcccaaccagtgtaacatatattttaaaatatgtaataggatgggcgtggtggttcattcctgtaatcccagcactttgggaggccaaggcggacgggttgcaatgtcaggagttcgagaccagcctgaccaacacggtgaaaccccgtctctactaaaaatacaaaaattagccaggtgtggtggcacgcacctgtagtcccagctatttagggggctgaggcaggagaattgcttgaaccctggaggcggaggttgcagtgacctgagatcgcgccactgcactccatcctgggcgacagagtgagactgtgtctcaaaaaaaataaaaataaaatatataatatatctaaaaaactattgggcagtagtaaattatggctgtggtaggtactaccttactttaacaacataatgctataaaaggaaagacttaaactggtattacccttttatagtcccttagcaacatgcgtaggatrctacttgaggtcattatatttctcttcaccctttatggcgacatcaaatgatttgaatggctgatcagcttttttacgagggaatttgtaaaaactacccaataactctaatratggaagatgttaacaaaggaagatctgggtacagagtatataggaactctgtaatatctttgccacttttttgtaaatctaaaactattttaaaattgtttatttaaattctaattattcaacagtaatttagttcactaataaattgatttgaaagagtcagtattttttattcctactttcactggaagaaaataaattgaacttgttttccgcaacttttttttttaggattcaagatgaccaacgaagaacctcttcccaagaaggtatgggttttggttttgggtttttttgttttgttttgggttttttgggggcttttttaagcactttaaaaaaaaatagacttgaagggattatcgttgtttgcttatttttcatttctttgcctttataacaataatagcattggagttgtacagtgtgccagatattgtatcttatatccagtatattttttagaatattttcagattttggaaaactttagttataataatattcccatggtctactcttaatgttcattatgtgaatatttccaggtctactcttaatgttcattatgtaaatatttccaggtacatatatacaaataatgtcaaaaatggacattatgagtatattattattcttttcctagtgtaaatccctttgattgtaattaaaaactactttattaaaaaaatggttatagctaattttcaaattctacctttttctctgaagttttgttgtctagtctcaaatctccccctgttgtgcattcctaccttgagtttaattactcttacatacacacacatacacacacacagtggctgttataaaagaggtaacatygtctctaggaggaatttgtgattcaattgggaaagcttactaaacttaatatttaagtgaataatttagatattacagaagtttcctattgtggagtcagattactcattaaatgaataaaggattgtattatgctttcataatctgagaattactgtgtgctccctctggtaccctttgattttcctcccttggaacagggtcttgctctcttgcccaggttggagtgcagtggtgcaatcttggcttactgcagtctccgcctcctgggctcaagcgatcatcccacctcggcctcctgagtatctgggggctacaagtacrtgccaccacgcccagctaatttttgtatttcttgtagagatggggttttaccatgttgcccaggctggtctcgaactcccgggctcaagagatagccacctgcctctgccttccaaagtgctgggataataggcatgagctgcctctggcagcctttcaatatgttacattataatagttccctcgttccattttatggtaatactattttactggttagtattataatttgaaacatttttaaggaaaaaaatttaagtgtcttgtaagggaatactaataaagcctttattttatttttattttttattttctgagacagagtctcactctgttgcccatgctggagtgcagtggtacaatcttggctcattgtggcctcataccccagcttatgcgatcctcccacctytgccccccaaagtagctcagactacaggtgtgccactacgcctggctaatttttgtattttttggtagagatggggttttgccatgttacccaggctgatcttgaactcccgagttcaagatatactcccgcctcagtctcccaaagtgcaggaggcatgagccacaatgcccagccaaagccttaattttatactgaggtaggagaggtatctcacctttacagcctttatttggtgtagtgaatatactgtttctcaatttttgaagcatgttagcttatgcccttctttcagctttttgttttgaaataattatagattcataggaagttgcaaataaatgtacagagaggttctgtgcaactttcactgagcctgcttcattgttaacaycttgcgtgactagcagacatctctaataactgtgaaaatcagggaattgacattggtacaatccacagagcttattcacatttcacgttatactagcactgttattgggggaagtggggaagagctatatgcactattatcatgtctagctttgtgtaaccatcattaatcaagatacatatctgaactatcaccataaagcttcatcgagttattcttttatagccacatctaccccgtccctctccatgcctgacccctggcaaccactaatttatctccatttgtataattgttacttcagagtgttatataaatgtaatcatgtagtatgcatctttttgagactattttttttccttccacttagcacagtttccttaaggcttatacaaattgtttcatgtatcagtagtcctgtttctttttattgcttaaagtgttccatggtgtggctgtatgatagttcaatcatttgcctgttaaaggacatttggatagttttcagttttttagcttttacaagtaaagctgcttgcatgttttcatttctttgagatacatgtttaagagtgcaactgctgagttatatggcacattcatttttagttgtattaataaaaggaactgccwtacttcttcagataccatttttatattctcacctgcagtgtaggaaacttcagtttctctgaatcctcaccagcgtttggtgttgccactaatttttattttagccattctaatcagtgtgtggtgatacctggggttttaatgtgcattttcctaatgatgatgcccattgttaagataccaaatagtttaccttaaaaaaaaaaaacttttgtaataaaatactttttcaaaaaatcrtaatatgtactgagccgtttaaatctcacacttgggagatgtttcataggtctcattatagaactttgtgtcttcaggaagaacactaaattcatattgtaattctctttataggttcgattgagtgaaacagacttcaaagttatggcaagagatgagttaattctaaggtaaaatgttctctgttcaaaaacaaagtctttctatagaacattatattgtgactctacactgtaattgtctttgtgccagatattgtttttaatgttgttctatcctcaaataatttaatgtactttttgagcatactatgacctatttcttatattaacaccgaggaaaacgtaacactttaaagaactactaggaagctataagtttaacaaatatatggcttgttttgtgtagtttttcctttcgtgtttaacatttgaaaaagaaatgtaatcctaaaagatgcacttatatttatggaagaaatacataatttactaatgaagtgaggttactttttcttattagtgtgaccttcaccagctcatataacttcatactcttcattttctcatctgtaagttgaagaggttgggttaagttattgttaaaggtgacttccagttctgaatttctgcggttatcttgtaaatgtcttacaaaagcagattgtcaagtacaacgtataatctttttagattgtgtaagaaatcaggaagtaggatgttctgtgttttgtaatttaaatatattctttctgtattttattgctatggttagtaagtttcttgataacttagataaaaataaaataagtattttaacaggctgaaagcggaggagagaaaagatgttttgtgagataggctaacacagattttgttgtttcctagagtgtgacaatttcctactttcacctttggacagctactgtattatgaacacactttttacctttttttttttttttttttttttttttttttttgccataatctcatacataggacagtttccattgcatacctttgtctttctgcacataaaatttaaatttttgttattctaaaacacttctgtcttatgctgaagtatatacttaagatacactactactcaatgctgggtttttttttgtttgttttaatgtgcatataaattataatagaggtgaggtgctgctcaggctggtcttgaatgcctggcctgaagtgattctctcaccttggcctcccaaagtgctgggattacaggcatgggccaccatgcctggccatgattttttttttccctgtctctggcattgtatactttttttaatgccttcttacataattgctctggttagtctgtgcagtcatttttttgatttaactgtaggaggggaaaaatcagtaatcttaataaagaatcatagaaatgttttattttaagatacctttaaggtttctaaatcatatgcagtgtatttccttgaggtcagtttaacatctttccttagggaattcatgtaagacttttaggcgagttttttctctttgattcccttggagattttaaaccagctgctacttatttaactagtctgtgccttctatccttgtgatatacatgttcttgcttcagtttttatatttttctgtacttctaaaataaatcgttcttttatagcctccactgaagatctttctctatacatccccaaatatttggtaaactacgtgtcttaggttgtaagtgccgtaaaaataaagcatggccttggctgaacatcagtgtttacatagaaagtggattagtttggtattaggaaggttttttttttttcttttttctttcttttttttttttttaagacagagtctcgctctgtcaccaggctggaatgcagttgcgcgatctcggctcactgcaaccgccgcctcccggtcaagcggttctcctgcctcagcctcccaagtagctgggactacgggcatgcgccaccatgccctgctaatttttttgtattttcagtagagacgggatttcactgtgttggccaggatggtcttgatttcttgacctcatgatctgcccgcctcggcctcccaaagtgctgggattacaggcacgagcctttttgttcattatgttgtaatattaataactcatgacaagcctgtttttaagattataaaatggttttctaaagccaaattttaattaattgtacctgaagagcagcttgaaaacatggctcttaagtatgcaggatagcagacattcagggcagggtgctttccattaggaactgcctaataagactaggaaaaatctttattgctaagaggacctagcagtgtatatattcagggtagagaagtataatgaagaacaacggtccccttgtattctgatagcatatggcatttatgcaggtttctgacagttagatgtgattgttaaattacagtcttgaaaaatgttatattctccccctgtgtttacaggcagaaattgatactaccttgagaagagtcacatggtattttcccaaaagagccaagataaagaaccttcaattctacataatgaggcacatttctaatatgccttttgttctaagtggacaacatatgaaagcagcagtgggatttttttttcagcttctataatccaggattatcctgaacatcagtgatatcaaagtgaatctggggtttgatctcacccagggcatgcttggcatgttctcagcagaaaaaaccttctctatatatctctttttacctgtttcctgtaaaatgggaaggaataatgagggactattttatgatcagttaaactagatttaggctgggtgtggtgactcaggcctgtaatttcagcagtttgggaggccagggtgtgaggatcatttgagctcgggagttcaagaccagcctgggcaacrtagtgagaccccatctctacaaaaaaatgagccatgtgcctttggtcccagctatacaggaagctgaggcagggacatcgcttgagcccagaccctgtttgcgccacgctgcactccagcctgggggacagagcgagactctgtctaaaaaaaactagatttaaaatgaaaaatccagaagaatgctcagtattactaaaatctgtgagtttatagatatcttctagtttatttaataaactattttatcgtaacaactaatgtatggatttttttttattagatggaaacaatatgaagcatatgtacaagctttggagggcaagtacacagatcttaactgtaagtttgagttttagcttcctaaagactgaataatctccttttgattgttaaaatcaaaaggatagttgtttttattaaagcaaatgtaatttttctcgtgttttattataagaactgtacataggcactgtgttgggtgcaagaaaatataaagatgaatgagacacagtctcagtcattggagaagacagaggtgtaatagtcatgtaatggcatgacttagcaaaattatatgcaaggttctgaatatagatgcagtaactcagaactacttgaaacttttcttacttgtccctaaccccttctgcataggaatttgacttgaagcatgagttactagtctagaagagaaataaacagaagcaaccagtaacagatttatgacagcttaaatcaatatatataacttaataatatatacagatttttttaaatctgctgaaaataacgtttatcattttaagccattttagtctcactttttactgtttgaatcacatactatttgttgagtataaaaaccaatatatattgttttgtaacttcagaagggttaataccctgaaattctaattttgcgtgactgtgttacccatagaagtcatgaacattgtgaaagtttaaggctaggcacagtggctcacacctataatcccagcactttgggaggccaaggtgggaagatcacttgagcccaggagtttgagaccagcataggcaacatagggagaccttgtctctacaaaaaaaaaaagagtcaggaggatcactagagcccgggaggtcaaggctgctgcagtgagccctgattgtgccactggactcctgcctgggtaacagaataagatcctgcctcaagtttaaaatacaaattgtccagcagttattactattttatttatttatttgtttgtttgagacagggtctcgcactgttgcccaggctggagtgcagtggcacaatctgggcttagtgcaacctctgcctcccaggttcaagtcattgacctgcctcagcctcccaagtagctgggattacagacatgcatcaccacgactggctaattttgtatttttagtagagacggtgtttcaccgtgttggttaggctggtctgaaactcctgacctcaggtgatctacctgcctcagcctcccaaagtgctgggattacaggcgtgagcctctgtgcccagacagcatttttatattaaataggttaaaacatactaatcaggattttgtgaatactgtataacacagatgttttctgtcttctgttgggagtagatgaaactataaaaacataatttagttagtagtcatggagcactatgacaccattgtctcctaaaggagctctcgtgaccaggaagaaattcgcctgttataaaagtagttaggatggaaactaaagacttgattaattttttgaccctagttcttattgttcttgacagaggtatttagaacttgatcttaaaattgtatttataatttttttttgaatcatcagctaatgatgtaactggcctaagagagtctgaagaaaaactaaagcaacaacagcaggagtctgcacgcagggaaaacatccttgtaatgcgactagcaacyaaggamcaagagatgcaagagtgtactgtaagtatttcaagttatataaatgtctttagttgaggaattggtttttagtccacattattacatgttaattttaaacatttaatgctaaatataagagcttatcttttataggtacgtatgctttgagctttaagaatactagatgaaaaattttgataatgtctcatttagactgttttttgtggccaagaaggcaaagttttaagttttttttgaaattttcatgccttataagtattagttcatcaattccagacatttttcagatatcttggtgtctgaggatgtaatcaataaaagaacatttgctctttattgctttactttcactgattaggaaagccatctgaggactttatctctgttctcttgtcccctctgtgtatagaactgtttttcctagtgtcagcaacctctttagtgtctcctttttaattgttagaactttgatgtgtactgtgtagtatttactatgtctacgtagatctgaaatctagtgacataattgatcatccagctctggtagtttaggctcaatcttacggtgtaattatacaaaataattagaggcagctgtatccttgtttctgattttaaaatctgaatgtttcttcaattctttgtgtactctcccttcatttggtacatatagaagtcttcttatgtgttattaaagtcttctaagatagtattctggtcattggagacaccaaaaatctatgggcacagtcctgttcctgtttyttttgccaatagaatgttccttaaggttcagtcacagtccttttacttcccttacagagattgtttaaatttccacaaaagcaygtatttactcttctttcacttgttactaaatgacttcttcacattttactttgctaaaggctggcttttatcattttctttacttttttttcccactaacccccccgcccttttcttgagacagrgcctctctctcatccaggctggagtgcagtggtgtaatcacacctcacttcagcttcccgagtaactgatttcaggtgtgcgccaccaagcgcagctaatttcttaatttttstagagatgaggtcttccctatgttgcccaggctggtcttgaactgctgtactttggcaatccttactccttggcctcccaaaactgttgggattataggtgtgagccatcgcacctggcccattatcattttctctaccttcttaacacattttgtccttttgtttctatcagttttgttgtaattcttaccaccactgatacttctttctccatagttactaatgaatgttttaacaaatttccctttacacgagaaatggatcttacctttagactgctagcacttgggagatagagtgtgaatagaaggtgttgatggtaatatctcataggatcagaatgtcttgaattccatttctcttccggattcctactcttgacatcatagttgatgtgtgcacatcacaatgtttgtgctattcatgcacatctgattctccatctgtcctatatgcgctggcagttttgatcatattacgcctggtcaaggccttcggtgatacctcatcactcttgtctcctcgacctggattttaaggttatttcaactataatggaacctaaccttttccagcttttttttttttttaaaacagctgtcacctgcatacgccagctgaacaacttcctgttcttccaattataatacaagtgaggttttgcagacagggcagggcagcaggagcaaaatcacaaggaaaggtcaagattatatatggcagatgaggataaagtttcaggtgagagtgaaaaaagatgaggtcagcctggaatcttgggtattctagaagagaggggactactgaagaattcttcagcaagagatgtatgtgatggatcagatttagatttacattttaggtagatcactctgacttgagtatgaaagatagatttgagaggaacaggactttaagcaggaaaaccaattgtgaggctgttaaaatagttcagatgaaatacatgaagccactggtggtagcagacaggacagartaggtgttttggaggcacaatcaataggacttgtttagtttggatgctgttgtggaaggaatgaaaaaaatctagggaggaatcacagcttcaggtttgtcttgtttgactgagtaacgatgctactaggatagatcctacaaagatcaaattttaaaagaagagtagagtgtggtgttaggaaaacaggaaatccagcattccctcctccttccccaaaatacaaagtgattaaaacaaaggcatacataaagttctgtacaatacgaatttaaaattgttcgttagatttggcagttaagaggttgttggccaaggaagccaaaagattggatacccctgctctagaggaactgtcaagtgggaagtgagagaaactaaatttaaagagtagaaagaatgggagtgatgtactataggagtttggagggaataggttaagcgaatggttgaaaggattggccctgagaaggagggtttcttaccctcttgagtgaaaaatagtggaaaggtttgtattaggtacctgtcctttaaaacagagctgctgcatttacccttggtgtttcaaattaagctaagcttagaaaaaataaaatatacatccttaggaatctatttgtgtagatcttttgtttgtccagcatactaactcatccatttgatcttttaataataatgctttatttctttgtctacatgcagtctttgccaagtacatcagtagtcaatttagttagttttgagcgtaaggcataaattagccacgtagttactatattcttaactatatactgtattcttaactatattttattttgttggtaagtaaaatctgtcatttttgttcacctcagtggtatttctgtttttcatttagtcttttgccaatcaactcaaaatagatttaggaataaaactaactttgaaaacactttactcagtgttctcttccctagaacatggaatttattctagtctgattcacctctcttttcatgaatgaaagtgttgactattgggtctttgtaaagctaaatagtaactgagtctcagtcagtgctgtagactgttttaatcagtcctgtcagtacatggagtgcactgtaagtcatggtttattctcgctctgttatcttagcagctggcttcacattgactatgcagttgtactagatttttgctcagtgaaacaaatatattcccaaaccacttagtatatttgttccttttactaaatttatattagaaaattttaactgtaatcctayttaagccttagtatggagttagatcttgggccagatctactttgagtatgaagaaaatgatgaatttaatgctaataactatatttcatattttagaaatgtatttttagtgtgctagtaaatagcacaactgaagtcgaaattgaaggtttcatatgtaagtagaagggttctggtatggtggaaaaagctctagactgggaatcagaaggccggagaactagaattgtagtcccgctatggcactgaactaaacagttgggttatttaatctcaaaataagcagtttggattaggtgagttactttccagctttacaattctatgattcggatctattcagaaggggaaaaatatgaattatactttattttggcttaaggtcctatagagttttgcttttataaagctgtaacagcaactcttgtagctataagtactgtatattttttcctttagaaattcaaatgtgtattttaagttataatcttgcacctgatgtatttttaggggactttacatagaataatttccacaggtaaaaaattaagcaaaccaaagacttcattaactcttaggtaattaatattttaaactttgcttttttccactgggttgtcagcatttttagtaaatataatgttgattttcgtttgttttttggtaatgtttggattgtaaagtaaaatgtatgtagccactttaagtcccagatttggagatgtaatcaaatggcctcaattccwaagtgagtaaccttaaataawgttatttttttaattgacaaataagttttttacatattcaaggactactacatagtgatgtttcaatacatataatgtatagtgatcagatcggggtaattagcatattcatcaaatagtttttagtctgtactttttctagaaagttttaagatttttctagagaatttcaggatcaaagaggggaggagcttaatgaaagagttggtaaatcaagtgaatggagggagttttccccaccttcttatgtatgtttcctttgatttggtcgtaattgtttcttttgctttgcacagactcaaatccagtacctcaagcaagtccagcagcckagcgttgcccaactgagatcaacaatggtagacccagcgatcaacttgtttttcctaaaaatgaaaggtgaactggaacagactaaagacaaactggaacaagcccaaaatgaactgagtgcctggaagtttacgcctgataggtaaacaaatcatactccccagtcaagacttccctgacagtcccactacgagaaagctgtggtgggacagccaagtactcgtttccacaccaagactcagactttttgagccaaaaaaaagccacattcttacactgtccagcttgtaatggttaatgtaaaacttaccagatgaaccttgtgtttcagcttttttcttttccccttccccttgcttcagaggcctgatggcgtcggactattccgaagaagtggccacctccgaaaaattccccttctagaacatgtagacacttgagaaatgtttctgtttgaagaaaatagagggagaaacagaagtcttaagtctgtggcacactgtgtcttcagacagtttgaaggaatgaaaacctagagattttaaatyatgaattgaacatgtaaaattccagtaaaatgtaaaaacggaatatgcatcgctcttaaccttgagcatagtgacttagagacactgtgtatcagttttgccaataagactgtggacttcatgattgttgttgaacttctgggtcaaaactcaaatgaggtgaattttgcctttaaagggtttatttgctgagaaccaactttcaatagtcatgagagaatcaaataatagatgtccgtacaagtagcgcatatatttaaccatttagtttggggctctatattacttgcttgagccttaatcaatgtggttttattcaatggtttgttctttgaatggttgcaaaaactgtagatmatcttactgaggactgtacaaacatgaaggtgtggtatcaaacttcaggttgaaactgtttgaagcattataaacattcatttcacaactagattgtataaggatattagctgtgatgagactcactgcattattttttttagtgaattttatgaaatccccgttccattcaacaggcacatgtttaaaaragctttgtcgttggtgttaatgggggaatgtgttccttcattgtatttgggccttttgtattgcactcttgatattaaattaaatgtgccttgaaatagttggtttttttttttttttaagttcaaagaatattatgatgattttgttgtactctttaacattttaatttggggcggggagggcctgttgagagcagattcattttggaaatactgttgctgtgctcttcaaagtgaaggaaaaggcgctgtgcctcatttttaaaagacctacataaaagacaaggagacttgacacttgttacttttatgacactttgtcccagggtattgcagtagaaagtaatgtgggacagcttcacagggtgtctgccagaagataatgtgttggaactgtgggctggcctaagtaagacattttgtgaattgaaaaaaggtatagtgatcatttctagcaaattcatttaatcatttagataaatgaggcattattttcttcatgcttccatccaatcctggaggtgaattttttccgtcagatcattctataagtcaccaattcaaattttcgcttggtgataatggagtctaagatgagtggaagataaatgttccagcttgtcccaacgtttaagtgcagttttaacaagggtgacttaagttctctcttaatcattcaaatcaattgtaagtatcatatgtttgtgctttagggaactgattgtggggcagagggtgggttgaagaagtggtttgtgtgacttttcagcaagaaatctgcttctaaaattctcactatttgtgagggttggagggtaagtaaccagatctgtttgaaattagcttatgtgcttgcattaaggcttttgtaaatattttatgccatttaagttcacagtagaaatggcctaagtatctttttagtagattttagtagaagagtaatccataaaatgtattattaacatgtactcaaattgagcaggcatctttctttgacacttagataacagtcatgagttctatggtttttttcttgtcattgttaaaattttctcttttaataagataatacatgcttatgtataaaattgaaatactgtagagaaagggggagatgaaaagtgagtgtcactcccggatgtgaccttgacatcctcattctcttctccaagagcagtaactgctattactttttcttgggtatcatcaagataatttctatgcatatacagttattttatgtatattgttttaaacaaatgtgatcataccataaacacagatgagttgcaccttgtttttttttacttggtctctttggcatttttccattttttaatgtatctagacaactacatttttaatgcttacatagtatatttccgttatattaaggaatcataatttatttgaatcacttataaatggatttttttctataaaattggctgtaagccagagtatatcaggtactataaatacatcactaatttgaaacaaataatggctcaggcaatcccctgtctggaatatttccagtggtggaatgggttttgctttgggttgcgtgcacgcgcacgcacgtgtgtgtcttcgctttactgtttttctgttctaattttgaggaagaaagattcccagaaataacctgtccagttcagttaaaatatttcattcatgtgagaatgcacacattttagagtgtttagaggtatatctttcaaagtgctttctattatgtttgtgggttaatcgattttaggaatgggttgatttttttgtttgtaattttaaaaaattatttcaaaaacaactacttgtaattaaattattttttcaaaactgtgattttgttaaaatttattttactaatcactagttttaaacgtgatatgactatcttagcttagacatttatttattaaaaggtatgactttttaaacgaaaccttttttgcattagaatttgtgacatttttatatggggttaagtcaggtcacagattaatgtatcttacagttgtctttttctactctttaaaattcatatagtaagaaggttagttgtaaacaccaatgaaatatatatactttgcaagaagacagttttgagagcataggcagtaaagtggaaggaattccattgtttttgacaatcttgcatatctctcattttcccattgtttaatttctaagtggatgttcagtggaggctaacgcctgagagtgctgatgggaaatggtggaaatctggagctacagtagcagtgaacaagaacaccagctaataaagttatcatatcaaagaataaagcctttaccacatgctcactggtggctttcaccctcgggctcctctgagcagtagtaacccaggttgaactcttcaggtattttctggaagaaagcttaattacaaacttttccttgaattacattaggttagaaaacatgcagccaggcacggtggctcatgcctgtaatcccaacactttggaaggctgaggtaggcagatcacttgagcttaggagtttgagaccagcctgggcaacaaggcgaaaccccatctctactaaaaatccaaaattagctgggggtgctcgtgcacacctatagtccccaggtactccggaggctgaggtgggaggatcacctgagcctggggacgtcaaggctccagtgagctgagatcacgccactgcactccagcctggcaacacagtgagacccccatctcaaaaaaaaaaaaaaaatgctgtaggtgaaagaaccatgcaacacttcaaagattgataaaatatttacaaaatgctctcatttttaaacttataaggcatactgaagtagtgtatcaggcaagtgaaagcctcactagaagaaggaaagactagaatttaaaaaatgttttaacccataaggtcatcctggacttaccccaaggacaagaatgtcacactgtctttatccaagtctcaaaggtaaatatcacaattatttacttagatccctttaaaagtgatcatttctttttttttcttttttcataaataattacaagaacaagcaaataatttctccttttattgctgaggctaaagaaaagcagtaaaattttattgggaaacatttgagcttttcattacatatttgcaattgctatgtatgtgcacataggttcagtagtatgttgcactagcatttggaaactataatctgtggaaagtgtgacactcctagattggcagatatttgcgtgtttgaattgtgatacgtgaccactggtcttatttttgtgtcaaaaggatgatcttttccaataaagtcttaagtctttaaaaaaaaaaccttaactgctgaatgtgcctcaattaatataatagataatattcttgagagttatggaagatggatgtaccagaaaacttccctctctcctcctcttttttgagacagggtccctgtttccgaagctggaatgcagtggcatggtcacagcgtcaaccacttgggcttaagcagtcctctcacctcagcctttccagaggctggcactacaagcatgtgtgcctggctactttttaaaaaattttttgtagagttggagtctatgttgcccatgctggaggacttcctgttaaggaaaatccttattaaatgtttttctagcaagaataaatactctcattcatttttatttgtaggtactgattttcataaatatttgtgattgatgttgcatgtaccttttcaagaacttttctgataaagcgctagattccttagtgtaataatactggtatagccaaggtgtgtgttaattaactggctctgtttccatttcaaatgrtaatttgagatgaaaatagatggatttcagaattgattattgatgtaatagaaacaaggtgtagctgtttgggcactttttgtttagggtttatttttrctgctgtgttggcaaaatactgaaatgcagaagatggatgtgtcccagaaaagaagatggtaattatggggaagcatctgctgtgatatagttatgtttgtatgtgttacatctatcactgtaataattgtaagcaaagacagagagttttgkcttcattttgtgatggatggctctttcctttgcagccaaacagggaaaaagttaatggcgaagtgtcgaatgcttatccaggaraatcaagagcttggaaggcagctgtcccagggacgtattgcacaacttgaagcagagttggctttacagaagaaatacagtgaggagcttaaaagcagtcaggatggtaaggggtttgtttctttttggaacgttgtctcaactttgcattggctttttaaaactgccagtcatgaatattataggttagattctgtacattgttaacctctgccctatgattgtatattattgtgagtgaagcatttttagttgagtccgcaaacaaagccatataattttagtttgtttatccccaccctcctaattctttattgttcaaaatttcttacatttttgtttttagttgggggtaggatttggtaaaagataaaagggtgttgtattacttaacaagatggacaaatttgtattcattgtttgaaagggagaataagcatttctcgttaagtgtaaatcttagaaacatgggcagttttcagcgatctgaaagtaataaagttgattgtatctgtgaaggttttattagtgaataagagatttaatctttaaatttgctgagataaaacttgtcagcctccatcctttttagtgcaagtgtagctgtatctctgtttctcttctttgtaaggtgcattattaataaggaaaatatccaaattctttgaaattttaaattgaaaattagtgtctctggttaattgcaaagatgatcagtagccaagtaatttcttctgaactacctaccttttcaaaatcttcaggaattatttcctgtgacttttgtccttttatrtgtaacagtccttggttgagaacatgggcctctttggagtgttatagaggaccacactatccttaaggatcagacttgctatggaactaaggcactggatcaggaataaggggattggccatagtgggcccataggtaaacgtgagtcaaactttggggctgtaatcaggcatatggcaagatggatcaaaacaattttaacttggttgcttaatacagttgccctcggtatccatggtggattggtgtcaggacctcccacagtaagcccctcatataaaatgatgtcatatttacatataaacctatgtacatcttcccctttgagccatctctagattaacagtacctaatacaatataaatgctaggaaaatagttattttactgtattgtttgggggataatgacaagaaaaaaaatctgtacatgttcagtatagacccagttttttcttccttgaatattttccttctacagttgsttgaattcattgttgcatgtggagggccaactgtatattattttaagtatctgacttcccccaaaacaaactcagtcatattttaagattccaagcaaaatttttaaatgtagtgtgattttagaattgtatttgtttacttgagcgtttattgactcccttgctttgtggcaggcactaaagaaacatttttcaatgttataaacgatattaaagttggtctgactctcctttgcacagaactgaatgacttcatcatccagcttgatgaagaagtagagggtatgcagagtaccattctagttctgcagcagcagctgaaggagacacgccagcagttggctcagtaccagcagcagcagtctcaggcctctgccccaagtaccagcaggactacagcttctgaacctgtagaacagtcagaggccacaagtaaagactgcagtcgtctgacaaacggaccaagtaatggtagctcctcccgccagaggacgtctgggtctggatttcacagggagggcaacacaaccgaagatgactttccttcttctccagggaatggtaataagtcctccaacagctcagaggagagaactggcagaggaggtagtggttacgtaaatcaactcagtgcggggtatgaaagtgtagactctcccacgggcagkgaaaactctctcacacaccaatcaaatgacacagactccagtcatgaccctcaagaggagaaagcagtgagtgggaaaggtaatcgaactgtgggttcccgccacgttcagaatggcttggactcaagtgtaaatgtacagggttcagttttgtaatattttttcagcaaatttttatacagtgtcatttaatttgggagaggatactgtccagaaaattaatgcatacttttgtcacaatttgcctttttgtgggtgtacgttttggtttttttttgttgttttttttctttgttttttttttcttttctttttttttttttttttttttttttgcttcaatacttctgccgctttggaaattgtaacagttaattactttgaatgttgctaaaaggacattttgtgtagggtcaagttatttttatatgagttaatgtgaaattgtaaatggaaatttttccttaaaatacaacacaatgatgtctgtataaatctgtctgtttaraatctgtgctgtgtaagggcattcgtactcatgctgttactgtacttatgcaccattcagacttgttagagtagatgtgggtttatgactgccaagtttgcccagtacagtagttttttatcactaaaagttggactcattgatggagtcctgtagtagtttcagtgttagatacagttttttccaccatacatctgtgcattttctctttaggtgactgtttaagaaatttgtgtgcatagttactcagtttttatgaactgttgtatcctgttaatgcatattgctctgtgactccagtatatcttacctgtactgaccaaacctaaataaagatttttattgtaactccttaattagcttttttgttttgttttgggtgtatgtttagcatttgtcattttcattgagtcattgaatttctactcattatccttcaagtaccacaacagtcaaacttaagaccaagcatcgattacgattttgcacacaatttttaatttatgccttattttgcaaaacggagctggagtttagggctacacttaaaattttttcttgacttataattgttacaaaatattttaaaatacagaaaagtataaagaaaatagtcatctatttcttaggctttttttttttttttttttttttaattgagacagggtcttgctttgtcacttaggctcaagtgcagtggtgcagtcatggctcactgcagcctcaaagtcctcgactcaagtgatcctcccacttcaggcttccgagtacctgagactataggcatatactaccacacccagctacatttattttaattttagtagagacaaggcctcgctatgttgcacaggctggcctcaaactcctggccccaagggatccttctgccttggcttcccaacgtgttgggattgcaggagtgagctacagctcctggccctttttgagttttaattgaaaagcagcgttggttttttgtgacctgatttcaagtagagtatctttgtagtcagtgatgtttgttttaaaacgctggccagcactactgatttttactaacaacatatctggtaatattatatgagtaaggggtgttagaatgtaggtaggagaaaatgtttttaaggtggaagaatgtcaaaatttgctccattttctcagaggtaattaagtataaaagtatgatattgaatggccttcaaatgtgtagctttcatatatggttgaaatgaaattccatttctgttaaaagcaaagtattgttttagacataacttgtaatacaatcaaggaaccttgggagtggagttataatactcgaaaactgaggtacaacttatttgaaagtaattgctgcttttgcttgtttagctgatacaggtatatccggtcttcagcagtatgttaaatactgcactgtctcttgattaaccttttcttttttttctttttctcttttttttttttgccgagagtctcgctctgccacccaggctggagtgcagtggcaccatcgtggctcactgcaacctccacctcccggattcaagtaattctcctgcctcagactcctgagtagctgggattacaggcgtgcgccaccatgcccggcttatttttgtatttttagaagagatgaggtttcactgtgttggccaggctggtctcgaactcctgaccttgtgatccacccacctcggcctcccaaagtgctgggattacaggtgtgagccaccgcgcccaaccttgattaaccttttctacagtctgctcaagtgagtaaaaaatcctatacgatttttaatttgcatgtgattaaacattttggtgtttgatatatcagatactgtgtttggcttttgttatgtacatccttcaacttgaccaatttaaacaaaaatgtaatttctctgtcctgttggtgtaatgtaatcaagagtttgtgataggaaattaatttttcaaccagtgatacaattttatgactgaatttaatatggacctgttaatgtgacattttcatgtttctgttgagtctgccttgatgaataactcagagcacttattctgtggtacacagagtcagtatttctcatttctggaattggatgctttattttctggtatgcctgtgataagagaggtgatagagtggcttctgcatctaattggtttgaatcctggtattacacttaactgatttgggcaaatgtatcctcgaggctcgatattttgttttgtttttctcccctgtaagagcactcactgctgtcttagcttgggctgctgtgaaaaaaaaaaaaaaccacagactgggtggctttacacgcgcattcctcactgtttttggaggctgggaagtctaaagatcacagtgccccctgattggtgccccagtttggttcctggtagtcctcatacagagagcgcaatagatgtcagtttccttggctcctcaggtgtattggatacaactgactactccagtttttgagacacttttgcaaaacaatgtaaagccattccttctgacaactttctttctcagatgttccctctttcatgagtagttatgccctgtactcaaatcattgcctgctgctctacgtcactgtcttgggagttcacctatccctgtggttatagtgaacactttcataatcccaggtaatgtcattaactgatctggacccatcatggggtggctgtgctgagggagtgttgagctagcccctagtggtaaggagtacactgctgaccttcatcctatggcaattccactttggtgattcactgttcccctcatggagaccaaggaggaatttgctgcatggtaggttggtgaatccagcctgtagcaaagacctggcttggactcctgcaactctttatgaaacttaaccaagaatgattgcatcttccagcgggggaagatgctgagaaggccccttcaggataaactggctccatagcactgctgtaatgatggctcctcatgagtaagcacttggagatttttgtggcttcctgcccactcaccctgctcaccagtccaggtagtttatgatttgagatctagatgtaattttattttatttctttttttttttttgagatggagtttcgctcttgttgcccaggctggagtacaatggtgcaatctcggcccaccacaacctccgcctcccaggttcaagcaattctcctgcctcagcctccctagtagctgggatttacaggcatgtggcaccacgcccagctaattttgtatttttagtagagacagagtttctgcatgttggtcaggcaggtcttgaactcccgacctcaggtgatctgcccgcctcggcctcccaaagtgctgggattacaggcatgagccaccgcggccggccaagacataattttaaaaattatcttccagctggccgggcgcggtggctcacgcctgtaatcccagcactttgggaggccgaggtgggcggatcacaaggtcaggagttcgagatcagcctgactaacatggtgaaaccccgtctttactaaaaatataaaaattagctgggcatgatggcacgggcctgtaatcccagctactcaggactctgaggcagaagaatcgcttgaacccgggaggtggaggttgtggtgagccgagatagcgccactgcactccagcctgggtgacagagcgagctccgtctcaaaaaaaaaaaaaaaattcctcttctttccttcattcattattcttagtctctgtctgtctcatatgagtagataatcatatgagtagctataatgaggactcctcaggggacagattctgtttggccactcagcagaagcatgcaattaccttctcaagattggctcctaaacttactctagatagagccttcaggcaggaaactctatatcccttggctccagaagaatatattcatactcattcaaatgtgctaggcactggccataaagaatattggtgttcattcataactgcctataatgtgctaggagctgtgcataaagcagtgtaacaggatcatcttggaaagcttatgtagtcagtagaggagacagataaactaggaattacatggtaagttgaaagaggaagttaggggtaagatgctgcaccaaatgcaggagattggaaggtttttctggaagaagtgatgtttagggggagtttcagaggtaaatttctggtttggttaacagaagatagtttcactgctcactgagattacagaagaaacaggctggaagagtttggtttcaatatgtcaaatttgatgtgcttataggaaattttatttatttgagacagtttctctctgtcgctcaggctggagtgcagtggtgtgatctcggctcactgaaacctctgcctcctaggttcaagcgattttcccatgtcagcctccccagtagctgggattacaggcgcacggcaccacgcccggctaatttttctattttatggtagaaacgggatatcaccatgttggccaggctggtgtcaaactgctgacctcaaatgatccgccctcctcggcctcccaaagtgctgggattacaggtgtgagccaaggtgcccgacctgatgtgcttgtaagaatttaaatgaagagggtcagtcagcttaggagacgaggttagatgtaaggatttcagacttgtcagtatacaggtggtgattgatgccgtaggaatgactggtattacccagggagctggtgcaaagtaggagccttggggaacatgttaaggggatgtgagagtaagcccacaaagactcagaagtggccagggagtaaggggaaaatgggatagaatagagcaaaagccacgggaggcattccttgaattccttggactcagatatgttaggggacaggaaacacattgaagacaactgaagagacttcagtgtgctgctgagttcttagcagagtagacagctgatttcaccactattccagaccctaaagatttctcctgaaattgcactgttatgcaatttttttccttctctattgccccacctctggggcctacactctttaccttctctgatttatctgacccatccgcatatctctgcaaagtcttaatgtaggtttccaggatttaatgattctttcaatcaactttaaagttcttcaggaagattctccaggtccgtcaacagttttccccttcatgactttgtgacaaagctttcttgttccactatccaggtgttcccaacaagttgctgtaacggtggcccctcataagcttgcctggaaaccctagaaagctcagaaaaattatgaactttgcccagtaagaggctgggaagtcagaaagggttttaaacaaaactgaccccacttgttacatgctcctttcactgtccaaacgtcaaccaaaggaacttttgtgacgctaagacgctcccggcgtcctcacccgttcacagccagagttgatcttagaaggcagggggctcgcaccgagacgctcctagcaagcccctcacgcgagcgaatgactggcgccaggagaaacgcataggacctcccgaagccgccgagagcaaaaggacccatcagagctgtgctgagacccgccgcgggccgggctcgcactcgagattctcgcccgtgggattccagtcctgagctgaacgagagataagtctttgtcaccccccagtctttactgtttcgagaaaccctaagattttttaaaaaaaagcccaagacgtcaagtcggggaactccaacattggggtgtccagaaacactggggtttcaggcgctctgtaaatgcgtccgaggtccgcggttctgcccgcaagcccagaccccggcctcacttccgccccgcgccccgcgccccggcctcacttccgccccgcgccccgcgccccgcgccccgcgcgcctccgcccgcccctgctccggccttgcgcctgcgcacagtgggatgcgcggggaggtggtgcgcggggaggtggagggcgaggggcggggctacctcaggtcccgcccgcggcaggcctgtgggctgcgaggaggagctttgcctagcttgcaggcagcgcagggcagacggcggcaggagaagcaagatgaatgcaggctcagatcctgtggtcatcgtctcggcggcgcggaccatcataggtgagtggccggcgggagccgcgcagagtccgaggcgcctgctgcttcggcaggagcgccgagggccggacttgtgtaggagaggggcgtatgtggaggaagccggtcaggccaagccgcgaggagccgcgggatccctggaaccctgcggctcccgcgttccctgacctggt

SEQ ID NO: 8920 - DNA, 20991 bp, Homo sapiens
cttaaaaggccaaaaataatctctcaacatacctctgtctaatttggtccagtttttcagggtctgtaatgaccacctgtacaccaagcttcatttttgttttttgcaggctgaagtcaaggcaagcaatttttgcatttacgattctcttgggcatgcctacaattgaacataagattaagttaatacgtctatccttaaaagcataataaagagtacctataatcgattgtatgtaaacacacaaatttagactaattcattgcattttatcttagaaaaattttatggcattaaatgcacgtaatttcttttaattcacattccttctaccatgttgtatgtgctttaaattacaaaaagatgtactgcacataatccacaaaaaaacattttttatttttttttttttttgagacggagtctcactctgtagcccaggctggagtgcagtggtgtgatcttggctcactgcaatctccgcctcccaggttccagtgattctccttcctcagcctcccaagtagctgggactacaggcaggtgccaccatgcccagctaatttttgtattttttagtagagatgaggtttcaccatattggacaggctgctctcaaactcctgccctcgtgatccacctgactcagcctcccaaagtgctgggattacaggcatgagccaccgcgcccagccaaaagaaaagctagttttaatctgtagcaatctcattctataaaccaaatcccaaaccttaccctgggatcccaccacacagttgagtgcatagccactgatgagcatactctccatttgacttctcccatgggctttcaaaatattaacagagttgactggatagcgtggctggcctcttatgtctgtgtatttaatagcaagtacagcatctactaccatgttagcaaagaaatcaccatttctacgccaaaagttaaggacagtaacaggtttggaatggacaaagggtacacacgtgaaaaatcaagggtaatttcaagggacttccttttagtaatctaatctattaaagcagcaagcattacttgtcaccaaaatgttacaacattatcactatctgcaattcatatcacttttagacatgctttttattaccttttcaccctaaaaaagcagggaaggcaacaggtaatttcaatacagcattactcctctctattgatatcaatttgcataaaattggttattcaaaattttattgcacaaaattgatactgctgctactacgcacgcgtgcgcgcaacacatgcgcacacacgcacccactcccgagacagggtcttgctatgttgcccacattggactggcactcctgggttcaattaatactcctacctcagcctccttagtagctgggactacaggcacataccaccatgcccatctcaaagtcttatgctttaaaaagtctaaattttatctgacaaccacaaggatacattccaatgattttggaagacatggatgtcttagcagcattaatcaggcaatctcttcccagttcatctgtgttaacaattaggttttcattgatataacgcactgcttccctgtttaaaagtgtgggggagaaaaacgcttataaagtcactactcaaactctttgcattcatcatgcttaacacagagccaaaatgtcgtaagtaataatacccgttcagccatttcatataggaggaggacatgaaaaaaccctccctcttcagatcatggcaagtttaatctatcccataagcatagccactaaaatctattattaggagaaaatgtggtagtcaaatgagaaaaaagatactggtccaagtttttaacttcaaatattactacttaaatgctaaaacatttaaattgaaggttttcaaattaaaatttagttattaatcaaaacgttaagacaacacagtttacaactattacatcaaaaaaaatttctctgaatgcaaacaatcttacttgcaagcaagtcgatagccactaataactgatgtgggatgaattttctgtttgactaattcatctgcattttttaggagttctgctgcaataataacctgttgagaaaacattcaccggtctgagtgtgccggatattcaacatgtgcaatacatatggaatgacactaaaatggccatatattattaaccaaaatggtagtgatgaaatgaattaactggttattagaaacctgggcgtgaagggagaagaacgctacaaaacactccaagtcctccacgttactcataaattcttggaaactgccactttaagcaaaacaatggacagcaatttctcaaatacagttgtttattgtaacgctgatggggggaggaaaacttgtttttttatacatcatctttcctcttaaagtcagtttccatgaagccactgtggatgttcagtgaggtcttattgtattataaatgcaaatggccaaaactgggtaggagccagaaaaatgttctaagaaactagttcagcaataagaaactagttcatcaatacaaccgtaaaagacaacacatctattacctttagaaaaaatgctcaacagaagctaaaccgagtgtgactattcatatgacctatattaggctattattttatttaaaaaagatagttcttcaagttgataaaacactaagaaatatttttaaagcaaaaagactgtcagcttcttatggaaggaaaactacatttgttaaatcacattatcgtaagttagacaaagatcatattcatattttaggagtagattccattctttcatggctaaagtttaatctagaaatacattttccccacaaactatctagtttctccagaattaacatctttctcaccaaacaatagtgtttctactataccagcatgctggatgatctatgaagagtttatactgtgtatcacatttactgactcggtaagatcacactgtcatatcatgatgtatttattaatttctcacactcccattttgaattcctgagattacctgtcaggatttaaaaaatagaacaggctgagtgcagctcatgcgtgtaatcccagcactacagaggccgagaagggaggatcacttgaggccaggagttcaagaccagcctgggcaacatagcgagaccctgtctcttaaaaaaaaaaaaaagaggtttttaattagttgcttgtggtggcacatgcctgcaatcccaagcactctgggaggctaaggcaggaggattgcttgaacccaggagttccaggctgcagtgagatatgacagcactgcagcacttcagactgtgctacagatggtctcttaaaaataataatataaaaacattgtttctcccccagattggtaacattttatcctccaaataatcagaaaagttgagagctttccaagtctcaaggggtgatgggggaggaaacaagacttttgagagaccataaaaaaatctgtgtgatgtctgaatactgccataaaaggaaaaataagccctcaaaacttgtgaataccaacatttaaaacaatggggctatgtcaaatgaactcaaattctttcctacttaaactgtacaaactagctgtaactatcaacttacaaattttgtttctgaatctgtacctaagaagcttatttcccctcttaaatgtgtaacttcttttgttttttcttcttgctcaatcttctgggcattcagaatatgtaacttatttctgacacagcacaaatgacccacttatggcttcaactttctgaaagtcggtcgtttttagaaaaatgatcattctttagccagtctacctaccactgaagtagttccatctccaacttctttgtcttgcagatcagccagctcacaaagaactttagctgcaggatgttctacctccagtaacttcaggatggttgcaccatcgttagtaatggttacatcctaagaaattcgcaggaaaaaatatgaaccacttatagaaatcaacacagccccattataatacacgttcacctttaatatcaccttccagtacgtggattctgataaagtcaaagaaagaacatagcaaaacactgaagatagttttactttaaggaaactaacacaacagttatgtgtacttacaccaatatcatccaccaacattttatccaagccaactggaccaagagaactttttacaatattggcaatcgaagctgcagccataactgtagacaatcaattaaaaataaaaaagaaatgaggataagccacaactctgaaagacagtaatttcagcctaaaggtaaatgacatccaacagcccccgtatttcccaaatctacaaatctgtgttaattatttaaaaaccacctactaagagtgtaaatggggccagacactgtggctcacaggtgtaatcccaacactgcgaggccgaggcaggaggatcgcttgatgccaggagtttgagacccctttgggcaacatagcgaaacccatttctacaaaaaataaaaacaaagccggatgcggcggcgcggacctgtgcttggagaatgcagtgagctatgatggcactctcgtctgggcgacaggtgggaccctgtccctaaacaaagcgagcctatttggcacagctttgatgcggggtggaatctgatggcggggaaaaaaaaaaaaagtaataaccaccaatttcatgctctgccacttcgtacagctataccagccttttccttcagattctgcaagttttttgctcattaaaactctctttatctgtgaggagagaaatcggtagtcaacggggaaggtggtgactttcagatttgtttacgaaaaaaattaggaatctatcaagaaacagtaagctctgtaggtatccaaaggcctgacagcaaacgctctgctaagttagcgctgccgtctcctggggtcaatgcactcgagtggcgtttcctgggctaactctactgtaagaagctgtcaacccggatacggctggacgccggacgcccgacctcgactgcagctgcgggcggacagggcaccgggctcatccgagggcgcgcggatggacctactctttttctggtaaatggtcctaaaataaaacctggcgtttaacatggacactcagggggtcgccctgaaacaaaagggggtgcgaggcgtggcccgcacgtgcgagcccgggaggcccgctttcccgcggagggcgcgtttccaacgccgccccggacaccacatccacgcgttgccggtctcaaaaccctgccgcgcgcggcggggctcctcctcgctgtgggaaaagtggggccacagcgccctgccccagagaacggcgggtgggctgggtccggctgcggggccccgaggccctttctgcggaggtaaaggagagaaacgagggcagccggggtccggtcgcggtgggactcggccctccccggccgcaaacccgacccaggcccggcccgcccttaccgttttgggagcggatcgtttccccagtgctgcggtcaccgaacacggacaaaggcccctccatcttgacggcagcgatacacgtcgaattctgcttacaccgcgggcaaccagtatcgcggcccctcggccgaccggcgaccacagcagtggctgcgacggcgtggagcgtacccgagcgatgtcccaggagctactgggtaacacaccaccccacccgcttcccggctgccccggcccggccgcggggcacggcgggaaggaaaaagaggcagggacaacagggagagaaacaggactgtgacggaagtgaggctccggggaaggggcggggtcggcatttttgtccaattagatagccgatgggaagggcgcgaaagcggagaacggaagtcggatgttggaccgctgggaagaggttgaaccttcgcctcaaacgatgttgcgcagacgcagtgggccattctagtgccttctagaaaaggttgtaagaagggtggagcttggagctggggtgtaactggaggggcgggcccttctccaagttagagttggggttctgagcgagtcgtgcgttttaggtttagtgtcttttccttgtcyctgctcggggagcgtgaggcagatcggccggctttgctccaggcctcaggagtgtaagtttaagggcgcgaacctgggtgggacggggcagtttttccagcgggccatacgggaaaatttttggttcgaggaagacaaccaccctttttaaggagaaaactgcatcttgccctgcsttattcctacgcggtgcccaggtggggtgtgtgtggaccagtcaatgaccgcccaagctctccgagtagaaaacccaaacatggttttgtggggtgtgtgcctttgaccccggacttaagcaamaagcgtggtcttgggcgtagctacgaggtggttggtgggctccagggcctgcgtgcccctcgacgtgagcgatgattggcgrtgmaggataacagatcgccttctyggccactcagtggcaggggacttgctacttccgggtcggyggcgtctggcgtggagagtttggggatctacagcagccaaaggcttgtccctgactttatatggctgckcctggcgagcgactgagtcgtccgtgagraaaaagaggcgaggcttttccgagatcgtctcagcgatggcgcttcggtcgcrgttttgggggttctcggtttgcaggaaccctggtaattagtcttgccccccttctcccagctcactcgcctgggcttgcacagtacattggaacgtgcgggttctattttgtattcgacgtgccggatcgaaatagagctcgcggcactgcgaagaccacagtaggaagttaaggacggggtcagtgctgactccaccctgtgggcatacgtatttttcgtcccctcgggcctaaagattgggggtgtaaaagcggatagacgttagagcgggttcgtgcgctgtccatatccgtcatttttaagccctgtgcggtttttcccgttgcccagggtgcaggttcgcagccctgtcaaccagctccgagccggcagcgaaacctgaagtggaccctgtggaaaatgaagctgtcgccccagaattcaccaaccggaacccccggaacctggagcttttatctgtagccaggaaagagcggggctggcggacggtgtttccctcccgtgagttctggcacaggtaattaaatctgcttgtgattgacaagggcagtgcaccctacagactattttcattcattcaactccaggcactctcccaggtagctgccatgcggcgggtagaggcarggttcgcggaggggctggaacaaacaacaaataggtgtgatgggggctatttaaagaggatgttacagtagcggacaggatacctgcctgtctgaggtgacatttaagaaggtgagatctgaaagaggaagaagcctagtcatctgccagaaagagcagtcctagcaaaggaaactgctggggtgaggaactgaagggcttgtggatctgaagctcaatgggcagaggatgaatggcccaagatgaacatggaggggtaaggaggcgacagatgattagctttgtaagtcaagatgagcactttagactttcttttcattatagtgggaaactacgagaggatttaaagcttgagcccgaattggtttttcaagatcattctggctgggcgcattgtctcatgcctgtaatcccagcactttagggagccagccgaagaagscggatcatctgaggtcaggagtttgagaccaacctggccaacatggtgaaaccccgtctctactaaaaatataaaaattagaggggcgtggtggtgcacgcctgtaatcccagctactccagtggctgaggcaygagaatcacttgaacccaggaggcggaggttgcagtgagctgagcgcctgggcgacagagcaaaattctgtctcaaaaaaaaaaaaatcattttagctgctttttggaagattaaatttttgagggagcaggacttgaagaaagaccagttaggagtctagtatgacttgagatactttgttataaaggtggttgtttaatgaacacttayatttgccaggaattatgctacttgctttatatgttttttctcatttaatccttaaaattacatcatgaagcagttataatttcccccattttacaggatcaaagaaattgaggtttagggagacatgattagtaagtgccagagctaagatttacatatgttttaactgacctcagagccaggacrctaggttattaccactatactacagcatgtaagtgtttatcaggtttatctgctgcttatctgcttggtgaggattttttagaatttcttaaggacttcttaagtactatgtaaagttgtaagagtaaattggaaatcattactgtgtgatgtattatttatttattgaacaagcatcatacctgtatcacttgmtaggcattgcgttagaggcaggagttacaaagataaagtagatgttatccctgtcatcaaaagtcttaagtttcatagtggaaagtggaatggggataatgatgtgttacagttgctgtaatacatttttactcatagaggagggagtccaagaaagggagtaggcagttcactttttaaataatctggatcttaaggctaaaaatcttttgaaacacccaacctattactttcttttttctttgtttttgagacagggtctgggtctgttgcccaggctagaatgcagtggtatgatatctgcttactgcatccttgacttccctgggctccagcaatcttcccacctcagcctcctgagtggctgggactagaggcgcatgccattactcccagctaatttgttttgttttgtttgagacaagctctggctctatcacccaggctggagtgcagtggtacagtatcagctggctgcaacctctgcctcccaggctcaaacgattctcccatctcagcttcctgagcatctgggactgcaggcacacactaccatggccggctaatttttttctttttctttttttttttttctggtattttttgtagagatggggttttgctgctgcccaggctggtctcgagctcttgagctcragagatctgcctgattcagcctcccaaggtgctgggattacagrcgtgrgccactgcactcggccccaacgcattactttgatttaatatttggatcattaaaaataactaaagatgtatttcctcattttttctctgtctgccttactcgcaatattaaaagtagagaatttcagaatattatagtaggaaatgacctttgacataatgaatcgggcccttcattgaacaaatggttcaagtgtcagcaaactacggcccgtgggccaaaggtagattgtgagctaaaaacttgtttttactttttttaagttaaaaaaaaaatcaaaagaatattttgtggcttgggaaaattaaatgaaaatcaaatttcgttgcccaggttcttagaacmtagctgtacctactctcatttgtttacgcatcacctggctgttctagcactacaatggctgagtcgaacagtttcaacagaagctattggacctagaaagcctaaaatatttactatctggcactttgtggaaaaagattgttgactcctggtttaacagattgtgatttttggccgggcgcggtggctcacgtttgtaatcccagcactttgggaggtcgaggcgggcggatcacgaggtcaggagatcaagaccatcctggctaacacggtgaaaccccgtctctactaaaaatacacaaaaaaattagccaggcgtggtggcaggcrcctgtagtcccagctactagggaggctgagacaggagagtggcgtgaacctgggaggcggagcttgcagtgagccgagatcgcgccactgcactccagcctgggcaacagastgagactccgtctcaaaaaaaaaaaaagagattgtgattttttactagagccaccaggaaaaccaggagtagactccatatttccaaatctaatgcctcttctatttcacattgagaatcctagtgagaatctaatgatttgggtgtgttttctttaacttaaacttgactttttaaagggtaacatatacgtatgttataaaatccaaagggagtacagtttcttgtgtgtccttctaaagattgtctatgcatataagcaaaaactgttaaaaacaataaatcttagcatacgataaacacttccgcatctttcttcaccaccaccctcaaccaccccaagcacgcacttaaaaatacatcttggagattcttcatggtagttaagagcattgactctggagccagacactgggacttaaaccatggctccattacttactagttttaatctttttcaagttacttaacstttctgtgttagtttctgcagctaaaaaaaaatatagaaaaaataatagaattgagacataagctttatctataaaccgttaagacaggcctggcatatactaagtgctcagtaaatgttaactattatcttcatcattataaagcattatttcattcatttcagtaactgtatggaatactattgcatggattttacttaactcgctcctagagggtgattatcttttatgattacagtgttgcatcgaattgtcttgtccatgcattttgttagtgagattgagcatatttttgtgaatttgagtcattaatatttttcttttctgtgaacagtctgttyggataatgctttgcctattaagttatgaaggggtgggttgcccctcctcacctgtgggtgtttctygttaggtggaacgagagacttggaaaagaaaaagacacaaagtatagagaaagaaataaggggacccagggaaccagcgttcagcatatggaggatcccgccagcctctgagttcccttagtatttattgatcattcgtgggtgtttctctgagagggggatgtgtcagggtcacaagacaatagtggggagaggattagcagacaaacatgtgaacaaaggtctttgcatcatagacaaagtaaagaatcaagtgctgtgcttttagatatgcatacacataaacatctcaatgctttacaaagcagtattgctgcccgcatgtcccacctccagccctaaggcggtttttccctaactcagtagatggaacgtacaatcgggttttataccgagacagtgcattgcccagggacaggcaggagacagatgctttcctcttgtctcaagtgcaagaggcatgccttcctcttatactaatcctcctcagcacagaccctttacgggtgtcaggctgggggacggtcaggtctttcccttcccacgaggccatatttcagtctatcacatggggagaaaccttggacaatacctggctttcctaggcagaggtccctgcggccttccgcagtgtttgtgtccctgggtacttgagattagggagtggtgatgactcttaacgagcatgctgccttcaagcatctgtttaacaaagcacatcttgcacaacccttaatccatttaaccctgagtttgacacagcacgtrtttcagagagcagggggttgggggtaaggtcatagattaacagaatctcaaggcagaagaatttttcttagtacagaacaaaatggagtctcctatgtctacttctttctacacagacagtaacaatctgatctcttgcttttccccacaagttattgatcattttcttgttaattataggaggcttttaacatattgtgtaaattagctctttgaacaatatatgagtttaaaatattttttctttttatatttttgtgacagggtttcactctgtcacccaggctggagtgcagggcattatcacggctcactgcagccacaacctcctgggctcaaacaatcttcccacctcagcctcccaagtagctgggactacaggtgcacaccatcacgcctggctgattttttctattttttgtagagacagagtgtcactgtgttgcctgggctggtcttgaactccttggctctagcagtcctcctgcctcagccttccaaagtgctgggattacaagcttgagtcacatgcccagcctaaaatattttttgtttcattgcttttcttttgacttcattttactttttttttttttttttttttaaccatgcagcaaattttgtccatcatttcttttttatgccatatgaggggctgggcatggtggctcagcctgtaaccccagcacattaggaggctgaggtgggtagactgcttgagcttaggagtttgagacgagcctgggcaatatggcaaaccctgtctctacaaaaaaatacaaaaattagctgggtgcagtggcatgcgcctgtagtcccagccacttgggaggttgaggtggaaggatgacttgawcccaggaggcagaggctgctgtgagccaagttcgtgcctctgtactctagcctgagagacagaggcagaccctgtctcaaaaaaaaaaaaaaatggccatatgaagctggacacagtggctcatgcctgtaatcccagtgctttgggaggttgagaagggtgggtcgcttgaggccaggagtttgacaccagccttggcaacatagggagaccctgtctctacaaaataaaaattatcttggtgcagtggcatgcacctgtaatgccaactacttgggagactaaggcaggagagttgcttgagcctaggggtttgaggctacagtgagctgtggttgcactgctgtactccgagctgggtgacagtgagaccctgtttctgaaaaataataaaagccatatgacatggtttgatgtcatatttaaatatgcataccttgagattataaaaaaawttctcatgttttcttctagtactgttatgatttcagtttttgcatttaaatttttgttccgtcttatatttattttggtgctagctataaataaaagcaaagagtaagtatatccatrtcatgcatatgttcagtaacttagctctgtctcttcaaatctctttgaagtagatctgtaaataaaactcagctcttcagaaacaaatttcttcatgatacttgaactatttagtttgttattattgaggatattctcataaaggcggaggaaaaatacttttcccaagcaaaatccaagttaaatatgtdaaatkaaccaaacactggattgttgraaaatatttagtcatttattcacctcaattaatgtaactttaggatacagattcttctgtgattttattatcttctcaccccatttaggttgcgagttataaggactcagcatcatgtagaagcacttgtggagcatcagaatggcaaggttgtggtttcggcctccactcgtgagtgggctattaaaaagcacctttatagtaccagaaatgtggtggcttgtgagagtataggacgagtgctggcacagagatgcttagaggcgggaatcaacttcatggtctaccaaccaaccccgtgggaggcagcctcagactcggtatttttgttttcatgtayttattgaaaaggtattgtgttaattcttggcattrgataacttacataataataacagtttttacttaccaaatactttccatgtgtcagaccctttggtgagtactcaacagtgttacttcatttaatcctcacatcagtccatagggtagggactagtactctcattctatacagaaataaactgaggcttacttgcccagagtcagtgtatggtggatttcaaacccagggtgactgattctgtagtccatgatgtcagccactgtatttcctgttcatatattgacatcttgtccatataatattttgaaatgctgctgaaccttgacatctctacatttcctttttacttacatcattattaagatcactttctgaaaaacygttgtaggctgggaagttagcaagaacaaatcaatttatttctgtcttttggaaggtgaaagtattttcagcctactygtgctgctgacttaatcttttccttttttwtctgattttcaaaaccagatgaaacgactacaaagtgccatgacagaaggtggtgtggttctacgggaacctcagagaatctatgaataaatggaagcattaattgttttgaacatgtaaatataaatctgtcagccactacagccatcaaaagagagcatctggaagaacagccagcttggaagttttacagcaataatgttgcagtggaatattatttgtagttaaggtcatcctcctcccctttctgtttttttaaatcaagaactacrttctgcccctctcttgggcttcagaagcatctaagaaaagcagtcatcaattataattaactttcaaagggcaagtcagaagttgtttataaattacaaaataaaggcatattatgaactcttattttctggttatatgacattgtctgagctcactgtggcagtggagcacatatgaggttgatgtaaagcacttattactgtgtctagttcatggcgagtgatctcagtgaatgacagttgtttgctgctcggagtgtgggktgttttttaaaataggaaatgtcagtatcaatctaatattatagaacagtcagwatgtgaaaatgaaaggaccaaatgccaacctcacttggactcttggttcccaacagtaagagaaacaaatttgaaagaggaaggaggtggcatcaggagctgaaagcagaggtggaaatggttggggttagtgggcgctcaatttgccatgaagtgaacattttattagataggagatgaaacttgaaatgcatgcaagttaatctaaaatttgagcttgggtagatgggaatcatggcagttctctgaaaggagctgattaaggtgttaatttttggctatttgataaatgtgagaaaaaacctgtaggcagttaaggtggcttctagagcattgttttccagtttttttaatgtataccccaattaaatgtttgtttagaagtgaaatatgttacttctgccaatttgagtattcaatgtgttattttaaatggaacacatctgtatgaagtatgatttgttctgagaggtcttcagaatcaaatggcttaatagtccccttttgcttaattaatgtcccggagaggcatttaaaagtataattgaagatcggatgcagtgcctcacacctctaatcccaccactttaggaggctgaagcaggtggatcacttgaggccaggaattcgagaccagcctggccaatacggtttaaccctatctctactaaaaacaaaaatgagttgggcgtggtggtgcatgcctgtaatcccagctgttcagaggctgaggcgggagaatcgcttgaactcaggaggtggagattgcagagagccgagatggcaccactgcactccagcctgggtgacagagtgagactgtctcaaaaggaaaaaataaaaaagtataacggtaatgttttctccgctaaccttaaagattgatttgagcacctcactttgaggaccatagttccaaaacgctgttcaagtagaagcctagaattcaagggaggacactgtaaggaagaccatggactagttgcactggaaacagtaacaaaagtaaaaattaagctcacatgtatgtgatggtgtaggtagggatttccgcaaggagtgagtgcacgagataatccctggggaccaaggattccttcaatttaatgggcagttcttgaggctttgcaaagtttgattgcaggtgtgaagacagtggtaaggtggacagcagaatgaggaaaaagatgtccaggggcgtgggagagggaatggggacagacatactggcagtgatggagaagttgggaagaggtgatttagaagaccgtgagccgcagcaaaggatctgcttattgcagttgcgtccggtgttgttcctgctccgcttttctgatttcaccctttctggactctgtcttcgtctcctgccacgcctcttaacattctaagtccatgtaaatgacattctcacgttaagggctgcaaagaaattgctgaggagccaggtaaacaggctttgattgcaattgcaatcaaacctctgtagcaaatcgtacaattaaaacacccgcaggcaggtgtgggcgacgccagcagcacacggggaagctgggcacgtggggcggaggcagctgcctggtttccatgtgtgcgccctttaagacccggcggcgcgacggaagcgcgtgggcagcacgtgggcagcacgtgatagcgctgggcgactccgcggagctgcacggccatggacgtgggcgccgacgagttcgaggagagcctccctctgctgcaggagctcgtccaggaggccgacttcgtgggtgaagagcctgggattcgcggctgtgccggacagagccccttgccccgggcgagcttggggagggggtggcgggacggttgccaggccacagggcctcagagagggcctcgggaaggacaggggggcttccttctccagccccggggcggtgggactttgagcagcaagtacactccgagccccacgtcccttgttggccagagccccgtgcgcccaggtgcctggctgctccttgccttggttcctccattttcccttcctgacctcacttggcttgagcgcagaggtgagcgcgggtgccttggccgcctgcagatctacagtgtgaggagtgctggcgatgttctgcacccgaggactgctattttttgccttcctggcaggtctggacatagagttcacgggccttcgttctaacctgtctgggccccagcagatcaggtaaaactaaagctgtgtcccctctgtataagagcctggccagaccagcactgtttctggccagcagcctgttggcatttggggggcaggacgttttgtgtggcttgctcctacgtgttggaggaccttgcttttttctgtccactaaatgatggtagtgctccctagttgttgtaacaaggaaaaaatcctccccggttgcgagtggtggtcctgccgcggaggccatagtgccgggatgggatgtcattgctcgtggaatgagatgcctgtttgttcacagtctttttgatttgccatcggagtggtatctaaagacccgtcagagtgttcagcaatttacagtctgtcagattggtgagtttaatatcagctgttagagtttttcaagaaggtatttttattgtccttggatttcctactgtaaaaacagctctgagatttttcaaggatattgagtatcgttttgtatgcttgttttgtgttgggccattgtatacatatggaaatcaacacttcggagcaaaccaaatttagcagcattgtttccgtgcttaaataagtcagtattaaggaacactcactgttactctttcaagtaaaactgtgtgtgtgcgatttttattttattttttgagacagggtcttgctctgtcaccaagactggagtgcagtagcatagtcttagctcactgcagcctagacttcctgggctcaagtgatactagcacgtcagcctcctgagtaaactgggactacaggctcaccaccacacctagctaatttttaaattttttgttcagatgggttttcgtcatgttgcccaggctggtcttgacttcctgggctcgagcaatctttctgcctctgcctctcaaagtgatggaattataagcgtgagcaaccacacctggcctgtgatttttttttcttaagaaaatttacacacaaaaataatttttttaaggtcatctcagtttcagaaactttttttttttccttgatgggatttggagatctttctgtatcggttcatacagatctatttgttgatttagttattagtttattttctgagatggagtctcgctctgttgcccaggctggagtgcagtagcgcgatgtgggctcaccgcaacctccaccacccaggttcgggtgattctcctgcctcagcctccagagcagctgggattacaggcaattgccaccaggcctggctaatttttgtatttttagtagcgatggggtttcaccatgttggccaggctggtcaagacagagctgttaacggttgcgtaatgctgtttcttttacagctactcaatcctgcttttgtaatgtgaaattagctgtagagaatacatgaacaaatgagcatggctccattccagtaaaatgttattgtatttacagaaacagaccctgggccagattttacttttctgggtttgtctgtgccctctcccgcaccattgggtttttgctgtgttgcccaggctgggctcaaacttttgggctctggagatcctccagtctcagcttctgaagtagctgggagtgctgccacgcccagcccctgcttttactatgaatgatgctgaacgtgtgtgtgttttcctctctatcctgatcctttgctacttttctgttatggttttttttttgttcgtttgtttgtttttaattataagacctctttgagaagtataggaaacagttgtagttatgtttccattgttgtacccaaatttggttggggggaagggggacagagtcttgctctgttgcccaggctggagtgcaggggcacgatcttggctccctgcaacacccttgcctcccaggcccaagcaattctcctgcctcagcctcctgagtagctgggattacaggtgcgcgccaccacacctagctaatttttgtatttttagtagagacagggtttcaccatgttggtcaggctggtctcgaattcctgacctcaagtgatccacctgcctaggtctcccaaagtgttgggattacaggcataagccaccgcacctggcctgaagtcttttttttttttaactttgcatatggttttctttgaggggggaggaatagacattttaaatgagttaaatatataaatcttaatggtttttggtattttctgtggatagttttaaaactatgagaatgtcattttaatatttacttctgtatttgaagaacaggccacaattagattttagcaaattcagtgtgaattacaatttgacatttctcatgcttccagtctgtcttttcttttttgtcattaaagatgttatcctgttgtacagcccacatagtatctgtgggcgcaaagtactgtttgagttgtttttgtctttgtagtgaaattcaggttgcttttccttggcattcattccctctacggtcattcttccaggattgtctgtgttttccgctattgaaggagaggcaaacaagtacgtatcaagagcttctgcaaacataggtgcttcccacctatgttccacagctgccaccttcaaattctgcctcaggtgccccgatcacttttgccctggatcttccgtattctctcctgtgtctgttcctccactcactctgccctctgcggattccagcttgtctttgatgtctctctggaagcagtacctttcccgccagccttgctctgtaccttaagtgctcctttccccatttccattgtctccagtgtgcacctatattaataaaagcgcctgacacagtgtggtgtaatgaaagtgatgtttaaactacctgacacagtaggcagaaaggatgccccaactatcaggatgcctccccaccccccatgagcagttgagggtgccagcctgcacgccctaacctggcatccctgggcagcttgtggaggggctgtctctgtggtatacgctggccctgaaggcaggctctctgcctttttcatttagcacccccagtgccaatcatagctcctgaaacacagcagacactcgggcacactcagattcttcttgcctaaaagaaagagcccaccctgaagccagccctgggagccagagttttttaaatggttgtggctttttctctgtatgtttgttttattataggtatatagcccattcttgtaacttctatctcttccctacaacgtttgggattttggactcagaattctccttccaggcttccagtgttcagtttttgaatcagtatggcttcaactataacaaggtatggcattggaggaggggaacgggaatgtcttttgtttgtttctgagatggagtctcgctctgttgcccaggctggagtgcagtggtgcaatcttcgcctcccgggttcaagtgattttcctgcttcagcctcccaagtagctgggattacaggcacccgccaccatgcccagctaattctttttgtatttttagtagagacggggtttcaccatgttggtcaggctggtcttgaactcctagcctcaggcaatccacctgcctcggcctcccaaagtgctggggttataggcatgagccaccgcacccggcctgggaatgtcttacaagtgatctagacgaactggcttatacagcccgtctcctttcccctttctacctgtcctcgtgaaatcaggcacagaggatccctctgacttgtctccttgttctgtttgttgttctgtttctgtcttaagtttctcaaaaacggaatcccatatatgaatgaagaacaggagaagaaaattagacacgatatcctgactgggaactggagagttcgcaggtatggcctgtttctccaggtgcctttttgtttccttgttgctgttgtctgcatttcccgtgggcgggcgtgccgtttccaggagtgtggtgacctccatccatgcttggcggggatggcttcagctgcctgtgcagctggcgctgctctccctgtgccccaactgagaatggctttcacctgtctccatcatgttccactccctaatgaacctctcactgcgttgagtgtgagtttcagtgtttaaaaagaaaaagaaactgactcctaatt

SEQ ID NO: 8921 - DNA, 40394 bp, Homo sapiens
  misc_feature (1)...(40394): n = A,T,C or G, or insertion/deletion polymorphism (see Tables 1-2)
gatcagagtttttaaagatagtttggtgctgggtgtggtggctcacgcttgtaatcccggcactttgggaggctgaggcaggcggatcacctgaggtcaggagttcaagaccagcctggccaacatggcgaaaccccatctgtactaaaaatacaaaaaattagctgggcgtggtggcacttgcctgtaaacccaggtactcgggagattgaggctggagactcacttgaacccaggaggcggaggttgcagtgagctgagattgtgccactgcactccagcctgggcaacagagtgagactccatcacaaacaaacaaacaaacataatttggcaggtaggggctcaggaagcagagtgctgattggtcaaggttggagatggaatcctaggggggtcgaactgaggttttcttgctgttttctactcctagatgggatggcagaactgattggcccagattaccggtctggatggtgtcagctgatccatccagtataggatctacaaaatatctcaaacactgatcttaggttttacaatagtgatgctatccccaaaagcaatttggggcggttcagactcttggagccagaggctgcatgacccctaaaccgtaatttctaatcttgtagctaacttgttagtcctgcaaaggcagactggtccccaggcaagaagggagtcttttcgggaaagcgctattattaattttgtttcagagtcaaactatgaactgaattccttcccaaatgcccagcaatgaacaaggacagcttaaaggttagaagcaagatggagtcggttaggtctgatctctttcactgttataatttcttcagttataatttttgcaaaggcagttgaaactgtgtctttgaaaagacacagcagaaacatctgttacataaacaacagaaatgaggaagaaagtatctgactcagtagcaaaggaaatccacagaaagaatgttctgagaacggaagcaatgatcagaccaggtagggatatgatagaaagaaaattctcatctaattcaaattctggccagtccttttggtgatttccatactaatactaggcactttaaaatgtgagttctggtaacacatggaacctcaaagtagaaatgtctgttgttcatttttaaaagactatttgcagagttttgatgtttatcaatgaaaagagttttttttttaaatttatgaagaatagggaatcctatatgggcatggggcaaataatcaaactgttttaatgcagaaaaaaatgtgcaacagaaagagatagctcatggagggataaagactttattctggaccctctagattctgtggggcctgcagtagcttcaagatgccccagcatgtcctgcgcccacacccctgtcaagatcactgtggtcagggcgtcttgcccatggccagtgtattagtctgcttgggttgccacaacaaaataccacagactgaggttgaaaacatttattttctcacagttttggaggctagaagtcctagatcaaggtgccagcagcgttgcttcctctgaggcagctcttcttggcctgtaggtggcgccttcttgctgtgtcttcacatgggcggcccctcagtctgtgtgtctaggtcctaatcttctcttataaacacaccagtcatactggattagggtccatcattttaccttaacggcctatttaaaggccttatctccaaatacagatgcattttgaaatactaagggttagtacctcaacatctgaattctggggggacacacttcaacccataacatgcaggcagacctcaatgctgcttgcagacccaaggcgaactgcacaacaatcaagcctggctcttaggacaaaaacatctgccagagtcaaccaaactgaattctctgggaaggacgagatgcctggtgtcataaaaagaccatagtcttttttaagtgtgatgcatgcgcacacaggcacgcatacacacacgcgcacacacgcgcacacactgcactgctgccctgtccttggcagacattcctgtggggtcatgttcgaaatatgcacttctgtggagtagcttgggttttcttggaagtctctttttctaaacttgtacctaagctgatggcctgtgcctgcttgggcatgaggggtcggagtggggatgggtcaagactgactcctgttcactgtgaagtagaggaaggcagtgatagccagacagggacgtgtgtttagggaagtcctctgtgttttcagttctgtttttgttttgtttttatgatgggagagatgagcaaatataaaggctgcttctaggagcaggagtgaggagaggttgcctatatgagagaaacgggatggtcaatactgtaggtttttttgagaaggtgaaatatggaattcattttttaaattttttaaatttttttttttttgagacagagtctcgctctgtcacccaggctggagtgcagtgatgtgatctctgctcattgcaacttctgcctcctgtttatataaacaggccaaaccctgtatgtatgtatgtatttatttatttttgagatggagtttcgctcttgttccacttgttgcccaggctggagtgcaatggcacgatcttggctcactgcaacctgcaactcccgggttcaagcgattctcctgcctcagcctcccaagtagctgggattaccagcactcaccaccacagccggctaatttttttgtatttttagtagagacggggtttcaccatgttggccaggctggtctcgaactcttgacctcaggtgatccacctgcctcagcttcccaaagtgctaggattacaggcatgagccactgcacccagccgaaagatggaattcaaagaagtgctggtaagtcactgtggtatttgtgaaaaaataaaaataaagagggtttgggctaggcgcggtggctcatgcctgtaatctcagcactttgggaggccaaggggggtggatcacctgaggttgggagttcgagaccagcctgaccaacatggagaaaccctgtctctactgaaaatacaaaattagccgggtgtggtggcgcatgcctgtaatcccagctactcgggaggctgaggcaggagaatcacttgaaccgagaggtagaggttgcagtgagccaagattgtgccactgcactccagcctgggcaacaagaggaacaagagcaaaactccatcaaataaataaataaataaataaataaaaacagggtttggccttgggcaggatggaccgttttctagaaggacagccgtggtgcgctgcacaactggtatgaagcccagtttccatctgaagtcctcgatgttcatggaaataggggcgagacagtctgaggagtgtgaagaaggcctgaaaatatccttgcagagaacaggagagacaatgactgggacagccaggcagggctgagggcccatttgaatttcccgcagtgccctctgtcctgttgtgtgacccctccagcagtaggtactgggaaagcaggtggctgagttcatccaggactgaggctctgccagacaagaacagtgcagcaaggatgttgaaggtaatggcaaaaaataactggaatgcagagaaatgaaatcaaagctgatgaggagggaagggaagagaggagagggcagatagacttgggtagagaggacagaacaatgacagggcaaactggtgatgttgaggaagagtcacagggagcagctaaacaagccagctgcagggatggcactgtgtggctggagagcagggttctggagttatcggtttttccatgtgtgacatgggcctgggtgggtgaggctgagtgtagaagtcttacatttccagtcttgtcactcctctgatgagtttcagaccaatatatccatctgcctagatgtcatttctccttggattcacatgctccaaaccaaactcctgggctcagacatcaaagccactcaaaaatagctctctgagaaatagaactaccatatgatccagtaatccaacttttgggtatagacccaaaagaattaaaaacagaatattgaacagatatttgcatagctttattcacaacagccaaaggtgggaacaacccacatgcccatcaacagacgaatggataaacaaaatgtgctatatacataaaatggaatctttttcggccttaatgaaggaaggaaatcctgacacatgctacatggatgaaccttgaggatattttgctaagcaaaagaagccagacactaatggacaaatactataaaatccacttatatgagatacttagagtagtcaaatttagggacagaatcagatttgcaagataaaaagtttctggaaacgtatttcacaataatgtgaatatgcctgatactactgaacacctcaaaaagggttaacacggggccgggcgcggtggctcatgcctgtaatctcatcactgtgggaggccaaggtgggcagatcacctgaggttaggagttggagaccagcctggccaacatggtgaaacccggtctctgctaaaaatacacacaaaaaaattagctgggcatggtggcaggtgcctgtaatcccagctacttgggaggctgatgcgggagaatcgcttgaacccgggaggtggaggttgcagtgaaccgagacagggccattgcactccagcctgggcaacaagaacgaaattccgtctcaaaataaaataaaataaacaataaaaataaagggttaacatgggggctgagcacggtcagcgagagaatcacttgaggccaggagtctgagaccagcctgggcaacagagaacgctgtctctacaaagcataataataaaaaaatgagccaggtgtggtggcatgcacccgtggtcccagctacttgtgaggctgagatgggaggttgagactgcagtgagccgtgttcgcatcactgctctccagcctgggcacagagacactctgtctctgaaacaaacaaaaaaagaggggctaacatggtaaatttcatgtttcttatcaagtaaaaaggcttgctgacccacaatctatattaggtttccctgttactagcaaggagtgaaggatgtgctatcccaaaatatgtccaaaaattggtatattattttgagctaaaaacaccggagaaattgtagtttcagaaagggctagatgacctgtcgtttcctacagggaataagcagtaaagattcctctgggagtggcaccctctctgtacccgggtcagaaaatagcccttatcaccagagactgggagttggggctgcaatggacctgaataaatgaacttcccaagtaacacttaccttccactaattttacaccctccccaatatttctcctagtgactctcttagaaatgtatcgccccagccagatgccttttgtgctttcttctcaaatgcatcattctttgtctaaaaagtataaaagcatcttgctgtggccacttcttcagacctcactctcttttgaaggtccccatgaaaaactaataaagtgtgtatgcttttcttttgtttatctgcctcttgtcaattcggtttctggctccagcggaagagcccgcagaagcgctgaggggactggagacggtctctggcgcccctacacctgctcagtgagccttcagccccttctccctgacgaagctcccagaggctggaactctggcgcgggaggcacttgggaaatcctcccgaaagcaaggaggagcctttcctagaccgggagcggtcccacgcgggggtacaggttggggcaggggcgaccgagccgggcacaggaactcgcagcagggtagggttggcggctacgccgccctcggtccgcggggaaccacgcgggcttccgggtcacgccgccgcgttccgaccgccctcggggagaggggaggagcctccagcgccgggcggggcgtggttaaggccggtgggccccaccgcagccagacgctgcccgtttaagcgcagagggccgcgggtcacgtggtgggcggggtgggggcgtggcaccaggaagcggcgtccgcgccgggcccagagccgcagccgcagccgccgctacagtccgggccgggctccaccgcgcatcctgctccactctggcgaccgcccccggggcccccgccgcgggcgcggcgcccgccatgggcgaggaggactactatctggagctgtgcgagcggccggtgcagttcgagaaggcgaaccctgtcaactgcgtcttcttcgatgaggccaacaagcaggtccggcgcgcccgcgcttcctcccccgcgcggccctgccggggtcgtgggcgygccaaggccggtcccgcgcgaccaggcccgagcgtcccctcctgtcctgtcccgtcccgtcccagcgcgggaggcggcgcgcgctccttccttgttgggtgggctcagccgcggccaggtgtcctcgcaggtgacctcggggctggacccccgagccagctgcgcggatgcagtggccccgtggccagtgtctcaattgttggcgcgcccgtcttatctaggcttcttttgttgtgtttgtcattagttacactcgtagtcaagggtttagacgtcgagattttcattttccttgaaattttgtaaagggggaaaagactgtacttcaggcgtatcagcggcgccgatgcgcgaaccggygttagaacttggagcctcgggaacccgacccggtgtcacggtggcatccttttcgctctctgctcttggtttttaaaattcacctgagcagccaaacatctgtaccttgatatgtgccgtgttactttagttgaacccagggtggtgtataacagaaataatcgcttgcgggttggcttctgagtttagatcctttcagagttcaggctgttaaccttgctgcttttccctctcaggtttttgctgttcgatctggtggagctactggcgtggtagttaaaggcccagatgataggaatcccatctcatttaggtaatggtatagacactttcagatcattttgtcatgtaaacagaatgatgtttttctaattcaaatggttttttataattttgtcatttggtctgccctaagaggcctgaagtctgtgtgcgcacatggaattcctgtctgtagggagggtcttcgtggcacttactagcacctcttgtcagagtggaatatctggagcagttgatttgggagccaaatacttcaaaagtggggcagccacttcctagcactggaaattaacaagtcagcgtgatgatgtgcccatttctggtttgttcacagaggagggcgttcatttctttagcccaggtctttccagagtggcaggtggaggagattcattgtttctcatgtaataatacaagaaaatcatggcttccactatacttaaggtgactgcatagtcccagttcgcactgttgaacaggtttaatgatcaacagcagggcctttcactttcagaagtgtctcgatttggatgataagctatctggccacygtaacactggtgcttacagaaggtgaaagtataatgtaggccctcaattcagtagtgacttaaaaaattttactgttggtctgtgttaatgagaaactgtccttttttgagagggagcctccctctgttccccagggtggagtgcagtggtgcratcttggctgactgcaacctccgcctcccaggttcaagtgattctcctgcttcagcttcccaagtagctgggattagaggcgcccaccaccacgcccggctaattttttttgtatttttagtagagatggggtttcaccgtgttggccaggctggtttcgaactcctgacctcaaaacgatccgcccgcctcagactcccacagtgctaggattacaggcatgagccgctgcacccggcctgagcaaggttttaaagtatggatggggtkcgagcatggtgttttggggaactctgggtctgtgtaactgaaggttacatagggtgtctccacagggaaggggaaatggtggtggtgtggccactggcaggggccagcttgaaccttacatattctcctatgaaattagagctttatcttcttattgaaacttatcaggtggggtgtgggatgatcatgtcagtgtttggcaagatcatgctgttcacagcacggaggctggcttagttgggagcctgtcagagttagggatgctatggagagtagcaatcagcgagccatgtgtggtgaagagcagcgctctggtggtgtagagtggcattgcataggcaatcaagggatacttaggaagatgggtctctcgtaagacccgggggtcggttgggtgtggaaaacgagtgagcccgtgataatctagattgggggctctaagaagtttgtgggtggggggaaggtactgaatttaacttaaaaagagtttttagactgggcrcggtggctcatgcctgtaatcccagcactttgggaggccgaggcgggtggatcacttgagatcaggagttcgagaccagcctggccagcatggtgaaaccctgtctctactaaaaatacaaaaattagccaggtgtggtggcacgtgcctgtaatcccagctactcggaacgctgaggcaggagaatcacgtgaacccgagaggcagaggttgcagtgagccgagatcatgccactgcactgtagcctgggcaacagagcaagactcygtctcaaaaaaaaaaaaaaaaagatttttaaaagcagctttattgaggcatagttgacacataataaactgtacacacttaatattatgcmatatgtgagttttgacatgtatacacccatgaaaccatcaccacaatcaaggcaatgaacatgttcagaccccgaaaagtttccttgggcccttctgtaatccatcccttgagttttttttttttaaatgaatttttaatttaaaaaatgtatgtattggaatagagacrgggtctcactgtgttgctgaggctggtctcgaattcctgtgatcctcctgcttcatcctctcacagtgctgggattacaggtgtaggccgctgtgcccagctgagttcactttttaacatctgtctgaggcggtcatgagacactgtagtggagccatctgggttgcataatgaatgtgctgtgagatgcacaagtagatagttctttccagaagctttgctgtgagagagaaacagcagttacggagaaggctcctgagcgggtctatagttatttatgttggaacaattctcaggtgatatgtgtgtgtgatctgaattcttcaatcacttgttacccataatactgtaagtttcccagcaagttctttccagttggatttggtagtttgaaaagaggtcctactgatggcttccgaaacataattttaattttagactagaatttgctgcctcctgaatatagattgtgtcttttgccttttcaataaatggtagtagctagaattcggttatttaactactaacacaatctttcttcttaaagaatggatgacaaaggagaagtgaagtgcattaagttttccttagaaaataagatattggctgttcagaggacctcaaagactgtggtaagacttatctttaaaatacagcattaaagggcattagaaatacatttggaagagaaggaatcgcaaattttcagtgttaaaggaaacttttattatcttactgttgtgaaaggtatagttatgttgcattgtattagagccttcaaaaacgaaaaagacatttgagtgggttaaaaaaatgaccttagtttgatttttaaattaaattaaaaatttttttttgagccagtcttcctttgttgcccaggctggagtgcagtgatgtgatctcggctcactgcagcctcgatctctcaggctcaagtgattctctcgcctcagtctcccttaaaaattgttaaaaaataatttggaacttcrtgtgtcttttgtattgcttgatagcagcatagaatatgtgaggtatttttggctactttgtgaattagccttttcatctctcatttctgagtgctagatctgataggagcagatattccaagttgaagcagcctacaggcactttagccygtgtaaatgttcaccattgccgtttgtagagtagagggaaggctgttagaaacaggcagaatcctctgttagtttcttccatcagttttaagtgttaaagtcttggggaagcctcttagtgcagcaacacatttctctgacatcagctgcttgaggaatgaatttttgaaaggagttactaaactgtaactgaatatttgtattaacttaaaaaaaawtgaatcgtaagcctgctgctgttgagacagatgatccgaattggtctttttatctttcctgtgttttggttgtcttcagttattttctggtcaytttttaagttaatatttatttttcttgtcttgtagtatgccaacgtaggttggcagtatgctgcctaatccaaatttgtgtgtgtctgtgtgtttttcctttcaggatttttgtaattttatccctgataattcccagctggaatacacacaggagtgcaaggtatgaccccaggccctttctcagctgctggtgtcagtggtgttgagctgggttatgtagtggagagcggggcatyggggtcgcagggagcacagacttgaagtcagactgtccctcatgttgattcccaaactggagtcaggcggggtgtttgctttgtgacactgaacagttttctaagtttgaaagcttgttcctttggagggggagggttcaatggatgatgcgtggtgaacacccagtagtgctagcccttggggctgtcgtctgtcttgccctttttctcctcactgggctgacagcacatctgggtctgggccctgggatgcctcacagccacctggagtggaggtttctggtgaggagtttctttttctgtttcctgaagtttcctttcctcaatttgttgtctttgtcttgtccttactctttctttcttctcctaggtgttgattctaatccacattaatgagatttgctgggtgtagtaaactaggctagagggagctgagctaaaattggcagtgtggcaccttgggcgctgacagaagctgctagtggttggggtagggctttctgcatttttgtgactgttttgctcaatggagttcagggcggactctttggtgaggagaggtgcatccccaccactgtcctgcctgccctgcagtggccccgtgtgaagagaccctcagcccggcccttctcaaacctgtctgccctcaagcgagtcgggtgtgtgtctcagggtcctcaacccattttagtcaacactcactaaagacccttaggcctttgtacatttttaataaccatttttataacgtgggtgactaagaatgttggcagtatggtgattcctgcaggtagaagctgctgtctgtgagctctggtcagttacttttctacaaaacacagacttctcctgttctgtttagtagaaggaattaggattcaggttcttgaatgaagagttatgggcaaaaatcagggaacattgtatttaaaagaaaatttgttttgttaattagtaaacattccggggaacgttcattaaagaatgacaaacygcagagtttgtgaagcttttgaagagagttatatgtgttttttcttattaattaaaaatatttttaaaaaatttttcttagactaagaatgccaacattctaggattctgctggactagttcaactgaaattgtcttcataacagatcaaggaatcgaattttaccaggtattatgtttatcatttatgtttgttggttaaagttcagtgatagcattctggcagccttttgaattcagtactgaatatatatatatatattttaaacattttctagagatggagtcttgctctgttgcccaggctgcagtgcagtggcaccatcatggctcactgtaatctcaaactcctgggctcaagcaatcctcctgcctcagtctcctgagtaggtgggactacaggcatgtaccaccatgcctggctaatttttctttttattattttattttattttattttatttttgagacggagtttcgctcttgttgcccaggctggtggagtgcaatggcgcgatctcggctcaccgcaacctccgcctcccaggttcaagcgattctcctgtctcagcctcgtgagtagatgggattacaggcatgcatcaccatgcccgggtaattttgtatttttagtagagacgggatttctccatgttgagactggtctcgaactcccgacctcaggtgatccacccgcctcggcctcccaaagtgctgggattacaggcgtgagccactgcgcccggccctggctaatttttaaacttttttgtagagacgaagtcttgctatgttgcccaggctggtgtcaaactcctaacctcaactcctgccttggccactcagctttagtctcttgctggggattttattctttttttttttttttataattgcaagtaataaattaaaaaaaaaaaaaagaaaagaaaaagggcttggtggcccrtgcctgtaattccagctctttggaaggccaaggtgggtggatggcttgagtccaggagtctgagaccagccaggccaacatgatgaaatcccatctctataaaaaatacaaaatgttagtcaggcatggtggtgtgcgcctgtagtcccagctacttgggaggctgaagtgggaggattgcttgagcctgggaggcaggaggttgcagtgagccaagatcacagcactgcactccagcctggatgacagtgagaccccatctcaaaaaaaaaaacaaaaacacaacaacattaaaaagtgggcaaaggccaggtacagtggctcacacctgtaatcccagcactttgggagaccgaggtgggcagatcacctgaggtcaggagttcgagaccagcatggccaacatgacgaaaccctgtctctattaaaaatacaaaaattagccaggttggtggcaggcacctgtaatcccagctactagggaggctgaggccagggaattgcttgaacctggaaggcggagcttgtagtgagctgagatggtgccactgcactccagcctgggcaacagagcgagactccgtctcaaaaaaaaaaaagtgggcaaaggacatgagcagacactttttaaaagaagacacacatgcgaccaacaaacataaaagagctcaacatcactgatcattagagaaatgcaaatcaaaaccacaatgagaaactatctcacactagtcagcatagccattataaaaaagtcaaagaataacagatactggcaaggttgtggagaaaagggaacccttatgcactattgctgggagtgtaaattagttcaacctttgtggaaaacagtatggcgattcctcagagagctaaaagcagaactactgtttgacctagcagccccattactgggtgtaatatgcagaggaatataaattattctaccataaaggcacatgcacgtgaatgttcattgcagcactgttcacaatggcaaagacatggaatcatcctaaatgcccatcagtgacagattggataaagaaaatgtggtacatatataccatggaatactatgcagccataaaaatgaayaagatcatgtcttttgtgggaacatggatggagctggaggccatcatccttagcaaactaacacaggaacagaaaaccaaataccacatgttctcacttctaagtgggagctaaatgtaagttatgaatgcaaagaaggaaacaacagacacggggggctacttgagcaggggagggtgggaggagggagaggagcagaaaagataactattgggtactggacttaatacctgggtgatgaaataatctgtaccacaaaccccgtgacatgagtttacgtatgtaacaaaccttcacatctatccctgaacctaaaagttaaaacaaaaaacattcaaacattgcaagatatgtaatatggaaagcaaatgttccctataatcccgataaataattattatgaacagtttggtgcatattcctctatttttaaaaataaatacaaacttctttttaacaaaaaggggaatgttgtatataaacttttgcagctagctttttttttttttgtccaaagtgtatcttggacatctttctatattttattctgactgggtagtatyccactgtatggatggactgcagtttaaaaattttcttgttatkggacattggctggttttccatttttttgtgattacaaataacccttcagtaacatgcttgtacacacttctttatattagagggagagttgcagtataggtacgaacatctgaaaagctgaaccagtatcgccaaatttcttctagacatgtgtattttcactagcaatataggaacttctgcttttcatacctttaggaggactggatattatcagtctatagacatttgccaacctgagaggtagaaagacttttttttttttttttttttctgagacagagtctcactccgtcgcccaggctggagtgcaatggtgcgatctcggctcacggcaacctccacctcctgggttcaagcaattctcctgcctcagcctcccaagtagctgggtctacaggcgcccagcaccacgcctggctaatttttgtatttttagaagaggtggggtttcaccatgttggccaggctggtcttgaacccctggcctcaaataatccacctatctcggccccctaaagtgctgggattacaggcgtgagccaccatgcctggccgaaagacattttaatttgcattttacattactagggaagtaagcatcttttcatttgtatattgtccatttgtattttgttaacttcctcttaaaatttttttattttgtaataattattttgagacaggatctctgtcacccaggctggagtacagtggcacaatcacggctcactgcagcctcgacctcctagcctcacgtagtcctcccacctcagcttcctgagtagctggaactacaggtgtgtgccagcacgcccaacttaatttttttttcctttttttttttttgtagagatgaggtcttgctgtgttgcctagactggtcttgaactcctaggttcaagccattcttctgccttggcctcccagagtgctgggatttatgggcatgagccactgtgtgtggtcaaaaatattttttttactgtggtaaaaaaacatacaacatttattatcttaactgtttttaagtgttcagttcagtagtgttaagtatattcattcacattgttatgaaatagctccagaacttttttcatcttgtgaaaccaaaactatccagtaaacaactccccttatcccttccctgcagccccagcaatctctattttactttctgtttctatgaatttgactcctttttttttaagatggagtcttgctctgttgcccaggctggagtgcagtggcgtgatctcagctcactgcaacctctgtctcctgggttcaggcgattctcctgtctcagcttcctgaatagctgggattacaggtgtgcgccaccacgcctggctaatttttgtatttttggtagagatggggtttcaccatgttggccaagctggtcttgaactcctgacttcaggtgatccactcacctcagcctcccaaagtgctgggattacaggcgtgagccactgtgtccggccgaatttgattaccttttatacttcatataagtgaaattatacagtatttgtccctttgtgactggcttatttcatctaccataatttcctacaggttcccccatgccatagcatgtgatagggtttcctttttaagactgataataccgcactgagcgtatacaccacattttgcttatccattcatctgttgagggacatttgggttgcttctgcctcttggccattgtgaatagtgctgctgtcaatacaggtatgcagataccgcttcaagatcccgttttcagttcttttagatttatacccagagtgagattgctggagcagatggtagttctgtttctgaatattttagggaaccgctatactgttttccatagcagttacaccattttgcaatccctccaagtgtacaagggtcccagtttctccatatcctcaccaacacttgctgttttgttttgttttgtttttgatactagccatcttaattgtggttttgatttgcgctctttgttgattagtgatgttgagcacttttgtgtgtgtgttttggccactttgtgtatcatctttggagaaatgactaattcgggtcattgtgcctatttttaaaatcaaattactattatttgttgaattgtagttctttatatattctgatattarcaccttcttagagatacaatttgcaagtattttctccgaatccggaggttgcctttccactctgtggattgtgtcctttgatgtacctgcctgtttcttttcatctgttccagcttcctgacctattaagcatgcttctgagatctctaaggggaactaatttagagggtgttaagagttctttcaggttttaattttgttgacctaatgaaagtcatataatttagaatgtatggttagagaaaatacacctgtgtgttaatgccatggtgctttgctgtaaggccatcatcgaaatcttagtaatgactggctgggcayggtggctcatgcctgtaatcctagcactttgggaggccgaggtgggcgatcatctgaggtcaggagttcgagaccagcctggccgccatggcgaaaccccgtctctattaaactccatctttactaagtgccgtctctactgtctcaaaataaaaatacaaaaattagctgggtgtggtggtgggcgcctataatcccagttacttgggaggctgaggcagaagaatcccttgaacgtgggaggtggaggttgcggtgagccgagattgtgccactgcactccagcctgggcaacaagagtgaaactccgtctcaaaaaaaaaaaaaatttgtaatgaccaataggagaactttaaacaaactttagacaaattccatacacacagaaatagaattttgtacatgtgattgcatgggaaggatggcttgctttctgggggagttccctatggtaatcatttaaaagtctgtctttctgttctctgcagtgggaaagtataccttaaggttacctagatggcttcagatcttcaagaaaaaagttaaaaagaaagaagactctagcacatcctaattattatagttcttaagaagcttacggctcctgcccctgacttgcgcagcagttcttcagtgcagtgtaccatgagcattaatgtcttgggggctctgtacagtgttctgtaatatcggaatatttagggtacattgaaaatgtgcctggattataaagtactgcatttgtatggagtcttatgaacacatctgctagaagaagggagctcctcccaggcccagtgtagactggagtcgaggtggaggccaagcagaaggcagatctgccatggtctgggaggtggccgagttaacacatggggtcctggaggtgtcagtttcttttggccgtttcctggatgaggagaaatttgttgtaaattgctcttaggtgtatccatgtgctccacatgcccaggcatgtggaggcacagataaggattttggagggaaacagcctacccaggctataattgctttgttaaggggcaggttccctaatccactcttggagccttgtttctcatctggctaatagggccagtgatgcctgcctctcagtcgtggcaaagagtaaatgagttaggaggctctgtaaagcaccaagcatagggctggttaagtagtagctgtaataagtacaagtgagaatgttcatttcacttagtgggtttcttctgctttttattctcagagcgcactgtaaggatcttctgacagtttgctgttattgatttatttattaattgagactgaatctcgctctgtcactcacgctggagtgtgatggtgcaatcttgactcactgcaacctctgcctcctgggttcattcaagcaattcttgtgcctcagccttctgagtagctggaattacaggcatgtgccaccacgcctggctaatttttgtatttttagtagagatggggttttaccattttgtccaggctggtctcgaactcctgacctcaggtgatccgcccaccttagcctcccaaagtgctgggattagtttgccgttttttaaatgaagatcctgtttcttaaactctgcttcaggtattaccagagaaacggagtctgaaactcttgaagagccacaatctcaatgtgaattggtacatgtactgccccgagagcgccgtgatcttgctgtctaccacrgtcctggagaatgtcctgcagccttttcactttagggtaagaggaagcctcccctgaaaaaaacacctttccccagttgtcccctgttcctgtagcatcctaatgtgtcaggcacgttagggacaggttcctctagccgtaacgtcaccgctctgaccactagagggcactctgtatacccgtcagctcctggagccattcattctatgctgggcagacaggctgtgagaggacatgggggacggtggaaaggatccaaagacgaagtctgtgtttatccttgttggttttacacagggaatgatgaaacattgaaggggtttaataagcttttcctaaaacattttccccctaaacaggctggcactatgtcgaagctgcccaaatttgagattgaattaccagctgcgcctaagtcaactaaacccagcctttccgaaagagacatcgcaatggctaccatgtatgtccgtgtcagagagaattccatcctgtgattgctttcagtaatataaataatagaaggagtgtgttacaagcaccacgtgatgccctgacccctagaacacataaggaggactccccttgttctgggtattcagtgtataggtcctgtgaacatagaaaacctgcagtgtttttggcattcctttttgatttttatcagctttgtgatgctaaggaattcctttacctttctagcctgataaaacaagaacattgaaccaatttatttcttagtatctttgttttagaatttcttcttctttttttttttttttcgagacagagtcttgttctgtcccctaggctggagtgcagtggtgcagtgtcggctcactgcagcctccacctcccaggctcaaacgattcttctgcttcagcctcccaagtagctgggattacaagtgtgcgtcacctcgcccggctagtctttgtatttttggtagagacagggcttcaccatgttggccaggctggtctcgaactcctgacctcaagtgatccacctgccttggcttcccaaagtgctgggattacaggcatgagccactgtgcctggccaagtttattttttttaaaagctcagttaaataataattgttctaaataagaaaatagattaagattttatgtaacagacatggaactaaattacgtatatatagaggtatattttcttttactttttttttttgtttgtttttgtgatggagtcttgctctgttgccaggctggagtacagtggcacgatcttggctcactgcaacctccgcctcccaggttcaagcgattctcctgcctcagcctcccgagtagctgggactacaggtgcgtgccaccatgcccaactaatttttgtatttttagtagagacagggtttcaccatgttggccagggtggtctcggtctcttgacctcttgatctgccctcctcagcctcccaaagtgttgggattacaggcgtgagccaccacgcctggcagtacggaggtatattttcatttgaaaaagtggatatctcagtttttaartttgtaatgaaaattttaaacacacaatagagactaataaaaaagaacccctgtatgcctgtatctgattcgacaatagtcaaaattttgcttctaagttacttctgattcttctgtggcctaaaacagtggcccaaactttcaaactttatggtagttagtataatgttctttcatttcttcttcctttttttttaaacrtactcttctgtggcattcctgtttatttttaaattttttttggagagtgtcgctctgttgcccaggctggagtgcagtgttacaatctcagctcaccacaacctccgccttctaggttcaagtgattttcctgccacagtctcccaagtagctgggactacaggcgcatgccaccacatctggataatttttgtattttctgaagagatggagtttcaccatgttgcccaggctggtcttgaactcctgggctcgggtgatcctcccgcctcatcctcccaaagtgctgggtttataggcatgagccgccgtgcccagccagcattcctgtttagacaatagataaagtgagagcagtcctggctgaagtggaggtggggacctgttccctcccaccttggtctcctccttgtccctgggcaggcccagcacagagtttaccactggactagaatatgcattcaggaactgttcacagcaacatttattagatggcacttaaatagaaaaggctgagcatggtggcacacacctgtaataccagtgactggggaggccaaggcagggggatcgccttgaggccaggagttcaagaccagcccgggcaacatagtgagaccctgtttctacaaaaaaatttaaaaattagccaggcacggtggcacgtgcatgtagtcctagctactggggaggctgaggtgagggaagatcgccaaagcctaggaggtggaggttgcagtgagctgtggttgcaccactgcattccagcctgggtgacagagggagaccctgtctctgaaaaatgaaaaaaaaaaatagtgattatattttcctgttattaaggaatatacattcattatacaaaacttggaaaacagagaagaaaatgaacttagcatatcactcaagtataactattacatgtgtttctttccaatcattttagactctatgcttaggtttggggttttcttttaaaatattatgatcaagctgtgtttagtgtgtgttctcttttccacttaactttataataggctttgagtaactgcatgtttctttgtaaacacttgttggcagcaaaatactccattaagtgaatatcttataatttacttaaccgtgatgccatttagaacaaaggaattttgaatggccagatgtgatttatgtctgtttgttccctaattagatacgggcagctgtatgttctcttcttgaggcatcattctcggacctccaacagcacaggagcggaggtggtcctctatcatctaccacggtagatttcatgctttgttttccctctctctctgattttaaaatgtgaactgyagcttgttgatctgttttttgctttctatcctacagagaaggtgcctgtaaaaagatgcacatattgaagttaaataggacgggaaagtttgccctgaacgtggtggacaacctggtagtcgtgcatcatcaggatacagaggtacaagctgtctgcgtttctaccaaagttaaggttgcttaaaagccttgtgaaaattggtggctgggcacggtggatcacgcctgtaatcccagcactttgggaggccaaggcggacagattgcttgagcccaggagttcgagaccagcctgagcagcatggcaaaaccccacctatataaaaaatacaaaaattagccgggcgtggtagtgcacgcctatagtcccagctacttgtggggctaaggctggaggatggcttgagcccaggaggtcggggcttcagtgagtggagatcgcgccactgcactccagcctgggtgatggagcaagatcctgtctccgaaaaaaaaaaaaaattggcaaaatgtctgaataagactagaaagtgcatttttatgctaagagttttggtcttccagatggaaatgggtttggtagtctyaagtagtttagaaaaaagtgattgtgtcagttgattaaagataattcaaaactatttcagaaactaacgcttgagatttgaccttggaagaaggtgggaatccgctccattccacgagtacttgaactctstgttgcaattgtgagcatggatgacagtgctgggggataatggttttgaggccgtgtggaccaggacaactagaatgggtcctgtgggctgggcctctgatataaagaagctgcttmcctcctctaccctcccagagggtggtgacgctaactctgtgacacgtgaggatgtttccagttgaaatgacagagatctgcttaggtcactttgagtgagctcatcaaaggaagcatgtcataaatgcaggaaatacttgtgagaggagataaaaatattaaaagagagttgtgatgttaatsacaaattccttctcaagtaagagctagcctgtagggwggaaatgcaaacacaggcttttaaactgatttaaacagcaagatgggatggaatgaaagcaactgggcaaaccatgattgattttggcctcagtcttgtctttttcccccccagacatcggtaatattcgatatcaagttacggggagagtttgacggctccgttaccttccaccaccccgtgcttccygctcgatcgatccagccctatcagatccccatcacaggtaacacgggttctgtagaggagtctgtgctgccctttcaccatgtggctgtgttctcaccatgatctttgggagtcacgttaaaagtggagtgaggaataaacagagattcccagatctgtctgattttgccaggggccatttgttccagttttgttgttgttttgagacagtctcactgagtcacccaggctggtaggtagtgtcgtgatcttggctcactacartctccacctcctgggttcaagtgattatcctgcctcagcctcccaagtagtggggattacaggtgtgtgccaccgtgcccagctaatttttatatttttttaaatttatttttttgacagagcctcactttgttgcccaggctggagtgcagtggcatgatctcggctcactgcaacctccacctgtctgtcacaaggttcaagcttgtgaggtattcaagcaattgaaccaagtattcaatcgcttaaatacttgtgagaggagataaggttcaagtgattctcctgcctcagcctcccaagtagctgggattacaggcgtgcaccaccacgcccagctaatttttttgtatttttagtagagatggggtttcaccatgttggccaggctggtcttgaacttctggcctcaagtgatctgcccaccttggcctctcaaagtggtgggattacaggcatgagccaccacgcctggcccaaatttttatatttttggtagagatgggatttcaccatgttggccagactggtcttgaactcctgacctcaggtgatccgcctgcctcgctctcccaaagtgctaggattacaagtgtgagccaccatgcccagcctgttctagttttttaaaaaatgcaactactactgatcctataagctaaaattatgttgtgaaaaaagcattttctaagatagatgaatctcccttgggaggaaatagaataatttatcttccctgagctttagaatggatagttttgattagccgttgatggtgaaatatgttttaatattgaatacacccgtaacgttttctgtttgccttagctctgtaaygctgaaattaactttggctgtaggtttgttactgtaacctgggatcacttttctctttctcacattccgtgtgacagtgatgatgaatattgcattctttgggactgacagtcamagtaagtgcttcggctgtggctcttaggcttacccaaatcagtcctccttctgtctggagaggtggggttgggaagtcagaagagtggaggtcaggaattcaggaaaagggaaagaagtcatttatttgcttcgttttgcctttttccagtgtaattgattttaagatagaactgaaagaatattcaacacacactctctctcttttttttttttccttaaacagaactttattttctcacagttctggaggctagaagttcaagatcaagatgtctgcaggtttgctttcttctgaggcctccctcctggcaggcctctttgcagatggccaccttctcactgtgttctcacagggtctttcttctgtgcctgtccctcgcagcagtctctcccggctctcttttgaaggagattggagtgcagaattggctagtctgaggtttcagtgtgcaagacgtagtcagatggctcacatttggaaccctrgtagtaatgttttattctttgtccgatggcattgggcgggttgacccagcctgcagtcaggatttccttgtaccgttcacccgggagttcagaatcgcactctggctgaaagttcagcaagagcaccattgtcagcctgactgccctgtcttgctggaccagccaaaagcttagttactttctggcacagttggaggaaggagctggttcttaacagacgttcaattaggtcttttkgctttctgtgttctttcaagcttcttccttttcctttgtaaataatgttagtattgaaagaatagattttgccaagtgattgtcttgtgtctgctgcccacttggcatgaaggtaactgctggtgaattgggggaaaaaaactaaacatttagaacaagcctgtccaacccacggtctgtgggccacatgtggcccaggacagctttgaatgcagcccaacacaaattcttaaactttcttaaaacattatgagatttttttaatgatattttttaagctcatcagctattgttagtgttagtgtattttatgygtggcccaagaccattcttcttcttcctcttaaggcccagggaagccaaaacattggacacccctggcttagaaccttcagctctgttccggtggtacaggaccagttaggaggcatcaggttctaaccatctggtcataagggaacagatgcgaggcctggtcacagtaacagcccgtgcagagatcaataggaggaaatcaggaatccactgagggtctggggatctaggtagtgtgggctgcaaagcattttcagaggttagtgactctccttttgtttcctgctgggctgtgagccctggcggcttgatgcatccgtgtgtcttgcccactgtgctgccactgggtgggcgtgctcaggaattgaatgggcctgttgagaaagatataaccagcacttttgggaagagtcagccaccctttttctttttgttttgggcctgttagaacagtgggtctcaatctgactacatattaggatcatctggggggccttaaaaatgaaagctctcacctgacagtgtgtaggtcagccacccaaaggtgagggctrtgcactcggcgcagaccttgacacttaggtccaaagcgcgagtgctcttcgccaaagcttgtctgcctgggctctttcctacctttgggtggtctgttcacaatgaccctttctctgaccagctgattgaaacctgccttctgattgtacctgggtaattggaacagaaccaggagtcatggttagcttgtagggctgcctgcatggctcatgagcagtataactggttgttaacggtccctgtcatgtgaggttttgggggtctgcttcccagacgagctcactgtgcttggacctactctatgcaatggataatcgaactaattatttagataattaagtggctgggcacagtggctcatgcctgtaatcgcagcatgttgggaggctgaggtgggcagatcacttaagcccaggagttggagaccagcctaggtaacatagaccttgtcttcacaaaaaaaaaaaaaaaaaaaaaaaaaaagaaaaaaagttagggcatggtcacatgcctgtagtcctagctactctgaaggctgaggcaggaggaccacttgagccaaggagttcgtggttatagtgggctatgatcaactactgcactcaagcctggacagcagagcaacaccctctcttaaagaaaaaaaaagataattaagctacaagccacatttatttgaaacattctccgtggatgatctgggtatttgattttgaatccttcaagtaaatttctcagttccttaacgtgcatatgtaaacgatcatgagtcatctttggttattaaaaataacccaaaccacagtgattgaagccttgacatgctttctttttcttggtgagattttcctggattgtyagctccttcccccttcctccccgtacgtgctttcagtgagacggaacagttcatttcttccktgactacaattgaataaacatttcgtaatgacattaaaaagtattgacttttgtgtcataagtaccagcatttgcagcattttctgactgcatcgttgcacttatgttttctcaatttgtaggtcctgctgccgtgaccagccagtctcctgttccatgtaaactctgtatcctttactraggtgtggcaccgtgcacaacagggcaagtggtcaccctcagagagtggtcctgaagtcctcctccgggcagctgtgaataamactccgagagccaccccgcaggcagcttccctgactgtccaggggcctygcgtttagcgtggacycagtacatggtgggcaggggcgagtgctagcggaaactgggtttgctttttgtttycatcttttcctggtttagaatttcctataacatgtggattcttcatcttggattgtctttcaacctgacatcattatcagcgcaagccaaggtaggtcagcggggacagttgtcgtgttacaacatggtgcttgttgactttggatcccagttgtagccagggacgttttcaaggtgaatctcttagaaatgacccctcctttcaagcgtgggaatgggatttttttttttcactttatamgttttttactatatgtgcattttatcaagaacatatactacttttaataattaaagcaacaactaagaatgccattctcctgcttaagcccattctggaaaagccagactccaccccagggtggatggaaagccggactccaccccagggtgtctccctcatttctcccatcraccttcccaccggtgtccgtgcccttttctgttctgcatgagcccgggaggtgtgctcctctttctggccttgctgaggaagcctcctcagtctgttaattgtctcttcctgggtaatytctttattagagaaatcttttttttttttttttttttttttgagacggagttttgctcgttgcccaggctggagtgcaatggcgtgatcttggctcactgcaacctccgcctcccgggttcaagcgattctcctgcctcagcctcctgaatagctgggattacaggcatgtgccaccacgcccagctaattttgtatttttagtagagacgaggtttttccatgttggtcaggctggtctcaaactcccaacctcaggtgatccgcctgcctcggcctcccaaagtgctgggattacaggcatgagccactgtgcccggcctaaagaaatcttatttttttaaggcagggtcttgctccgtcacccagcctggagtgcagtagtgctatctcagcttactgcagccttgagctcctgggctcaggcgatcctcctgcttcagcctcccaagtagctgggcctacaggcgcacatcaccacgcccagttaatttattataataataataataattattttgagacggaatctcgctttgtcaccaggctggagtgcartggtgccatctcggctcactgcaacctccaactcctgggtttaagcgattctcctgcctcagcctccccagtagctgggattacaggcatgcgccaccacacccagctaatttttgtatttttagtagatacggggtttcaccatgttggccaggatggtctcgatctcctgacctcgtgatctgcccacctcagcctcccaaagtgctgggattacaggtgtgagccaccacagccggcctataattttttttttgtagagacagggtcttgccatgttgcccctgtgtctctaatacctcgccaggctggttattagagaatctcctatgttactctttaatcctctgtgtattttcctgcctttcctctggaattcctaagaactcttgaggagagaattagccctgatgctgtaggcatccactgtatgtaatgcattgttgtgccttgtctgtaacccatagcctcatgtgacatccactgtatgtatgtaatgaagtcatttctctcctgtgcatctcgctggtgttttcctgtacagctgctctgtacctgccttgggccaactgaaaagggggtcacccagatgattttttatgtggcacttcattctcctgtggcatcccaattgggaaaggccacaccagatgctggcagtgtgggtgatcagtacatttatgggtcgatgaatggatgagttatgatgttccattgagagcctctggagttaccttttaaactaatgagctgttgtaggagaaaccaaagcacaggactgaagttgatgccacgtgttgacatctttttctattttaaacgttaaaagaggggctaggtctagggaagtccccgtttggaatgaaggactaggagctacacctttgatgtgcccctgaatgcagaggttacttggaaaagagtcagccaggtgtgcggtggttgggctgtcatcctcctgtggtagacacgctcctgaattgctcctgaatggctcagctctgctttggttaggaaggaaaagctacactgactgtactttgcggctttttatcaccacctgccacccgccccgcagatgtttaggggaaccacttttgggcttttgttacggtttgcatcatactgttttatttgctgcctcttaaaatccaggttacctctggaacctccaagtgaaacttgagcccatagtaaatctcttaccagacaaaggaagactcatggactttctcctccagagaaaggaatgcaagatggtcatcctgtctgtctgttcacagagtaagttgaatccttcccccttgctctgattccagtgtgaggcctgtgctgcccaacactttttatcgggatgtgggctacattgttgtgtcttgtctgtgacccacagcctcattctttatgtgaggggtggctatgtgaccccctaggaaaggctgctaaatggaaagatgatttgtagagatactggtagaaaagaacaataaatgggatggttctgaatgaaagtgggcacacaggaggggagtgggccaccacccctggccttcacacacacctctttcaaaatccaagccactcactgcatatgtgtcttctttaagaatcccctactgaggccaggcatggtggctcatgcttataatcccagcactctgggaggctgaagcaggaggattgcctgagcctaggagttcgagaccagcctggacgacaacatggcaaaaccctgtctctmcaaaaaaaaaaaaaaaaaaaaaaaaaattagctgagtttggtggtatacacctgtggccccagctactccagaggctgccgagggaggattccttgagcccgggaggacgaggctgcagcgagccgtttgtgtcagtgtacctccagcctgggcgacagagcaagaccctgtatccaaaaaaaaataataataataatcccctaccaatatgtgctgttggtgtttgtttttgttttggtatagatggggtcttgccttgttgcccaggctggtctcaaactcccagcgttaagtgatccttctgcctcggcctacccaaagtgctgggattataggcatgtgccactgagcctggcctgctatagcttttttttttttttttttttttaaccgtaaccagaaaggggttgcgaatgacatctagctgtcaggtctttaaagtattgtatttcttaragtgtcctttaaaggtacttttgcattggtaaccttttgagattagtttttatcatagcaacgtgtggaaattctgaagctgacatgaagttggtttgatccgtgtgtgaacattgtgcctttccagtgttaagtgagtcagacagagcatcgctgcccgtgatagccactgtttttgataaactcaaccatgagtataaaaagtacctggatgccgascagagttatgcgatggtgagttacatggagtatgacaaagggtcctcctcccccaccccctcccgggtattttctaagtaattatgatgcaaaattgtttcctatatattagaataaggtcgctgagatttgccgcctgccatagggcaaggtggcagtagtggkggatagtggaggagtagtaaattcagggtccctgcatcccackagctggcggctgcatctcacttcataccttcactgtttttgtttttcccatctgtgtttgatcttgcctgtagatccttggtctactgttatagatgagaaaaatcagtctctgctttgcaatattttgtatatttttctgttatgccagagtgaggacttagaaaattaaattagaaatatttatatttgccacacctttcttcccttttgggaaagaatcctgttgagatagtgacgattcagtgttagcacttagcaggcgtgtttgtagtcaaggtaataaccatggcttatcgccaccaattcccgctgtattacttgtacatcatatcttctgaagccagaagaaaagtttaggacaaggagaatgaattatttcaattccaggatctgattagtcctaggctgaaaatggttttaaaccaacaaaagccccagaactccactcccctttagctgttcatggaagggtaagaggtctgagacaggcactgaagagggccagttgctgggacagtgtccattcctacgctgccagacgtgagggatggcyragtccttttggactctattgctgtgggtgttctgggctgtgggaatcagtaggtctgatcccaaatggcagtttctgtgccgtcccacacggtctgctgggctccataaaccgtcatgactcagcagtgtgggccactgaccagccacatgagcagcatctggagtttcttggaaatgcaagttctcaggctacaccccacagctattgcataatctgcacggatctgaactgcttttttttttttgagacggagttttgttcttattgcccaggctggagtgcaatggtgagatcttggctcaccgcaacctctgcctcctgggttcaagggattctcctgcctcagcctcctgagtagctgggattacaggcatgcgcacaggaaaaagttgtatctaagtagagaaagtgttttccgctcatatcctgggtccacatcgaagaattcagtccttgtggatgaactgtaaacagcacccttcctctaagatgcygaagatcatagtttgtggtttttttctttcaggcrgtggaagcagggcagarccgaagcagcccgctcctcaagaggccggtgcggacccaggcggtgctggaccagtcagatgtgtacacccatgtcctgtcagccttngtggaaaagaaggtgggcygcagctttccgcctcttctggactgagaatgctcaaaacaaggaagttgctgaaaacgaggagacttcatgtgattagagtcacttgaagtgattagaatcactggagtttccttgggtgaggccctagagctggtagtttggcttctaatgctgaggcctaaagcataattgttgacgggtggttctggagcgatktgtgcaaaaccagtgaaagatgaacactgggccattttaagatggaaacaaggtgggggttggatagrgagttatatgcagcctcttttgcacctcgttggtatttgtaagaccacatttttttctccctaggagatgcctcataaatttgtgatagccgtgctgatggaatacattcgttctcttaaccagtttcagattgcagtacaggtaccttcaaatcatctgggcccaagttaaaacagaaggaatttaaaaaaaaaacacagtcactgtcttagaagatgactcatatgctaagacaggtctgcctccctgactcagaatgctgagtgactcctgacattattagttggaatgggaagtgtaaggtcaagttggggtctttacctgcatgacgaaaccacttcttgtaatgacagacttttactgtgttggttagaatagccagtccttggggagcctctagtctgttgtagctgaatgatttggaagtgttctttcactttttacttttgtcctcagcattayctacatgaacttgttatcaaaacccttgtccagcacaacctcttttatatgctgcatcagttcctgcagtaccacgtcctcagcgactccaaacctttggtatgcattgccagatttttacttccattgtggttaaaaatggaaaattttaaccgttatctttccaactgaagtgggtctaaaaatgtctttcaggcttgtctgctgttatccctagagagtttctatcctcctgctcatcagctatctctggacatgctgaaggtaactctgatgtgtgaggttttagactatggaaactaactctgttcctgttgtttgcactgacctggacttctctcccttactgctagcgactttcaacagcaaatgatgaaatagtagaagttctcctttccaaacaccaagtgttagctgccttaaggtttatccggggcattggtggccatgacaacatttctgcacgaaaatttttagatgctgcaaagcagactgaagacaacatgcttttctatacaatattccgcttttttgaacagcgaaaccagcgtttgcgagggagccccaatttcacaccaggtgagaatgcaatgaaaagacttggggtaaccatagcctcaaagagtagcagagggcactggcagctggtgggcgaggaccctgggttagcatttttgtaaacaacacaatttgataacagcccacctagcccttggcccattatttgtagtagagtgaattcagtatactgacagaatctgaattatgctctggaactcaccgaggaggtgtgttttgagtcaagacacatttaggacccagatcaggcacagcccatctcttatagcagatcttggaatatctcttaaagccaggaataagacggcaaatggtggctaagggttttaaagggtctggggcttattaaggtttcagttttatgaagtatacattggttgatcattctcattttttttttgagacagagtctcgctccgttgcccaggctggagtgcagtggtgtgatctcggttcactgcaacctccgctgggttcaagcgattcttctgcctcagcctcctgagtagttgggactacaggtgcgtgccaccacacccggctgatttttgtatttttagtagagatggggttttactatattgtccaggctggtctcaaactcctgacctcatgatccgcctgcctcagcctcccaaagtgctgggattacaggtttgagccaccgcacctggccctggttgatcattctcatctccaaatagttatacaacctaagacatcatctttaggatagggaaggatcagggctgtctaatgaaacttctaggtctatttctagctcaatgtaagacggcatttagttaccataaggacaggttagatagaatctcttccatttagcttttgtatttgtctctcaaagcagatagggtaaccccaaaacttaggaaaacaatgtattttattaaagaaaaataagttaaaacccagtagacacacctacgagatgctttctttgtccctcatttcatgccacatctaactggcaattaaatctcttcctttctaggggaacactgtgaagaacatgttgcttttttcaaacagatttttggagaccaagctctaatgaggcctacaacattctgaaatcacttgctgtttttttatataaaaatgtgtacaaagttaatttattgcattaataaagctctttaaactataaaatgttataaagtgtatctacaacctcaactgtcactaaaaatatggtatagaacttgtgggatggcttactcctaaaaggagagacagacagtgcattgattggcctttacagagtgtcagtgagcggatcacattcacagccatctagtgtcacctcctgcttgccaaagaatgaggtttctttcctgaagaggctgggagaagtttagtgtcctgtggttgcctccagatctagtaatactgcttcccaagtcaactgtgcattcctgagttcacaggcgctacgttcaaagctgctgccaaacaaccgatggttggcaccatccggtgttcaacttggccttgccgatgcagcacccgtccagtggtaaaccgaccgacccttagacacagttcagtcaggatgccctgcgagagggctagaaatttagaagccgttcgcgctctgttcctttgtatcgctcttcagtggcacaacttttggctttatttactgatggccctatgagagagagagactttttcttatttctgcaggagaaagggagctagttggctgggcatagtggctcacgcctgtaatcccactttggaagactgaggcaggagaattgcttgagaccagcctggacaacagagtgagaccacatctctctccctctcttttggagatgggctctttgctttcttcctcaggctgcagtgcagtggtatgaacacgactcactgcatcctaagcccacccttctgggctcaagcaagcttcctgcctcagcctaacaagtaggtgggactgcagacgcacaccacttcacctggctaattttatttttgtagagatggaggcctcactatgttgcctaggctggtctcaaacgattctcctgtctcagccttccaaagtgctcatctcttttttttttttttttttcttaaaaggaactagtatattagattgtaatagaactactttctatcccccggagatgataaaaagcccctcattttcttaatcttctacttcagtgcttcaatttagtgacaaagctataaatgaagcaaatcagtattgttctttcaaccgtgggtcatttttgtgcaaggtgaagtggccatagaagtaaaaggatcaaggacagtctcgagatgaagaaaggcagcaagcactttgctaagaaacgggaaatccatgagggacataaaaagctgttctgcagcactgctggtgtgagagctggctgccagatggactccttcatctcagtggcagggaggagctgccctgcctgctgacactcagatccattcaaggactggctccaggcctttgtgaagcagacagatcaggcctccagaaaaaacatcgacaacttcctaataaagtagtctgcaccatcatgaatcccctggatgggttttttcttttagaagaaatttttttactcagtatcatttatcattatcaaatgaccattagtatgagttcaaatacttgaaaagaatgcctcaggatagaattccctttcagtaatgtccttctattgtgccacccttttaagatgagaactcttacctatgtaactgagtaagacagggagaaatattaatccgtgagtggctcccagtaagaccatggccaaatacatcctgaagtagaatatctggaaaatttgagatttggcaaaagccaacaccacaatccctccaaattttgtaagtgtgattccactgaacacctaaaagaagagatactgtgttagaaaccacttttaccaacctgtaattgaacaaaaacacttccttacaaggatttctcccaggttcaagtgattctcctgccccagcctcctgagtagctgggattaaacaggtgcacgccaccatgcctggctaatttttgtgtttttagtagagatggggtttcaccatgttggccatggtctcgaacccctggccgcaagtggtccgccagccttggcctcccaaagtgctggggttataggcatgagccaccgtggccagcccttatggggatttcttaatattcaaggttcaaagcaatgggaactgaacccaggtagcatcatctactacctaacactatttgctgccttatgatcctgggggagaggtatgaccaagttaaaagctgtgtattctgcacagacactgcatcgtgtctcccaattgattatctttctttatattctcaggtgaaaacttaaatatttaaaagtgttacgaaacaaagttttagtttttactctttaccaggtattttctacagtggtaaagagataggctaagccagggtgtagagttgaaccaagacgactctccaggcaccaaccgcacatcacacgctgggttctggcccgggctcccctgcattttaaatgggaaagactgccagctgtctcatgtttaacttgtctgttattttcctgcttcagcacactgccacctaaaaaggagccgtaccaacaggtacagttccacagaacgtccgttctgtccacgatgtggcagctaattcatgaattgcctgaaagcttgcaatccttagaagctgctttgtaagtacaggatccagactcttcagtcactgaggaggattactttgtggtgcgactctgccggcgtggccctgctcagggtactcacggagctgcccatgtgggcaagtgcctcttccgcgcgctccacgcggctgcctttcatgctcaccgtgaacgctctggttatgtggctgcagaactccacggagatgccacagctctgaaataaagcacttcctttaggatggctctcttcctgttgaagaccctaggcagccaccccgttctgaggatgggtgctaattacccagggcaccctgggtgctagaggaggccaagcatcccattggacttacaaggcctccatcacaccaatcttactgtaccaggaactttttggggccctctctacacacagccaaaagcctggttttctgtggcacgtttgtgttgaccaggagaaattgctggaacccgttaaggtcaccccacccgcaccgagctggcgcattgtcacaacttcttttcttggacctcagtgctcccctatctgaagcagggctcatatctgagagtacggatacactgttctattttccatgaataccttctcgagtgctctcatctttaatgattaaaagtacctgataaccacataggaggcaaaaggcactggtcggagagctcctggggcggggtgcaattttctaagtaaaaagtgaacatcctgctgtcatcaggctacaggcttgtgcaatctctaaagaataacaaattacaggcagactagcccagaactaggccaggaaatcacatttccatggtcagaggcaccatcaggtatactagtatagccgcaaggaatgggacaagagaaaaaattgaacagaaattgcctgtaatgtgcctatgctcccagatgtccaactcaatgctcgctccctctatgccctgtcccaccaccatccagcactcctccagcactcatcctgcctctccatgtgtgccaagagcaagcgccagacttggtatcttactccatctttagggtttacatggaatctaagacagccaattcccccaagtgaaacaggagctagggacaaactgagactgtatgaggactcaccatcaccaggttgaccaaggatacagcgttcagactgatgccccagagccacataactccaaacatgttgaccaagaccatggcgatggtggcacacatgatgactgcagaccagagctcacagcccaggaggaccatggtcaccagaaatatcgcgcccagggacacaccgaggttgaagatagtgtcgtcaatgatggtcaggtactgttcgtagaagacataaaacacactggaggggagaggggaggcctcattaaagctcgctctcactcccgaacactgcgtgttcatcctgtcaccactgccaagtggtcagactcctttgggaaacatcccttgcagaaaaccttgctggctgtctacaagactcaccgaaagcaactcacttgacctctcatggccactgaccacccagagaagggcccagcagtgatgcaaaatgtatatttttgataaagtttctgtttataagcccaatctatgctattttatagacatttacagagagcattccacagcattctgaaaaaacacaaaaaaacaaagaatcctgatctatcctgagacactacctcaggctcagcggggtccgtgcaaggcctgaggaaaacatgctttcatttattttctgccagagctaaccggctcttaacttcttccaaacaaatccaggccttcctgctttaagcgagatcatggggaggcaggaaaaataaatcacttgtttctcctacctttctacagtttctaaattcagtagttcatacataatacttttcttcctgggaaaaaaaacccctaacaatataaaaagtctacatacaggcagcatcccaaataaccagcagttagggattctggttcattgttggccaagaatgtgggccgggccctgctctgagccgcctgctctccaagcgccccctgccttaagccattttccagtgtgtgtctcttgcagctgtgcagtggcgcagagatcaagttttgcgtctctagccctcaggccttcacagagactttagattctgaactcctttgcccagcacccatttcctttgatatactgccctgtgctcagaatggagcaggggccagaacccaacctgaaaatcagcatcttgccaagggaaccctccccactcccacccagtgtaggccctttgctgggtaaaccccattgaaaaagggcaggctttacctgtaaggaaatactcggtaggcactgccgttaatgcccatggtttcggtgacattactggctataagtcgggctttcttcagagcgtcaataaagtcagcagaggtctgcagcacggtgtggtaggtcatgaagtacgtggctccgaccctggtgccatggccaaggaggatgttaactgcagaactataggcagcatgtcccctgaggaaagaatcctgggtgtcaagagagtccaggtcttgcaaaatatcagcagaatctgagcacttgaggctaagcaaaatcacctgaccctggactcagaggtcagacccagctgtacatttcagggatgaagaaggcccccagataagggaacaccaaaggtttagcttgttctctcccagactggcttctttttttttttattttgagacagagtcttgctctgtagcccaggctggagtgcagtggcgtgatctcggctcactgcaacctccacctcccgggttcaagcaattctccctgcctcagcctcccgaatagctgggattacaggcacctgccaccacgctcaactaacttttgtatttttttagtagagacagggttttgccatgttggcctggctagtcttgaactcctgaggtgatctcaggtgatccgcccacctcggcctccaaaagtactgggattacaggtgtgagccacttcgcctggccagatgggcttttctcgattgctctgggttctttggtacatagctgctgtttctccacctggtttcatgtataatcaaaggtacagggtttactcagtcctgttgtgtaataggaagcaggaaagggcaagggccctgggaacaacctcagccctgccacttactggtcatgtaaccccgagcaaaatgaccacctctgagccccagtctcctcttctgtaaatgggtataccaccacctactcataggctgcgtgatgagaaatggaataatgtcagggagtgcctggcatgacgctggcaccctggaggctccccaggaacggtggctactgccttcagaaaaactgaatctacttcaacttattttacgtaggccaaagcatccagtcagtgagtaaatcaagctgcaagattca

SEQ ID NO: 8922 - DNA, 26069 bp, Homo sapiens
gtgaggcggaggttgtggtgagccgagatcgcaccattgcactccagcctgggcaacaaaagcaaaactctgtctcaaaaaaaaaaaaaaaaagagtttcctcagagcctggatcctcgctgctcttttccactcacacacccttctctccggcttcctccctcctcctgcttggatttggagtaacatagatctgggttgcagtcctgagtctacctgttcctgtgtgactttggacaaatcacttaacctctctgaacctctttcctcaactgacaaatgggtacatgacctagatcatctctaagggccttcctgctttctcagtctcctctctcaagcaccaggctcttgccccacagtctcttctcaaaaacaacttttttctttgtttgttttgagacagagtcttgctctgttacccaggctgttgtgcagtggcacaatctcggctcattgcaatctccgcctcctgggttcaagcaattctcgtgcctcagcctcccgagtagctgggactacagacgtcgccaccatgcccagctaatttcttgtattttttggtagagatggggtttcgccatgttggtcaggctggtcttgaactcctggcctcaagtgatccacctgcctcagcctcccaaaatgcttggattacaggcgtgagctaccgcacccagccaaaaacaacttgactgggtgaaaagaacactgggtaagagtcagagagacctggccttggaatctagtttccactggaactagctgtgtgaacttgagcaagttacttaacctctctgagtttccacttccttgtctatagaatggggatcctgaaacccaacccgtgaaactggaatgaggcttacctgaagtcatgtccctaagacatttagtgtctggcatctggtatgtgctacagaaatgttgactgttattgttattagctattattattcattatttattgactgtttgctctgtgccaggcattgtgtcaagtgtcttaagatgtactaactcatttaatcctcacagccatgctatgagatagctgcatcttatagatgaggaaactgaggcacagaagggttaagtaaattgctgatggtcacacagctaaaaagccatggaattgatccatgaacccaggctatctggatgcagagcctgctctatcacccaccaagctgcactgtctcaaatactactactttctggaagaatgttctctttgcttgtccaagcccagagagaattccagtaggggtgaggatggagcagtagctgaattcagttggtcaaatccaagggtgagaaagacgttcttaccctaacgcgagataaatgtccagggcattaacttgagctggcccaagtgcagtggcctacacaggtaatcccagaacttcgggaggccaaggtaagaggattgcttgagcttaggagttccagaccagcctagtcaacatagtgagaccttgtctccactaaacattttaaaaatcagccgcatggtagcacgtgcctatagtcccagctgcttggggaagctgaggcgacaggatcatttgaacctgggagatcgaggctgcactcagtcataatcgtgccactgcaccccagcctggccaacagagcaagaccctgtctcaaaactaaaataaaaatacaaataggccaggcgcagtggctcacacctgtaattccaacactttgggagggagtttgagaccagcctggccaacatggtgaaaccccatctctactaaaaatacaaaaattagccaggccacggttgtgggtgcctgtaatcccagctacttgggagctgaggaaggagaattgcttgaacctgggaggcagaagtttcagtgagatgagattgtgccacggcactccagcctaggcaacaagagtgaaactctatctcaaaataaaataaaataaaaataaataaataaaaataatttgggtcacccctgattatttcctgaccccacccctaatattttacccattgaaaacctgccaaaatgcaactgggaccagctttcttcaatgggggcagcagagagggtctgactgggatgtggctgtgtgtttgctacgagagtgaatttctgtgtttctgtggatgcatgagtgtgtggagtaggcgatggtggtcttgtctgtgtggctggactgtggggtcttcctcgttgtctgtctctcaacactgtggagaggcagtatgggggtgcctgtcccacctctcccacccacaggatgtgtgacccggggcaaatgactcacctctttgtgccttagtttcttcatgtatataaaaatgtggatgatgataataatagggttattctgaagattaaatgagattgcccatgtaatgtgcttaaaacagtgctggccacttatgagaaagtagctaataccatcagcttatatgtagtagacatgcttaagtgtgtaacctgtgggtttctgtatatttatacaggacacctgtggtgtacaatggagaggatatgagggcctggcggggacgagctctctgtgatttgtgggaggggatgtgcttatatgagtgtgtgcacaaacgtgtgtgtgtgtgtgcacatacatgtgttgtgtgtacagcagatgcctgcgccttctgcacatgtgcaaggacgttcactgccaggacccaggttaccacacaaacagtctccatccctaggacaagtcactgaggctcacgtgtgcctcggttccttcatctatacaatgggtggagtcactaccccaaagggagctgtgaggcccaagtgaattgaggatgtgaagttctgagccagtgcaaagtgccagttacataggagtggcttgtgctatgcgttctgagagagccgggcttacttgttgacactcctgggttcctaagtgccatggctgtttgtgtctgccttccctgggctgcagaatttgccctggtgtatcgaagatcccacctgttgttgtccgaagagccagaattgggaacctatcaaagagaaactgggaacagccttcttcagtgggggcagcaatttcagttcagtttcttcagtggggcatccaaggcccaaagaaggataagaacttgccttaagacacccagcacactggaggcagagacggggctagatcgaacgagtctctcttgtccttctggcatagtgggagagcccccataggggtcaggggtcgcagccctcacccctcactgctctgccctccccaccttccccagcatccagcaggaaggtcactgctccagcaggaaggtgtgtgctttggcagccgcactgtctgggctgcctgtggtgggaattccacatgtctggagaggacccgtctggagtagcccagtcccagcccccagccctgcttcgccagctggcccagggtttggcctgctgccccgagactaggttcagcctgggaatcctcagagcttgctagaagagtagtctgaggattgcaaattcttcacctgtgttttttatataacacctttctgttgtaagtctatccccttctattacaaaagtaatgcattttatttttggggaatacaagtaatgaaagaggagaaaattgaactctttcttaacctaggacttcagcaactcagagactgagactttaaacacacacacacacacacacacacacgcacacacgtccattatctacatactcatacattcacctggggacacatttgactcaagaacactcaaacacacacacatgtaagtatacttgcacacacatacacaagtgcatacatactctcacaagtacacacgtacacacaaacacattcacacacacattcctagagtgcacacagtgtgccagccactgtactaaggctccacaaatgttcactcatttcatcttcgcagtaatgctacaaggtaggcaccgctatttctcccattttacagatgaggcacacaatggttgagtaacgtgcccaacacctagttagtgagggggtgggataagggaaatttgaacccagatttgtgggcttaattcatttgctaatgaataggctgtgtttgagtggcatcataacgaacatcaccctaggcttttttccttatgcatctatatttggtttggttagaaaatggcatctttggctgatacaaaaaaattagccaagtatggtggtgcgtgcccgtggccccagctattcaggaggctgagatgggaggatcacctgagcctgggaggtggaggttgcagtgagccgagattgtgccactgcactccagcctggacgacagagcgagactctgtctcaaaagaaaaaaaaagaaagacagcctgtccaatatggtgaaaccccatccctactaaaaaatacaaaaattagccaggtgtggtggtgtgcacctgtagccccagctacttaggaggctgaggcaggagaatcgaggttgcagtgagccgagattgcgccactgcactccagcctgggcgacaaagtgagacaaaaaacagaaagaaaaaaaaaaggaaaggaaaaggaaaaggcatccttttagatactaaccaggcctggggtcagatctggacttaaatcctggcgtgattgcagactggctggcttgactttgggcttgttctttctcctctctggggctcagtttcctcatctatgaaatggggagctatagtacctgcttctgaaggttggctgggcttttgtgtaaagcactcagccctgggcctggcacatagcaggggctcactagatgggccatattaactgtctgctccaaggctggagggtgttatagggaaaacagtcagaaaatactctccagatgcaaggtggccttaatatgtcaggatgtggaaggcagagagaagcctcggggtctgggatctcccataggggatgagtattttttcctggaatccctgccctgttgccacatcactaccctgaccatttgcccagcccagccctacatgcttcaggtgaaagcagagagagaggggcgggagagaaaagcccatcaagcagcaggcggagcctccctgcaggagtctggcctggctggaaggggagggggctgtggggccagggacgtcagatgccaacagcaccaggggaccgttaaagttgctgcgccgccaggtgggccagggtgtctgcagaggtccccggcctcctgggctgccgcctgccaccgcttgggctgcccgtcctgggtacgcaccgttggagcctcctgcctggtctctcgtgcttctctgtctcttctctaagtcgatttttcgctctttcttctgtttgtgcccctctctctgtctatttctgtcctcccccagccacattgttgcctctctctcattctctcttatctctttacctttctatttctcattcttttttctctgtaactctttttttctgtcccctttttggtctctcttttttctctgcctctttcattctctgccattgggttttctctgtgtctcattctcaattcctaaattgcagcaaagcagggacaaaaggaccttgcaatatgacttggggtaaggtgggccctgccctccgagggcattgactgagcccgctccagcaggattggtgaagaggatgtctagactggagagggctgctgtctgtctcctgggctggagggacagagcactggctttgaagtggtggcaccatctcaccccagggccatgtctggattagccactgtctgggcatttcttccccttgcccaacccactcagtcccctggggtggaaaggaaggggtgctgggcatctggaccagagctgcatctggaggtctttgccaagttcccaggaggcagcatcctctgggtcggcactgttggagaacgctcagggtctggtgctctcgtgcctgccccttccaggcagccggctctgattgcacaaggcagacctgtgactcctccatccagctatgcccctgctgcccagcaccgtgggcctggcaggcctgctctkctgggctggccaggcagtgaaygccttgataatgcctaatgctaccccagccccggcccagcccgagagcacggctatgcggctcctgagtggcctggaggtgcccaggtaccgccggaagcgccacatctctgtgagagacatgaatgccttactgrattatcacaaccacatccgggccagygtgtacccacctgccgccaacatggaatacatggtgagtccccgtacctgccccccaccccccgcagtgtcccttccggcaaacgcagccggactcatcttggcctagaatgactggctttgaagagctggaccacttgcctgcctggccccactagccagtatctgggtgtcgacctgtggaaagggcaggagttaatctgcccattttacagatgaggaaaccaagaaggttgcacagctgttccagtgagtcaggcatgtgactactatgtaaggagcaccactgtgcgccaggcactgcacgtgagtatcatctccattttccagaggaagaaactgagactcagagaattaatttgcccagccaggatttcaatccaggtctgcctgctgccacctggcaccatcacaactgtaaccatcacaatcccctacccaagaattttggctccccacactggggacctgcakggggtgcgtggctggtgctttctatgctattgtctctttaccctaaggtcttgactgacacacccacagcatcctccacaagcccctggaggcaggcttggagcagtggggacaggtactggggaatctcaggctgaggaaaaccaacagctgaccagcagaggaagctgggatgtctcccctcaaagaggcagggctggtggctctcactccagcccccaagaagtcaaaggagggcaccaaccttttgcttacagctcctcccccagggccactgtccaaaaccagcctagagggatgggtttccagcccacccagagatgtctttagggaaagagtttgccagtctgccccctgaaagaccaacacatgccactcgatagcctgaaaacttaactttttcatcgtatccattgacttatacttggagtacacttgcagccaggcaccgtgctaagccttgtggatactgctggtaacagaatagacaaggccccttccttcacgaaggtgacattttagtgggaataagagaaaacaagcatgaacaacaagatattaatgtacataagataacgtgaggaggcaatacrgtgttgggaggggcgggaataagagccgggatggcaggcagctagagtgcaggggagtcattgacttgttcattcattcgttagcacctagaatgccctccatttttcaaacaaatggcacatttattgagcacccgttgtgcgtgtgtggcacctgccccaacaggtgtttaatgattgcaggcggcatggagcagagagggttcaatatctcaccagggactccagggagggcctgaacatgtaggtttgatgtttagcctgctccttccctcactttacccctttgtagcatgagggaagcactcctctgctctccctaaaagactgagccagagagccgggcgcagtggctcacgccagtaatcccagcactttgggaggccgaggtgggtgaatcacctgaggtcaggagttccagaccagcctggccaacatggtgaaacccagtctgtactaaaaatacaaaaattagctgggtgtggtgatgagcgcctgtaatcccaagctacttgagaggtggaggcaggagaatcgcttgaacctgggaggccgaggttgcagtgagccgagatccagccagcctggatgacaagagtgaaactctatctaaaaaaaaaaaaaaaaaaaaaatattgggccagacaaccctggtagatacctggacccctctttggatgccccatttctccctccctagctgacttctactcacagaacaggctgtccaactcgacagcctttgccctagcagcccttctctcactgccgcaagaaagtttggctcccatttctcactctcacaccgaccaggactgtaataatcaatgacttgttgaaggccttgttgccttgctaccctgagtcctcagtgcctagagatgttgtttgatatttgatgaatgaacaaatcctatttcagagaatcccaggaagtcagagatggaagggaactagtattttaatgacatattttctggttataaaacttggagaattcatacattggaaaattacaaaactgttaaggaggatgaggagggcattcaccatgtagtgatggggaataatcactaagacaaaagagcaaggtgcagaatagaatatgctgccatttgcctatatatatgtgtgtgtgtgtgtgtgtgtgtgtctgtgtgtgtgtgtatatatagagagctgcttgtacaggtatagaatatatacctgtatacagaggacacaagaagcagtggtgactgcctcttgggacggtgtgcagggtggtggggttgggggagaagtataggagagagatgagactttctactgttcctccttggttatctatttttgttgttgttgacacggaatctccctctgttgcccaagctggagtgcagtggcacgatctcggctcactacaacctctgcctcctgagttcaagcaattctcgtgcctcagcctcccaagtagctgggaccacaggtacacaccaccatgcctgactaatttttgtattatcattattatttttgaagacagagtttcactgttgttgcccaggatggagtacaatgatatggactcagctcactgcaacctcggtctcccaggttcaagcgattctcctgcctcagcctcccgaatagctgggattataggtgcccgccaccacacccggctaatttttatatttttagtagagacagggtttcaccatgttggccaggttagtctcgacctcctgacctcaggtgatccgcccacctcggcctcccaaagtgctgggattacagatgtgagccaccatgcctggcctaatttttgtatttttagtagagagggggtttctccatgttggccaggatggtctcgaactcctgacctcaagtgatctgcctgcctcagcctcccaaaagtgctgagattacaggcgtgarccactgtgcccaagcggatatcttacatattaaaattatgcatattttcacgatttaaaaaagcttttgacttaaccattttcaatgttaaaataaacacatttagaaaatactacaaggccgggtgcgatccacctgcttcagcctcccgaagtgccctgtaatcccagcactttgggatgctgaggcaggtgaattgtttgaggccaggagttggagactagcctgggcaacatggcaaaaccctgtctctacaaaaattagccaggtgtggtggcatgcgcctgcagtcccagctactcaggaggctgaggtgggaggatcgcctctcacctcaccacctcccactgtaccaggaggcagaggttgcagtgagctgcgatcgcaccactgcactccagcttgggtgacagagtgagatcctgtctcaaaaaagaaaagaaaagaaaaaaagaaagaaagaaaaagaaaatactataagtacaatttaagaattagttattttctcatccttctgggttcagtcacttctagggactgctgagaactcctgtacgaacaccctgggacctgctcagagcagagcccaagctcagagtcaagagatctgggtgtggaccccagctctggtatggactcatggttgcccttcaagtcatcagcgagctgagcctcagtcttctactttgtcacgtgggtttgttgcagggttccagggagatggggtagaaacggcaccaggtaaatgtgcatctctggacacagttstgacgatrgtggcrattcccctggggaatttcattgcctttctttccccaggtctgggacaagcggctggccagggctgccgaagcctgggccacccagtgcatctgggcacatgggccttcacagctgatgagatacgtgggccagaacctctccatccattmtggccagtgagtgaccctctgcccttccttcactcagtcattcaacaaatactcattgaacacttactctgtaccaggtgctgcacttgacactgggatacagtggcgagcaaggcagacaagctctccacctgcagggagcctgcattctagttagaaggggcaggcaaaaccctaacaaagttgtgtatacattgaattgaggcaagtcttgtttggtttgagaacaaacaagtgcacagattgtggtggaaagtgaggagggattggaagactaagaaaataggataagggggccgggcayggtggcttacacctgtaatcccagcactttgggaggctgaggtgggcagatcacttcaggtcagtagttcaagaccagtctggacagcatggtgaaaccccgtctctaccaaaaatacaaaaattagcccagtgtggtggcgcatgcctgtaatcccaagtactcgggaggctgaggcaggagaatcacttgaacctgggaggtggaggttgtggtgagctgaggttgcgccactgcactctagcctgagtgacagagtgagactgtgtctcaaaaataataatgtcaataaaataaaataaagataaggggataaaataaaataaagataagtctgagaatggcaaacccacccttctggcctgaccttctcaccgccattctgactgtcaagtcagattccggggaccttctgatctgggtagccttgggaagttatttccactttctaaaccttggtgtccctgtttgtaaaacaaagttgttagcctagctcagttctttccagacttgtggatttcacaggcctataaaattgcaaaaagaaatctgtgagactgccacacaattgtcagatttttattttgccaaataaggatgtyagaaaaacaactaccttcccatcctcgccattctgccatcaccccggggagagtgggaaagaattaaggccagtcccttcaagtgagctcagtggaaattcagggccctgtctgtgttttttcatgtccttcactggtcacaaccagcaccagcctctgagagccgtgaatggtcactcagagccctacagagcagacatcgggtgattcagtcctgcctccatttcactttccctctcccccgcygctgaactcttcctgccagactccacccctacccatggccaccatttgagaggctcacagagagaaagaaagcagtgttagacacgaagctgtgctgtcgtaaattatgaatgtgcattcttccagattttctccctctttagtcatttatgtatatttttatatatttgtgcccctgtcaaatatgtgtaatagaaaaagccctcagaggccgggtgcggtggctcatgcttgtaatcccagcactttgggaggcagaagcgagcggatcacctaasgtcaggagttcgagaccagcctggccaacatagtgaaacctcatctgtactaaaaatacaaaaattagccaggcgtatgcaggtgcatacctgcagtcccagctacttgggaggctgaggcacaagaattgcttgaacccagaaggcagaagctgtagtgagctgagatcacactgctgcactccagcctgggcaacagagcgagactccatctcaaaaaaaagaaaaagccctcaggtcctcccagatggcttttcagactacagaggttatctctgggtgacacaccagtatctgccttctcctcacatctcagaggcctaggagatcatccgaggagcccttcctttcctaaaaatgcaagctcccccgtctgagatgcacctcctgcccggccctctgtataacagtaacacgtatccttttttgaggacttaccacttgccaggtacagggaggcacttcacatgggttcagaacatgcctgtgaggcagggccactgccctcatgctcacagataggaaactgagatgggggaaaggaagcaaagtgatcacccaaggtcaccagcaagttggyggcygagccacttttccatcytctcacccagcttcttccgtgtcccccgcctccccaggtaccggtccgtagtggatctcatgaagtcctggtctgaggagaagtggcattacttgtttccggccccaagggactgtaacccacactgcccctggcgctgcgatggccccayctgctcccattatacccaggtactcctccgtcagggctgagggcccctgggataacacatcctggcgccttagaagaaaaggaatgtgtggagcagaaataagaatgcaaacaaagaccgttatgagcttcttttcaccaaagargcatattcctggaaagttgtgtgcacaatgaattgaggtgaatcttttttgtttttgttttttgtttgtttgttttttgagacagagtctcactctgttgccgaggctggagtgtagtggtgagatctcggctcactgtaacctctacctcccaggttcaagtgaaactctgtcccccccgcaaaaaattaaaagttatatatatataaagaaagaaaatgactgggtgcagtggctcacgcttgtaatctcagtaacttgagaggctgagatggcaggatttcctgaacacaggagtttgagagcagcctaggcaacagagaaagacctcatttctaaaaacctttttaaaaatagtgaggtgtggccatgcaaggtggctcacgcctgtaatcccagcactttgggaggccaagggggtggatcacgagatcaggagatcaagaccatcctggctaacacggtgagaccccgtctctactgaaaatacaaaaaattagccaggcttggtggcatgtgcctataatctcagctactcgggaggctgaggcaggacaatcacttgaacccaggaggcagatgttgcagtgagccgagattgcactactgcactccagcctgggcaacagaacgagactccgtctcaaaaaaaaaaaaaaagtgaagcttggtggtgcacacctttagtcccagctacgtgggaggctgaggcaggaggattgcttgagcccaggaggttgaggttgtggtgagctatgatcccaccactgcactccagcctgggtgacagtgagacccacctctctaaaaataataataatttaaaaaggaaatgaatagaaaagtatagaaaatatattggctggccaggtgcagtggctcatgcctgtaatcgtagcactttgggaagccaaggtgggcagatcacctgaggtcaggagttcaagaccagcctggccaacatgatgaaaccccatctctactaaaaatccaaaaaattagctaggtatgctggtggttgcctgtaatcccagctactcgggaggctgaggcaggagaatcacttgaacctgggaggcagaggttgcagtgagccaagataccaccactgcactctagcctgggagaccgcgagactctgtctccaaataaataaataaataaaaacattagtgactgtcaaaaaaaaaaagaaaatatattggctagtctgaaggtagtgagttctctcaattgattgtttacagtcagttacagatccaacttccttctcgcgactgcacttgactgagtgcagtatgaaatgaaagaaagaaaatatatcacacatgataacatgataaggctagtgatttgtaaaactcttgttcaaattgtgtgtatgtgtgtgtctgtttgtacacctgtaacaatataaaaattattccttactgttggttgtaataaaaagaaaacattgagaaacatcatgttacaatataaatgcctccgtttcctcccccaacaccttggaacaggcagactgtctctcccaggaagacctcacctaatgcaactgtacaaccccagggagcctgggtcccactgagcccttctcatagccccctctgtctctgtccttcaccagatggtgtgggcatcctccaatcggctgggctgygccatccacacctgtagtagcatcagtgtctggggcaacacctggcatcgggcggcatacctggtctgcaactatgccattaagtaagtgcctgcaccaaggcaaagagggccctggggccggcgggtgggtcctgagaattcaaagaaagatacgctccatatcccttcttcattctaagtgccctcaataccatataatttgggtagttttaagagtttactaaggccgagcatggtggctcacgcctgaaatcccagcactttgggaagccaaggtgggcagatcccttgagcccaggagttcaagatcagcctggggaacaaagcaagaccccaactcttaaaaaaaaaaattagctgagtgtcatggtgatcatctgtagtcctagatactgggggaggggtgaggcgggagggtcacttgagcccaggaggttgaggctgcagtgagccattatcatgctcactcatgagtgagaaactgtctcaaaaaaaaagtcaattaataatccattttttctttctttctttcttttttttgagaagaggccttgctctctcagccaggctggaatgcagtggcatgatctcagctcgctgcagcctccacttcccaggttcaagcaattttcctgcctcagcctcccgagtagctgggattacaggcgtctgccaccacgcccagctaattgttgtatttttactagagacaaggtttcgccatgttggccagactggtctcaaacccctaacctcaggtgatctgcccgcatcggcctcccaaagtgctgggattacaggagtgagccactgcgcctggcctattttctcttctttttttgagacaaggtctccctctgttgcccaggctggagtacagtggcacaatcacagctcactacagcctcgactggctgggctcaagtaaccctcctcacttcagcctctcaagtagctgggactacaggtgaatgccaccatgcctcgctaattttttgtagagacggtgtctcactatgttgcccaggctggtcttgaactcctaggctcaagcagtcctccttccaaggtctcccaaagtgctgsgattacaggcgtgagccaccctacccagcccaataatccttttcctttacccaagtttgagaatcactgggaaatagacaggattgacacaggtggaaagacagtgttgctgaagtcagtagtggagaatgtggcttacatctgccaatacaccagccaactaggcttacaaatatctcactactgaattagacctacacatccagtggcaggtaacactggatagccaaaggccccttcttagaagtacagtgccagccctctaagcttacgacaagaaaaatacagccaagaacacatgctccctgcaggcaggcagatcccaaagaaaaggaaggaggaatgagtgtgcttagcttctccagtttgctgggtgggagagtttaggagatgcctgcatacaagcctcttggaaacagggagcaagcgtaatgaaacttgcagacgttccagattctcatagaaaaacaagaacaggccaggagcagtgtcttacacctgcaatcccagcactttggggggctgaggcgagtgaatcacctgargttaggagtttgagaccagcctggccaacatggcaaaacctcgtgtctaccaaaaataccaaaattagctgggcatggtggcgcgtgcctgtaatcccagctacttgggaggctgaggcaggagaatcgcttgagcctcagaagtggaggttgcagcgagctgagatcacaccactgcattccagcctgggcaacagagcaagactccgtctcaaacaacaacaacaacaaaaacaaaacaagaacaaattctaagtaaacatgatatttagaatttctttttttcttttttcttttttttttggsgggggacgaggtcttgctctgtcgcccaggctggagtgcaatagccagatcatagctcactgcagcctccaactcctgggttcaagcaatcctcccgcctcaccctcctgagtagctgggagtacaggcatgcaccattacacctggctaatttttaacatttttgtagagatggggggctcattatgttgcctaggctggtcttgaactcctggcctcaagcaatctccctacttggactcccaaagtgctgggattataggtgtgagccacccaccgtgcctgccctagaattccaaaattatataataaccacattttactgtcacatagcctttaatcatttacaaactactttcacactatctcattgaagagatgaaagaaagaaggaaaaaggggggaaccctaggaggacattctttttacaaattaagaaattgaggctcaggcaggttgagtaatttaccaaatgtcacaaagccaacaagtagtagagctggttcagaagaatcagtcttttgattccaaattccaaattctttctattgtattattctgatgttcttgaagtcattagtagcctgaaacaaattctcaaaacaggatacttgttatttgttagaaatggcatctattgacaatgtgtcacgttacagcccagctttatcagagacagaaaaatacaagaaaccaaatttcattacaaatagcgtctaatttttttttttttttttttttttttggaggcagggtcttgctgtgttacctaggctcggaagtacagtggcatggtcacagctcacggcagcctcaacctcccaggctcaagttttctagtttgtttgttgacatatcaaatgtttgaagcattgagtgttatcagtatagttgttaagatttttagcctctggggccaagactaccagggttcaaatgtgtgatcttacttaacttctctactcctgtttcttcatctgcaaaatgggaataaaataatacccaatcttggaattgagtgagataacacaggtaatgcccccaggctcataagtgggaaatacagattggttactattgttattaccaggcctaggtttgattcccctctgcaatgcatctactaagcatttgaatacatcattttatcttgacaggcttcggccttccccttccccttcctttctttccttcccctttccttttccctttttcctttcccttttcccctttctccttttccctttctcctttcctttcctttcctttcttttcttctgtccagctctgtcacccaggctggagtgcagtggcagaatctcagctctgcaacctccacgttcctggttcgagcaatcctcacacctcagcctccccagtagctgggactacaggcgttcaccaccacacctggcttatgttttgttttttgtttttgttttttgtagagacgggggtctcgccatgttgcccaggctagtctggaactcctgggctcaagcaatctgcccacctcagtctcccaaagtgctgggactacaggcacgagccaccaagcccagcccctttaaggtaaatgctacctgctcacagaatttaaggattaaaatataaygtgaggccaggtgtggtggctcacgcctgtaatcccagcactctgrgaggccgaggcaagtggatcacctgaggtcaggaggtcgagaccagcctggccaacatagtgaaatcccatctctactaaaagcacaaaaattagtcgggcatggaggtgcgtccctgaggcaggagaatcgcttgaacccgggaggcggagtctgcagtgacctgagatcatgccactgcactctagcctgggcgacaatgcgagactctatctcaaagtaaaataaaataaaataaataaaataaaataaaataaaataaaataaaataaaataaaaatagcctctgtggtgccttgcccatagtacatgctaaataaatggtggccatgactagaaccaagttataaactcttgggcatgggaaatcgaccgttttcatttctatatccttctactatagtgattgcaatcctttgtttttttaagcagaacttttttctaagtggttaaattaaacaaaaaaagaactccatgtcatcccaggtatcaccaccacccactctccccgcccccaaacttctgagagcaccttttgagaactgtggactgacagcagccggcacaaatcctgatgttcaataggtgctccagaagtgtttgttgaatgactaaatgattgaatgagtcctgttaggaaaccagaagtgagtatttttctgagcacttcagctgatttcactcatggtcactcaacaatcacgtttggagaaaaaagattatatttctgctcaaaggtgtgttcatttaaggtgagaaaacaaggcactggggcttggcaaagaatgccacaggccagtggtgagattattaggcagccatgagcaagagctggaggaacaattttaggctttgaaaggagaaagagggagaaaaaggctgggcgcggtggctcacgtctgtaattccagcactttgggaggccaaggtgggcagatcacttgaggtcaggagttcgagaccagcctggccaacatggtgaaaccctgtctgtactaaaaatacaaaaattagccaggtgtggtggcacatgcctataatcccagctactcaggaggctgaggcacgagaattgcttgaacccaggaggcggaggctgcagtgagccaagatcgcaccattgcattccagactgggtgacagagcgagactccctctcagaacaaaacaaacaaaaagaataagaaaatcaacccttacaagggagccactaattaactaggcacagtgctaggtgcatacatacatgtgatctttgctgaattccttagagagagaggaggctcttctcttggttttacaggagaaaccaaggcttacaggttgggcacagtggctcatgactgtaatctcagcactttgggaggctgaggcaggaggactgcttgagtccagaagtttgagaccagcctgagcagtatagggagaccccccatctctgcaaataaataaaaaattagctgggcatggtagcatgtgcctgtagtcttagctactcagaagactgagctgagttgggaggattgcttgagcccaggacgtcaaggctgcagtgagctatgggtgacagagcaaaacaaaataaataaataaataaataaaggaaagaaaaaaaagaaaccaaggcttgcagatgtgacttgccccaggtccccagggctggtcagtggcagcgctgagatctggacatctgtgtgaaggttactcacctaatgctcctctgtctccctgggtccttttctcttccaggggcaactggattggcgagtccccgtacaagatgggaaagccgtgctcctcctgtccccccagttatcaaggcagctgcaatagcaacatgtgcttcaaggggctgaaatccaacaagttcacgtggttctgaattttctctggrctttggtgcgcctccagctgggcctgaccctccatgtcctgccctcaaaaaactgggtggagaaataattgtttctttaaaggatatgagttagaatcaccccctgttraattttccctcctagatccccttcttaaatgtccaacatgggtcaaaagaaaatgacctccttgccttccttctttcctagttgcatctttcttttcttgggcctctgggaaagagccctgcatctttcattaattcggttctcagagaaccaaggctggaaggcatagaactggcaccttgggaccaggcataatggctcacacctataatcccagtattttgggaggctgaggtgggagaatcacttgagtcctggagttggagaacagcctggaaagcctggcgataccccatctctatttagaaacaaacaaacaaacaaayaaaaaacctggcacctcggttttgtaactctcaggctttgtcaaacccaaatgactttgtccatccaatgaaaggaattccactgggtgcggcggctcacaccggtaatcccagcactttgggaggctgaggcaggtggatcacctgaggtcaacagttcgagaccagcctggccaacatggtgaaactctgtctctactaaaaatacaaaaattagccaggagtggtggctcgcgcctataatcgcagctactcgggaggctgaggcaggagaatcgcttgaacctaggaggcggaggttgcagtgaacagagatccagcgactgcattccagcctgaggacagagtgagactctgtctctaaaaaaaaaaaaaaaaagaaagaaagaaaggaaacccgctttcattcgtctcataacagtcaaccagtttctgggcagcctttgaggactcgtgattcgctccctgagttgggcacatttcaggcccatgattttgaaaaacattgaaattggcttgtggacatccgcccccccacccccactgcatggtactggagccacgacagagtccaggcccccctttttacagatgggtacactgaggctcagagcagggtgtaacttacccagagctgcatagcttgtctttgatggccaaggttagagctcagtctctcacagctccttcctgcttcctcggctctcagaactgagaagtgaaaaccaaagttggcctgaggggactctctctgggcctttttttctctatctctgcctcggtctctctctcttttgtctactgtccgttctatctctgcctgtttttgttttggtctctgcatctctgattctttttctcccatataatcttactctcattccaataaaccatttcccctctccccccaccatcccacccagggatcatagcacacaaaagtccttttgtctccagagatagtaaaatctcctccctcagaccttgccctgcagctggggcccactccctgcctggctggagagcttttcctttgaagacccgggatggaaaacaggcccttttccatggagtccctacgttgtcctggatggaatgaattttctcatcctgtgcatgtcaccccctcccattccacccccaataaagtcttttgagatccagtgtagtggctctttctggtccctccctctcttggctcccaagagggtcaaaacacaaggaatgggaactgggtgggggaagatgggtgagaggaaaaccagctcaactggaagaccaggggaaggaactaacagcgctttgggccccgctctgcagaaggctagatcaatgcacaagtgcatgcacgtatactattgctccactttacagatgagataaatgaggcatggggtgagtactagcttccaaatgctggaaatgagtgaaataagagaattaagaggttgggcgtggtggctcatgcctgtaatcccagcactttgggaggccaaggcggcagatagcttgaggccaggagttcaagaccagtctgggcaacacagtgaaaccctgtctctactaaaattacaaaaattagccaagcatggtggggcacgcctgtaatcccagctactcaggaggctgagacaccagaattgcttgaacccaggaagtgaaggttgcggtgagccaagactgcaccactgcactccagcctgggtgacacagcaagtctgtgtctcaaaaaaaaaaaaaaaaaagagagagagaattaaggacactgttgtgagttcattgttcttagactatatctttcctactttattttttggaatgggctctcgaaggcagtatcagaaatggaaaaccgaagagatcacgtggaattcccaccttacagtggcacttttggcttgtctcttccctggcacagtggctcatacctgtaatcccagcactttgggaggccaaggaaggtggatcacctgagttcaggagttccagaccagcctgaccaacatggtgaaaccccgtctctactaaaaatacaaaattagccaggcgtggtgctgtgtgcctgtaatcccagctacttgggaggctgaggaaggagaatcgcttgaacccaggaggcggaggttaaagtgagccgagatggcgccattgcactccagcctggacaacaagagcaaaactctgtctcagaaaaaaaaaaaaaaaaaaaagaacagatttaatgaaacttcttgaatcccagtttttacatctgtaaaatgggaatattgacagtgacaattcaatgacgttaagaatatacaatgctgacaaactaaagagttcataaatgccagtggttgtcatcctcattatcctggtgctcaggaaggcaatgtgagacctgttgaaatagcacgggctttggggtcagatgatgctgaattccagttctgtgttggctccttcgtagttatgtgacctcatgacgccacttcatgcagggggttacgtaccacttaaatctccagaacattttgggaaattgacatagggttagcaaacctcccccacccccatataaaaatattaatacttttttttttttctgagatggagtctggctctgtcgccgaggctgcagtgcagtagtgcaatctcggctcactgcaacatttgcctcctaggttgaaacgattctcctccttcagcctcccgagtagctgagattacaggtgctcgctgccacacccagctaatttttgtatttttagtagagatgggattacaccgtgttggccagcctggtctcaaactcctgacctcaagtgatccacctgcctcagcctcccaaactgctgggattacaggcatgagccactacacccgaccaagaatattaatacttttttttaaaaaatatcgaagttatttatttatttatttatttatttatttatttatttattttgagatggagtctctctctgttgcccaggctggagtgcagtggcacgatcttggctcactgcaacctctgtccccctggttcaaacgattctcttgcctcagcctcccgtttgccaccatgcccggctaatttttttatttttggtagagacggggtttcaccatgttggtcaggctggcctcaaactcctgacctcgtgatcggcgcgcctcggcctcccaaaatgctggggttacaggcgtgagccactgcacccggccccaaaatctaacgtttgttatcactgttgttttagaaaagaaaggacattttaatgcaacccatgcccatctgtaggggctgaaggtccctctgaggtgattgataaagctgaaaaaagagactatgggaagagaagaggaatattatcaattagctattttagaagcagggcaaactatgagctaggtattcctataaggaaatgaaataatttactaaaaaacatacagcaagaaaataatagagctggagttttctgatttttctgagtccagaatttgtttcactgttctcatttcagctctctctaacaggatgaatgaccttgatttcagaatccccaagcaggtggtgagatccaaaactgagacaaaagaaacggggctgttccaaaaaaaaagctaggtggcaggtgtctaacatgccagggagctaaaacagagtgtgtgagtttcagcagcaggttgaatttagaatggggaaggagaccagaggagacgccagacaggatgactttgtcccattggcctggaggcagccccatgtttctccacccctcatatcactcaccagtttgtaatagtatctttgaatgacgatctgattaaggtccgtctcctccattagtccacaagtttcgggggtacatctactttgctcatttccatatccccagagtctagcacaaggcctggtacatagtaggtgctcaataaatatgttagatgaaaggaagataacacctctatgtactagcagtgagactccaggcatgcaatttctctctgtccttcagtcccttcatctcaaggtttaatttaaatatggtaacgcctgtatgcaactcccagcatccagtaggcactcactaaacacagttctccaccctccttttttcctctgcccctccctcggttttcccactacttcctgcatggtgacacacccatagtttggagccataaaacccaacccaggttggactctcacctctccagccccttctgctccggccctgtcctcaaattggggggctgatgtccccatacacctggctctgggttcccctaaccccagagtgcaggactaggacccgagtggacctcaggtctggccaggtcgccattgccatggagacagcaacagtccccagccgcgggttccctaagtgactggttactctttaacgtatccacccaccttgggtgattagaagaatcaataagataaccgggcggtggcagctggccgcactcaccgccttcctggtggacgggctcctggtggctgtgctgctgctgtgagcgggcccctgctcctccatgcccccagctctccggctgggtgggcttggccatggtcagcgtgaacgcgcccctcggggctccagtggagagttcttacggtaagtggggctgggggaagactggacagggcgggactgcggtcagctttgggaggccatgggacacctccccgtgtgtttcttacgggcccaaagctcctcctggagctcctctggaagggcaggaagccccacggaggcaatgtgaccgcttccctaagctctcaagccggggcatggcctgcttggtgcgagaagtgctgggaggggccgagaagccctggggcagaggcttggctcattttgtctgtccagaggccttcctgggaatgcatctcaggggtctttccaaaaccccacagagggtggggcttggaagcaccgtcctgtttcgatgcggggcaaattgaggtccaccaggagaggcttgctgggcctaggtcacgttgctggtgcattatcaagctgggcgtgggaccgggcagctcggtcgctccgcacctccgttggctctggataatggggaggaggtagaaagcgccgcgcagggtggagcgttggaaaatgagaatatcttgtgcggacgtgtgaaactcagatgcagggctagaaagcatgtgttactgagagtgaaaggctcaggctcactccttagggtgacccccacattggaagcaacccaatgtccctcagcagagggaagacgggtaaataaagcgtgagacgtctttacagtggaatgctatcccattgttcaaggaaacaacgcacatctgtgtgtgacagggaagaacctctcagttaaattaagtgaaaacggtacactgaagaactgtgtagttgctgatagcgaaacggatatagatgtatatatgtacacacgcgtatacgtgtacattccacgcatagaaaattcgtggaatgacacaataaaattggtgacaggtttgtttctgaggagggaaattcaagagaatgttttatcttttggggacacattttggattttttaaaagttgggtgccttttataaacctgttcaaatcacacacccgcacagaacttggtctctggaatccagcagacctcggggtctagttgtgactctgtcacacggctcaacattcacgtgcctcttgctttctttctgaagtggagacaggactaggatgtgtcttaagatcatggtggatgccgtggggaacaaggatgtaaagcccttgataccacgtgcattgcaaagacacaatcaacatttatgtcatcaattgctgaggacagagagccagggaatgacagaatcagggcctgatctcctgactctagtcaggaagaatcttctttgctttgacccccatcaaacaggaatatgtgatgcactggaaatggcagaggctgaagaaaccaacagcctgggaacccatcccacacaccagctgtgtgacct

SEQ ID NO: 8923 - DNA, 55184 bp, Homo sapiens
tttacaaatagaatgctagaagatcatataaaatagaacagtatgatttcattgctctgctaatatctaaaaattattcactttatataacttactattaacaagttaggttgatgactaaatttcaaaatgatttcttaaacacccagtaaaaccttatttcagaaagaagagtaacatgttaaattacaaggactatattttctatattctaggaaaatattaatgttattgagaaaccaaacattttatagtaactggaaaccaaatatgactatcaatgctatcttatcaatgacacagtattgctattaatgactattaacagcaatgctctaacacagtcatacaaaaaacctactttaaatggctcattttttttttcttttaagtgtcaaagcataaaagcaaaggatgttgagctgatgaagactgtagaaaatagcataagagtgttcactaaatcatctttgcttaattcttaacagtggaactctagaaacatttttttaagttcaggcttaatattttaaggtatcccaaaaggttaatttaaaaaatatgtattaatttacttttcttggctaacatctgctaggcatttaaattttttttcctagcccagaagattaacaaacataattctaggttagcaagtataaaactagaaataaagaattacatagtggtaatgctacccatctgtgattaataggtataacttattctttacctgaccaagtaacaaatgcacataattttacttcagaagcagaaggctctgaaatcccagtagcaaaaataatgttcttctgttgctgaatcttatgaatccatttacagaactgagataagcaaatcttcagagggactccttcatcaacttgagcctgagtagagagtcacaaaagctgaattcaacaatcaaattccattattatttagcatgttttataactgtggagaaagattaatggttttaaaagaatcagaaatgccaagtcatgaaaacacagtgtactgtgggaagacataacaaagtggttctaactggcaaagagtttatttagtggaaagaggtaaaaacacgtgggaaagaaagaatatttagaacccaccaaggtaagaaagattaggttgataaaaactaaaatcacacagaaatatgatcattaagtccagactgacataaatcatagacaaatttgagtcacttaatttccataaaatcaatttgatcctcatttttataacattattcttcctttgctgtgtatttatttaatttttaaaatttatttttttttgagacgaggtcttgctttgttgcccagggtggagtgcagtggcatgatctcagctcactgcaacctccacctcctgggttcaagtgagtctcctgcctcagcctcccaagtagtgggaatcacaggtgtgtaacaccatgcctggctaatttttgtatttttagtagagacggggttttgccaagttggccaggctggtctcgaactcctgacctcagatgatccacccaccttggcctcccaaagtactgagattacaggtatgttcctttgctttttaaatcgagtcctgaggtgactcacgcctgtaatcccagcacctcgggaggccaaggtgggcagatcacttgaggtcaggagttcgagaccagcctggccaacatagtgaaaccctgtctctattaaaaatataaaaattagccagatgtggtggtgtgtacctatagtcccagttactcaggaagctgaggcatgagaatcgcctgaacccaggaagcagaggttgcagtgagccccgccaccttactccagcctggccaacagagcatgcctttgtctgaaaaataaataaataaatacataaatcgagtcctgaatctggaataacactaatcttatttatttatttacttatttattcatttattttcagagacaaagtctgtcacccaggatagactgagattatacctccctgcagcctcaaactcctgggctcaagtggtcctcccacctcagcctcagcctcccaagaagctgggactacagacacatgccaccaagtcaggctaatttaaattttttttttttttttttttagagatggggttctcactatgttgtctaggttggtctcaaactcctggcctcaagcaattctcgaacatcagcctgcaaagtgctgggattacaggcataagccatcatgcctaacactaaataaatctaatttcaaatggtataataacttttattttctttttgaaactgacttctgaattttaagatttgcatcatacctgctttatgcctgtcaattccatgcaaaattctgaaagaattggatgttcctgaggttgaacataagcctggaactcagagtcaatctgtccagttgatgtgttcagcaacactgctggaaactcaactaaatgaaagaataatcaattgacagttgaataaataatttttaaattaatcctgtaatcatcctaaattaaacatgttaccattttaattaaacaaccagttttcagtaaaagcatactaaaatgaccaaagcagtgtgacataaaggttataataaagttatgctaaagtcaaaatattgaagttatgagcatgttgtcttaaaagaaaacaatataattaaataaatataaaaaccatatggaatataaaatttactttttttgcaaaggcatttttttcagtttctatgccattgaggtgttgtatgtaatataaaacaactattttatataataacacatttaggtatttgagattttgctcttttttattcaacataagttttgcattaaactaccaatgcatagaccatcctgttttcttaaacttttggctgattcagatctataaactttaaagtgactcatctagtgccagctttggccattcgtagcccagacttacttatttcctggctatggtggtgcttcccatcattccagcatgtcgattcaaaatcaatgacaattaagtagtcaaacaactgctctgcaaaagatcaagttgttcttatgctttaccagtgctgaaaatgcaaggctacaaaatgcaaagaaactaagcatactactcactggatttgcttcttccgagatttccatttgctggcgcaattgactttctcctaattaatccaagctgcctaaaaatgtgaagcaatccaaatatgatcaatgaactcattcacactcctgtttgagtaggctaccaaactaatggtactgggcaacaatctcattatttattgtgactgaggggaaatcgaactggactttggctttacctgcacaggcctcgaaagtacatatttgcaaattaggctaatttgttggttttgtttttgagacagggtcttgctctgtcacgtaggttgcagtgcagtggtatgatcaccactcactacagccttaatctcctgggctcaagcaatcctcccaccacagtctcctgactaagactacagatgcatgccaccacggcccattagttttaatttttttttttttttgaaggcagggcctcactatgttacccaggctcatctcgaactcctgagctccagcaatcctcccacctcagcccctcaaagtgctgggattacaggcctgagccactgtgtccagccaatttacactaattttatgttacccttgttttacagtaatactgagtaactcatttgagttcctacaatcatttgattgtagaggtaaaaatgcactgaaaatcttatttttccccctgcattttttaagctcttgctatgtgtacagtgcagttttaagaagacaagacaatgtaggacatggttcagtcttccagtttaaaaatctgggtaaagaaacaaaagatagggccaggtaaagtggctcatgcctgtaatcccagcactttgggaggccaaggcaggtggattgcttgagctccggagttcgagaccagcctgagcaacatggtgaaaccccgtctctacaaaaattataaaacctagctggggcgtgatggtgcatacctgtagtcccaactactcaggaggctaaggtgggaggattgcttgagcccgggaggtggagactgcagtgagccgagatcatgccactgcactccagcatgggcaacagagcgagaccctgtctcaaaaaaataaataaataaaataaaataagaaaaaaagagaagagcttactgaggtcttaagtgcaagtaaaacaaactacttggtattagcaggtagagttttaactaggcagacacctcctgtagttttctgtgtttgctaagagtgggaagtgccaggatttgggaataataaatatcatttattgactgcttactacatagcaggtactaaaattaaactaagatgatggcctcctttaatcctcaacaagtgtagtagctagaaacttttcctacctatattttatggatgagaaaactgattcttaatttgccaaagaacatagctttggtatgtgaacccaagactgtccaattctgaagctcatgctatttgctattatattacatctttctagtaatcagaaatatgcacagcgcatccaggaatcagggaggacacaataattcatattgtgaattaaaaggatcactaggccaggcaccgtggctcacacctgtaaccccagcactttgggaggttgaggcgggtggatcacctgaggtcgggagttcgagaacagtctgaccaacatagagaaaccccatttctactaaaaatacaaaattagctgggtgtggtggtgcatgcctgtaatcccagctacttgggaggctgaggcaggagaatgacttgaacccgggaggcagaggttatggtaagccgagatcgcaccactgcactctagcctaggcaacaaaactccgtctcaaaaaaaaaaaaaaagatcactagaaaatgggtttgtaaaaagtagaggttcctcttcaaagacttccttccccgtctaattaggaataaatagtaacttctcttagagcaaaatttattcaaagacctgtgctaacattcttaaatatctgctagatataataaagaaatcaatgtactttatgttcttagctcccacaatttagcctaaatatttgccctggcatgcttatactggtccaatcaaacattaggtcatagcctgttcctcttccttacttaaaagtgtttttacctttctcagcattccacaagttacttccttcttcctttgttctcctctgcctttgcctcttttaaaaagttctatgttgctagtcagtcgggacaaatacagaatgtgaggtcccgttccagccaaaggaaaccggacacagcagtagggtggacgcgccacgttataaatgaccctgtctcctttgttcagtgtactctcctggcaaaactgctggcgagtgtaccctttctgcaggaagtaaaaatggccttactaaataaattaaatttaagtttaagttctatttctttacagcaccgaggaacgagcatttcgaacaggttgaacaccttgacagattcagtgtgtggcctgcctgagacctccaaccagtctgcagggcactgtcacgtccagtcgtttcccaaggcctaaaataggcaggcactggctcaaggccacacagtcaaggccccagggttcgtccgcctcgggctcctgtcaccctcgggtagaaggtggcccaaggctgaagaccgaggtccagggaggcgcctttccaaccgtgccagagagggcaggtcgcagacgccggggctgcggggaatagaggccctcaccgcagatgccacctgccgtgccctgctctgcggccaacgccagcgctggacccggagctacccgcccccgacccggaactccctcgagtaccgcgcgagccgcttggtcgccattcccgacactccttgcttttccaagtccagctgccggaagtcgctcgacttctacttccggtccgttcaaaaagcccgcgaggctgaggggcggttgttgttggcagctgtggctaaggaggggagaacctctgctccccgcccgtcttctcttctgcgtttcccgggctagggggcgtggggagtggttttaggcggcgaagccgctcggcagcaccttccttctttgccaggcagacgcccgttgtagccgttggggaaccgttgagaatccggtaaccgatgcggacggtaaagccgtttgggttagagcggcgcgggtgtccagtccgcggaacggggagatcgttggcaccttcgcttttttaggggaacggggatagttcggtaaactgaattgagaagcggatccgagggaggttgaaagctgtcaagcccgtgtagctctcccgctaggaggcggcacrcgggggaataggggcgctggagtttccccagctctacctcatctttctccacagccatggagccagagagggaagggaccgagagacaccccaggaaggtcagggaaagcaggcaggccccaaataagctggtcggggcagctgaggcgatgaaagccggttgggatctygaggagagtcagcccgaggccaaggtgagcaacggggatcccgagcaggcggccctaggcggtttggagctcccggaccctcgcccaaccgccgtcgggggcactggattcgggcgggctctccgccctggcctctccgaacctgatccctgatcattaaaatgggaatgagtgtaataccaccttcctgcaacaaggctgtcattggctgtcactgggatagtgagtcggccgagtgcggtggctcatgcctgtaattccagcactttgggaggccgaggcgggcggatcacgaggtcaggagttcgagaccagccttgtcaacatggagaaatccccgtctctaccaaaaacacacacacaaaattagccaggcgtggtagtgggtgactgtaatcccacctacttgggaggctgaggcaggagaatcgctagaacccaggaaccagaggttgcaatgagccaagaccacgccattacactccaccctggacaacaagaaagaaatcacgtctcagaaaaaaaaaaaaaaaaaaaaaaactgggatggtgggccgggtgcagtggctcacgcctgtaatcccagcagtttgggaggccaaggcgggagcatcatttgaggccaggaattcaagaccagcctgggcaatatagcaaggaccccatctcttaaaaaaaaaaaacaaaaaacaaaacaaaaaaaaaactgcctgtacataataggaatgttcatcgatatcctggggcacaaaaatacaattccttgccctcgtgcagtttacattccagtagggcgggggtccccaaccccctgtgcacagactagtacctgcctgtccatggggtccccaacccactgtccacagctggcctgttaggaaccgggccacaaagcagcaggaggtgagcggtggccgatagaacgttaccccctgagctccacctaggcattagattctcataggaatgtgccaaacctattgtgagccctattgtgaactttgcatacgarggtcctaggtggcatgctgcttatgagactctaatgataaatgtaatgcacttgaatcaccccgaaaccatccccccagcccttctcccagtcagtggaaagattatctaacacgaaaccggtccctggtgccaacggttggggaccgctgcaataggggaataaaaaggctgattatccctatcatccttaccatttactgagaactaaatatacttcattcatcccttcagtcgttcattgggcttttttgtttgtttttgtgtttgagacagggtctctgctctgctggactcaggctggactacagtggtgtgacaaggatcctcctgtctctgcctcttacaggcatgagccactgcacccagctattcattggtttttattgtctgccatgtgctggggcactgacctaggtgcttggggtacatcagtgaatcaagttcactgccctagtaggtcttatattctagtgggcagagacaaatgataaaaataagttataatatgtgagagagggattagggatgtgatttttttttttttttttttttttgaggtggagtctccctctgttgcccaggctggatttggctcactgcaacttttgcctcccaggttgaagtgatcctcccacctcagttccaccaattagatgggactacagatgtgtgccactgtgccagctaatttttcttttttttgtagagacggggttttgccatgttgcccaggctggtcttgaactcctggacttaagcgatctgtccaccttggcctctgcaagttctgggattacaggcatgagccactgcttttttttgtttttttttcgtttktttttttttaaagagagacagggtctccaactcctgggatcaggagattcacctgcctcagcctcccatagtgctggggattacatgtgtgagccactgcacccagctgaaaattttttttattaaagtgggattccagtttttttgcctatcaaatttgcaaaaaaatgtttaatgtttatgtggttagtgtaaggagattgacaatcacatattttgttatgttgaaacaatctcaaacttttagaaaagttgtaagaatagtatcaaaacctcccctcaaccaacatttgaaagtagttgctgacacaatggtctttttctacccaycctcaagatattttattatatattctctataaacctacataatcacaatgcaaccatcaaaattggaaattaccatggatatatcatgaccatctactcctcagatgccatccaaattttctgtagttgtttgaataacgctttttagcaataagatccagtctagaattgtgttaaatttaattgtcatgtctccatcaaacagttccttagtcttcccttgatattcatgactttactgcatttgaataatcctgggccaattattttgttgaatgtcccttaaattagatttgtctgtttcttcattgattagattcaggttatatacatctttagcaggaatatcacaggagtgatactctgctcccttgcagattgtacacaatttgatttgtcccattattggtgatattaaccttgataactagattaagatagtttctactaaagttctctaaagttatctttttctctgtgtaattttcattcttatttttttgagacaggatcttgctatattgcccaggctagtctggaattcctgggctaaagcaatcctcccacctcagcctcagtgtagctgaggttacaggcccaagccactgctcccagctgtctgtaatgtgcttcctcaaacactttgggcttatgcatttacttttttatcagtatgatgaactcagtggtacctattttgttcagtgtgttactatcttttactggattgtgatgctttaaatatccaagattttgtcattaagctagcttctgtggccttttgacatgacaacatcattctttgagcatgtcattactttctggcacaagaagatattccaggctcatatgtgctttccctgccccaagcctggaatcagtcatttctcttagggtacctggttctttttagtgtagaatgatatttagatttgggtgctatggtgatgttaatacagatgcttcttcacttaaaataagattacgtcccaataaatccatcgtaaattgaaaattttgtaagttgaaagtgtatacacacacacatacttacatttaaatatttttctgtattttacttatgtgaattcacatcagtatctccactttaatccaaatccagtaatacagggttcattctattcattctagttttctcctttttttttttcttttgagacaaaagtcttgccctgtcacccaggctggagtgcagtggcatgatctctgctcattgcaacctctccctcccagcgattctcctacctcagcctcctgagtagctgggattacaggcacccaccaccacgcctggctaatttttgtacatttagtggagatggcgtttgaccatgttggctggtctcaaattcatgacctcaagtgatctgcccacctcggcttcgcaaagtgttgggattacaggcgtgaaccaccgcgcccagtccattttcatatttgtaacttccttcactaacaatgagaaacccgacacccaacatcttcagtatatttgatcaatccttattgctgccgctgacccaccctcacaccctcttgactctgcttaggctctgtcaccctgcactggctccatcaccttgtaccaggtcatcttcctttgtgagcaccctcatcctatgacaggtggctgccaccatccctctcaggtttataccctcatcctgttcaggctttaaaccctgcaacaggccactactgtccctcagcattgatgccctccttaccctaaatagtttctgacatctgatgtcaggactcactgccctcccttccttcctgtatgggtgacgtccttgtgctgctgaggctttgacaccccacaccagagcaccctcctgcatgaatgtcctcagcttctgctcctagtcctggactgtctcctctacaggacaccttcctcacccaactcaggctcttgacatcccatgcctggcaaccagggttactcaccgccatatagactccatcttgctcagtctcaccttattaatctcatgtttttatttggtaaaaacaaactggcatattctttcaggagttcatttgaaccaggaattgatcctaagaaagtagatagatgtacaaaggtgtctgtacaaggatgttcatcataatgttgtttgtaatttaaaaaaccagtgttatcaatagggaatgtttttcagatatattataaattttcaggtaaatttagaaaatggactattattcaagtattaaaattgattttttttaactgatatggaaagatacagcttaagttcgggagtagggagttggtttcaaaaaagaatgattgataaaatccactgcgggctgtatagtatagagataagcctgcattccagtcttggttctatcatttatctgtctctccaatttatctgtaaaatggggatgatagtagtacacacttacaaagttgtgagaattaaatgatttaatgcatgtaaaatgatcagaactgtgtttygctaatgtaagagtttaacattagcttaaggccatgggaatacattagcaataatatctaatgtttattaagtacttatgtcaggtactagcctcagtacattgtacttgaactatttcattggtcctcccaattatttaatgagataaaattataattactctctagatgaggaaactgagtcttagaaaggctatggcactggtccaagatgatgatgatggtccaaggctatggcactggtccaagcctggtgtttgaactcaggtagtatgactagggcttgagcttctaaccgctatgctctgctgcctcgcagaccaaaacgaaagtggtgattacctctaagttgtacttttattttaattatctctgaggtgacttttattttcgtttctctgtatcatttattttacaattctctgttaatgagtcttttgtaacaaacacgaattactttattaaacaaatataggctgggcgtggtgactataggccgggcgtggtggctcatgcttgtaatcccagcactttgggaggctgaggagagcagatcgcttgagctcaggagctcgagaccagcctgggcaacatggtaaaaactcatctctaccaaaaatacaaaaaaaattagccaggtgtggtggcatacatctgtggtcccagctactcaggacactgaggcaggaggatcgcttgagcctgggaggcagaggttgtagtgagcaaagatagcgccactgtactccatcctgggtgacagagtgagactctgtctcagaaaagaaaaaaacaagtataagttcaaagcctttttaaaggggttgggagctttgctgaactcttgttgcccaggggataaattctgattcattagcttaggccgcattgatctatgatctggctcctgcttccctctcctcatacctccactactatgcaacatgcaatcctggctccttgccaaaccatactacatgttgaatgcgatgttccctccaacatggcattgttttcaaggctcagcctcagtattttcatctcagtagccttccccaaactctctaacccctaaggcagttagactccttgttctcatagctttgtaatagcacttacccacactgtgttggaattagctattgctttctctccctagtagaatggactctttgagagcatgaattatgctttatttatcctattcctagcatgtaaccaagtatctataattcagttttgtgtcaatgatarttactttattaataatgtcatacctaccacatattgttattttaggccatcattttcaattaattagcacttccttatgttagaatatacctgtatgttaaagtaatcagaagctagaataatttaacttgctttgttggtattcttgataaccaataatggcttgctacgccctgattaatctttgcagaaagcccgcttatctaccattttatttactgacaactgtgaagtaacccatgaccagctgtgtgaattgctgaagtatgcagttctgggcaaatccaatgttccaaaacccaggtatgagatgaatttaaatggtgggtattgaccagcggtttcttttttyyttttttttttttacctctcccaaggctccatcattcaaaccagaggtttcaaactggcttatcgacagtatttttttgctatgcagcatgtcctgaattttttatgatggctgccaagtgttaattctggaaattcctatataaaaatctacattttcttcttccaaaaactcaaagatggcagctatccctatattcccacatggcaataatttgtcaaagctgagtggtggtctccccctttatatgggacatgtatactacaatgtcctacctggcctgcttcccatatttacagtatctgtctggctactatagatattttagtttgtttcccgtgwtgcagactcagctgaaataacaatgatctgtgaagaattccagttaatcttttttctttcttttacaaataaaaggcaaagagagcccmggcatagtggctcacagttataatcccagcactttgggaggccaaggtgtgaggatcacttgagtcccagagtctgagaccagcctgggcaacatagcgagactcaggccctacaaaaaaaaaagagaatcttactgttctgatattgttggtgccattattaagtgtcttatgaaaaatattttgtatgtatgcaaataatacacacgtctttctgggggaggttgttatgaattggctagctacttcgagaactgtcttctccatcaacaattacagccatcagtctgtcagtttatctaaaactgtttttttttttttttggtaggttttatgtctctattgcaactacccaacttggccattgtagcccaaagcagccatacataacacatagacaaataagcatgactgtagttcaatagtcttatttacaaaaatgggtggagcaggatttgacatttttttggtgggggatggagcctcgctctgtcacctaggctggagtgcagtggcacgatctccgctcaatgcaacctccacctcccaggttcaagtgatcctcttgcctcagcctccagagtagctaggattgtaggctcatacaaccaggcccagctaatttttttgtattttttttagtagagatggggtttcgccatgttgcccaggttggtcttgaactcctgacctcaagtcatccacctgcctcggcctcccaaagtgctgggattacaggcgtgagtcaccgtgcccagcsaaaactgaatttcttaaagccagccatttgattccctggtttaggaaggaccgcagagtaggttggtatcttagggatgactttgtaaagtgagcttagttctgattccaaacaaaccttaataggactgtgaatttaaatgcattgcattttgcttggtattttactggatttgaatacaacaagtatttatctctagggatctttatttgaattctgtgcaataatggctgtcttccagttccaggcagacggtgaatggtgataaattctattaactctcactcactgcttttcctgcrccttctcccctatttcccctctatatgactgtaactgacttaaggccatctgtcttaactgtgttggtttgatttcttggcagctggtgccagctttttcatcaaaaccacctaaacaacgtagtggtttttgttctgcagggaatgagtcagctacacttttacaggttctatttggagtttggatgtcttcgaaaagcattcagacatgtaagttaagaatactttgtactaggggctgagtctgttttcccattctgagactaatacatgtgtcagggaccatgctccttggcaacctaactgaacaaacagtaggggatatagaaagcaaaargaccttagaggcctcatgtagatttgtctctgattttctttggaaatctaggcaaactcttattcccaggttataatctgtagctcctaggttgatattgttctattttatttgggctatggtgttttcagaaattgtaaaatataatacaagctgagttttctacctctctttaaaaaaatcgcaagattgggcacccttaaaacagtatatggaactgaatagcagttgtcatctttaaaaagaggcacctgctgtccattttcccgtagcctcttccatttcctagtgacccatttcatccatttattcctgaaggcatttgagttggtgagccctaatttaacctccctgggtcaccattttcttttttgctttcatttattgagcacttcctgtgtatcaggctctctattaaccacggaccacctgctacacgtatcatctttaattatcacaatagtcttataaaatagatactttttaatttccattttgtacatgagaaactgagtaacttgcccgagttccagctagtaagtggtagggctgaaatttaagcccaggtgaacctgaagctgaagctctcaacctttttgccrtgtgataccatctattctgatggcaatggcatgctttccaatgaaataatagatttggaagaactttgaaaatacaaagggacttttcttgtctaagttgtatatttctgtaaagtttgtctattttacaatatataatcatagggatcagttagtgttgtgtggcttcatttacttagtcacttttctatattaaggaaacagttcttattttaaaatgctaacaattactgtctagaactttcaaagcactgaggtgacaataaaagtccaggcctttcacagtattttagctgttttcaaccatttttgtaaaacctgttaatatattttcagaaattccgcttgcctccaccatcatctgattttctagctgatgttgttgggctacaaactgaacaaagagctggagatctgcccaagacaatggaaggtatagctatgatgctggtttgatgctttgctcactctaaaagatacggatatgattgtaagtaggtttagcacaacaaaactcaattctaactagcttaagcacaaaaacaatttttttttttttgaaacgggggtctcactcttgtcacccaggtgtgagtgcagtggcgtgatcacacggctcactgcagccttgacctcccagactcaagcagtccttccacctcagcctcctgagtagctggggaactaccagcacaggccacatccccagctaattttgtttgtttgtttgtttgtttgttttgagaaacggggctccactgtgctgcccaggctggtctcaaactcctgagctcaagtgatcttcccaccttggcttcccaaagtgtggggattataggcatgagccaccatacctgggccacaaaaacagtttttttaaggaaaaatgggcaggtactcagggaagttagatagcaggaaccacagccagggttcatgtctcagaaacaatctggttagatagctaaggatacctgggtatcactgatgttggactcttatgaattactgtgaataatttctaaactgtcactgggtctttgtacccaccagtgtacaggtgggaaggaagatcttgcctttgactaatataagggatacctgctgatactactcacagtgaagaataggcaggaggtttagatactagccagctgaaagattcatgatagcagtgtgtttttcaaactgtgggttgtgtcctattrgtaagttataagtaatctttttggttttgcaggaaggtgagtgatagagtagtataggacttatcagagttagttgcatatagtaaggttaggtattgttcaatgatactctattttgtgttcagaaataattaattgaataattgcactgagggaacatgaaaaagtagtgaggagtaacttgatttcttatctcctctagaaatgtgcttgcattatcctctgtcctaatccccacttctaattttctatctttctgttgttctcttcttctcatggatgcccatttttgatctgcaattgtatttgatttgatttgcactgtattttaaacatctgtgattaaatcacagagtaatcattatgagattctaggttcaagtaaaagcatcacgttgcaaaagaaaagatgtaatcaggaaaaagaaatctgacatgtttgaagagtacagcttgttggacatgctgagaagaataggaggaggtggtgatgagagacaaagctggaaaggcagattaaagccatatcctgcaggctttgtttttattttatgttttatttttatattctgtaccagccacggagagacaacctacaggctttgaatgtcatgccaaaagaatttggattttattctgtaggccttgaggagccagagaggttagggcaacttctccatcctcctaagtatttcacttcattttccagtgctaaatatcagagtccccaaggcatagtccctcgcactctgatcttcgttaatcagtctttccttcggagcattcatctgttcttgccaagtttacctattagttttctttgaatgactcctgtatctttatctctaggtctgatgccccagattgcaggcctgcattctcaactgcctgctgaatattccaattgctatttggatattctactgtcctcagtcataacatagctaaatgcgtttttctcatcctcaaataatggtctcttcatattccctcttgttggtgtcatttttctctaagacaccagtgttgaattttacagttttcttttggctccctatccccaaactgtctgcatgcctaattccctttgctcctataaatctctattcagatgtcaatttaacagagaccttctcagctcatcctatacaaaatatatgacagtaaccctttccctgccccaatatttcctatacttttctcctccttttcttcaaagcccttatcttacctgatatattacrtatttatttgtttattatccatatttccaactataagttaaatgtcatgaggaattttgttggttttgtgcattggggaattcctagtggccaaaacagtgccggctacataataaagttataaatatttaaatattttgctggctgaataattttttcaccatgttctaccagtttttcatgtatgttttatatatccctttttctccatagcttccactatcttaattcagatgctgtaacaacttctttttgaaacagagtctcgctctgtcgctgaggctggagtgcagtgggatgatcccagttcactgcaacctctgccacctgggttcaagcgatttttgtgcctctcagcctcctgagtagctgggactacaggcgtgcaccaccataccagctaatttttgtatttttagtarcgacagagtttcaccatgtttggccaggctggtattgaacgcttggcctcaagtgatccacctgcctcagcctcttaaaatgctgaaagtacaggcgtgagccactgcacttggccttttttcatcaacatttattttaagttcctgggtacatgtgcaggatgtgtaggtttgttacataggtaaatgtgtgctgtagtggtttactacacagatcagccaatcacctaggtattaagctcagcctccattaactattcttcctgatgctttacctccaccaacccctctgacaaccccaaatgtgtgttgtcatgtgtccatgtgttttcatcattcagctccctcttataagtgagaacatggtgttgtttggttttctgtttctgcatttgctgagaataatggcttccagttccatccatgtccctgcaaaggacatggtcttgttcctttttgtggctgcatagtattccatggtgtatatgtaccacatttttttttatctgatctatcatttatgggcatttgggttgataccatgtcttttccacctgcgcatatctttataatagaatgatttatattcctttagaatatacccagtaacatgattgctggctcaaatggtatttctgcccctagcagatgctcataattttttggccagaattattgtaaagccctttctagcctctttctacttcgctttctttctttcttcatttctttcctttcctttcctttcttttcctttcctttccttcctttcttttctttctttctttcctccttttttttttttttttttaaatttaggctgggcgcagtggctcacacctataatcccagcactttgggaggctgaggcaggtggatcacctgaggtcgggagttggagaccagcctgaccaacatggagaaatcccatctctactaaaaatacaaaattagccgggcgtggtggtacatgcctgtaatcccagctactcaggaggctgaggcaggagaatcatctgaacctgggaggcagaggttacagtgagccgagatcgcgccattgcactccagcctgggcaacaagagcgaaactccgtctccaaaaaaaaaaaaaaatttagagtcaggatctccctctgttgcccaggctaaagtgcagtggtacaatctaagctcactgcagtctcaaactcctacattcaagcgatcctcctgcctcagcctcctgagtagctaagacttgcagttatgcactaccatgcctggctaatttttgtttttgtagagactgggtcttgctccgttgcctagggtggtctcaaactcctggactcaagcaatcctcttgccttggcctcccaaattgctgggattacaggcatgccatgcacccagcctctactccattttttacaaatctttgaggttgatgtttcttaaaacactgctttaattacatcacttccgttctcaggagctttttgtggctccccattacgtattgaatggtggacgaaagttaattatgctcctgtctcaactttgtttcctatgctcatctcttgcacagacctttctttcttcattactggtctactgacaaaccaagtttactctacatttctgtcttgcctggaatgtcctcttctacttatgatactttggctattttctttacaaggatcagctactcacttaggtcatcttgagcaaatattgtttgaagaaggatgtatgtgggtagaaagccagcaggaacctaagtgcccctagtaaaaagattttctccaaccctttcatagcatctacttatctgtgtattttcttttctcttctgactagtcagttctctctctttatatatatatatatatatatatatatatatattttttttttttttttttttttttttttttttttttgagacagagcctcgctctgttgcccaggcaggagtgcagtggcacaatctctgctcactgcaacctctgcctcccgagttcaagcaattcttgtgccttagcctcctgaataggtggaattacaggtgcatgccactacacctggctaatttttgtgtttttagtagagatggggtttcaccatgttggccaggctggtcttgaactcctgacctcaagggttccacctacctcagcctcccaaagtgctggaattacaggtgtgagccactgtacctagcccagttctttatattttttagtgaaaatccttaaagcaggcggtctgatgaacttaactacttaagattttccctctgagaacatgtcttgataaggtcaatctatagatgatctctcttgagccaggtcatacccttaatccaatcagtaatggtccctggttaaagaacaagcttttgctgcttaaataggtggctgagggtggagtatatttagctagaatgaaccataagggagagacaggcactgtaaagaacaggttgaatataccaactatctgaattctgtcttttttttaagactcaatcttttcctttcttgatctctgacactctattgtgaagtatattcctcctcctatccctttactgttttagctcatttgggacttcattttctctgtgttttttttgtttgttttgagacggagtctcgctctgctgcccaggctggagtgcagtggcgcgatctcggctcactgcaagctctgcctctcgggttcacgccattctgccacctcagcctcccaagtagctgggactacaggcacccaccaccacacccggctaattttgtttttgtatttttagtagagacagggtttcaccatgttagccaggatggatggtctcgatctcctgacctcgtgatctgcctgcctcagcctcccaaagtgctgggattacaggcgtgagccactgcaccctgcctttctgtgttcttataattgtaatagattgcaagcccctaaatggttggggctgagttttatacatcttttgatcttccttgtgcttagcctatacaaccttaggagacatttcttctagggttcttaaacacacattctaatatacgttcaattgtttttctttcagggcctttaccttctaatgcaaaagccgccatcaaccttcaggatgatcccatcattcaaaagtatggctctaagaaagtgggcttgaccagatgccttctgacaaaggaggaaatgagaacgtttcactttccattacaaggttggcttaggcttactctgatattgctaacaatgtaagaatatctaacagcttatttaaatactactgtttgagattcatttatctggctgttttctgagtggcttattcttatttcatcttctattaatgaggaaatatcttcggcacagtgtatctcaaaagtgtgtgatgtctaccgtgattggcaaagtgatgattttaggtagtacatgaatgtgacattaaatagcattgaaataatatttaataagaaagttattccctttccttttcattcagttttctttcatttcttcttaatatattaaaaacagtcagtatgtctttaacattttaacacttttccagtacttctaattctcctcccacactgcccccatatttctttaacaaatagagcaggtctaggctcggagccttggtcaattatatagcaagaatttaataaaagtactttgatttcattttattttctttgttacctcctaattatagcaatgataattaaatttccttttttaaaaacagatataatttaacataccacacaattcacccacttaaagttacaattaagtattttttactatgttcacagagttgtacagccatcaccacaattttagaacacttctatcatcccaaaagaaaccctgtattataatttccctccaactccctgagcctttgacaaccgttaatctagtttctatatatagatttacccattctgggtatttcctgtaagtggatgtgcaatatgtgggctttgtgactggcttctttaacttagcataatgttctcaagcttcatccatgttgtagcatgtatcagtactacatttattttcactgcttaatgatactgcattggatagactgttcatcaggtgatggacatttgggttgtttccactttttagttaataatgctgctatgaatattcaggtccaagttttttgtgtgggcacatgctttcatttctgttgggtatatacctaggagtataattgctgggtcatgtgacaactctgtgtttaaccttttgaggaactgtcaggctgtgaaagctgccgtaccattttactttcccaccagcagcatatgaggtttccagttcctgcacattcttgccaacatttactattatcttgtctgaatatatccatcctagtgggtatgaagtggtgtctcattgtgattttgatttgcatgtttctgttggctgatgattttgagcaacttttcacatgcttattagtcatttgtatagcttcagagaactgtctattcagatcctttgtccatttttaaattgggctgtattttatcatggaattatyggagttcttattttctggatgcataaattttatttttttaattttttaagttgatgtaggcgtgttttataggtgccaggcaccgtactaagtgcctttttgtacattaactggcagtcctatgatatatgaactaaattttaactccattttatacatggcttttttctctatttattttaacatatttataaccatctttttcttgaggttgcactactgtcacatgagcacgtagtaagggcagtactgctaacacctataaaacaccactgataatatagataaggtaggcagcaaatatagtgtctgtgagatttgaggctgcctttcttctctgggatagaccatcttttgattcttttcattgcgattagttggaaatttcacagtaccgggaatcagaaattggtcaaaggtttgcatagccccctttgttccgtgtcaaacaagatttagatgttacctttactgctccagcctctgcctgaaggtagaaatcttcaacaattcagatgcttttgggtttttgagctaaatatgcatggttatggactcagggttcacaaatagagggagtaccttaaatctatagctgagcctctgtaggaaatatgtgattccagaaaatgcaggcaaggctctgaataggtgtttcagaggaatctcacaggttgagttgggtggagggacacatatggtgaatgttacttaaactttcttcctactatgaaatccttttagatctccattatggtggaatctcattcctattttctcttcctgtatttaggaaagaaagatgccacatacagttatttgcatactttattcattctttcttagtgctgacatggaaagcgcctaatgactttgggtttagccatgatttagttatctcttttctcatgaggaggaaaaattgttacttggtaactgccaggaagttcaagccccagaatctcctcctaacagcaagcctacattattctttcaatataaaaatgagtagatggagaaaaacttgaggacagagattgtatcttatttagtcattgtatttcaagtgtctaacataccaacatatctgactaaaatatctagtattgtagttttacctgcttgaatctaagagtgatgtttaccatctctattctaaaggcaaacattttcttcctttttctcctaggttttcctgattgtgaaaactttttacttaccaaatgtaatggttctatagcagacaatagtcctctctttggacttgactgtgaaatggcacgtactacttttaatttttcaattggagtgttgcaagctgaggtctagtagaaaatgatttcttgagtctaatgcactaatgaacgaatacattcatttttagtattctgttttaatagctgaaagtaggtccttytactcacactttagaaaacttagatctgtattccaggataaagaataaatatcacataagtggctgggtgccgtggctcacacctgtaatcccagcactttgggaggctgaggcgggtggatcatgaggtcaggagatcaagaccatcctggccaacatggtgaaaccccatctctactaaaaatacaaaaaattagctgggcatggcagcatgcacctgtagtcccaggtactcgggaggctgaggcaggagaatcgcttgaacccagtaggcagaggttgcagtgagctgagatagcgccactgcactccagcctggcgacagagtgagactcgatctcaaaaaaaaaaaatcacgttttccaactagttactatgtttaatcaggtctttgcatgttrctagaagttgattccttgtgtttgaagaagtattttgttgttgctgccatgaggactttgccttaattgttggtttggcttagttttacaccttgaagatcagaaataggatttccctgcttaagttcccctcgtgctttgctttatctaattgtagtaagcctcttttcaaagacagtgcatcccctctcagtactcaggaaacagtttctcaattcttaatagagtaactaagacctaaaatttgagaatctgacatatcagggtgtatatcctgtccttgcctgttagtggctatgtcgccttagacaaatacccctaacctatcagcctcggcttctccctctgtgaagtgggggtaataataaagcctacctcaaaaggtaattatgagagtggcatatataaaattcttagtacagcactagctgataatagaatgggcttcataaaaattacctattagtggtatttagcataatactggatatagtacacactccataaatggtagatrcaattattaatattatttgcattcatcttctttgtgcagactacactgtgttgatcctcttaagtgtaacattcagcagcctgcccagctttaatttcactcacactagatcctctagaaagcaagtttgtgccattgctgcagggaccctggtagattacagtagatggcagttgacatagtgtaaatagtaagaagaagcaataacttccacagttcagcagcctgactacatgttggtctttcagtgcctcacatccaaggggagagagctaacacgcatctcactggttgctgaaggaggctgctgtgttatggatgaactggtcaaacctgaaaacaagattctggactacctcaccaggtatttttcaccttgcctgcagctcttctaagagctatcgggctagaatggaataatacttaagaatggcccacagcttcagtttagttaggttttatctacttaaatattatcaaaggttagggcatcacataggtatattttaatgctgaaattgcacaatgtcagtgtataatgctcttgcccttcttgatcttcaatcttcttgtgaccttaagtcagcagaatattatcttccttgttccagaatctcccaattataatcattatctacaactgccaaacagctaragctttgctttctgataagacctcatctgaaaatctgcaagtcatcatttggcagtcaagtgatgttagagcttaatctgccttgacccccaaaacacaaacraatatttttcataacagaaatttgaagctgaaaatgttagtctacttttccaaagattagcatgtaatctcagaatgtacacacagtgactaggcaagaagccagtgaaacattactgttcccatccgttgacgtggcaccagtagattcgtgatgacttagggacagagaggcaatgatagtgataaatactgtcctattagcagacttgacaattagattcttagagaacagtcacgtgtggcaaagttgtatgcacaagcatgtttgtcacagtattgcaaaaatgtgagtatataaatgtctgaaagtaggggattagttaaaatatgctgtatctgtataatggaatactctgtaaccatttaaaaggatgtgctaaatagatttattgatgtgcaaatgtgtttatgacatattataaatgatagattcattgtaaagcagctcatgcattatgattacatttttataaaaattaaatatatacctgaatctatatcaaaagtatggaacgacatttactaaaatgtaaaaaagcaatcatctctgggtgataggattatgactaatttttaattcttatttgtcactttggacactaagcatatatatattaacagtaattttaaaaaatgttatttttaaaatcactttccagagaggaaaacttgttaatatcctagcctgtccatttctctttttttaatgaaagcttttcgggaatcacgaagaagattcttaacccagtgacgaccaaactcaaagatgtacagaggcagttaaaagcactgcttcctcctgatgctgtgttagtgggccactccttagatttggatctcagagcactgaaagtgagtatctgatttaggactttgcattttcagtrtaaatgcctgttccatttatctcaaatctaaagtcttgggctcttctctcccaccctgctagcccacttgttttttcctttagcataagacactactcattttattctctttcttcctcagatgatacatccatatgttattgatacatcgttgctttatgtcagagagcagggcagaagatttaagctcaagttcttagccaaagttattttggggtaggtttgcttatatgctgtaatattgttctgacaaactgcatacaagttagcatgtagtatctaatttaatgcatattgcaaaattcagggtttctgctctctttgctttaaacatgtttttttgcatttcttatgaaatgaagaaattgtagcaatagagacaggggtttacattcacagtcgaggcttaatggacagaactgaaccatgaaggcagaagaggtaaccaaaatttcaaaacataacatacctatatgcctatacaaggtagtataacatacttatactgtcctattgtattaagacacatatgtacaaaggtgttcattataacatggtttaaaatagcaaaatagaaaacctcaaatattctagaagtctggttgagtaaattatggttatctgtattattgaatattttgttgttcagaagaatatgataaatctgtttgtgatatgaacacctctctaagacactcctgagaataagggatgcagagcaagatctatatatgcctcaatatttatatgatatagattagatttagttctatctataaatatatacatatattaagctttttaaaaacacctaagaaagtatttaagtatgtatagacacttatatacaaataaaaaagtttcaggaaggcaactttaaacaatggttagatctgagaaatgggcctggtccatttcttagagaagggcctggccagggagtcagccagaaactttttgttgggtagccttttgtccggatgctatgcttgctgtgaacaaagctattcctgattgttttgcacccccagttcctctcgcagggctgggcaattagctggaataaaggaaccttgatttttgtgatgcaaatctaattatcagaattctaacattttatatgtaatcagaacacttgagatggttgaaaaagcctatcattaaaagtgcttccagtatgtcaattttatattgactttccaggaaggatatacagtgtccagacagacttggtcatgatgccacagaagatgctagaacaatccttgaattggctcggtatttccttaagcatggcccaaaaaaggttagtatctttgcccagtgtgttcaccttttcttaaaatcatgggactagatcagattatcacagactaccaactcctattatctatttttatgaaaatggcagtgtgggccaggtgcagtggctcatgcctgtaatcccagcactttgggaggccagggtgggcagatcaccaggtcaggagttcgagaccagcctggccaatatggtgaaaccccgtctctactaaaaatacaaaaattagccaggtgtggtggcgcgtgcctgtagtcccagctactccagaggctgagacaggagaatcgcttgaaccagggaggcagaggttgcggggaggcagaggttgcagtgagccgagattgcaccactgcactccagcttaggtgacagagcaagacttcatctcaaaaaaaaaaaaaagaaaagaaaatggcagtgtgattgaatcctaaaaaaagaaaatggcagtgtgattgaagcctagcatgtatttcgaattaagacccatatcactagcataatgtggttaagtatatagtccctgcagttgggcttatctgttttaaaatatatgttctactatgtctagctgtataatctagggcaatttctctgaacaacatcagtttttggatctataatatgggaatacacacttttctgggatattgttgagagtaaatgagatattgtgtataaaattcttagcacagtgtcttgaatatactaagcactatmctggtggtgtggtgattattgtagttaatactaataattataaaaaatctgcatagatttttgttttcttggagtagggggagcatacaattgtttcaacagcagttcagtgggtaaatgttagaacaacacataagggagacatggaagaggacatagtctctgacaaactttattataatgcattctaacctattagattgtcccattgcatagtacattccatcatgactccattatgaaataaattgtactccacatagaataataagtaacagccagaatagtcttttgtgtcaggtggtagaaagacattctaacagatcttctttgagcatatagataataatagccaccactcactgaggtcttaagtgtactgttctaaaatgctgtatatacattatcttatttaatcctcacaacagccctgtgagttagctattatcattccaattttatacatgagcctttcgaggttaccaaaggttagataacttatctgaggtcccacagtcagtcagaggtggaaccagaattgaaacccaggtctgtcacattctgtcttttctgtataccagggattagcaaactttttctgtaaaggccaactagtaaatattgtaggctttgcagatcatattgtctttattgcagctactcaacttgctgtggtactgcaagagcagccatagacattatgtcaacactggtgggcacagctgaaataaaactttatttatttacaaaaaaatatgtattggtgtctgctaatctctgctctaaatcactacaataggttctaaaacccttttggtctcatgactctttttatattgttacccacacaatggtgtgttcagtcacttagtgggtgttaacccaatgaccactaccaaggaatatttatttttatttttattttttttgagacagagtctcactctgtttcccaggctggagtgcagtggtgcgatctctcttcactgcagcctctgcctccccggttcaagtgattctcctgcctcagcttcccgagcagctgggattacaggtgcctgccaccacaccttgctaattttttttttttttgtatttttattagagatagggtttcaccatgttggccaggctggtctcaaactcctaacctcaggtgatccacccatctcagcctcccaaagtgctgggattacaggcatgagtcactgtgcctggcccaagaggatttaacaaggggattttattactttgcaacaagtaagaacaccagggatagttcccaaagcactatctccccaaatgaaggcaaaagcagggcttttattttgctagtcggctgagtcattgcatgtaaaggcagggtttgttccttgacacatacatgtatagaaaatggagaataagttcctccctaggtgagatttttagtatggtaatgcagagagtttgccaagttcatctctaacttcaggcatctctggttccagctggtttttatcttgctgtagctggtggtcttcctgtacccttttgaaacaacaaggtgcaacaggggttacacttttatagtgtgcacctgaagacccagggactctgggttacaatatctatcaacatttaccatattagaaattaaataaatttttaatattagtttaagataaataaaaagccattatatgttaacacaaatcactttttttctttttctgttttttttttttttttttttttgagacggggtctcactgtgttgcctaagctggactggaactcctgggctcaagggatcctcctacttcagcctcctgagtagctggaacttaagcatatacagccactctgtccagctacaaataacttacttttatggaaaaaagaattttccataaaaattagtggaaagaacatcattgttttaggtatttttgtgaaaccttttaatatctagcttaatagaaaacaagtggcttttcatatctgctttcacattcagtctgttatgtcacatagttggagaaggaaggacctcaccccttgtgagaagatgtctggaaaccccaggattctcaaaccacacttggggcacttaattatgcttgatttccagtgaaaattgtgtctcacttggataaaaactaaccaaatctgaattaagcatgggcttaattaataataatgcattactattggttcattaattgtgacaaatgcaccatacaaatctattactaataggtaaaaatggaggtatgctatatgggaactctgtactattttcataatttttctgtaaatctaaactgattctaaaaaaaaagtttatttttaaaatttgtaactttaaaaattattctctctacatcacaactccctggtgggctcccactttacggaaggagaagaaataactagaatagacttct[450 bp omitted]gattgcagaactaaatctagaagcactagctaatcaccaagaaatacaagcagcaggccaagagcctaaaaacacagcagaagtacttcagcacccaaacacaaggtaatattttcagtttgaaacaagagcaaagacaaatggagtrtctagtttcttatttaacaacacctgagaatgtttttatcctcttttgagtctattaaaaactatttaccaaaaaatgataacatctatcacaaaaaccacggaaaaaataccaccttctagccttaatatatagtatttaatttctaattttctgaatctagtggctggtctaaaatgatatccttgatcaaaaaaaaaaaaaagaaaaaataattggaatacgttgaacctaggtagcactgggaaagatgatagactagttggtattttggctagaagagtcaatctgtagccttgttgtattgcccagactatgaaagacacacacacagactcaaaagggctttgtctccagactatagcaaatgtatcagatctttagaattttgcctaatcttttgatagagagctttgggtatatttcttgtttatccttcctctctctattgaagcaacactgtccaaaacaattttctgtgatgatggaagtgctctacatctgtgctatctcgtttggtagctgctagtcacatttgactagtgcagttgaggaactgaatttttaattttatttaattttaattttaatagctatatattgctagtggctaccatattgtataatgcaagtatagagaaataactgtcaggttctggaaaactgttgttcttaccttaactcttctacttctttatagtgttttagaatgcttggattcagtgggtcagaagcttctttttttgacccgggagacagatgctggtgaacttccatcttccagaaattgtcaaactattaagtgtctttcaaataaagaggtgagtggcctgctgaacctttgcaggttatattcaaagcagaggggaatgtagccctttgcacccatgccagtgtcaagctttttttcatcagcaaccctggctacagttagcaagcctggcttgtgtctcacatcttgtatggagtacctaagtcctcataggggcagaactgtcagctgccaatgcctgcttccagagcccagcaggcctctggctttggtcttgcatacatctttgagtttctgttgtgtttctggttcatggaaacgtttatcttggttttgagcctggctatatcctttcgattttttctttttatattttatgtatcattgctgtatgttaagtcagagaggctacatcaaacatgagcttattatgttatcatattcagaagatctgtgtttgtttttttttaacattttgtttgtaaataatttcaaccttacagaaagcgtgcatgaatggtagaacacctgtatactttctgtctagattcaccttttttagcactctgccccagttgctttattattttatatgtaccctcatgcttatgctctctcatgtacacactctctctttcttcctctctgtatggcatttcctgaaccatttgagagtaagctgcatatatcatggccctaaacacttcagagtgtatttcatgagaataaaaatattattttatataaccacatcttaacatagttaccaattttagtaaatctaatattgtcctggtacctttatctacttgtcatctgtattctaattttcttggctgaccaaataatgtctttatagcatgtcttttccctttagaacagtatcatttctagggtcatgtattacaattacttgtcatatctttttagtctcctttaaagctgtaacagttcctcaacctttctttgtctttcataaccttaatactttttgagtaatgcatgcccccctccctttcttagcagagttgcttattttaggtttgtgtggtgtttgctcatgattaaattcagattatgcattcttagccaaatttcttggggtgttgcatccagaggcagttattactcatctgcccctcttttgtgctgtttattttgatcacctggtcaaggtgttgtctgctttctctattgcagagttcttgttttttctcttaattctaataaatatgtggggagatattttaagaacatgccagtatcgcttgagcgcaggaggttgaggctgcagtgaactatgatcgcaccactacactccagcctgggattacaggtgtgagccaccaggctcggccaagtgttcttttttatgygtcttttgcttgagcttgttgagcttttgcaatttgcgggtttatcatttttatcaaattagaaaaaatgttgaccattatttctccccattattttttctttcaccaccctcccctcctttgggcactcccattgcatatgtattaggccgtttaaagttgtcccatagctcactgatgtgctgttcatgttttttccagttttttttcctgtctgttttattttagattgtttccgttgctatgtcttaggtttctaattctgctgcagtatctaatctactgataatccaatccagtgtactttcacctcacacattgtattttttacctctagargttaacttttgttctattttgtatcttccatgtgtctagttaacattcagactttcctctagcttcttaaatttcagaatatagttacaataactattttaacatccttctctattaatttgataatctgtgtcatttttagattaactgaaattgattggtttttctccttattatggactatattcattcttctttgcagcctggtagtttttgtattggatgccagacatagtgaattttaatttgttgggtgctatatatttttgtatttctataaatatttgtgagctttggtctgagatgtggtaaagttacttggaaacactttggtccttttggatcttctttctttctttccttccttcttttcttatctttcttttcttttctttcttatgttgcctaggctgatctcaaactcctggcctcaagtaatctgcccacttcagcattccaaagtgctgggattacaggggtgagccactatgcctggccagatccttttgaattcttgcttttaaggtttgttaggtgaaaccagagtaaattttgtcccactactgaagcaaaaccatactaagtacttaatctccataaattatgagattttacactctagcttttgggaatctaaaccattcctggccttgtgttagcccttgcgattgtttcctctaatccttttgggcatcctttccttgacctcgcatagtttacttacatggatacactaatccctactcaactgaatatttgagggggattatttatagatctatcggtttcctatctttaaggatcactgtccttcattttccaatatcccgagaactgctgttcttaggaattttttttttttcttcctgagcacttacatgggcctcaagggctctttgggcattattattgttattttaatagacttttatttttagagcagttttaggttcacaacaatattaaatggaaagtctaagctgggtgcagtagtttacacctgtaatctcaggactttgggaggctgaggtaggtggatctcttgagtccaggagtttgagactgacctgggcaacatggcgaaacactgtcgctacaaaaaattagccaggcctggtagcacatgcctgtggtcccagctgctcaggaggctgagatgggaggattgcttgagcccaggaggtggaggttgcagtgactgacgtatgatcgcactactgcactccagcctggcaacagagaccctgtctcaaaaaaaagaaagtacagagagttcccatttacccccacacccacccacacaaacaacttccaccattatcaacaacctgtacctgggtagtacatttgttaaaatcaatgaacccactatgacatataattaccaaagtccatagtttacgttagggttctgtcttggtgttgacaaatgtatagtgacatatatctaccattatagtatcatacagaatagtttcattggcctaaaaatctgtgatgaatgtgctctgcctgttggaaaccactgattttttttttactgtctccataattttgcctgttttagaaagtcacatagttggaatcatatagtatatagctttttcagactggcttctttaacttagtatatgtatttaagttttctccatgtcttttcactgctttatagttttttttcctttttaacactgaataactatacattacctagatttaccacaatttatccattcacctgctgatagacatcttggctgcttccaagttttggcaattatggacaaagttgctataaatgtctgtgtgcaggttttcatgtgtacataagtttcaaacacatttgggcaaataccaaagagtacaatttctagattgtatagtaagaatatgtttagtcttgtaagaaactgctgaacttctgaagtgtctatgattttgcattcccaccagcagtgaatgagagttcctgttgctccacattcttttcagcatttgatggtgtcagtgttttgttggattttggctattctgatggatatgtattagtatctcattgttttaatttgcagtcccctaatgacatgtaatgtgaagcatcttttcatatgcttatttgctatatgtatctcttctttggtgaagtgtctgttcaactcttttgcccatttttaaaattggattgttcattttcttattggtgagttttaatagttctttgtatatttgggtaagagtcctttaacagataagtcttttgcaaatattttctcccagtctggcttgtcttctcattctctttatcgtatattttttatagtttcttaggtgtttgaggagagagggtaactctactctttgttattcagtcttgactggggatggaaatccttgtaagttgcatttgagaaacttaatggcaatctaattttcttggccttttaagttacttttactgaggatttatttttcccgttttgtttaaagtctaattgttttactaagctatgtctcagagttgatcattccaagtcactttttattggtacccaaggcccctttcaatatttaggttatagtttcttttatttccagaaggttttcttggattgtattttcaagtatttggttccattgctttaattttcttcctcatggacttcacttatgcatatatgttgttccccgctggcctatctttcattcacctactttctctctgatccttttgatttcatttgtatactcctaattctttccatgcttttcattaatgccctttattaaaatttcacttgaatctattctttcttgacaacttgtagttgctttttcatatcctcaaatgcttggctgctaatattcaattcagtttagaccgtaatgttaactgtatcctttagccccatggttgatttttttttttagggggaataattttcatcagctgaaatgcttcgattctcactttatgtcttggcttttgtttttgtttttgagacagggtcttgctctattgcccaggctggagtgcagtggcgtgagcagagctcactgcagccttgacctccgggctcaagcgatcctcctgcctcagccacccragtagctgggactacaggcatgtgccaccatgcctggctaatttttaaattttttatacagatgaggtctcattatgttgcccaggctcgtctcaaaactcctgagctcaaaatatcttcccaccttggcttcccaaagtgccaggatcacaagcatgagccaccgcgcccagctgttgctgtttttttaatagtagtttagattaatatggtctactattttctaattttactgatttgtttttgaacaaggttttcattcaagagcatctcttttattctgccttcctcagtgcagttttttcttctttttttgtgcttttcctctacttatcaagggattctctctccctttcctctcctgcctctcttcttattgtagtaaaaaacataaaatttaccatcttaactgtttttatgtacatagttcagtaatgttaggtatatttatattattgtgaaagagatcttataacttttttattttgcagaagtgaaacttgggctatgtttctttgtatgccttgtgacttattgttgttggtattgttgaggcttgggcatttgaataaatacccagttgttgtctttacagactgcttcgtgcaggggaagaccttcaccaatcagcctagttagagatttcatgacctcccaaacctgttctggagatttgtcttctctggggttatgcatgtgcctttagttgttccctgagccccttgtccctacttcttttcagagcccataatctctttcttcccctggtttcttactgcagctctaacatgccatggtgatcacatctgttttcagtggcttccaaacaaggccttcttcagtcctgtcagccttccgagtcacgcaaaacagaaaatagtccctcagacagcccccacagtacccagaacattggacacatggtcccctcttttttttccatcccaagagaagatctgtggtgtggaagaagccatattatgtcagatagggagaggtgtagatgggaccacaaaacatcacaaattttcctttcccatttactggaaacccttcttggtttcatgctggtctaggtgctatatagtttctcatggaatctctacagttctctcaaaggtgttctggtccgtatattgttgttaactcattgtttctgtgagagtgagaggctgaagtgaagcttcctagttctccatttccagaatgatggtgtggtgttgagggaagggaggaatttataatattgttcagaagagttggcattcttcacagcagtgtctccaaggagtaccaccttttctctatatatctgattcttctccagaagcatggcttctctgaggctgccaagcctcttgcttgtagtcaagtgctgagaactgtcaaaatcatgacccatgttccttatttgacatttaattggagtttttattttggggtttttttatgcttcatctaattcttccatgccccttgatttttttttttttaaccaaatctattaagcctcctctcccttgctttccctactcacaggcttgcagcagtttacaatagtgggagttacacttatttatttaattacaggtcatttgaaaatttttgtaatagcccttgtctcttagtaatgccgaaggtatggctcatatgtattttatttttattctttttattgattctgtggttctttggggaaggtgtgtggtttcaccattttcctgcagacctggaagtcagccccatattacctttcagtatgcgtaaaaagacaactactgtttatattattgtggctcatatccaggagccacaatagagtatgaggttcctaccttatccaggctgtgctgttctctacaggttcttgagcaggccagagtggaaatccccctgtttcccttcagcattgttcagttctcttttaaggccttttcacctgtcctcactgaggagatgaacaaaagggtaagtgaatgggttctgctgaatgatttatttagtgacttattataacctctcatcattaaggaaagtaatacatgctttatttaatttgttgtgtttttctctagatttttactatctgcatattaacatttaaaaatatttttatgaaaatgggaatcagactatgcatactgttttgcaactttattttttcatttaacagtatatcatacatctttctgtatcactacatatcttatttcccttgtttttaatggctacatagtattctgctatatgatatacctattaacatttgtgctttatacatttttgctattacaaataatayttcagtgaacatccttggacatttggcaagtatttatatcaaaaaaatctttggtgaataatcccatgcattgactcatgatttcagttctctttccatattcattcccatactatattctgttgtttttcctacagatgaggatcaagtggacagagatatcaactgtctatgctgggccatttagcaaaaattgcaatctcagggctctgaagaggctgtttaaaagctttggcccagtccagtcaatgacttttgttcttgaaacccgtcaggtaagaccggaaaattcagatttcattttctagattagtgttagacattcaggtgactgcttgggccatgcagatagcaaatattcgtaaagtaagcttgattgctaccaactggagtgtgagacatactctaatgagagcagttgttgacccacaagaatgtatacccagtattgtgagatcttttgttgtgtgtgtttaaagaattgagaaatctggctgggcgcagtggcctatacctgtaatcccagcactttgggagtttgaggagggaggattgcttgagcccaggagttcaagaccagcctgggctcaagcaatgtgrgaccacattgctacaaacaatttaaaaacaagaattaagaaatctgtcagttttcatatgttggctcccatttctcaaataccaggccatacgaaaaaatatgtctgctggttgaatataacctgtggtccttatgattgtacctcagctttaaatgataaaatactctttcaaaaagagaagtaactttcatatcttagaaagttacttctttttttacattacagagtaggctcatggcttgcttggttaagatacaggaggaagattatgggagggcttttgttgttattgttatctcttatctcttagggtaagtttttggtattgtaggtttgtatttacataaaagccctttaaagagattagttttactttaacaaaaataatacttgcatatggttttaaaaatttatgtagttcaaaaggacttcacaagttatgtctccatcttcacagtcataacaataccatatcaatagataaagtttatatgtgaagcaataacatcataagcatatagagacatggaagaaatcatgaaaagaaaaatggaaacagtgtaatgtaggatgtttgtagaatgatatacaataaaggtaacaatggaggcctctagggggaagaattaggcagctagctaatgggattaggggaagacttcactgtaaatatattgttcctttagaattcggaactaggtaactattaaactggtgtattacaatgtatgaaagtgaagtaaaaacacttctaaagtgatctaagtgcaggatcctagatattttaaaatggctgtctctaaattttttaatttaatttttattttatttttatttttgagacagaggcccaggctgcagtgcagtggtgccatcttggctcaccacagcctctgcctccccagttcaaatgatttctcatgcctcagcctcccaagtagctgagacgacaggtatgtgcccccacgcctggctaatttttgtatttttagtagagactgggtttcaccatattggccaggctggtcgcgaactcctgacctcaagtgatccacctcccaaagtgctgggattacaggcatgagccactgcacccagcttccaaatcttttattaatggcttttctatgactaaaaataaaaatacaaagattgtccctgagaagatggattgggggatgagaagtgtatagcaagggactataacatcttcctttctcttggcccctttttttggttgcgggggtggcgggtaaaatacatataaaataaaatgtacctttttaaccatttttaagtggcattcagtatgttgatattgtgcagctatcatcaccatccatctctagaactttttcatcatcccgaactgaaatttcctattaagcaataatttcctattacccctccccccagcccctggtaatcattgttttactttctgtctttatgaatttgactactctgtgtacgtacctcacataagtggaatcatacaatatttgtccttttgtgtctggtttatttcatttagcatgtcttcaaggttcattcatgttgtagcatgtattagaatttcattttcaaggcaaaataatattccatttcatgtatataccacattttgtttatccatttgttgatggacatttgggttgtttcttgtttctaccctttgttttgtttgttttttttttttttgagatagggtcttgctcacccaggctggagttcagtggcgtgatcacaactaactacagcctcaacctcctgggctcgagcaatcctcccacctcagcctcctgctgggaccacaggcatgcacgcctggctaattttttgtaagacagggtctctctatgttgcccaggctgatcttgaactcctggactcaagagatccaccyaccttggcctcccaaagttcttggattacaggcgtgagccactgtgcctgaccctgggttgtttctacctttgactatcatgaataatgctgctatgaacatggttgtacacatatctgttcaagtccctgctttcagttcttctgggtgtatacccagaagtggaattgatggatcaaatagtaattctatgtttaattttttgaggaaccattatactgttttccacagtggctataccattttacattcctaccagcaaagaacaaaggttccaacttatctacatcttcactgacacttgktttctattttatttaatagtagccatcctaatggatgtgaaatggtatctcatttgggtttgatttgcgtttccctaatgattagtgatgttgagtgtcgcaggcaatttgtacatcttttacagcaaagtctattcacttgtttgccctttttttcttatttatttttttcagttccagctactctgcagtgtttgcccatttttaaatcaggttgtttggcttttttattgttgaattgtaggatttctctgtacattctggatattaatcttttattagctatgtgattgcaactatttctccattctgtgggttrctttttgacactgctgttagtgtcctttgatatacaaaaggttttaatttttatgaagtctaatttgtctatttttaattttgttgcctgcctttgatgtcatattcaagaaaccattgccaaatccagtgtcatgaaacttttctatgggaaggcttttatctccatattgatgctatggctcagataatcacaaagatttagttactccgagttaacaaacagaaaagcagaccatttgaagatgtagcctatccagtggaagaacttatccttcccaagcttataaagttaagccaaaagacaaatgggaatctctgcccgtgacttgcagtgatgactttagtgatgcataataaatattatgaaaagcctgttgggtagttccattttaaatgacaaagttatttgttgtctgaaagctagtttctgaactttgatgatcccatttaaagttgacagtttacaatcaatacttgtgtagcccagcacagtaaaggcatccattctggtggctttggccactgtagtttgaatcctttccccaaccccttctttagcagtttgagctggaaagcaatgatgaggaaatcttggtctttctgcagcctcatctctgtatacagtatgaagtcctagaagctgcccagctggccatagartccttggatggtattctggtagatggtatctgcatcaaggtagggtgacaagagaaagccccctttgcttgggtctggcctaccacagcctgtatttatagtgycccaggacatataggaaacactctcaagaggcccacgcacaagactttgttatggaaagtcttcagccaagtctaacattctcctactggcagtgattgaagacataacggctttcatttgtgtcagaaatcatcctgggctagatttgggtcttccttgcattctttgttactacttaagtcccctgtggtttattctggttggttctttgtggttacccttttcttcacctttcagggagatcaaatggtggtattttgaagtttcttgtgcacataaacagaatttcattaagggtgggaggcaggaaactgaagagaatatgtttacatgaaaatatgtatttatcaattaagtctctaacataattctgtgaggccattatctttagtttccttttacagaaaagaaaagaaacggaaaattttaggaaactgaaaaatgaagttattagtaatggcaacaacttgctagtatccaataggcctgaggattaaattgattttctaccactaacaccaactttccttggttaggtgcagaggcctgtgacagagctcacgcttgattgtgacaccctcgtgaatgagctggaaggagattctgaaaaccaaggctctatatatctgtctggagtgagtgaaaccttcaaagaacagctattgcaggagccccgcctctttcttggcctggaagctgtgatcttgcctaaagatcttaaaagtggaaagcagaaaaaatactgtttcctgagtaagtctatgctactgaatgtagctttggggaaggaaactggggatggtgataacatgaggtcagagaaaggaagattcacctcctgggctggaccagggcagcagttcctgattctgtccttctcctttgaccctggccaggcagcttggatggtgatcagctttcttggcccttaataacataaggtgggggttcttgctttcagaattcaaaagttttggcagtgcccagcaggccctcaacattctcacaggcaaggactggaagctgaaaggcaggcatgccctaacccccaggcacctccatgcctggctcagaggcttaccacctgaatcaacaaggctcccagggcttcgtgttgtacctcccccctttgaacaggaggccttgcaggtgagtgagtgaaggcgtcttggagaagatgtcaggagagtcctgctcagtgacacttaatcctttaatcttttttttttttctaccctggccctcagtcttatttcactctccagcttcctccagtcctggccacatctccttttctcgcagatctctcatacttttgcccccaccatacctgctaaacttagttttttagtcttccagatctccaagggactttgaaggacaaaggcaggaagtcagagagctggacaattattcagtgatctagtctagggtttcccaaagtgtggtatatacacaagataaattgtggttgtcatagatggtcttttcttttttgttttcacttttatgattatggacttgtccgtctttttattatatctaagacatctgaatggacttgttttgctaatacttgttaaagtatacaataactacattgagcctatgattttgtggatggcattagttagacaaggctaaggaagaaattaactcactttatggaaaaatgttagagggatatacaagcagaagagtggaggtagaaggtaaatggctgaagcttgggaaaccctgtcttagtctaatctctcatacttaacagatgaaaagtaggggctagagttggtaagtcacttgcccaaggtcacaaagagacttaatggcagaagccagactagacccytcatcagcaatgtggctcccctagcttggggtcttggaagacccatgtggaggaaaggacagtagctgtcctcccctgaggaagtccttagccaacttggaggcctggggatgctgggtcagcagagaacctgcagtgtgggctccagtgttagaaaagggatttgtctggaacctttactggaatcccatagccttagaggcagaggaagagtgttgcagcccttccaaaggtaacgagagagtgttctggctgagtatcgacacatggctttgatcccagactctgaaactggaccacccgaagatagcagcctggcgctggagccggaagattggaaagctctacaacagcttgtgcccgggcactctctgcctcatcctgctgccaggaaccaagaggtraggactagaaagggtatcccttcaggactctgtmccctggatttcagctgttcttagagaaaaagccttttgctgatatttaggcacatagtgaggacttacatgaatcatctctttaattttcaccgttctaaaagataggcattgtattcccatttcacatttatatgctcttgtataactacatttattggtccctcaaggagataatttatccccagttaaaaccaggagtcttatgtccttactgctctctggagtaagaagtagctgctaaccccacttgagtaaaaaaagtaaagtctcagaacaagccctaggcttaggtgtaaccactctacatgtgaggaatgtgttcctgccttctgtacccttttccccattgacacctatgttttaagagataacagggcctggtttgctgattctaagcctgaggaatactggagcaggactttgagtctagttgcagctttatcacctatctcctctgacaagtggccaagctacttccccactgtaggtctcaatgtccttttagtaacatgagggatttggaataaatcagttgattttcaaacccttttaactgtaaaccctttctttaaagaaaaactgatattaaatcttaaagcataaagatgggcagttttggaatgagtgagtgggcagctaaatgaatgagtgtatattggggaagggagggaaagatggtggcttttttgaacagtgtgaaaaccttgggttgtgttaatttttaaaagtcccttgagattctgacatctggttaggcgcagtggctcatgcctataatcctagcactttagaaggccaaggtgagcggagcacttgagctcaggagttcaagaccagactaggcaacatgacaagaccctgtctctaccaaaaacacacacacaaaaaaaaaacaaaaaaaaaaacccagccaggtttggtgttgtgtgcctgtggtcccaactacttgggaggctgaggcacgagaatcacttgaacccagggggcagaggttgcagtgagctgagattgcaccactgcactccagcctgggctacagagtaagactyttatctcaaaaaaaaaaaaaaaaaaagattcttacattctaggagttgacagagcatgaatacctctggccttgaaggtggatcagaagaaattcatttcctagcataaagttcttataacatgcatctgaggaccattagggagatggtctacctactgggcacctttgaaagaactgctttctctgaaaagcagaaacaagtattaggtgcttacattgaggggaaaaaaaatcttagaccaacatactttaaacaggcttgtgggtaagctaacaggaacaggttaaaaagtgaccacaagttgccagtaaaagctttttggttaagatgtgggctctggggaacagacagacttgctcctcaggggcagtgtatggtggtaggtggactgggttttcatgttctcacgtagaatacttagattacagtccaccattgtttaggtaaactaagtcaagagtagcccaaatcattgttcttcctggatgttccacagagggtgaagccagaggaggaagtgctggggtcagggagcaaaaacacttaagttgtgactgagacaaaggtcctaagtttgacaagtcagtagaattaagcaccccctggaagcagcaaatcctgtggtgaagaaacctgaactactcctatcctttaaaagtcacattctgatttctgtagacatattgatcaaactcagcagcagtagcatgcatttccccaggctgtggaagcttgctgtgtgactgacttctctgggccttgtttgtgcagttgtgtccgtgatggcagcagatactcttgggaaacgtyggggaaaaaaggaatagcaaaaacaatagaaggtttccttaggctggggtcttgatgcagctcttaatccttacatttttggtagcttcttaaattaatattgaaaacaacagtaatgtattaaacccaggtactgtgctaaatgcttctatatgcatttttggttgaggttgtcagaatctttactgaacaagtggagaaaaagtctcagattaaccaattttcctagggtcacatagctagtaagtgcatagtcaggacttgtaccctgatggtgtgtctgactccagagcaactctcctgccctcaaagctctagttctccatacacaaaagtctagtgtttgcatgtttaagttcatacatcaggtggagacagattctgtgtttgtctttgctcatttctacctgctttgcctcagagagctcctcaacgctgacccagttccatgaataytcattacaaggtggcagggaactaacaagtattgaaggctcctaaattccaagcaccacaccaggttttttacaacaaacattgttaaataagttaatgttttgtaacttttttaaacagcctctggcacctagcaggtgctacaaaagtatggaatgaacaaagactaagactctttaacagcaacttataagggatctaatgacagattgctattattgatatcctggttctgtcacttaacagttgtgtgacttcagcaagtcatataatgtctatgagcttttttattttttaaatgaggataacacttgtacctacatcagtgagcagttttgaggattaaatgagacaagtgcttagaacaactcttggcatgtagtaagtgctcagtgtatgtttgctattgtcgatagtcttcaccaaatccctgtgagatagtaatttaaatatttcatagttttatagatatgcctcatatctcttaattggtaaaggtaggatttgaatctagacctctgagactcatcagtgctttttccattaaaccatcttcagcaggcagctttccataaaccttcctgcccttgccccatggcacacacacatacttggaaaaatatctcctctaactaggcatttataaccattcattcaaccttatggataaaaacatacctttgtttcttatttattgcagcactcatggttcactctctggtctaggactgatgggaataaaagaggaagaagaaagcgctggcccaggcctgtkttcgtgagtcggcctgccatgtttccatgtgccatttcttaccccttgtaggcaatggcaaagaatgtggtcaggctgtagcctccccaaccagcagacagytttatggaaacttggtatagcagctaaaagagtttagtttgtttatatggcatgtataagttttcaataaatgcctaaagttcaagcatagtatggggatgtccacagattgtttctttgtgtcattgagtttatgtgcataggtgcggtacaaggtgctcattccatgtagcacccctattacgtggtatatactgctaaggaaaccaagaggagtgattactcagaaaaccagccgattatgcaatttgtcaaagttgtaatgtctgtgaagcaaatttctttaaactgttttcttattgacaactcttaaaaaattgaaggacaatgatagctgaactgagaaatctggcaagtccaccaggcagtggagtggaagattcttttagtttttttaaccagccctggaaaccccttccattccacgtttaggaatcctccttcccttcagaacatgactgcagtgccacccttcaccagtaggtgcctccatcacaccatctctccctctaggaactggaaacttgaaattcagtaaaagccgttttaatcaactctcaaactgataacaatctgtgttggaaaggacatggggcataggcacccaattccaaaactactagaaatattaactgccctccagaaaagatgaatctggcatacagtatgtatcatacccaaaaacctcgtaaattgctctgtacactgagaccctgcaattctacagcattatcctaggatactaggatagctacacaaaaacatgtaatgaaggagctatcagagggttattacaatggagttctaggtagccagttctaatgtgtgtgtgagagagagtaaataaaatcttcggtgaaagagatcttcaagaagaggcagtagacctctggatccagaatgcttgactttgaatcccagctttttaaattattgtgtgaacttgaataaattgcttaacatttctgtgcttgggataataatggtatgtatccgagaggattacagattagtgagattatacattcacagtactgtatattatttgttgtatgaagtctggagggatacagaatagcatgtagtttgagtacacttttgtaggagaaaatatacaaagctatacataggcttctaacaaaacctgcaaggctatatgccaaaacgttaatagtatttatctatggctagtgccattgacaaatcaggttttaacaaatgcttttctgttgtagactcgattttttttaacattcaacatatattgcttttataattggaaaataattcttaccacctgctgtcaggagaagaaaagaagagaaagataattctacttaaaattaactcttagggttgggcagttggagcagtgtttaatcttataaatgtagcttcataagatctggtcctatatgaaagtttaaatgtagcttctgtaagatctggccctatgtggaaccagaactgaagagcttgacttgggatcagacaccgcaacttgattcaagtcccttcatcaggaggaaagttccctaggtgaattgccaacttccgctgcaaggccctgagaacaacttgaaactgacagtgttgttgggttccttcctgcccagctgagctccaaagctgtgagagcttagctgctgtttacctcttgaggctcaagtcctgagagataaattaagtgtctgcctcggatatgaagaggcctgggttggagcttcacctcccacacacacctgagtattttggggcaagtcacttaacctcatttgaggctatttccacagctgtataaaataaggaaataactattttgattattgagacatttgtggaaaataacacagtaatgcactatgtgtgaattaatttccctctctgggcctgtttcctcacctttaaaataggggaaattagtacttcataaggttatgaggattaaactaggaaaagtcaagattgagtgctgaataaatgacatactattttactagggatcatctccctgtaccaagagcactccacttgctctcaagaatagccaaggccatctttttcttaggaaaaagggtaggggtggaggtttccccagggatccaactccagaactctgcagagatgggcctgcactacaaggcctctgagacttcagtctgcacactctgttctttagcctgatgctccaccttttggaagccaaagctgccaacttggcctcttgcaaaacacacattccattcataagtgcgtttgtgcatttttcctcccacacccttctaggcagccagcgcagagctgccaaggcagctgctggagaagcagcttcttatgggggaaaagcaactccaagggcttttacagaactcatggtttaggctttgaacacattactcccattttctggtctccttgaccatagggggggttgttcatttctttttgcccccctttttgtaaataacctcttccctattaaaaggaaacctattaatgaaaatttgaaaaatacagaaaaatttaaatcacaactgatcccaccatcaacagtcaatgactgccaatattttataatcgatcaactttttccatgatgatagaaattctattattcaaaagcagagttttaatagctgtgtaatattctagcattgatgtatgccataatttctaaaacagtcccttttgttgaccttggaagttgttcccaaatgatgctgccagtgatatccttgcacatacatccttgggagatatttcttttaggaaaagtgcctaagtgaaattattgggttaaagagtacgaacacatgcttttaactccagaaaggattttactgtttactagcatagatttctttcaaatttttgccatttaaaatttttcattgtatatttaatgtctgcttatttgaataccctttagattggcatcctgctttttttcccagaagctttttggtaaattatttttcctaagtgagttgttcatatcctttgccatttttctattgggaagccagatccttttccatactgaatttttaagagcgccttatggattcactatatatagtgtccatttacaaactattacaaaattttagtttgctttttaaggtatatcattttatgtttagtcttttgtgatttcctctatttgcttttatgcttagaaagccctgactgatctctggatccaatgacaagtttatatatttctaatgatttaatgtctatacttcatagccttatttttcttggaatttatcttggcatgtaataactttctcccaaatatttagataattttacccaattatctagctttacttacccaataaaggaggatgctcctttatcatttaagtccatgtgtatactagggccagtattcatgttttcttctgtcttgtcatgtagtagtaccacactattgtgtagctctatgatgtactagcagttttagcagcatcaccccagataaacacagggcccatggagagtctccatcagcatggattacagaacactgtagagttaagatgcttcgctgctgactgcactggtgctgctacattccaccaggactttttcagcacccctgagtcaagagacgggacaagggtcagaacactgaacagaagaatgttaaactcaggtaggagccttatgtttttaagacagggcatcctcacaagtcaacgtaaaggaaaggaaatggagaggttaggcaagctccctaatcttatcaggcagactaaccctttttgacctacgtcaaaactcagagctagaaggatgacttccagagccaatccagccatgtgcttcagcaactgatttgaaaggagggaagaagccagtgttgcaactcttccgtactcctcagatcctcagcactaccttcagtgcacctttcttgctagaaagcattccacgtgcagttaagctcatctggtaactaagtgaagttgtttgtccatcatctaattgaaaattagattttagctgtatataatctatacagcctgtgacagcactttgaatagcccaggctctatacaagcccccaaatcagtatccttccactttattccccaaacctatttgtaaggctctggctgggctccataactcagaagtgccaaagcacagaagaaacaagcccaaaagagccaactggggaatgttttagaggcatactttttaagtgaggaaaacatcatcccttaagatttccttcctgcccccacctggtcctgtccttagtaatgaggaagagaaaaagagttgcagttcattgaggaaatctcagaaacctctccctaatcagagaatgtagacatgacttccagagcctttgcaacagaaaagaaaaagtacacctactcccaccaccatacttacttatttttacaagataccaacatgaggctgggaatctttggggaggccatcagggtctccatgaaagaaatgtgtaagatggccagtcaagagctttcctgaatgtaaacaataactagacagaaaatacaatggaaggaagctaagggtcgtaagtggtctaatcatcatacatctagagtgttaagaggcagatgggaatcccagggatcacgttagtctgagcttcttcccccatccccaatttggcacagagggaaattaagcccctaagaggggctgtgacttgtgaaaggtcatgtatgaccatgccaaccccctctcttattctctggtttccctgcattactcacctagcattcctttggagaaccttaaaagagcttgtaatgtttgagcacttatgtgtcattgggactttatcaagacttttaaatcctagcactctgatggaaccaagagtcttttaattttgcagatgagtaaaaggaaacttagaggttcactaacttgccgaaggtcacatagcagtggcatttgacagttaaagccagatacagcttgtttcctttgccttaatgcactgccatactgttaaatctaggggtcatgcatttaacatactgctcaacttcactttttattcctcatgagaattcacatcagttgcaaaggtaagactatttaggcagtggccctgtgaagacttatttgctctttgcctctaagcactgagacccccaaaagccaccctactaagcttggtatgtgggaggtcaacacccatgtttggagtctgaggatcctgtacttatctggattgtttttcaaagaataaaaattgttactcaatatcatgttggtagaagctcccagtgggtaaattttgccccagaataaagtcactgtttttttttttttgtagaaatatcaatattcaagtaaacaaatttattaaatccaacagcaggtaaccttccaaataaaaaacattaaaggaaaaaatgtagacatcaaagacaaaaatgtgtgtaacaagtcaataaaaatactcaaggggccatttggagagtgcaacagtgcagaaaatacaaacaaaagtattaacttttgtcaagtttgtacaacctcaacaaacagacacactggtcacaaaccaagagggatccacaaaggtggagggtcacatgagcagtggactcatcacctcagcggcttaaggcagggtatatctgtgggaccaattcatccaagccccatgtgcctattgcttcacattccccctttaaaacctagtcatattcattagtgcaacaggtaagagcaattaagcacagacggagctggggaccagggtcagagggaagacacttctcccagagcaaatgtatgcatgtcagggggatgaaaaaccccagcagctgctgaatggcttcctttggcaatatccaagatttgtgttgaaaggagcagggaggttggatgggtggcggaagtaggtatttatgagataggctgggtttccaagaagagaagaatagggaggacatgatgcccagcacctgaatcagaagcagaacccaatggttatgcaaagctatttgaactattttggcttctgcaaccagtgctcaagaatctatttcatctttcgaaaagggggaaaacccctgccgatcct

SEQ ID NO: 8924 - DNA, 36634 bp, Homo sapiens
gaaatattatttctttactagtcacacagatgtgcccaggacagtggtagagcccacagggttacataaatcataatggtagccctcaagaacttcataaactgtatatggtattttaaaaagttgcatattgtctgtttccacctactagaacataagctctagaagggcagagactatgttttgttcaccactgtttctccagtgtctagacgtagattctttgaatgcatttaattggagccttgagatatgaagaagtaggatgcggttacttcatgcagagcaagagtagcatgcacccagagaaggccaggtggaactcagcatgagtgtgaaggcctcatgtcaagccatgtcaggggacacaaagatggagtattctctaacctatgtgacactcggcataagggaagtacaagcactcaatatgtgagtttcattcccacagtctgtggtctttagcccagtctttccagatgcctattgagttcttcaagcatccaaatggtttggggaaaggcttcaggttctaaatgagaggctttgtgggttaccagctggagagtcagaaaatctggatttgaattcactcagccatgaaataattgtgtgatcttgggccgggcacggtggctcacgcttgtaatcccagcactttgggaggccaaggaaggtgaatcactagaggtcaggagtttgagaccagcctggccaacatggtgaaaccccgtcttttttttttttttttttttttttttgagacaaagtctcgctctgttgccaggctggagtgcagtggcacaatctcggctcactgcaacctccgcctccctggttcaagtgattcccctgcctcagcctcccgagtagctgggactacaggcgtgcaccaccacgctaatttttttgtattttagtagagatggagtttcaccatgttggccaggatagtcttgaactcctgacctcgtgatctgcctgcctcggcctcccgagaaaccaagtctttactaaaaaatatcaaaattagccaggtgtgatggacctgtagtcccatctacttgggaggctgaggcaggagaattgcttgaacctgggaggtggaggttgcagtaagctgagatggtgccactgcactccagcctgggggacagagcaagactctctctcagaaaaaaaaaaaaaaaaagtttgatcttggggagttctaaggcccactagcctcatctgtagaatggaagcaatagtactactttgcagagctgacttcaggaccaagagatctaatgtctatgaagcggggtacttccttctatttgtcaggatgggggaggctagtcctgtgatgactgggaatgaagggtaaaagagacagaggttgggtaaactccaggctctgtgttcatagcctgctcccagacattctcttgttatctctctgtttcctagcctacacacgtgcacagacacgtagctgctgttcaggaactgagctaatggttttaaagtctgttccttatctttgctggaggcaggcagtagctgtgcagtgacagtgtgcctatgcagacagagggagcagtgaatagcaatagggtgtttccaccatggtcttcactcaggccccggctgaaatcatgggccacctccagatacgcagcctcctggcccggcagtgcctggcagagtttctgggtgtgtttgtactcatggtaggtaggatcactgcgggaaggaaagaagggggttgggcaaaagttcctggctccttctgttgtccttatctctttctcttggtgtcccccttcctctcaactccctatcacttttcgtttttatcctctcgtctctcctaatctcctttcctctcctacttcatcatttttattcttgtcattttaattctttctttaataacaagtgtatcatagttcttgaaacataatttttctctcttcagtttcccatttttatgaaagaccattttcatggtaagaccaatgtgctttattatacttggcctgatgattgtataaagtgcagcaagaataattatttttcacataggcttttaaaattggctttgatggaactcttccatagaaagaatcttagataagactttttaaagctgagccctgccatgggtttgtaccctcaaatgcctatgagttgggtaaattcttttcttttttcccacattctttccctttcttcttcctccactttccccatttcttttcccttccctccttctgcttttctccttcccttgcttgtcttctgtgctcattcatctccttggctgctcccctggccttcccaacctttctccctgttggtctcctgggctccctgttcctcatctctcctcttctcagcagctcctcacccaaggagctgtggcccaggctgtcaccagtggagaaaccaaaggcaacttcttcaccatgtttctggctggctctctggccgttacgatagccatctacgtgggtggtaacgtctcaggtgaggagggtggggtctggtcatcagagcacgtgggatgtgcatgccagtttgtctgtctggtgatggtggaaacgcaaatccttctgtgactcgtggacattatccccttgaacagtgccccagactgaaataagcctttggccccaccagcccctcctctttctgtatctctccatcctgcttcctcacactaatgcttggctcacctagacagaaatcaatggcagggcacgaagggcagctgctatcctcttgtatcccccacccgaagtcctctgggggctcatctccactcaggacctctcctgtttgtaccccagatacacactgcatcggtgtgcttgggtggagccttgagacatagtgtgttgctgtggaaaaagcagacagacctaggttccaactttggattcacagtgtcttcttcttctttttttttttttttttttctttttttttgagatggagtttcactctgttgcccaggctggagagcagtggtgtgatgtctgttcactgcaacctctgcccctgggttcacgcgattctcctgcctcagcatcccgaatagctgattttacaggcacctgctaccacgcctggctaatatttgtgtttttagtggaaacggggtttcaccatgttggccaggctggtctggaattcctgacctcaagtgatccactgcctcggcctcccaaagtgctgggattacaggcgtgagccactgtgcctggcccacagtgtgactttgctaagtcacttaacatctgtaacatctggagcctcaatttcctaagctgtgtgatgagaattacactatctgccttaagagctataggaaggagcagtagtgttgtctggtgacaatgcctggcagtgacacttaatagatgctctttttctttccttgatacttgaaggggcccacctgaatccagccttctccctggccatgtgcatcgttggacgcctcccctgggtcaagctccccatttacatcttggtgcagttgctgtctgctttctgtgcttcgggagccacctatgttctctaccatggtgacagagggaacagagggagctgtgccttgagagcacctgtgggtgggcaggggtgcctcagaatggttttggatgaatgagcaaagagggaaatcctgggtgttcccttcctccacagatgccctacagaactatacaggtgggaacctgacagtgactggccccaaggagacagcctccatttttgccacctatcctgccccctatctgtccctgaacaatggcttcctggatcaggtaagtgtgagggggagacctggggacactactttggtcctgttcctcggcaccccagcctattgttcagtctctgggtggagtgtgggttgggtctatcttggcactccccaccatccccaactgcctgtgttgcacaaagccagatgacatggaatatttggatgagagagggcagatggagcacctggcagctgacagggaaccctctgcctctgttgactccaaggttctgggcactgggatgctgattgtggggctcttggccatcctggacagacggaacaagggagtccctgcgggtctggagcctgtggtggtggggatgctgatcctggccctcgggttatccatgggtgccaactgcgggattccactcaaccctgcccgggacctgggcccacgtctcttcacctacgtggctggctggggtcctgaagtcttcaggtgggagacagactctcctggtgctggcctccactcaccttcctctgctaagggctctgtccctgggtccacagcactctgcctttaaaatagctctcttggcttcttaggacagtgttctttctccaagtcatattctccccctttctcccttgcttccctcccaacttttcactgaaacagtaagatttagaggttgtgttcttaggcatgccacattacttccatgcacattagtgacttcatcagcaaaattaatatattcagataattccctaaggcaagaggctggaccaagctctcctggggttccctcttctaaatactatgctttggtgacaaggcaatcctcttcctggtgtctaccaccctgggaacaactttagggcactctcttgttactgccccccgtccttggagaggggaaggctaagggagtcactcctgataccttcccactgtccttcttttgcagtgctggtaatggctggtggtgggtgcctgtggtggcccctctggtgggggccaccgttggcacagccacttaccagctgttggtggctctgcaccaccctgagggcccagagccagctcaggatctggtgtctgctcaacacaaagcctcagagttggaaactcctgcctcagctcagatgctggagtgtaagctatgattaggacaaccctcacttcactcatggaccctggagccagccactgaccccgcctgggaacaacagtcattcttcctctttgttaatgtgccagaacctgggaggcttctctgtttatctgtttggcatcccttcctcctaaactaagaaggatcctggacagggagaagtggaggaggataaggtaccaggactcaggcttctcatcccctcctcccgcaaagcggttttctgaccctcagggcctctcggaatgtagttgctcgaggtaaccgctagagggtgcgcacctggatgctggatggggacggctgcgggcatctgcagggtggagggggccaccatccagtgtagggcacaaccctggggactgccctccatagcctgtcccgactgccgactcctagctctcatcgcctcggcgcctcccaccttcaccctctcggggatgcctccccaagagggtagttaggggtggggaagccgcctccacccagggggcgtggtgggggcggagggaaggagggcggcggggcacagagacagagagcaaggctgtgaaactgaggcaccgttcctagacatctcggtgctgtgtcgttcattcaaggagagttgagatacagtgaaatgagccagggcgaggagggagggtgaaggaacggagggcgggcggctccgaggagcgagagtcgggctgagggcaacctggcgccagggaaaattctggttattcaccacttctacagctctcctgccgctccctgcagaggatgctcgttttgcagagaaggcagtgttcctctattcccttcttccgaattaaaaataccccctcagagcgatctagcctcccgaattgttttttcttttaagatgcggatggacgtacgtgtgggggcatcccagcccagccacgccgaggctcggaagggctaagaccctcccactgccccgcacaaagatggctgctccctcctccccgctccttctcccctccccaaaaccccctcccgccccccggcccccgccgccggctccgtcacttccgccccgccgtggccgaaactgacacaaagtagcgggccgaggccccgggggagcggggccgcagctgggggggcgggagcccgtggggagccgagccgagcgccccccgccccagcccccggcatgggcagtacggggccgccggggcgggcgccgagcgctgagcgctgaggtgaggcgaggcgaggcgaagcgggggcgcccgggagcgcggggccaggagggcagagggagatgcggccgcagccgcggggctggaggggccggggagcgggtgtagactggggagcaccgggggccaagatttgggagctgcggccagacggggcggggatggcggccgactggagacgaggggctgtcgggtkcccggggacggggcagagcgggggtctgcgtacaggatgggaggatggggtgccgaaggggcgcgtggagagcaggagagcggcgcgagtgccaaggagaagctcgtgcagccttggccaggggagacccgcccagagagttgttgggcgagaggagtaaccgggacccgagggtttggtgcctggagaagggagtttgggctggtaggctttgtctcagtaaggtggaggtctatgcctgaggaaaactgagggtgtcaggaaggggcagtagctctgggagatgatagctgtgccgggagccctgagttctgtccttggtgagggaaggtggcccgagctcgtgttggtggccagtgagctggaggtctcgagttccatttcctcctgtttccctgacctgccatcctcctctgaaagaagtggccagcctttggggctcttgcttgtaagggagcagggaccggacctataggaggagctgttttcctccatggagcattgcctgcttgccggggctggctatttttatcccaaatgtggccgagagggggctggggctgggtgacggggcagggcaacgtggctgatgggcctgacctgctcagaaaacccaggctgtgtgagactaagaaggaaaagtgagaggggatcccagttcccaggtctctcctctcttccccttggaatgatggcccccccagaggggatgaggtctggggccaagcctgcttccagtctccccagggtctcagaggtagaacaactttcctggtccatatccagactcctgactcctgatggcgtgtgcagctcctacattaactctttcatgggactcaaactcagatgtttaggctgatagtgtttcttgatcccttcctccccaagggcggggctgcctgtagaacttgtgatgcccactcttgcatcctttaacctctccctgtgctccccaccctcccgtgactcatactcagactgggtggagaccctggctgggggccctggaggagggcttggcatctctaaaatatggatgaggtttttcttcctgagccaggcaccctggactgccatagttggagaaggtcagggatgaaaaggacttctggctttcaggattgcctgacttggtgtaagggcgggatctgagctagcgaagggagaactggtgtgggtgactgggttgtggccagaatctgtaattatagagcttagccagacaggcaattagtatctcttggggctgacaggttggtggggtgtgcctggtaggctaaaggcagagggaaccaaagaggatgaggaggtgaaaggccttccacccagacaaggaaagaggaggtgactgactggcagtttcctttgggccaggctggggagtaaggatgaggctctgccttgtaaggccaggccttgaaccttttaggagaaaggacatgggaaggcggaagcaggcagaggcttgtctcactggtgctccctaagcctgcaccctgtgccatactgactggactaggcttggggtgggagggagggaggggcaaactccccaccagggttgggaagacccctctgccagcccagaagggtggctgacccaggctgaggggaagctgtttagggactgtctgtgcagaaagtgagggccatgcctctaatgtgagctcccctggaggaggtgataatggaagccctagtaatggggggtggggatggcagggaacttataagcctttcgagaagggtggagcctgcccaccctgtttcctgatgccctgccaggtgtttcctggctcatgttccctccaccccaccctttggggaaactgctttctagtaagcacaagcactactcattgccgccagaacacatgagagcctccattgtccctgggatggataccttgagagctgttccccttttttcaatatctggcctcttctcctttccctacaggcatgggcttctgtaaagtctcagccccccatgtcacccaaggcaggggcatgatgggaggtggtggggaagtcccctctttcccaggaacccatcatggcagtaagaggagagactgggagaaggaggctgggggaggggcagggtcagagctggagaagagggtcttcaaaagaggtctcatgaggggagggaagggttatcctcagcttcctgacctcattcrtctgtcacttcttgcagggtctcccatgggattgctgggatcttgctgggtgagatggcagtgtgygcaaaaaagcgccccccaggtaagacaggcaaggaggggagatcccgggaaccatcaagagtgggtgttgttatggctcagggagcaaaaggaaaagggacaactggtatgggtctgagggagggtagcttacagcagcccctacccagcttgggggcagcctaggaaaccgaattcttccgcttgatcccaaarctgggttatctgccaggacagcgcagagcaccagccccacgccccgaaacacctgcagtcttatcttcgggcacctgcagctcctgctttctggcctagggagctgtgttctcatctctgcttggtcctctcaccccttccctgctcccctcgtttttccatctaccggttctcctggtttttccgcgggcgggggtgtgtgtgtgtgaaagcggttgcccccgacaacgccggcagtccgctcacccgcattggcccggcccgggggtgggaggggaggcggggctcgcgcgcgagctttcgcctacgcggcgcgctggcaggctgcggctcctgcagtcggggagcgggcgggggcggaaccctgggcgtgctcggcgtgtccggggccactcagcgcacgctggcatccgccggggggmatggggggcggcggcggcggcgcagctgagctcgcggtgtccccgagcgccggcggccgggaggatggcctgggctgcgggtggggcgcgcgcccgacggctggggctcccctctgagcggctgcggctcctgcacctccccggggagccgccccgtcgatgccactaaggccaaggacatatagacggtctgccctcccccactcaaaccgggatcatgacggtccccaaggagatgcccgagaagtgggcccgggcccaggcgcctccctcttggagccgaaagaagccctcttgggggacaggtaacgggaggcagcgcctggcagctctcccgcacccattatttcccccctccaatccctacattcacttgtccccagcctccccctacctgccttgatcctctttccagacccagagatcctggctccgaaggatccagtccctaccttcttcgtttgcatggtctttggtgattgcgcaggggacttggcccaagagagcccctctagggaagtttatgggagtgaagtggcttggtaggcagggggcactgtggcctgggttttgttactgcagtgtgctctgcaggggtcctggggtgtgtagaaagggttctggaatgctgtctttggctcccggacaggcttaaggcattaggtttgctgcctaaccaagttacccctttttgcagcatgaggtcatggtgacccccggggagacgggctggggaatctattataggacagctccttgttctgggacatgaatttgatgcctgcagtcccagacctgcagaggtttcagataggtttagctagataggtgtcactaactgagtgacagatgagccctttaaagctaaatgtgtgcagatggtacaaggaaggtccagttagagagcaactgtttcaattacatttcattcctccctcctctatctctatctcagtctgcatgacccatatccctgaaacgcaccccccacacctttttctacttgaagatgagctttgaaataaggtgatgtcatttcgggccagtcagaagcagttgctggtgacatgtgacaaccagaggctcctgtaggggggactgcacatggggctgggatgctcccgcagagcagctccagggcacagggagcctccttcttgccacctaccccactctctaaataagggagagagcagtaccgcgactagatctgcagtggtccccagggggaaggaagctttgcgttttcagcgctactccttgattatgacaatgtatgcattagtaatagcagcaaaaggggctggggaatcccaggactgtcagtggctcagattcctctggagtgggggtgggggagacaaactgggtgcttccagtggaagaccttgaagtttggtggtgaggaaaagagaacatgtcctgtcctgtgaatgtaacctggagagccgtgtggtcaggctgctggtgagaggtggactggagggaagaatttgatgaccccctcagttgtggagctaactccttaaaatgatattctgtggaaaaaaacagggaaccccccagcaaagtgttggtcyagacctcagtttgctcctcctgactgcagcatcattttgttgcagaagaagaaaggagggcgcgggctaatgaccgagaatacaatgagaaattccagtatgcggtaagcgactctagaccacctgttccctctctctgtttggagaggggaatggggcaaggacaacctaccgttgggactgagggctgcctgggaagagtgcttgggggaggggaagcaacctcctcagccactctccatctgctatcgtgctgaatttttcatgccttcacctgtcagtgaagcagaatacattgacccccttgagactcccttctctcctcctctttccccctcccacacctgtgtttgctagcttttggggtagaggtctggggaagtataaagatgggggaggcagcctcagtctggttctsggttgggactggagactgctcattatcttctctcctactgccatagagtaactgcatcaagacctccaagtacaatattctcaccttcctgcctgtcaacctctttgagcagttccaggaagttgccaacacttacttcctgttcctcctcattctgcaggtaggtgacccatagtagattttttgcagytccccaaactgaataaagccaaggaagaggaaagggaatgaaggcatcagatggggcctcagaggcatacttctctttctttttttcagttgatcccccagatctcttccctgtcctggttcaccaccattgtgcctttggttcttgtcctcaccatcacagctgttaaagatgccactgatgactatgtgagtggttttcattcttctattttgtcccagtcacccacccctactcccagccccacccccatctcatggccaccttcatycagcacaatttcttggtgaccttgacatcccttacccggtccagctagatccatgatgtctttttgctgagcgtggggagagggaatcagggagtgaactggtttgtgatggggtgtgtatgaggcgttaaccagcatgctctgagttctactgatcaacgaattccttcgaggcgggggaaggtgtcttacctttcagttttcttcttttcagttccgccacaagagcgataaccaggtgaataaccgccagtctcrggtgctgatcaayggaatgtgagtgcctgttggagacaagagctctggggacgaagggggtcccttaggaacctctttagctcctgacagcctcttcactgtcttctcgttgcctcagcctccagcaggagcagtggatgaatgtctgtgttggtgatattatcaagctagaaaataaccagtttgtggcggtaagggacagggtacccctctaggcctgtaggttcttcctcttctttgtgagaaaaggatgaatctttcctgatttactgttgcctcttaaacacccgtggcaggaatctttctcacaccaggggcttctgtgtcatgctgatatgcctggaactagccatttatgcacctggaactaagcaaaccaagaatgcttagtggaaggagccaccattacagcccactgggggtggaggtttgcatatttggacttctcattagtttttctctctaggcggatctcctcctcctttccagcagtgagccccatgggctgtgttacatagagacagcagaacttgatgggtaagtggcatgctcagtgtcagccctctccttctgtctctttggaggtaaaaagattgtctttgaatgaggttctcaggcctgggctctgtctgaatttggaaaaattaggggtaagaaaggctttggatgggatgtgtgaagtgttattcaaccagtatttgctgggctgagcagttatgcaccatgcttaggtgtcaccaggtagaatttagaggatggggagaggtgggcatggtgactcactcctgtaaatcccagcactttgggaggccagtgtgggaggattgcttgaggccaggagtttgagaccagcctgggcaagatggtgagacttcatctctataaaacaaacaaacaaaaaatttaaaaagtttaaaacttagctgggtatggtggttttaatgcctataatcccagccacttgggaggctgaggcgggaggattgtttgagcccaggagttcgaggctttagtgagctatgattgtgcgactgcactccagcctgggcagcagagcgagaccccatctgtgaaaaaaaacatttagaggatgaggagggagcggggactcagagatactgtccttccagcgagaccaacatgaaagtacgtcaggcgattccagtcacctcagaattgggagacatcagtaagcttgccaagtttgacggtgagtaattttggagsagcagcctgaaggtagaggagtggggttgggttttgtttgggggcgttaaattatacattttcctttgggctttttgttgttattatgcaactccctggactgttttggggaggggagtgtttgtaatgtcatgtggctccctcttggttttgagtttataattatttcaaggggactttgtggctgatagctccccacttgctatgcatgttgagagaaattcagcttattcttttagcttattagctcagaataataatatgtgttccttataagacaaaccatacagagtgtataagaaaaagtgaatagaggtcggtaccatggctcacgcctgtaatcccagcactttgggaggccgaggtgggcggattgcctgaggccaggagttcgagaccagtctggtcaacatggtgaaaccctgtctctattaaaaatacaaaaattattagctgggcgtggtgctgcatgcctgtaatcccagctattcaggaagctgaggcaggtgaatcccttgaacctgggaggcggaggttgcagggaggcggaggttgcagtgagctaagatcgtgccactgcactccagcctgggtgacaagagcgaaactctgtctcaaaaagaaaaaaaaaatacaaaaattagccgggcgtcgtggtgtgcatctgtagtcccagctacttgagaggctgaggcatgagagttgcttgaacctgggaggtggaggttgcagtgagccgagatcgggccactgcactccagcgtgggcaacacagtgagacactgtctcaaaaaaaaaaaagaagaagaaaatagctcttccttcctcttctaccctgctgaagtagccacattaattgacagtcagtgtgtgctcatccacacttttcatacatgtttgtacaaacaaatattaggtcatgctgcagctttttttttttttttttaaatactcctgcccaggttggagtgtagtggtgcgatctcggctcactgcatcctctacctcccaggttcaagcgatcctcgtgcctcagcctcccgattagctagaattacaggctcccaccaccacacccggctaatttttgtatttttagtagagacagggtttcaccatgttggccaggctggtctcaaactcctgacctcagctgatccacccgccttagcctcccaaagtgctgggattacaggcatgagctgccgcgcccggcctgcttcattattttcctgaagagttgcatcagctcacactcctcccagcagcatatggatgggcccttgcccttgcatcctcttcgctcagctcattttctctttgttttattgtcttgtggttaggctgtagactggaccttaagcagtggaattcttgtctcctgttcaggtgaagtgatctgtgaacctcccaacaacaaactggacaaattcagcggaaccctstactggaaggaaaataagttccctctgagcaaccagaacatgctgctgcggggctgtgtgctgcgaaacaccgagtggtgcttcgggctggtcatctttgcaggtgagcctcctagcatccaaagaaagaagggtaagagtgactcagccagccctcactcaggagtatgggatgaggtgggagaatacctaaggtaaaaaacctccagctgtgtatacaggcttcttatctagccagtatctctattccaccctggtgtcctgcagtctggggatcagggcagaagcccagaggcagatgtgttatttggctttcccagcccttcccattcttttccaggtcccgacactaagctgatgcaaaacagcggcagaacaaagttcaaaagaacgagtatcgatcgcctaatgaataccctggtgctctgggtgaggcgccccacatctggctccctgcccctgccctctcttctccttgggtgctccttttcctttcctctttcttctttggtcagtagacttcaggtttggctttaaagctgctagcaggtcagctacacaaaggcagtgtttattttaggctccttttagttggaagatgttatttaaaaaaacttcaggaacgtgcatgaatcaacaacttaaagctaaaacaaatcatcccttctctgattccagttatgatgatgactttgtgaagcatgtgaccttctgtttgcttttgccagggacaaggaggccttcatggggatggagagggaattaaaagaaaaatttccatttggaagaggttggcagggtcttttccccccaacttctaagaacgaaggatcccaaaggaaaagtttctgtttaagtttttggcagttcctgaatccttctcttgtttagctagaaatctgaactccttgttgggctctcctccccttcctgtgccccgactgtctgctgcctgcccgccacatgccagcttgtgaaggctggggctagcytctggtgagcttgtttccgccctggctttaaagrgtgtgcggaaacccagcctggtgggcgaggttgtctatcacataagggctccagtcgccccctggtggccattgggcaccaatctcctattttgtttcaaagcctaaacagcggaggcagctttggaaatagatgtaggaaattggacagtggcctggttttttaccagtctctccagagactccaaaatttataagatttttgactaatcaggaaatctagaccaggagtggtggctcacacctgtaatcccagcactttgggagaccaaggtgggaggatcatttgagcctaggagttcgaaaacagcctggacaccatagtgagaccctgtctttacaaaaaactgaaaaattagccaggtttggtggcatgcacctgtggtcccagttactctggaggctgaggcggggggattgcttggcctgggagattgaggctgcgttgagctaggatcatgccactgcactccagcctgggcaacaaagcaagaccctgtttcaaaaaagaaatctacgtttatgaagataagtttgtttcccaagtttaaaaaaaaaaaaggcaatcttagccaggtgcagtggctcacgcctgtaatcccagcactttgggagaccgaggtgggtggatcacgaggtcaagagatcaagaccatcctgaccaacatggtgaaaccccatctctactaaaaatacaaaaaaatagctgggcgtggtggcgggcacctgtagtcccagctacttgggaggttgaggcaggaaaatggcgtgaacccgggaggtggagcttgcagcagtgagccgaggtcgcgccactgcactccagcctgggcgacagagcaagrctccatctcaaaaaaaaaaaaaaaaggccatctatgtgagatagtgaacattaccgtggcttggcatttttgttggcttgtacctagcccaggtgaatagattatttacagtaagttttctggtatgttaaamgtagctcatccccactcttaccaactttgaggactctgraaggtttcaaggtgccagattgagagctaatcaactatttcagtttcttcatcatatagatgaaataatggtcagacagaaggccacatgataattggtgacagactagaacctgtcaccagttctgagctttttccactagagcagtggtgtccaatattttggcatccctgggccacattggaagaagaattgtcttgggccacacataaaatacactaacattaacaatagctgataagcttagaaaaaaaaaaattgcaaaaaaaatctcataaatttttttttttttttttgagacggagtctcactctgtcactaggctggagtgtagtgcaatggcattatctcggctcactgcaacctctgcctctcgggttcacgtgattctcctgcctcagcctccctagtagctgggattacaggtgcccgccrccacacccggctaatttttttgtatttttagtagagatgagagatggggtttcaccatgttggccagactggtctcgaactcctgacctcrtgatctgcccgccttggcctcccaaagtgctgggattataggtgtgagtcactgcacctggccttttttttttttttttgagacaggttcttgctctgttgcccaggctgggatgcagtggcatgatcttggctcactgcaatgtctgcctcccgggttcaagcaattctcatgccttggactcctgagtagctgagactacaggcaagtgccatcaggactggctaattttttaaatgtttttagtagagacggggtttcaccrtgttggccaggctggtctcaaactcctgacctcaggtgatccatccgcctcaacctcccaaaatgctgggattacaggcttgagccactgcgcccagcccataatagttttttttttttttataattatttttcatttaacattcagctgttaccaaaatctcatagtgttttaagaaagtttatgaatctgtgttgggccacatgtggcccagagaccatgggttggacaagcttgcactagagcatctgagcttttgagggctcaagggatgaatacatcacagatgcacttggttttgagggcttcctacatgtcagcctcrcctgtgcttctcattcctccccagatttttggattcctggtttgcatgggggtgatcctggccattggcaatgccatctgggagcacgaggtggggatgcgtttccaggtctacctgccgtgggatgaggcagtggacagtgccttcttctctggcttcctctccttctggtcctacatcatcatcctcaacaccgttgtgcccatttcactctatgtcaggtatgtgccttctctgacctggggtctstccagggagtcaggcggtcccatagaacttttcttttctatgaagatgaagtccttgagaagtaacgagaagtcctcttcttcctgtactgtaaacatttgatgttatctgtttatctttgtgggcagagcaaactttttaccacagtttcctggtacttgggactgtattagagaaaaaaaaaatattgatttattcagcacctatttattacatgcctactgtgtacaaagaagtgtgctaggtgccatcacaaataaaagatgaattaggaatggatctccttccttctaggagcttacgtctagtaaaggaaggaaaatctaaacacattataaaacaaaataggaaccagtgctgtagaattcgacctagagtcttctatgtgaagcttggggatacagagatgtataaggtggcctctgcctttagcagcagcagatggatmggtcgaggaggggagatctggacagtgtcagactgagataccatgtgggaggcacagggtgcccggggactgggagagtgtcgctccctaagcaggtaggcagagagggagagatggcatttgctctgggctttgagtggtgactgggctggatgaaggtggagccacaatggagaggaggmtgagagggctggaagcaaaggtgtggagatgggagcctgggaatggcctatggaaatagttggccagggtcttgggccaagagcaagagctggaaacatagcttgctcctgattgtggaggcttttgaatatttgcctgtggactttgtatttactaaccattaaaagttattgaaaagactgggcacggtggctcacacctgtaatcccagcactttgggaagccaaggtgggcggataacgaggtcaggaattcgagaccagcctggccaacatgttgaaaccccgtctctactaaaaatacaaaaaytagccaggtgtggtggtggttgcctgtaatcccagctacttgggaggctaaggtaggagaatcgcttgaaaccggaaggtggaggtagcagtgagccaagatcacgccactgcactctagcctgggcaacgagcgaaactgtgtctcaaaaaacaaygaaacaaacaaacaaacaaaaaagtttttgaagaaagtcaaaagaatgtattctgtattctaaaaatgcattctaagtgttacagctcttttagaatttgtctagcaggttttccagttttcmctggaacccctcccccacaaaaagaaaaaaatgcattctaaaaaaaaactaaagaatgctttaggaagtattgactggcagtagtgtacagcatgaataggatcaaggcaacatgtaggatgtttgaggtaaagagaatgttagcagggacaggccagtgagaatgaaggggaggatcggaggaagacgaggcaggaggaatggccaggggaaaggaactttcttgcttagtgccttgcacttgagataagggaacctgtgacatttttaaggaaatgttttatggaggtgctgaaaacttgtcctgtctcccatcttttgttcatacagattccccaaatagccctcaactctctcccagcccccaatcttactgctggtgataataaatagaagatacagcatttctgtgctgagagaatatagttwaggcttttccagggtgtgaagaggagagttgggaggttctgggtttagtcctgcctcctcactggccatgtgacctcaggaaaatccacggtcactcagggcctcacttgatcttagttttcccacgtgaaacaggaacaggagtacttgtctcaccttttaataggatgtcttgatataagatattggcttagaagatacattttaaacttaartgactgtacagttactgggtggtagcctgctcattgtgactgttgccactcccttctgcattactatttaaatgcctttgtgcttacaacctaattttgttttcccacctatgggctttgctatctgtgttttgtatctcagttcacttgaagcccttgggagcagctaaagcagttttctttctgagtctcatcaggtcacagtgtgtatgtttcgggaggctaagagggggttgaagagctgtgtgaggaaaaggccctttggaatgtgaagacattcccatttgcctggtaatgggatcctgataggtgccttagtcaggtgggaagcagggctctcgatagggccccattgctcggctgcactggacctaaacatggccctttctggaaatgctaacagtgcatatgattagcaaagaagaggatacgaacagacctggagatgttaaaggcactataggggccaggcatggtggctgtcgcctgtaatcccagcactttgggcggtggaggcgggaggatctcttgagttcaggaattcaagaccagtgtgggcaacacagcgagatcccatctctacaaaaaatgaaaattagccaggtgtggtggtgtgcacctgtagtcccagctactagggaggctgaggtgggaggattgcttgagcccaggagtttgaggctacagtgagctatgattacactactgcactccagcttgggtgacagagaccctagctcaaaaaacaaacaagcaaacaacaaccaccacaatgcgctgtgccattgtgaagtggtggtgttctgcagatgcccagggccctctccctctggagtcagcacctcagccctgcccggtgttcagaatcaggaatgtagtgccccaagcccagggtggaaggagcgcacccagcctgtggtgggacagtgacgagtgggcttcaagccttctccatttcccctccccggtgccacccctctttgaggtggcgtctgtgttgctgtggcatgcacagcaccctcattatttctctctctcttttctctcccctccctctggcactttctcttgtttttctctgcatggtttctgtattattagtcctgaggtaagaactggccgagtgccttgtctacagccccttttcctcctttgctgtctgtcctgcccacccaggccctttgcaccttcttgtctggagagcatcaggagggtcgggtcggggcgttcctctgctggctgtgtgcagccggctccaccttcaggctctccttgccctttcccacccaggtttctgtgcccaggtgtcttctccgttctygtctctccccaggcggagggcctgcagcgaaggcccatgtgggtggggcacctcctcttcttccygacccaagcctcacctcttgtcccctgtgcagtgtggaggtcatccgtctgggccacagctacttcatcaactgggataagaagatgttctgcatgaagaagcggacgcctgcagaagcccgcaccaccaccctaaaygaggagctgggccaggtggagtacatcttctccgacaagacgggcaccctcacccagaacatcatggttttcaacaagtgctccatcaatggccacagctatggtatggtggcaccactggggactgggggcttgcacctcgcctggaaggacagtggaactggggccccacagtttccttaacattggttttttcttccttcctagttgggtctgaggggcctagaagaaagggtccatcctggccaggcacrgtggctcatgcctatagtcatagcactttgggaggctgaggtgggaggattgctcgagcccaggaatgcgagacmagcctgggcaacatagtgagaccacatccctacaaaaaatttaaaaattagccaggtatggtggcatgcacctgtggtctcagctggccagtgactcaggaggctgagatgggaggatcacttgagcctgggaggtcaaggctgcagtgagccatgatcttccactgcactccagcctgggcgacagaatgaggccctgtctctcgagaaaaatccacacacaaagaagaggtccattctgtgtcccatgtcaagaagcagatcctggctgggcgcagtggatcacctgaggtcaagtgttcgagaccagcttggccaacatggtgaaactccgtctctactaaaaatacaaaaaatagctgggcgtggtggcaggtgcctgttttcccagctactcggggggctgaggcaggagaattgcttgaatccaggaggtggaggttacagtgagccgagtttgygccattgtactccagcctgggcgacaagagtgaaagtctatcaaaaaaaaaaaaaaattagattctgagagtcctccccttgtcctctcctgatgccctgaccctggtctcagctccaggaattaggggagctccttggctgtttgaagtgagacactggcctctgggcatcctggccaggyggaaccctgctagactctcccctgttgctgctcagggtccttgtgagtctgtggaatgtggctgtggttggacttcccagtgtggcccgtggctgtgctgctgggatggcctggggcagcatgtggggctgacttttatgcagagtgtggacccctcttgtgactgctttctgtactgactgatgcctttcggtcagtgtctgagccttgtctgctgctcaggtctaatgggtgcaaggaggcctgggaggtgtggaattggagctgccctgaggggggtgccgcctagggtagagacagggatggtgagcagtgggtgccggggctctttcatggccaggccttggggttctggaatctagggtgcctgatgcctcctatcccgcgagtcagcaatgtgactgagtgactcacactgtgacagctgctcagcgattagggttgaggggctcagtgcctacggggattctgcattggagatgtttttccatgctctggagctctctggctctgacattgcttctttttctgccctggctgtatgtaggtgatgtgtttgacgtcctgggacacaaagctgaattgggagaggtaagattcagtctccctaattctatgtgccagtgaaacagggtgcctggccagtaacagtgtagtcaggagtgatgtgttgtctggataggaaatggaagctgcttggagaaatgggtgttttaaggcagaactggtgatgacggaagtggaaattttgaggtccaccgtggacaggagcctactgagagttgggagggcagggatgaacccttccccgggatgcagcctggcactctagcctttcctaagagccttcttatgtgtttcagaggcctgaacctgttgacttctccttcaatcctctggctgacaagaagttcttattttgggaccccagcctgctggaggctgtcaagatcggggacccccacacgcatgagttcttccgcctcctttccctgtgtcatactgtcatgtcagaagaaaagaacgaaggtgggccgaggagccggctcgcactctcctgacctgactctgcccttgggctctgctctgctctgcaatgcggctgggctggggcttcctgggcggggcacgtggctgagggaagccacttatatcacgtgtattcttcctccccacccaggagagctgtactacaaagctcagtccccagatgagggggccctggtcaccgcagccaggaactttggttttgttttccgctctcgcacccccaaaacaatcaccgtccatgagatgggcacagccatcacctaccagctgctggccatcctggacttcaacaacatccgcaagcggatgtcggtcataggtgaggccaggcctggggtgctggggcgtttggggacagcattcaggcctggaatgggtgaagtgtgccgggtgactcttgatgtgtttatgttgggggtctttgcctgtctgaatttttctggcactttcttcacctgccccattcatagkgcggaatccagaggggaagatccgactctactgcaaaggggctgacactatcctactggacagactgcaccactccactcaagagctgctcaacaccaccatggaccaccttaatgtgggtgtgaggagaggaggggccagcctggggggttctactcttagtgtgggggaggcgacttaagtttgttttattgtgtaaatttaaggtctacaacgtgatgttttgatgtgtatatatagtgaagtgattactacagtcagacaacttaacacatcagccagctcccatagttacctctttttatgtatgtggtgacagtccctaactgtggaatgtggcacacacccagtctacagtgcaggattattcattgtcgccctcacgctgtccattagctctccagacttacccaggtgtgcctttccactctgcctccaggagtacgcaggggaagggctgaggaccctggtgctggcctacaaggatctggatgaagagtactaygaggagtgggctgagcgacgcctccaggccagcctggcccaggacagccgggaggacaggctggctagcatctatgaggaggttgagaacaacatgatggtacgggctgcgggacgggccaaggatgggcacggagggctcatgcctgcaattcttgtgccaggaatccttgtggtattttcagctgctgggtgcaacggccattgaggacaaacttcagcaaggggttccagagaccattgccctcctgacactggccaacatcaagatttgggtgctaaccggagacaagcaaggtgagagcccagcagggcagagccagttgcaactgacagtagccctgttggacccttgcatggagccgaggacatcaggcaggcaagtgtgctgaccttgttgggtgcctgtccgtagctcctgcgttctctcttggtagagacggctgtgaacatcggctattcctgcaagatgctgacggatgacatgactgaggttttcatagtcactggccatactgtcctggaggtgcgggaggagctcaggtaaacaagaagcccagggraggcggtgctgtgcgttgtgcccagggctcaggtgggggtttctggaccatttagacttgaatccctgctccccactgccrttctggaagaccacaaccgtatcatttccacctcgacaggaaagcccgggagaagatgatggactcatcccgctcygtaggcaacggcttcacctatcaggacaagctttcttcttccaagctaacttctgtcctggaggccgttgctggggagtacgccctggtcataaatggtcacagcctggtaggcatcgctatccttarcttgggcagtatctttccagtgagcacttctgtccagggcttttatatcttgttctaatttcccctgatttcagagaagactggtctcaaaggggactgggaggagctgagactcccaggtgtctcctggaaagacyggctctctcaggtttctctgtgctccaggcccacgcactggaggcagacatggagctggagtttctggagacagcgtgtgcctgcaaagctgtcatctgctgccgggtgacccccttgcagaaggcacaggtggtagaactggtcaagaagtacaagaaggctgtgacgcttgccattggagacggagccaatgatgtcagcatgatcaaaagtgagtgtgggctgtgcaggtgtgtaggctgggcttgaggctggggaggggcccactgaggtctctggactgcagaagaatgacgggaagggggttgtaacttggtaggctctaaagtgtgtggccggtggccatcttcaccctcttgtcatctcttgtctctgcagcggctcacattggtgtggggatcagtgggcaggaagggatccaggctgtcttggcctccgattactccttctcccagttcaagttcctgcagcgcctcctgctggtgcatgggcgctggtcctacctgcgaatgtgcaagtttctttgctatttcttctacaaaaactttgctttcaccatggtccacttctggtttggcttcttctgtggcttctcagcccaggtaataaatgttcccagtccactgttgtgcaaatctgtaaacctgagggcagaggttctgtcttgtttatcactcagtcccccagggcctagctattttctggtacatactcttaaaaaatgcttattaaaggaggagagaaggagcctcrgaaaatttcttagggttctctgtatgtgacatcagctgtcttcctgtgcctgatgtgtagcaaagaaaggttgcatgctcccttgctccctgttctcttccagaccgtctatgaccagtatttcatcaccctgtataacatcgtgtacacctccctgccagtcctggctatgggggtctttgatcaggtatgggggagtttgatgatcagatgggatgcggggaaggtcactgcttgaaggagtcacatagacgtggtgtgtgacacttgtgcccatttcctgtggccactgggaaggcagttctttcagccggggaaggtgtggctggttctccctcctggctgcagctgatctagaactctcttgggttgctgaactaagttagtctggrggtagctggcttgaggttggttctagctgccaaagactttggaaaggaggaggcagggacagagtcagagtctgcccttggtcatccagggtcaaaacggcaacctctgaggccccctatgctacatggtcctcccacacaggatgtccccgagcagcggagcatggagtaccctaagctgtatgagccgggccagctgaaccttctcttcaacaagcgggagttcttcatctgcatcgcccagggcatctacacctccgtgctcatgttcttcattccctatggggtgtttgctgatgccacccgggatgatggcactcagctggctgactaccagtcctttgcagtcactgtggccacatccttggtcattgtggttagcgtgcaggtatgaggccatccaggaactcccctcttctctggaaggagtgagccttctgtccctggggctgccctgggcaccacagttctgtttctgggggaaggggcttttagggcrtgcgcctgcctgactatgcctactttctgcagattgggctcgacacaggctactggacggccatcaaccacttcttcatctggggaagccttgctgtttactttgccatcctctttgccatgcacagcaatgggctcttcgacatgtttcccaaccagttccggtttgtgggtaagtccccgtggcctccttgaatcggtgaggaatcacagctgttctgggactaacaggaccatcagctaatctgcacattcaacatttcttatgtgccaagtattctgtttattttatttatttatttatttattttcgagaaggagtcttgcccaggctggagtgcagtggtgcgatctcggctcactgcagccttcgactcactgcagcctctgcctcccgggttcaagcgattctcatgcctcagcctcctgagtagctgggattacaggcacacgccaccaagcctggctaatttttgtatttttagtagagatagggtttcaccatgttggccaggctggtcttgaactcctgacctcaggtgatccactcacctcggcctcccaaagtgctgggattacaggtgtgagccaccgtgcccagctagcacagagaaatctgaataaagrgaaagggagcctgccatgtggctctctgggaactgtcaatccaggaagaggaaacagcaatataaakgccttcagccctggcctgggaggaggtcttctgcacgtggagctggggaggagtggaggaaatgagttggagggtgggggtgtggaatgagtcaggattatttaagcccttatgggtcagaggaagaactttgagtttttgaattttaatctaaatgtgagaggaagccattggagggctttgagcagagaaataccagaagcttacttatgtttttaaagggccgctcttacagtttcgtggataataaagtgtagggggcaagggtggaaatgggagactaggaggtgagagcagtcaccaggtgagcctaatgagggctcggaatagagtaaaaggccgtgagattccagagatgttttgaaaatggaaacaacaggccgggcgcggtggctcaagcctataatcccagtactttgggaggccgaggtaggcggatyacctgaggttgggagttcaagaccagcctgacccacatggagaaaccccatctctactaaaaatacaaaattagccggacttggtggcacatgcctgtaatcccagctacttgggaaggctgaggcaggagaatcgcttgaacctgggaggtggaggttgtggtgagccgagatcgcgccattgcactccagcctgggcaagagcaaaactctgtctcaaaaaaaaaaaaaaaaaatggaaccaatagattgaatgtggggtccaaagaagagagagaaatgaatcaagataaaaaacaacaaaaaaacagaaattaaaaaaaaatttttacagaaatgaatcaagatccattgcagggtttttagttggagcaactgaatgggttgtggcatttcctgagttgagaaagaccaggatcagatttggggaaaggaaacaatagttgagtttgggccacgggaaattcaagatgcctggtatgtcaagtctggcagttgaagcagcaggtctggagctttgggggagtttggagctaaatttggagatttacatttggagggtgagcctggagaagcgggaagccagaggtgacttaggctttgagagtagggaagtggagctgccagaaatgggaacggggaatgtctgcctcgtgactcccaaggccactgactcctcttcatccccagggaatgcccagaacaccttggcccagcccacggtgtggctgaccattgtgctcaccacrgtcgtctgcatcatgcccgtggttgccttccgattcctcaggctcaacctgaagccggatctctccgacacggtgagaagccaggctacctgctgtgggaggcagagatggggtggctggaaaggcctcrtgtgaacactgkggggctctgtggggccatgtggctgttcagtgtgttggtgctyatctgttcttcctggggacagacaccctgtgcagctggccacagaggcctctgcgtcagcctggtcccaggtgctgtgggtcggaggcctctgtgtcagcctggtcccgggtgctgtgggtcccttctccttggcgatatctgacacctccacgctgacagagggctcttccctgtgcccctctgcaggtccgctacacacagctcgtgaggaagaagcagaaggcccagcaccgctgcatgcggcgggttggccgcactggctcccggcgctccggctatgccttctcccatcaggagggcttcggggagctcatcatgtctggcaagaacatgcggctgagctctctcgcgctctccagcttcaccacccgctccagctccagctggattgagagcctgcgcaggaagaagagtgacagtgccagtagccccagtggcggtgccgacaagcccctcaagggctgaaggccgaggatggatgccctgtgccagtgaccagagcacccagggctggccagtcactgagggaacagygtctcggaactgctggtcctcattccttgcttcccgtccccccggtagactctgtcctgctggtcccaccacacatggctgggacatctgttcccagctgtaggcccttccaccagctggggagctagagggagcaggyccaagggcagagcagaggctgaggcacggggagccagccccactcggggaccagaagtggaaccaaaaacaagaaaaaactgtgagagattgtgtctgcccctgccctgcctgggacccacagggagactataatctccttatttttttactcctactccccagaggggccctagtgcctctgttcctgaattacataagaatgtaccatgccgggaagccagagacctgcaggggcctcggcccctcacatcgtgtatgtctctccttgatttgtgttgtgtccagtttggttttgtctttttttatttggcaagtggaggaggcttttatgtgacttttatgttgtggttggtgtcttaactctcctgggaaaaggaggctggcacacactgggatgccgcagcctggccggctgtggggtggtttgggaggatccatgtcggctctgcctgcagtgaccagtgctctgtggggcagaggagctgaccagggagggaggtacccatgagcagagggtagtgggagagtgtaaaggagggtttggtcctgtctgcttcctcaccttgagagtaaagtgctgccctctgcccccaacacacacacatatcaattcctggattccttagtcctgctggccttgggctggagcctaggaaagtggcccccaaatccttagtgagctaaagctgggtctgaaatttggtcagtggggaggggtagttttcttttcttttttctttttctttttttctttttttttttgagatggagtctcactcttgtcacctaggcaagagtgcaatggcacaatctcagctcactgcaacctccacctcctgggttcaagcgattctcctgcctcagcctcctgagtagctgggattacaggcacacaccaccacgcttggttaatttttgtatttttagtagagatgtttcaccatgttggccaggctagtcttgaattcctgacctcctgacctgcccacctcaacctcccaaagtgctgagattacaggcgtgagccaccacacccagctcagggaggcgtagttttctttaattttaaatttaaacccaagtttattggcagactcccttttgacctccctttgcctccccatctggtgctttcttgcatctacaccccagggccctgtggtggggctgcagggggaagctgtgcacctgagatgaggctggaacgggaattggcctctctgctcccttcttcagtaagcaaggagccccgcccctcaggcccagcctctggcaagaggtggtggaatccttgtgccgggtagtagaggaggataagggcaaaaccaggcccaggccagtgcctggcttggtctggatgggacactgtcagagtttggccacagcctgtcctttacttcatccacacctatgaagctattccctaaataaggcatttcccaagttagtcgctacctaatcagccttgagaagaatcctttcctcttctttgatagtgggtcgggggattcttcaggaatggtttggagctgggagtgggtagggggattttaaatgttccatatgggagccccaaaggaactggatgggctgcagtgaggtgggggcgggtgggcagggaatgggagaggggaagtcttggcagggaaatcccttttggccacacagtttacaaacccagtatcatgtctgtctgtgtgtctctcaaggtgagagtctgatttttataccaaagaggaaatgattttttttcatattttgtttgtctatattatataaatatatatatacagttatatatatatatattattttttggttctctctcgttttttagggagggaagaaagtaccaagttgcattgagctgtaattaaggaacattataatttatgacacatttctatacttgcaaaaattatatcattttatggatataagagaaaaatgcctttttataaaatttcaatttctgagaagtgtgtaatttgtctcttttctgatgtttaaccaagactggtggtgaaagtaaagacagaaactgtctcttaaatgtaattgagtgggtagatctgggatatcttggacaaattggaatctgactggtgtgggatagcacctcatccatttgcagacctcccgggatctgagtttcagctgaagatgaagacggggcagtgggtggtactgagcggcatatcgtatggactttggctgggtgcctaggaccttgagctgtttacctttctccaaacgcaggccaacctgtcatccctaacacacgccagatggatgtgtgtgtagggaaagtacctggtaaatattgtaaggttttgttttttaactctgcgcttttccgcatgcctcacatcttcctggcttctcaagtgagtatcaaggaagctaaagtcttatattaaagggagctttcctccagggaagggagggcggatgaggatggggtcctaggagtcagggccagggttagtgctggcctgaggagaaagaagtatagcttcctccgccgatggccaatatcagcatgatccagccccacccgcaggctaatttccccctgacccagccagtcttcagttatggaacaatccttctcaaaaacgtagactgggtgtggtggctcaatgcctgtaatcccagcattttgcgaggctgaggcaggaggatcacttgagcccagcccaggagttcaagaccagcctgggcaacatggggagaccccgcctgtattaaaaaaaaaaaaaaaaagggtgggggagcggagggtgtatggggggaagatgtgaagataagatctgtttccctcttcaggagaaacggcccctggcgggaatcccgccacagaccgccaggaacaccacctgacacccacctccacccagggagaggctgtccagtccacacaagcctttctttggggtctgtctggaaccctgagctttgggcagcaagtggcatctggcttcagtgcccccacccccgaaacacagaaagaagccttaatcccttgaggctggtgaggccccaagtccacccctcccacaagacaggtcttcagcactgcgctggcctcccgttgggggtctgttcagccactgggaatgtcttccttggctcctctcgctgaccctggctctcctgcacccaggatcctattatgtgtgtctgaggggcagggccaatgtcattttaactttcattgcctcttggggacgcgttttctccgtcgcgatatagacacacgcctccacggaggctccgggcactcgggctccccgttttctcccctctgccgcaggcatccctggtcttccttccctgcgctgactgagcacctgggctcctgtgggagtggcttccagcccctaggtccccatcgtcctagtgccttttctgagtgcgtggaggtgaagtctgtccgataccgcagctttgttccactgagcctgcttatctccaagggcgttcctctccactccactaaagcagcacacacccatgggcgcccactgccgtcgggaggagctccacctctgaactctcacaattcattcagcatttggccatccatattcttcagttcttcccgcttccatctgtgctcccagcgaaaactacggcccctccctttcctcctggtcgcttgcttccatatgtgaacccttacttgcttcccaatccagcccggagcccgtggtctggtactcgtcgctttgccccggaacattccagccttgggtcagcccagcgtctcccagggtgagctgtggaatgctgaagggcagcacacaaccacggagcaagaggagcggcagctgcccgggctccctccgcaggcgcctctgcacggcgaggagacgctgggaacctcattctcctgcccctccctcaactcctgccaccgcctcccaccctgccctcagcagatggtgctgcctcctacttcacggagcaaataacttctgcggctttcctctcaactacaaatctcactgcgcacaggcacgccggccttcccctttcctttcccctgcctggggaggctggactctcctgtcccgctccctgtggccccgcccctcccctcctcccaccactgcaccttccattgtccttcaccaggaccttctcttgaccctgccttcatttccctctccgttgattctttccttccccaaattagcctgctcagttttcttccccctcacctgacccctaacccctatcaactctgttgtggtctgtgtccctcccattagcctctctgttatctcttccactgcctgtaatctggcatctccttcaccagtccctgaaatgctttcactaaaatcacctttgaccttcatgttggccaagtccagaaggcatttccaggtctgatctgacttgcaatctcttagtcatttgactgtgttggctgccttctccttgaaactctgccctctgctgactttgttccactttctcttggtttaactgctgcctctctggttgatccttctgtctccttccttggagctccttcctctgttcttcttcctaccatgccccaggactccatacttggctctaagcttttctcttctgtgcagggtccttgaaggtccccatgcaaacccatggtttaaataagatttgtttaaacaaataagatttaacaattaaatggagagtcaccattgttcacctctagattggacttcttccttccactccacgctccagacccttgtattcaattatccattggacctctccactaggacgacccaccaccacctgttattcaacataccccacactgaacattgtttttcccaacacctgttgctcctcccgcatcctctatttcagtgagcagcacgcgatctcaccagtcaccaaagccagacacacatgtcctggagaaaaccctacaacctctgctctggggccaccacactgtaaatcatatatttcatcttctttgatgtggagcatgaaatgattaagctgcaatgtcctgagccactgtttcccagtgattgtgacccaggcagggtcacgacagccatatttctgtccccaaagcggggccatctaggttgggactcaaaacacaaagaaattctgccacaaaggttcaatgtcactttccttggccccaaaagagaaactggagagaccagagtgctcagattaggtaggcagctgcagcctcccactgtagccaccctgcagagcatgagggagggactcactgataaagcaccaggactacccactgcagtctctacttcagaggaagcaagccattgatggagatgtactaaacactgggctctgcggctgaaggaaggagctgagttctcctgcttatctctgctccagtgtcctatcttgaaggactgtgtcctgaccccagtgagaaacatgacctgtctgaccctcccaacccttcctggaaactttccagttctcagtgagttgctgggagctgccctgctggacacccgcctggggagggtgtagacttatcttgccgggctgagagagggaagtctttcccaatactagtctattaaaacacacactgggctgggcgcagtggctcacgcctgtaatcccagcactttgggaggccaaggcgggtggatcatctgaggtcaggagttcgagaccagcctgactaaaatggcttcaccctgtctatacgaaaaatacaacaaattagctgggcatgggggcagacgcctgtaatcccagctactcaggaggctgaggcaggagaattacttgaacctgggaggcggaggttgcattgagctaagatcaggccgttgcactctagcctgggcaacaagagcgaaactccatctaaaaaaacacacacacacacacacacacacacacacacacacacacacacacacacacagtggcccggcatggtggctcatgcctgtaaccccagcactttgggaggccaaggtgggcagatcgcctgaggccaggagttcgagaccagtctggccaacatggtgaaaccctgtctctactaaaaatacaaaaattagctgggtgtcctggcgtgcccctgtaatctcggctactcaggaggctgaggcaggagaatggcttgaacccaggaggcagaggttgcagtgagcagagatcgcgccactatactccagcctgggcgacagagtaagtctccttctaaaaaaataaaataacaaaacaaaacacacacacactttccctctctctctctctccaaaacgtgatggagtgtctcctcttaagaaaggagtgtttttggacacagaaagagggagttcctccagcctagcacagcctgagtttggcctgggctggaaattctgcagaaatcttccatcctgccactgggaataggacagggaggcctaagccgtgttttcggccccccggggcccagcagggacatgtgtgggttccaggactggggcaaggaggagaggatgcccaggtttactcaagggcaggcaggaggtgaggagggggtgacaggtggaaggaaaggaccatgtcccactctccactccttcctcatgggccactcttcatttcactcgcagccccgcagtgcacagctacaagctgggggttcatctcttcctggtcccctactaccttgggtgcagcacttctgccagaaccttctgggcgcctgctgctgtgcctgggctccccacgcagggagggacacccctggggcggaaggcaggcagctgcatagctgagtggctgcttctacaacacctggagaaccgctggggctagaagcaaacatgcagcagtttgggcc

SEQ ID NO: 8925 - DNA, 21752 bp, Homo sapiens
cccaaccccctctcacctccccactcctaccacacacacacaccccacacacactacacacaccacactcacacaccacacccaccacacacacactacacacactcacacaccacacacaccacactcacacccacacctaccacacaccacacccaccacacatgccacactcacaccacacccacaccacataccacacaccacacacacaccacatgcaacacacaacacacacataccacacgtgcgccacacatacatgccatatacaccacaaacataaccccccacacacaccacacatgccacaatgacacataccacacacacactagagaggctctgctcctgctggagaagacttgaagtctcctcaaaggaacagatgctccattcaggagcacaggtcaaaggctgtgccttcccttctctccccaaggtgaaaggccctgcttgtcatcttaggaagcagaaaccagcactgtgcctggcagagggtgatgagtggtgattttgctcctgccactggtgctgccctggggatggggtagaggtgggcacagctatgaggcaggctggggtgaggaccccagaaacccctcacatcacacatcccattttccaggcccttttttcttccctagttttgtacctgagggtgatgtttctctagaagagatgcagccctcagtcatgataaatcctgaaattttttttttttttttttttttttgagacggggtctctcaatctgttgcccaggctggagggcaatggcttcatcacggctgactgcagcctcaacctccctgggctcaggtgatcctcccacctcttcctcctgaataccttggaccacaggcatgtgtcaccatgcttggctaattttcttattttttgtagagatgggttttcagcatgttgctcaggctggcctcaaattcctaggttcaagtgatcctcttgcctgggccacccaaagtgctaggattacaggtaccagtcactgggcccacccctgaaggtctttgatgggggtgaagactcaggcacttcaagaagcagacctcaggccaggcgcagtggctcatgcctataatcccagcatttagggaggccaaggtgggcagatcacctgaggtcaggagttcaagaccagcctggacaacatggagaaatctcatctctattaaaaatataaaaatcagctgggcatggtggcaggtgcctgtaatcccagctactcaaaagctgacacaggaaatttcctgaacccaggaagcagaggttgcagtgagctgagatcacaccaatgcactacagccttggcaacagagcgagactctgcctcaaaaaaaaaaaagcagacctgtagggaacaggaggatcaaccaactgagataccacaagaagataggttctggctgggcacagtggctcacacctataattctagcactttggtaggccaaagcaggaggattgcttgagcccaggaattcaagaccagccgggacaacagagtgagatccctgtctctacaaaaaatttaaaaattggctgggcatggtgacacatgcctctgcctgtggtcccggctactcgagaggctaaggcaggaggatcacttaggcccaggaagttgagaccgaagtgagctgtgattgtgactctgcactccagcctgggtgaccgagtgagaccctgtctcaaaaataaataaataaataaaggaaaagaaaaaaggttatctgctcagacatgtaagctggccttgtggccaaggcagagagactctcatggcctatctcagaacagccacctaatgaccatcaaaaccttgacacactggcggggtgcaatggctcatgcctgtaatcccagcattttgggaagctgaaggaagaagactgtttgaggctagagttcaagacttggccaacatagggagactccatctctacaaaaagtttttaaaattagttgagcatggtagtgtgtgcctgtggtcccacctactcaggaggctggggcaggaggatcccttgagcccaggaggtggaggctgcagtgagccatgatggcacactctagcctgggtgacagagtgagtgagactttgtctaaaaaaaaaaaaaaaaacccaaaaacaaacaaaaaacaaccttgacacattcctctacaccccagtgtcccccttttctgttgtttaattttttaaaaactgtctctggcggtcaggcgcagtggctcacacctgtaatccgagcaccttgggaggctgaggcaggcagatcacctgaggtcaggagttcgagaccagcctggcccattaatgtagtgaagccctgtctctactaaaaatacaaaaaattagccaggcgtggtggcacacacctgtaatcccagctacatgggaggctgaggcaggaaaatcgcttgtgccagcaggtggaggttgcagtgagctgaggtggtgccactgcacttcatcctgggtgacagagcaagactctcaaaaaaaaaaaaaaaaattttatctggcctgcttaatgcttaagtgtttgaacatccccaccattttttttttttgtggcactcaagaggccatcccttccacctccatactagtcagtctgattttttccacatcccttctactcaagcatcaaagactgagaaaaatgagtcataaaagaacagatgttctagggtttcaacgtttattcctggcatgactaagaggacggaagagcctgctgacctcatcctacagctatacagggactcccaggccttgccccaagacgtacccttatgttttctgactgtagtaggtgggggcagactctaccttcagaaggaactacaagatgtttctttgttttgagatggagtctggcactgtcgcctaggctcactgcaacctctgcctcctgggttcaagtgattctcctgcctcggctacccaagtatctggcattacaggtgccctccaccatgcccagctaatctttgtattttagtagagacgggatttcaccacgttggccaggctggtctcgaactcctgtcctcaggtgatccacccacctcagcctcccaaagtgctgggattacaggtgtgagccattgcacccggccaggaaatacaagatgttaatgaaagaatttgagaacatgagcgaggtggctcatggccataatcccagcgctttgggaggcctgggtgggcggatcacctgaggtcaggagtttgagaccagcctggccaacatggtgaaaccccgtctctactaaaaatacaaaaactagccaggcctggtggcgagcacctgtaatctcagctactcaggaggctgaggctagagaagcaggctgaggctcttgaagccaggaagcagaggttgcagtgagccgagatcacgccattgcactcgagcctgggcgacaagcacgcaggaagtcaggggacctagccaggatacactgccttttccatcaactggctgtgtgtccttaacctccctggtggagccacttaacctctttggtacttccgtaatgtgaatgaggaggatagatggatataaggccccttactgctctaagaatctatgggattggatttcagttcagcatccatttccaggtttgcgctcatctttccaatgagagacacctgggcaggtagagcaaagagcaattctctggctgctggtatagtagacctaaggcttgagcaagtgcctgatacaagaagaaaaggaattgcccctttttcttggcagccaggacagagacccagtgcccaacctgcttatacctccaaccctgcccatccatcgcctgacagacaggagtgcaggacaagttctcgcccctcattgccctccctacctttccagttctggcagttccttgcaggctctccccaccttgggtttcctcccagccccgtctctgagggcagcaccttcccacatcctgacgcaggtcagtgtagctgtgaaggaggcagaggagtgagtgtctgagacacgagtgatccaggtccttcaagctgcagagtacatccctcacacacatactcaagattcctccagatggttgtcctagagaaggtggcgatgtgatttcccaggttctccgtgaagtagtcaagtattcaaactcctctatgcccttcttcctcttaccccttcattccctctatttctcctgcctctctcattgccattctttcttacattattttgcttccttcctcagttctccaggatcttcacctatttgtttattttgagatagcgtatgacttgtcacccagactgcagtgcagtggaatgtcatggctctctgcagcctcgacctcctgggctcaaataatcctctcacctcagcctcctaagtagctgggaccacaggtgcatgccaccacactcagctttttttttttttttttttttttttttgagacaagttatcactctgttgcccaggctagagtgtggagtgtggtggtggagtgtggtggtgatctcagctcactgcagcctcgacctcccaggctcaagtgatccttccacttcagcctctccccgagtagctgagactacaagtgcacaccaccacacctgcctaatattctgtatttttagtagagacagggttttgccatgttgcccaggctggtctcgaactcctgggatcaagcaatctgcccgccttgccctcccaaagtgctggggttacaagcctgagccactatgctttgccgaagattcccgtcttcccactgaaccttcctctttccttctcctgggccattcctgagccctggctgaggggagagaagggaaggaaagcccctcctgcggccatctcagcatccaaggcaatccttctggggctgctctgtctccagggccccagccatccccagacactgagtgcctgaggggggaccctcactcctgtggcactatggtaagataggaaacagtggcttctcctcaaagcagcctcgccggtcggtcagctgactaccaacatgggaagtggccgaagatccacatggaatgacactgataagcactttgcagtgtctgaaactcttaaacatcagtgctgtcttcctagttttacagacacaactctgtgggttggatgaggtttttctaaatgtacaaatgcagaaatatacggagggagtaaagggactgcctacaaatcacatctagagtgtggtgtacctgatttcaagtcttttattttattctcgcagcaacgggagaatccgcagtcgagggaggtgaaatgacttgctgaacgccacacggcggactccaagccccgagctcctataacagaggaggaggaaggcgggctcagctcctgccacccagcagcgggggagatgcagcccgggactaggctgggccatggggacagatccaggccccgccccctgaccttgttctctgcccgccgggaagtggggaacttgcggggagcagcctcagctagtccctggggcagagtctccacttgggtgcacgccctggggtggggcttcttcgggaagccgggggccttcaactctgctcaggagctcgggccggagaaaggccccgagacttgaagcccttgcccgggagggatgaacacgcaaaggaacccgaggaacggggtaggggaccaagagtaggaccagcttctcctgcgcggggacagggcctgtggagcggcctggaggaatctctcccagccgcgaagcccgggaaggctgcgaggccccagcgcggagcggcccctcccacctccccgagggcaggcggagcgaagcctcggggcccgggcccaggttttgtgcctacggaggctggacttccccgccaccccgaggagtcaccgagagccttctctccctcgcaggggccctgggaggcccgcgctttctctgaaagtggaaggagtgggcggggggcgcggccgaggcggggcgcgggcgtgcagcggcgcaggctccgccccggggccgtctccagccgggggcgccgagccgctccagtccccggcgcgccgcgggctggtgggctcagcggcggcgccggcactgggaaatgaccctgcccgggggcccaacgggcatggcgcggccggggggcgcgaggccctgcagcccggggctggagcgggccccgcgccggagtgtcggggagctgcgcctgctcttcgaggcgcgctgtgcggcggtcgctgcggccgccgccgcgggggagccccgggcccgcggggccaagcggcgtgggggacaggtccccaacgggcttccgcgggctcccccggccccggtgatccctcagctgaccgtgacagccgaggagcccgacgtgcccccgaccagccctgggccgccggagcgggagagggactgcctcccggcagcgggctcttcgcacctgcagcagccgcgccgcctttccacctcgtcggtctcctccactggctcctcgtcgctgctcgaggactcggaggacgacctgctgagcgacagtgagagccggagccgcggcaacgtgcagctggaagcgggcgaggacgtgggtcaggtacgggccgcgggggcggggccagcgccgggcgcgggggctgcacgggggacctggctgggtgctcccggaggacccgctcctgtccatgctccctccagcggaaggtcctgttctcgcggtttaggaggaatctgggggtcagagggaggcgcctggccgacctctcgcctgggcaactttcacctcggctccgccggcgggtcgtggcgctggccctggggcgtctaagaagcggggcgaggagcaggcgacccgccgcggggactgggcgaagcgggggtagcggaccttgttggctgtgggttaggacaggagggatcggaggggctgagccttgccgggtgaaccctcggaaggagagaggcgaaggagagtttcccttaccccccgccccctctccggtgccgcggccgcacccccgccgttgccacggtttccctctcctgagtgggagtggagcggcgctccaggctctgctcgggagccgctgccgtctgctcccagcgcccgcacgaggcgtggacgcaggggagggaggggcgtgggcctgggagctctggctgggagcggaacgcagcccacccagtgcgcgccctgcctcccatcttcccggctcgccgctcctgagcgcggcagagaggggcggtaaactgaggctgcaagggggcaggatcactctgctagtctctgcctctgatagcctgggtgttctgggaccaggtctgaccctcggaaaacacagccctgggcactgttaagtcattcctgacgcccgccacttagggatgtgcggctcccgggacaccctccttgttcccctcgttttaaccaaggccaaataccttgaataactgtccgtggtcagcgcgaaggactttctttagatccacgtttcgcaagtgtccctgaggccgaggaagaggcgaggggcgcccccggcctcgggcgtctggggcctgcccataagkccgggtcggcgcggcggggcggggagagctgtggccgcgcgcctgctccgccgcacaatcggctgggacaaggcagggaagctgtggcgacctgcaggggttcacaagcccggaggccgatggggtttgtcagtgacaccagaggggaaaagcctcacagagcaggaacaccccccgccgccaggtgctgggtgcgccggctcggtcactagcctgccgcttccccttcttccccggtggtcagagcagccccggacccaggatcgtttctggggtaacccttgcctaggtcggggggcggatgccggggcttcccaggatgtggagtgtggggcagtgagaggccccccgccccgcctcttcggaaaagcctgagcagcagctccsggggcgcggaagctctgacacctgagagccggtgcaggcgaaagggcgcgaagcgcgggcgcgtcccgcttccctcttccgcccgcagggactcggcgaagtgcctgggagagggagtgcgctaggaggaggtcctgcggcccaagcctgggtgtagagaccgccccggctaaggtcaagcctcggggacctgggcgaccccgccgccctccgagccgtcgggagccggtgcaaatcgccgctgagggcccttccagctccaaggctgcggcttccaggccttccccacccccaggcccgccggggcctccccgaagtcaaacagccacagcggcggcagataagccaggggctgttgacagaggctgcctgagtccgtgtggaagggcccagggcggactttgcctcgccgcaggtcccagagccgcacagcgcgccggcccaggccaatttagggcttccccaggcaggaagcaaggctggtccggctgaccgtgaaggatgcacgtgggccggactctaggactcccggcttaccagccccttacgcgcggcccaggcaggccggagcccaggaagtttctgcctgcctgcctgcctacctctctgcctggggcatacgtagtccccttcacctcctaggagccctctccagcctgcccagagcagggaaattgaaactgggcagcctcactccggcagaggaaaaagtcacaggcaggcttttcctaaccagccaggggagaagttggaggcccacccgcaaggtcagctgcatgactctatggccttgcctgcctcctcaaacaattgtggggtattgctggaggaaaagagagggtgtttggctcctgttcatctggttttcttctttctgtgctccaggataggtaaggagacctggatgccatcccctcctggactcagaattcccacacatcgctttccactaattatagagcagaatttaggttaacagacttcctttttaaacagctaatgcccatgggaaggtgaagtcgtgggtcacttataccttagtgcaaatcgttttataaatttaaactgattgctcttcccaccaccacgaccacagggagtgctagtttgatagggcarttggaacatggggagggtattgggctggtagagagcttcaaccagagcctggatgactggaggcagggagcaagggtgagtgccaaagacagagcactcacccacctgctggtctgctccrgcagaagatacactgtgtatctggcatgagcaggtgtcttcaaggcttccgaatggagcttagacaaaggagggtctgaggctagtatccagccaagccctgcccagagagaggtactccctgttcagccctaggagtgaggaattatcagagggccctcctgtgacttcattaaagtctctcacacagtcagcaatcctagcctttgcctcaagatacccaggtagcctctggctgtgtgttagtctcccagagagggcaccttcatggagggaggcccgagccagaggatgttcaagcttctcccgggttcaagcgattctcctgcctcagcctcccgagtagctgggattacaggcacctaccaccacaccggctaagttttgtatttttaatagagatggggtttcaccatgttggccaggctgctctcgaactcctgacctcaagtgatgcatctgccttggcctcccaaagtgctgagattacaggtgtcagccaccgcgcctgggcttacattcayttttaaaagcgtgatgttctctgggggaggtatctccctaaggtggaaggtggcagtgatttgagttccatgacacttgcacaactcctgccatgcttggccatacccattactggcaggggggctaaatcctgtcatagcaacctcaggtggtaggacggaggactcagatgagataataggtatgaaaatcttttgtaggctgggagcagtggctcacacttgtaatcccagcactttgggagtccaaggcgggaggatcacttgaaccccggagttcgaggccagcctgggcaacatagcaaaatcctgtctctactaaaaatacaaaaaaaatgtcacggtggctcacacttgcaatcccagcactttaggaggccatggcaggtagatcacttgaggccaggagtttgagaccagcctggccaacatgatgaaaccccgtctctactaaaaatataaaaattagccaggcgttggtggtgcacgcctataatcccagctactcaggagactgaggcaggagaatcgctcaaacctggaagacagaggtagcagtgagccgagatcgcaccactcaaataaatatgtacatacatacatacaaaaatacaaaaaatcaaccaggcatggtgactcacatctgtagtcccagctactctggaggctgaggtgggaggatcacctgaaccctggaagtccaggatgcagttagctgtgatcgyaccactggactccagcctggacaatgggagtgagaccttgtctcaaaaaaaaaaaaaaaaaaaaagtattttgtaacctgctagctaggactggccttagttgctgctgctcttgattcttatgagatgcagaaaaccaaggtcaagagagtaggtgatgacaccattttacccctgcttgggagcaggtccatcaatcaaatggtagtagcccaggtttttagacacacatcaaatcctcttctgccaggcccacctgccagccctcctcactgtttctgcacagttctaaaaggatggttcagttccctcaccctgcctaacccaaggcaagtttcctcttcactaagtccattctggtcccactatcccctaaattcttctagcaggtccctacagccattaaactcattcttttggataaaggcaaaggtggccatccagtagagaagggcccccaggcaggtctcagtgttccccagaagtcaaaactcagactgccttattgctgcacatcacttcaccaygcacaaagcactttctcaggccacatcccatttaacccccaaagggaggcaggatggtagcatcctgctggggatactttggaacctgctggggcagttggaacttggggagggaggatgggctgatagcttcagccagagattgggaggctggaggcagggcatgaggggatgtaactccccttgatttccttctgtaaaatgggaatgataccacttcacgcacttgctatgcatgtgcattcattatggctctcaaactgagtgtgggagaagggggtacaggatggtgctgctgaatatacatggcacatacatcatcttcctggaattttacttgagggtttggaggtggtgagttttataataaaacttggatttattatgcagcagaatgcaaacctggtgtgtatttaaagattttaaaaggagttttgaaagtgatgtcatgcttctagtgggctgcttctggctacacccccagatccctggggattgggcacgtgatcacaccctagtgtgccatgtaagggcttcagtaggaaagtgggagcaatgctgcctgatggaagatgagaaagtgcctgacatgcaataggcaggtagcatttgatggttcgtgttacggcagcagctatgtcctcccaggggaaacaggcccacacagatggcagtacttggttgggttcactcagctggaaggtgacacagccatgactggaaccaactactgacttcccacccagtgctctaccataacttccatctcctccccatgggaaagggctttatggtcagcagccctcttctacttaggccacctcctcagttctctctctccctcttagaactccctcttgtcagggaggtgtattcctctgggggtacaacatgtgtaactgtgctaaaaggcaagtgcctctgtggggaggcggcagacacagttgacatgagccaacctgtgtacttcagagaggacacagggctgccragttgcgggtggtaagaggagaggtccagaggatgggatgctctcaagattagctggaggctagaagagataaggggcacaccaaaaaaacaaaaacaaaaaacaaaaaacaaaaaacaaccctcgtctccttcccaggtttgtctaagttgacaggccctcaggtttgcaccttattttctttctttttcttttttttgagacggagtctcactctgctgccaggctagagtgcagtggctcgatcacagctcactgcaacctccacctcccagattcaagcgattctcctgcctcagcctcccaagtagctgggaccacaggygcatgccaccatgtccggctaatttttgtatttttagtagagacggggtttcaccatgttggctaggatggtcttgatctcttgaccttgtgatccgcccacctcagtctcccaaagtgctgggattacaggcatgagccacctcgcccagcccggcatcttattttcatggcttaagatttctaggtccagataaaaaccaagggtgccctgggccttgccagctaatgagtgcatagaatccagggatagcaagrgaggcttggagagccttttctttctccagccctgttctttctccaggccctgccaggctggccttcctgccctgggcctgtgtacaggtttgtttctgtgtatgtctgtctccctaaatgagaggaaccaaggtcctgagtgaaggaatcagtgattgagatttgttcagcttctgcctcataccatggaatgggatgggggagctgggcgcctatcatgcttaagccttatgtactactcacagcaacccagtaaggatagttatttcctcattttatagatctttttcttacagatgcacagaggcttgtttcttgggccctggaatcttttgaggcattggtagtaataaaaatttggggggccgggcctggtggctcacacctgtaatcccagcagtttgggaggctgaggtgggtggaacacctgagatcaggagttggagaccagcctgaccaatatggtgaaaccctgtctctactaaaaatacaaaaaattagccgggcatagtggtgtgcacctgtagtctcagctactcgggaggctgaaacaagagaaccgcctgaacccgggaggtagaggttgcagtgaggccagatcgcgccactgcactccagcctgggtgacagagcaagactccatctgaaaaaaaaaaaaaaaaaaaaaaaaatggccctactctagaccaacttagaacatccctgcggtaggcctgataatctgcaatttttaacaagggtgaccatcaggtaattccgatgttcacaacagttcaaaaacctcgacagagcattttcgtaacctgcccacgcgttcttcagtggcagagctggagcgcaaaccgggggcttcagatgctaagtccaggctcttgacagctcactggagacgctggaatcaccttcactgcgcctgtatcagcacccgccacwcaggcgcacaaataaaccttcccagagtgaatgaatgaattaatgactcatccagccccagctgcttccggtgggtcgggggcgtggcgagaccctgtttcagtggagggagggcttatgcattgccgagacgccgattatcagaccttgaccctgtcgctttcagaaaaaccactggcagaagatccggaccatggtcaatctgccggtcataagccctttcaagaagcgctacgcctgggtgcagctggcagggcacactggtgagcagtggggcgggtgggcgggtgcccgcgacgggaaggggctgggcggcgctgacggatgccggtcctcagggagttttaaggcggcgggcaccagcgggctgatcctgaagcgctgctcggagccggagcgctactgcctggcgcggctgatggctgacgcgctgcgcggctgcgtgcctgccttccacggcgtggtggagcgcgacggcgaaagctacctgcagctgcaggacctgctcgatggcttcgacggaccttgtgtgctcgactgcaaaatgggcgtcaggtatgcgtgccctgccaggtcggttggggggatcaagtaggggtccggggccgggacagctgcttgagggggacccggggcgagtgctcgaaggggtctccgtgtgcgccccctcatgccctggccgctgcctgcgcccccacaggacttacctagaggaggagctgaccaaggcccgtgagcggcccaagctgcggaaggacatgtacaagaaaatgctggcggtggatcctgaagctcccacggaggaggagcacgcgcagcgcgccgtcaccaagccgcgctacatgcagtggcgggaaggcatcagctccagcaccaccctcggcttccgcatcgagggcatcaaggtgaggcaggcgcgcttcgctggcaccgccgcagccccactgcgcgctgtctttyccgatcccccgctcccgccccgcctgcccctccgccctctcccaccgcctcgccgtcccctgcaactgggaggtaccgctgctctacgctgtcctcttccccactggcgggcccggggcccctgacactcctgtcccacatccagaaagcggacggctcctgcagcaccgacttcaagactacgcgaagccgagagcaggtgcttcgcgtctttgaagagtttgtgcaaggagatgaggaagtgctggtgagagcgggatcccaaaccctgaggtgttggggagcctgaagccgaggactgcccctgtcatctggcccagtgccctcggctgtgtccccaccatggccctcaccgcgctggctcgcaactgctctacgctccttcccttctgggccacgctgggcggggccctgggtcctcctcctggcggcatttgccaagcacagcgtgggtcccggctcctcatcgttagcaggggctcatttggcgtttagttaatttgccctcctctcccaccccaccctctgcagaggcggtatctgaaccgcctgcagcagatccgggacaccctggaggtatccgagttcttcaggaggcacgaggtaagcggcggctgcccgggtgcccgggccgcgagggctagggcgggaacccggcaagggcgtctctgggcagggccgcggcctgacggtgcggggctcgcaggtgatcggcagctcgctcctctttgtgcacgatcactgccatcgcgccggcgtgtggctcatcgacttcggcaagaccacgcccctccccgatggccagatcctggaccaccggcggccctgggaggagggcaaccgcgaggacggctatttgctggggctggacaatctcattggcatcctggccagcctggctgagagatgaggctggactcctgtccccgcgggccgctcacctgacatgtggacctgcagctttgtccccactgtgcatgccggcttgagactggagccccgcggtgcagggcagttcaccgggtcctgcaggaccaggtgccagccactaagggggggcaccgccgatgccaggggttttgcccacccgggccccagcgttcccagagccaaatgacactaacttatagaaggggagggggcaaagggcttcttcctcaggccagctcttctgaggaggctctgccctctccagaggtgccagaccgcggattttatttagcaagcccagaccttccggtctaacgtctcacaccacgacggactccccttcctaataaaactcaaagacaagatgcagcttcctgtgcctcaggcctcagcccctccctcctccggccccctcttcctcagttccggtccctggcatccacagatcgctggaggatgagaagagctttttattagaagcatctgcagggtggggggtctgcccagatgaaggatgctcataatgggagagcaatccagtgctccccatggacacctggggtgtgtgtaaggcggcctctggccccaagatcaaaagctggaagtggctgggcccttccctgggaggcctgggctggtttccagcatggcaagtgcagcgctgccaggccagccccgagacaggcccagacacacagcacagactgcagggaacagaggccgctggcataacaggccacccaggagcctgaggagtatagggagggaccctcagtgcctcagtccttaccctcagggccccttggggctcaggagcgataagtgggattccaaaggttctgaggttggaggcccctggatttgaggggcttgaggccagaggacagccaggggccaagagggctacctccccagcttttcaacttctctggactcagttcctggggctgtgggggtcttaggcactccaaagatctgttccccagcccagaagtcccttcctcctctggggtgggccccagctccattggcaggagtgaattcagcacatccgggtcctgtaatggaagagtcagggagcaggggggcatagagttttctggccctccctcctgacccacaagaccaggatgttagattaggtcgggggcacacctgagtgcagtactgcagacgctccaagatgctggcaaagctagggcggagctcaggctcgtgctgccaacactgggtcatgatgcggtacctggggagaggcaggagttcatgcccacccatggttgtgaaggacctcccttcccgggcagcactcaactcacacaggccctgggcagcccctaggagggtccatccggcctcctccaacgacgaagtccagcacctcctggttggtgcgcccaggatagggcatgtagcccagtgagaagatctcccagagcagcaccccaaaagacctgcatcacaagtgggggaaccaagtgaggcccgtcaggtgtagcctcccctcacatgaggtggctggaaaggacaggattagcctcaggggaggggaacagtggggaaggggaggggaagggtgttatcaccaggaatctgtcttggatgtgaagatgccctccaggaaggcctctgggggcatccacttgactgggagcaaggcccggtcccccctgcggtaataactggccctacaggagggaggaggtgaatgatgagttgttcaccaccaaggtgcggggaaaacccccttggagcaagagccttcccacctcccaagtcccgcaccggtagatatctcgtgccatcccaaagtccccaatcttggccactcggctgggtccagcgcagctcagcaggcagttccgggcggcaatatccctacagagtaggcaaaaaaaatcactgccagaatctagaagttcttgctcttcctgatctatttccttaaaagctgtgtggaagggctgttccttggggagggagttgggatgggggtcccctgagccaggactgctcctaacctgtggatgaagtgattttcctccaggtagtggcagccctgggctatgtcctgggccagttgcagcaggtcccgcatgaccagaggtgatggctggccctgggtcaggcagagggggcatcagtccatgtaggtctcagacacatggacagggtctttagaggggcctggggggggctaagacaagggtctcaccaggtgtggccgactgtgcctcaggaaactcttcatgtcccctccagacatcagttccagcagaatgaggcgaggggtggccctgaggctgagccccacacaccgcacaatgttctgatggcgaaacttgctgagtggggtgggggacatatcccgttaccaggagggagacggaaaccatgttttaggctccacaaagctggagaggccctctgtgtcccctgacttgctacctcagcctcagggtgaagagaaactgttcccgggcattcccctcccgccttccagccctgcccctggtcccaggtgcacctgatgatgagggcctccatgaggaaatccagctcatcctgaggcgagcagagttctggcagggtctggggaggaaaagggcacagtttctgagctgccctgcacgcttcaggagagggggttaaccctagctctagtcattgtccttcccttcagggtgttccgctctcctacccccagccagaagtcccactcctctcaccttgatagctacctgcaggggactggagtccccaggaaggccaattaccagtccctcatacacctccccaaaggcaccatggcccagggctctgcaggaagacacgttggaagggagtgggcaggcggcctggagaagagtcctagagagtctagtaccccctttacctcccctgcccctgccatatgcccagctgaccctatatagactctctccataccatggcatgtccccaggtagaagccctgcaagggtggtgctcactggcatagagccagggcaaaaaagagggcagatgcgggccagagtcaaggtgggagtgcatgatgaggacttccctggtccctgcagacgccctgggcgggaggcaatccctgggctccaagagtcatgattttttttcttttttaaacgaagtctcactctgtcatgcaggctggagtgcaatagcgcgatctcggctcactgcaacctctgcctctcgggttcaagtgattctcctgcctcagtctcccgagtagctgggactacaggcaagcgccacaacgcccagctattttttgtgtttttagtagacacagggtttcaccatgttggccaggctggtctcgaacccctgacctcaggtgatccacctgccttggcctcccaaagtgctgagattacaggcgccagatcatattctttttttattgagacagagtctcactctgtcgccctggctggagtgcaatggcgcaatctcggctcaccacaacctccgcctcccaggttcaagtgattcttctgcctcagcctcccacgtagctgggattacaggcatgcgccaccatgcccagctaattttgtatttttagtagagatggggtttctccatgttggtcaggctggtctcgaactcccgacctcaggtgacctgcctgcctcgacctcccaaagttctgggattacaggtgtgagccaccacgcccagctgagagatcatattctaagaactgggacggagaggtgacattgagcaagttacttccccttctggagcttctcagggcctccctctcccttacacaagggatgtgggccagattttttctgggacttataattcactacagcagggagagaatcagaggtggggattcagagtgcataggttctcagaaggaggcagaagacttacctgagcagagtaacattggctggggaaacctcggtgacacctggtggcagaggccaggactgggccgggccaagccccacctggcaataatagggattgggggctgtcctgatggcagaggttcgaagcttgctcagctcaagctcagggctcggcagcctcatctcctgcaggccctgccacttcttctgcttcactgggggtgggaagaataacggcacaccctccacctgcccatcaactctccctcccccacctgcccaggacacccctccagatgctcattaaggtaaacgttttccccaggcctccccagctccttcctatcttagaatcccagaggagtctaccacggctctgctgcggtgagtggtcttgaagtcagccccgggaccccgcagaaacccatcccagctcactggagaggagcagccttgaatcaactgtgcctgctagacgcttcgtacccagaatcaggaccccacacaccataaggaggctcagtgttgaggttgccaccacagccaccatcagaaccagagggcctgggggcttgtgcaggtctagggagaaagagagacacctccagtgggaaggtcttctctgttcctttaccctcaagttttacccacgcttcaagactcagctcaagtgttaatttttccatgatgccttcccccattatcctgggcaaaagcaacctctccctcttgaacacccctaaagcactttatacctcccacaacaatcgtcacttgagatatacatttacatagctatatctaaacatcctcccacactggacgacaggcctctgaaaggcactgtgcaccgatgaatctccaatcccctgcccagcacccaccacagggcctggcacacagcaaatctctataccatctttcccagtggcctactgctcctcccagtctgtgaccccaggagtccagaccttgggcaaaggtaggacatacccatgcaggtgacgttatccacagctagctccatgccttctgggcacaggcattcagccagctggagctctgcctgccattggcagtctctcaaagggcagtgactgcagttgaggtgccttcggatctctacctctccgtggttctcggtgactgtgagtaaaagaactgatatgatatggtgtggtagggctgggatatagtaaatacatgcctttggctgggtacagtggcacacgcctataatcattgcactttgggaggccgtggtgagcggatcaccggaggtcagaagttcaagaccagcctggccaaccccgcctctactaaaaatacaaaattagccgggtgtggtggcgcacgcctgcaatcccagctactccagcgactgaggctgcagaatcacttgaacccgggaggcggaggttgcagtgacccaagatcgcaccactgcactccagcctgggtgacagagcgagactctgtctcaaaaataaaaataaataaataaataaataaataaataaataaataaatacatgccttttccagccacatggttaattctagcccaggactttagagcaaagagcagcaccaagcttacaagggtggtgagagaagctgggggacttctgtcaagcctgcacactcccaggtatttgaagcgaattcatagcaagggggtacttgaaaagcacgcagcatgccctgcattgccatccagcacgactggcagcccactttccttttttttaagacagagttttgctcttgtcgcccaggctggagtgcaatggcatgatgacagcccatttttcaaatgaccctatgctatgcaagaatcctgtgctatgcaaggttattcacagtgcaggtggctcttcagtgcagtgcaggagtgggctcagggactgcggaagaagtccaggccaggctcagaggtggggttggggccaatacctgccagaggctgcaggaagagctcgctgctggggtgtatgaaggatactccatcttccccatcagcccagaggttgtcagtctctgaagcgtcgccccctggaagtggagagtgatggagagtttgactacaaaaatgggggatgggggagaagctggaatctcccggtggaaatcccagtgtggccctctcttctccagcatcatgatgcaaatgctgtctgttcacaagtgggagtgaaggaggtgaggagggggtaatcagctggagcctgaaggcctcgctgaggctggctgggatgcctcctgcctgcctgagcccctcctgtcccatgtcctcacagtccctttctgtgagaatgtagatcatgtgtgtatgtatgagcagtacagcccagacaggcacaaaggcatttacactagttatttgatcaaaacacagatgactgggactctcccttacagtttctgattcagtatgttagagaagggctgagaattcgcatttctttttaaaaat

SEQ ID NO: 8926 - DNA, 39104 bp, Homo sapiens
tcccagattcaagggatcctcctgcctcggccttccaagtagctgggttacagacacgtgccaccactggctaatttttttgtgtttttagtggagacaaggtttcagcatgttggccaggctgatctcaaattcctgacctcaggtgatccaccagtcttggcctcccaaagtgttgggattacacacatgagccaccatgccaggcctccaactgaggggcattctacaaaacaccctaccagtattactccaagctgtaaaagtcatcaaaaatataaaaagtctatgaaattgttatagccaagaggcgcctaaggggacttgacaactaaatgtaatgtaggtctggcacagtggctcacaccagtaatcccaacactttggtaggccgagatgggaggatcccttgaggctgggagttcaagaccagcctgggcaagatggcaggactctgtctctacgaaaataaaaataaaaaattagccaagcctgatggcacacacctgtggttccagctacttgggtggctaaggtaggaggatagcttgagcccaggaggttgaagctgtggtaaactgtgattgtgccactgcactccagcctgggcaacagaggagaccctgtctcaaaaataaataaaggcccagcatgatggctcatgcctgcaatcctagcactttgggagcccaaggctggcagatcacttgaggtcaggagttcgaaaccagcctggccaacatggtgaaacgctgtctctacaaaaaatacaaaaattaacaggacatggtgatgggtgcctgtaatctcagctacacaggagactgaggcacgagaatctcttgaacctggaaggtggaggttgcagtgagctgagattgcgccactccattccagcctaggcgacagagcgagactctgtctcaaaaaatacatacatacataaatacatacataaaaataaatgtaatgtggtatctttgatgtgatcctagaaaagaaacaatggccgggcgcagtggctcacgcctgtaatcccagcactttgggaggccgaggcgggtggatcacgaggtcaggagattgagaccatctggctaacacagtgaaaccccgtctctactaaaaatacaaaaaaattagctggacatggtggcgggcgcctgtagtcccagctactcggaggctgaggcaggagaatggcgtgaacccgggaggcggagcttgcagtgagccgagatcacgccactgcactacagactgggcgacaaagtgaaaaaaaaaattattcttttgccaggtgcagtggctcactcctgtgatcccagcactttgggaggctgaggcaggcggatcacctgaggtcaggagtttgagaccatcctggacaacatggcgaaaccccgtgtctactaaaagtacaaaaattagctaggcgtggtggtgggcacctgtaatccctgctacttaggaagctaaggcaggcgaatagcttgaacccgggaggtggaggttgcagtgagctgagattgcaccattgcactccagcctgggcgacatgagcgagactccgtctcaaaaaaaaaaaaattctttttagcgacaaagtctcattctgtcactgaggctggggtgcagttgtgcaaacagcttgctgcagcctcacattcctgggatcaagctattcccccgccgctgcatcgctaggactataggtgccaccacacccagctaattaaaaaaaattttttttatagaacagggtcttcctacgttgcccgggctggtcttgaattcctggccacaagcaatactcctgcctcagcctaccaaagtgctgagattataagcatgagccaccacacccagtctttgaaacaaaaaaacatagtcttacccaataaaaatttcataaatcctcgctgggtgtggtggcatgcacctgtggtcccagctacttgggaggctgaggtgggaggatcacttgagcctaggaggtcgaggctgcagtgagtcatgacagcaccactgcactccagcctcggtgacaaagcaagaccctatctcaaaaaaaaaaaaaagtaaatccttaatatcatacaaaatctagtttatatttagtattccctaacagtctcaaaaaaacagtttcaaaaatgaagatataaacaaagaccgcatttcatatgttatagtctctgcccagtgcagtggcttacacctgtaatcccagcattttgggaggctgaggtgggcaaatcacctgaggtcaggagtttgagaccagcctgaccaacatggtgaaaccctgtctctactaaaaatacaaaaattggctggacgcagtggctcacgcctgtaatcccagcactttgggaggccgaggtgggtagaacacctgaagtcaggagtatgagaccagcctggtcaacatggtgaattgaaaccttgtctctactcaaaatacaaaaattagccgggcatggtggcatgtgcctgtaaccccagctacctgggaggctgaggcaagataatcacttgaacccaggaggcagagtttgcagtgagccgagatcacaccattgccctgcagcttggcaacaagagcgaaactccgtctcaaaaaaaaaagaaaaaagttagccaggtatggtggcacacgcctgtaatcacagctacttaggaggctgaggcaggagaaccacttgaacccaggaggcggaggctgcagtgagccgagatcatgccactgcactccagcctgggcaacagagcaagactccatctcaacaacataaaataaaataaataataaataaatagtctcggctggtgcagtgactcatgcctgtaattccagcattttgggaggctgcggcgggtgagtcactagagcccaggagtttgacaccagactaggtgacatggcaaaaccctgtcactacaaaaaataaaagaattagccacgtttggttcaggcctgtgatcccagctattcaggaggttgaggcaggagaatcgcttgagctcagcaagcagagggaagcagaggttgcagtgagctgaggttgcaccactgcactccagcctgggcaacagagcaagaccctatctcaaaacagtagaaaagattcatcagtaagttcatataatggcaacctgatccatccatataaagtctgcatcaacctttcacctagttgttaaacaatgactgttaaaactattaggtcaaaggttgatgaagactttatatgaggctgggtgtgttttccaaccttagcaggcaccaaaattaagtggaaggcttgttaaaacagaatgctggagctggggatggtggcttatgcctatagtcccagcatttgggaggccagatcacctgaggtcaggagttcgtgaccaacctggccaacatggtccaaccgtgtccctactaaaaatacaaaacttagctgggcgtggtggcaccattgccaggagccattatctcgttatttcattgcgaacaattattttctactatcattcattctgcatatttggctccagttcctctccctcatcccgctgcctccataacttctgaccaggtctagtactattttggacctcaagatgactaaatcctagtagccgaaatttacatctgtagttgaagccaagaggattatagatctgctatagtgcgggaccagcagcatcacctagaaacttggtagaaatacaaattttggggctctattagaaacctactgaatcggctgggcacggtggctcacgcctgtaatcccagcactttgggaggccaaggcgggcagatcacgaggtcaggagatggagaccatcctggctaacacggtgaaaccctgtctctactaaaaatacaaaaaagtagcccggcatggtgacaggtgcctgtagtcccagctactcaggaggctgaggcaggagaatggtgtgaacccgggaggtgcaggttgcagtgagctgagactgcgccagtacactccagcctgggcgacagagcgagactctgtcacaaaaaaaaaggaaacctactgaaacaggccaggtgcagtagctcatgcctgtaatcccagcactttaggaagctgacgtaggtggatcacctgaggtcaggagctcgagaccagcctggccaacatggtgaaaccccgtctctactaaaaatacaaaaattagctgggcatggtggcgggcgcctgtaatcccagctactcgggaggctgaggcaggagaatcacttgaacccaggaggaggttgcagtgtgccgagatcatgctattgcactccagcctgggcgacaagagcaagactccgtcttaaaaaaaaaaaaagaaagaaaaagaaaaacctactgaatcagaaactcagaggttgaggcccagcaatctgtttcgttttgtttgaaacagagtctggctctgtggcccaatctggagtgcagtggttccatcttggctcactgcaacctccgcttcccaggttcaagtgattctcctggctcagcctcttgagtagctgggactacagatggacaccaccatgccctgctaatttttatatttttagtagagatggggtttcaccatgttggtcaggctggtctcgaactcctgaccttaggtgatctgccagcttcagcctcccaaagtactgggattataggcatgtgccactgtgcctggccccagcaatctggtttaacaagacttccagttgattctggtgcctgttaaagttggaaagccactggactaacattggctgccccatgatgtcctttggtctagaaatgatttacttaaggtcctactatgtgcatggcaacacgttgggtgctcagtatttagatgcaaagtacaaggtctggtgcccacaaggaactgacagtctattcaagggaacaggacataagcctgtgaaaaggtaaccggtgacagttggtagttggcagtgtgttcttagcataccacacaactggtgcaggcggtgagattccaggtgaatccaaggaaagtttggtgagtaggcgtggctggcagaggttttagagttgacgccagctaggccttaaagagttatcctttggagacaggggtggcagggaaaagagggaggatttccaagaagggagagtgggatgaacaaaggcaagattctggagaagatgataaccttgctagcaaggaagctttattccctctcttctcaccaccactatttctgcagtgcacactggcagtgttctttccttgggcctttttcatggttaccttctagctcttccataaacacattcgtcacgttggggtgtgtgtgtgtgtccacgtttctgtgtgctgccgtgggcgtgggtgctgggatgtgggatgtggtaacactggctggtgagtgcagagggacgtctgaggaacgctgtgtccctgccaggggtgtcgtaagtgcagaaggggctgtgcctgctgtacatcagaagcatgtgtgggccaggcgcggtggcacatcctgtaatcacagcactttggggggccgaggcgggcggattacctaaggtcgggagttcgagaccagcttggccaacatggtgaaaccccgtctctactaaaaatacaaaaattagccagacgtggtggcgggcacctgtaatcccagctactcgggaggctgaggcacaagaatcgcttgagcccgggaggcggaggttgcagtgagccgagattgcgccacagcactccagcctgtgcgacagagcaagactctgtctcaaaaaaaaaaaaaaaaaaaaggatgtgtgttctgggtgatggtatagagcttacgtgggggtaataaaccgccagccgcgcagcaccgcgctcaccagtccgctgcactgaacaagcaaagcccagaatgctccgagataagaccgggagaggcggggctgggctgcggggcggaagctggaatctggcggcggcggaaacgcgatctctgcggggcaagatggcggcgcccagacaggcctggagcacgtaggtggcggggctggagggacggatttcaggtgatctgggaggaggacccagggtagcgtgtccagtttctttgctggaacctgcctgcgggcctttggtctgtaagggagcaactgtggcctcctctgtgcatagatctcgggcacggcccttcaacgggcggcgaaagctgcgactcgrtgattcctcattgtagagttgggtggtccaggaggcttaactggagcccttracctgagcggtaagggcagtcacgcgtcccgactcgggattggatcctggctctggaggataggctgcaatgtaagagccccagagactcctcagaggccaacataaacccagaggtccattgttaggactacttttttttacgagttactctttaggcattactctttaggattacaggcgtgagccaccgcgcccggccaacccattcttattctattaataactgaaaatgttatcacttctagcactgattggttctggacaaatctgcgctggatttgtggggaaacacactggtggctttacttaggactaaaataattgttactgaggtttatttatataagtaacaggcactgggctaggcgttttgcgtgtatagtcatttaaatcctcacacatttcctattatataggacctgttactcacattttacagttgtggaaatgggacttaagacagcatagaggccgcgcacggtggctcacgcctgtaatcccagcactttgggaggccgaggcgggcgggtcacctgagatcaggagttcgagaccagtctggccaacatggtgaaaccccgtctgtactaaaaaaatacaaaaaattagccgggcgtggtggcaggcgcctgtaatcccagctactcgggagcctgaggcaggagaatcacttgaacccaggaggcggaggttgcagtgtgccgagatcgtgctattgcactccagcctgggcaacaagagggagaatctgtctcaaaaaaaaaaaaaaaaaaaaaaaggacagcattgataatttgcctaatttcgcacatttagtgcatttagtaagtagcggaactggtatttgacttctggcctattgattccaaaactggtgcccataaccccctggctctctttgtgatgtaggtatggcgcaccctatgaagtgagctggactttgcttttggatcacatgaatccatggataagtaggaattgtttctgcttatgtagactcttataggagtgaattgttaccatactatggattctcagttcatctagttcagccttccttagggcctttgggtaggcattggggtaggagactttttccttgtttgttggtcagactgcccaacaattagatatggttatctgccctttggctatataaataataagaatcataactggcgtttgtgtcctttcatgtatgagactctgttctaatcttcttacatatatataattaattcaggaggtaggtacagttatcttcatgttacagatgaggaaacaagcacagtaacttcagtaaaataccttgcttaagcttacacagttagtaaatggcagagcctggatttgaacacaggcagtccattttcatactgtttacctcccatccaggaaaaggcacatctgtatacttcgctgttgtcatgctacaaatagtaattaatacaagttctatgccaaatttaagatgaaattttgtagacaggtctttgctcacttcatccacttccttcagttctctacttatctaagttttctctttcaatattgacctctatttttaacctttagggatttttcccacctctgaaatcgtgtagcactgatcttctatgcaattaatttcatcactgggatgtactgccttgtaaatttatatgtgtgtttaccatattctctcaccccaactttgggtacatcattgaccaaaggaagacctttacaatcttggagacatcatttaaactgtaaacctttggaatttctagrcttgtgtgggcaaagagagataatgaagtgggaaattattaaaagacccagcatttcggcatggtctctgtctccccagtaagccccttgaacccagggactggattttactcccatttctttatatttacagccccytgtacaccgctcagcccagagtaaactctcaaaaaattttttgataatgttcttaaggtcacaccgtcatgtgattgtttcaccatttctacccctttagcctgcccccaacccctgtgttgggaggtgtttccaaggctggcttagttattagatctgatcctgcttagaagtagatgaagaaaaagtaaggaaatgtgtcattcagcactttttttttgagacagagtctcatgctctgtcccccaggctggagtgcagtggcacgatcttggctcattgcaacctccacttcccgggttcacgccattctcctgcctcagcctccccagtagctgggactacaggcgcgtgctaccacacccagctaattttttgtatttttagtagagacggcatttcaccgtgttagccaggatggtctcgatcttctgacctcgtgatctgcctgccttggcctcccaaagtgctgggattacaggcgtgagccagcacrcccggccttcattcagcactattgttagttccagctatctagcttgtctacctctccatctcatcctccttcaacttttaggaggtggtcaacttcatcatgttctcccatgtaccatatttattccctgcttttttttttttttttttcaagatggagtctagctctgtcacccaagctggagggcagtggtgtaatcttggctcactgcaacctccacctcctgggttcaaaccgttctcctgcctcagcctcccaagtagctgggagtacaggcacatgccaccacgcctgcctaatttttttgtatttttagtagagatggggtttcaccatgttggccaagctggtcttgaactcctgacctcagatgatccacccacctcagcctcaaagtgctgggattacaggtgtgagccactgcgcccggccctattccctgcttctatacctttgcccagctctcccttctggctggaggcctatcttatccttcaaggtctggttcagtggttttcaactgggggtgatttttttctgaggtgacatttggcaatgtctggagacatttttacttgtcacaactaggggaggaggtttgatgatgacgtctagtgggtaaaagccaggaatgccgctaaacatcctacagtgcgcaggacagcttcccacagcaaagaattacccagctataaagatcaatagtccctattgagaaaccttagtgtagttgcagcctttgctcttcaggagattctttatagttcttccccatctgcctcactattccagacttccaggacacccaggcaccacacagcagtaggcagtagaacatagtgggtaagagcatggactgactgggattgaatcctaatcctagcacacacttacactgagaccttgagcaaatacttaacttctcagcactattcttttctcagctgtaaaatttgaataatagtagtaactggcccgttgcagtggctcacgcctgtaatcccagcactttgggaggcagaggcgggcagatcacctgaggtcgggagttygagaccagcctgaccaacatggagaaacccagtctctactaaaaatacaaaattagctgggcgtggtggcacatgcctataatcccagctactagggagactgaggcaggagaatcgcttgaacctgggaggcggaggttgcagtgagccgagatcgtgccattgcactccagcctgggcaacaagagtgaaactccatctcaaaaaaaaaaaaaaatagtagtaacctacctcctaggctgttatgaggattaaatgaatgaatatggaaaaagtgcttagagaacagtatgtggtgcatactaagtgctcaataagtgttagatataacaatatttttattattatcagcatctagctcaggggttccaaaactagccagccagcttgcagatatctttggccagcccagcgttttttgttttataattgatttatagtttatataccacagaagtcatcattttattttattattattatttttttgagacggagtctcactctgtcgcccaggctggagtgcagtggtacgatcttggctcactgcagcctccgcctcccaggttcaagtgattcttctgcctcagcctcctgagtagctaggattacaggcacctgccaccacacccggctaattttttttgtatttttagtagagacttcaccatgttggtcaggctggtttgaactcctgacctcgtgagccacctgtctcagcctcccaaagtgctgggattactgatgtgagccaccgagcctggccagaattcatcattttaaaagtttacaggccaggtgcagtagctcaggcctgtaatcccagtactttgggagcccaaggtgggcagatttcttgagcccaggagatcgagaccagcctgtacaacatggtgaaatcctgtctctgtaaaaaacacaaaaattgtggggcacggtggctcacacctgtaatcccagcactttgggaggccaaggcaggtggatcatgaggtcaggagttcgagatcagcctgaccaacatggtgaaaccctgtctctactgaaaaactacaaaaaattagccaggcatggtggtgggcgcctgtaatcccagctactcaggaggctgaggcaggagaatcacttgaacctaggagtcagaggttgcagtgagccgagatcgcgccattgcacgccagcctgggcaacaagagcaaaactccgtctcaaaaaacaaaaaacaaaaaacaaaaaaaaaaacaaaaattagctgagtgtggtggtgcatctgtagtcctagctttttgggagactgaggtgggaggacggcttaagcccaggaggtagaggttgcagtgagcyaagatcacgctactgcactccakcctgggtgacagagccagactctgtcacaataaattaataaagtttacaattcatggcttttagtatattcacaaggttgaacattttcattactccaaaaagacgctccatacccattagctgtcaattcccatttccctccagctctcctagcccctggcaactactaatctactttctgtctctatggatttgcctattttggacattccatatgaacagaatcatacaatatgaggtcctttttggctagcttctttctttcttttcactaaataaaatgtttctgagtcatatagcttctttcacttagtataatgttttcaatgtttgtgcattggaacttcattcctttttgttgacaaataaatgtaaggtctctatgttaatttcttttttgcctttgtgccatggttacgtaaagtcttaacctttggagaaactgggtgaagactacatatggaaactgttcatactatctatataaatctgtaaatctaacattataacaaatcacaagtttaaaaagtacataaatttacagtatatagagaaaaatagaaatatgcatattttatcatgatacaaaacatttgattgctgacctgtttgttgattttttttatgttttttctttccttttttatcctctaagcctctgatcacttatcattgtcaaggttgagcagacagagaagtgcatacattctgcagcttgagtgcctaacttgagattctgtttctgacatttactgtggatttggggcaattaaattaactttctgtgtcaagtgggaggatcacccaagcccaggagtttgaggctgtagtaagctatgatagcagactgcactccaacctaggtgacagagtgagatcctgtctgttttttgttttgttttgttttgtttttttgacagagtctcactctgtcgcccaagctggagtgcagtggctccatctcagatcactgcaagctccgcctcccgggttcacgccattctcctgcctcagcctcccgagtagctgggaatacaggtgcccgccaccacgcccggctagttttytatatttttagtagagacggggtttcaccgtgttarccaggatggtcttgatctcctgacctcataatccacacgccttggcctcccaaagtgctgggattacaggcgtgagccaccgcatccggccaatgcaattgttttcttaattccattttctgcatgttctttgctagtgcatagacatacaatttttttttttttttttgagacggagttttactcttgttgcccaggctggagtgcaatggtgcaatctcggctcacagcaacctccatctcccaggttcaagcgattctcctgtctcagcctcccaggtagctgggattacaggcgcccaccacaatgcccagctaattttttgtatttttagtagagatggggtttcaccatgttggccaggctggtcttgaactcctggcctcaggtgacccaccctcctcggccttacaaaatgctgggattacgggcgtgagccactgcgcctggccacaaatgttttttatattgatattttacagcccaaggtttttaataatttacatacctttaggccaagcatgttctctccagtttgatacagaatcatcacccccccattatgacaacatttatctgctcggcccctgatgacattttcctcaggtctcctgctggttgttcctgagagttttatcacctatagattgtaaacaacctaagttggctataaatattgttgctaggctgatgacatcasggagggctgaagacagagggaatggcagtaaggtatgaatgaggaggaatgagttcatgttaacccaaggataaagaagatcttcgctgttgcccaataaagagaatcagggttcagttgcagagggcccatattctttcttgctcttagggatgaataagagggaacccccacayggagacactgctggagagagtcgtactggggaggcagctggagcagcaagatgctgtygagaccgaagccaggggagtccgaggtggacctgctgcacttccagagtcagtttctcgcagctggtgcagccccagcagtgcagytggtgaagaaaggaaataggggcggtggtgatgccaactcagaccggcctccgctccaggaccatcgggatgtggtgatgttggacagtgagttcccatggatgtgaggctgagaagtagagagggtacagcctygggccsctccctcttcctgttgtggttggattcagacacatcattattatttcagacactgcatagcctgtgtttctgcagccccattttacagaggaagaaaatgaggctcaaagaggttaaatatcttacccaagatgacacagcttgagccagggccccatggcagctgtctttcttccctagcctgcagtgtcttcctaggaaggtgtgcatatactcacgtttgggatcttttctttctcagatctcccagatttgcccccagctttggtcccttctcctccaaagagagccaggcccagccctggccactgcctgcctgaggatgaggacccagaagagaggctgaggaggcatgatcagcacatcactgctgtcttgactaagattattgtgcgtctcactctggctgagtaggataagatgttctagggcaacagggatattggatgctcggggtgggtgaggcttatcagtggagggtgcttcagaaaggtagacttttacccctgaggtcaggwtgggggctgggttagaatcactgccctgaagggaggagggtccgtaaccccccagagtgaggttctcatcgttcagaactgggctaataggatcgggtccagcctggggaagtttctccattgtgcttcacaactttgtgctttgttgctacaggaacgagatacaagttcagtggccgtgaatctgcctgtgcccagtggtgttgctttccctgctgtgttccttcgctcgcgggacacacaggtaggcaagggtaagcttaggtggtgctcaggagacagacaggtgagtctcatagtgcatcttctccaggcaggtagttttaatgatgataagcaatttaatttacaaagcaggatcatactaagcacttcatacccattacttcttttaatcttcataacaaacatataaggcaggtatcatgatgataccttggggatgaggagtccttattcccatttttcatatgaggaaactgagaccccaaagagataaataacttgtccaacaccacacatctaataggtagaagagccagaacttcaacccaagtctgtcagagtctaagacctttactcttatagacctctcctttttctgagaactagggttgtgatccctggaaattgagcaaatccccttttatctctttgttccagaggccttgatataaagaggttgagaggaaagtgggatgatgagcatcagtracctgggttttctttttgccccacaggggaaatcagcaacatctggtaagagaagcatctttgcccaggaaattgcggcaaggaggatagctgaagccawgggcccatcagttggggaagttgtgcccaacgtgggcccaccagagggtgagccggggttgaagaggattgggcttggcctttttaaaagacacaatcatarggtcatttttgaagatatgtcttcctgcctcaaatgagaggtgcatttgagccatctcaagtagtctgagaatactaggtatgggaggcttgggtccatatctgggtctcaggtgctgggagtggggcaggccattatgcagtcctaagagaaagggaatagggcagaagtgtctggcagagactgtaaaataaatgtgttggccaagatccctttaatgatgcaaattattagcttaacagctgggagcaggcccctggctatagatgcctgcctagatatctaagaggagtcagaaattaggatgtttctgaggaaaaccttttcatataagtactagggaagcagtgagtggagaagccacctggagtccctgtgccagacccagtggggtctccactctgaggaaagyttgggtctatacctgtctccagggctaatagccttatagaagaaggccaaaaagcccagttagagccctggaggacagagcaatgaatgtgatcatacctttcttccaggtgccgtgacctgtgagacacccactcctaggaaccagggctgccagcttcctgggagcagccacagctttcagggacccaatctggtcacagggaaggggctcagggatcaagaagctgagcaggaagcccagactatccatgaagagaacatagcaagactgcaggccatggctcctgaggagatcctgcaggaacagcagcggttgctggcccagcttggtatgggtgcctggctttcctgctgagaccaggctaggagaggaataccacttattgagctaggcttactgtgagttccgggcactgtgctgagtactttaatgcyttttttttttttttttttttttttgagatggtcttgctctgtcacccaggctggaatgcagtggcacgatctcggctcactgcaacctccaccttcacggctcaagcartcctcccacttcagcctcctgtgtagctgggattataggcacacaccaccacactcagctaatttttttttttttttgsggggacagagtttcactcttgttgcctaggctggaatgcaatagcacaatctcggctcaccacaacctccgcctcccgggttcaagagattctcctacctcagtctctcgagtagctggaattacacgcatctgccaccacgcccagctaatttttttatttttagtagaggtagggtttctccatgttggtcaggctggtctcgaactcccaacctcaggtgatctgccctcctcggcctcccaaagtgctaggattacaagcatgagccaccatgcccggcctttttttttttttgagatggagtttcggtcttgttgcccaggttagagtgcaatggcgcgacgtaggctcactgcaacctccgcctcctgggttcaaatgattctcctgcctcagcctcctgagtatctgggattacaggtgcccaccaccatacccaactaatttttgtatttttagtagagacggagtttcaccatgttggccaggctggtgtcgaactcctgacctcaggtgatccactggccttggcctcccaaagtgctggagccactgcgcctaggttttttttttttttttaagacggatttttcctcttgttgcccaggctggagtgcartggcgcaatctctgctcactgcaacctctgcctcccaggttcaagcaattctcctgtctcagcctccaaagtagctgggattacaggcgcctgccaccatgcctggctaatttttttattttttgtatttttagtagagacggggtttccctgtattggccaggctggtttcgaactcttgacctcaggtggatcaaagtgcctcccaaagtgctgggattacaggtgtgagccaccgtgcctggcccccagcgaatttcttttaaggtttttgtagagatgaggtctcactatattgcacaggttggtttttgttttttgttttttgttttcagagtctccctctgtcacccaggctggagtggaatggcacgatctcggctcactgcaacctctgcctcccaggttcaagtgattcttgtgcctcagccttttcagcagctggaattagaggtgtgtaccaccatgcttggctaattttttttattttcagtagagatggggtctcaccatgttggccaggctagtttcgaactcctggcatcaagtgatccaccgacctcagcctcccaaagtgctgggattacaggcatgagccaccgtgcctgacctttaatgcattattcagttctgtccttaaacttgtcctgtgaggtaggtggtattaaccctattttacttatgaaagaaactgaggcctaaaatttaaaagaaattctacccaggtcacacaccttataagaagcacaggacacaggatttaaacccagatctacctggtctcatatagatctacctggtctcatatgccctgcttttttttttttttttttttttttgagacggagtctcgctctgttgtcctgggtggagtacagtgacacgatctcagctcactgcaacttgtacctccctagttcaagcgattttcctgcctcagcctcctgagtagctgggattacagatgtgcaccaccacacccagctaatttttttgtatttttagtagagatgggtttcaccatgttggccaggctggtcttgaactcctgacctccagcgacccatctgcctcggcctgctgaagtgctgcgattttttttttgagatggtcaccgtgcccagccgaggccctactttttaaccactgtgctatgtataactgtactaccctggtatagtatacactatgctttattatagctatactctagtatatgtatagtctcttctactctgtgatactgttctatgctatgcctcacccctagtgtctgttcaccaaaatgccaggcactcagtcaatcttgttacccactgtatactagcacctctatagastataatacgtgttagggctcagtatggtgccttgccctgtaattccagcactttgggaggttgaggtgagaggattgcttgaggccaagagtttacgaccagcttgaggaacatcatgagaccccatctctacaaaaaataaagatataaaaaattacagccaggtgtggaggctcacgcctgtaatcccagcactttgggaggctgaggtgggcggatcacaagatcaagacattgagaccatcctgrccaacacggtgaaatcctgtctctactaaaaatacaaaaattagctgggcgtggtggcacacgcctgtagtcccagctactcgggaggctgaggcaagaaaatcacttgaacccgggaggcggaccttgcagtgagccgagatcgtgccatggcactccagcctgggcgacagagtgagactctgtctcaaaaaaaaaaaaaaaaattagccagatatggtggtgcatgccggtagtcccagttacttgggaggctgaggcgggaggattgcttgagcccaggagtttgaggctgtggtgagctacgattgtgccactgyactccagcatgggtaacagagcaagaccctatctctttaaaaatatatatttacagcctgagcaacatggtaaaaccccgtctctagtaaaaatacaaaaattagccaggcgtggtggcaggcacttttaatcccagctactcaggaggctgaggcaggagaatcccttgaacctgggagatggaggttgcagtaagttgagattgcaccactgcactccagcccgggcgacacagcgagattccgtctcaaaaaaaaaaaaaaaaaaaaaaataaataaatatatatatatatatatatatatatatgtgtgtgtgcataaataaattagctaagagaaggaaattctttctgtaaatgccttctttttggccctagtcaacattaacttattcattctacagccacttacattggaactgtgacctgaaaccaaagggataggcataggaacctgggccagtggactgtgagggatagagggaaaggtgggcaggtgggcaggtgggcctagtgaccccacaggtgtgagaaggctgggtcattgatgggccacaggagcacccagaaggctcaggcccaggctcggaagcagcttgtcctgtccttggcacccacagacaggcgatattcagcgggttccaggtctgtaggaggccagggaggatctaccctcactcactctcccctctaccttcgcctctagaccccagcttggttgctttcttgagatctcacagccacacgcaagagcaaacaggagagacagcctctgaggagcagaggccaggaggaccctctgctaatgtcaccaaggaggaacccctcatgtcagcttttgccagtgagcccaggaagagagacaagctggagccagaagccccaggtttgcaggaggcgggggtcatattttggtggataaaagtaggggaaattgtcccttttcctaggcctggcaaatgagagaagagagaagcttctgtgcttttggacatctaacattaatcctcattattggcttcaagtcagtcttcattgctgatgcatgtcttcttcctgcacatgcttcctgttttcttgtcctgttactgccccttctccgccttcccttttaagaggcagcaatgcgtgatggctgaatcccactccacccgctcccggcagactatcttcctgtccttgctgtagctgccccagctctggctctgtccatcccactgttctttctctctctgctcacagtgctgggggaaagatggcagggccagagtaataagagaggcagaatctgacaaagatcttatgaacatgccagaccagaagcagagaggccagtggaagcactcatttcccagaaactagattatttcattagtgattawcaaaataagaaattgaattatgagagccaggaacctcatgcccccggaggagctccaggccagctgagcaggttgggtgggggtaggcgtgaaggaggaaaatgctgtgggatttgtttctgtatcctgccccccaggagcagtatagttgcctcctcctcattgtccccactctcctactcctttaagggctggtactggaaagtggagatggtgccttcctgacatatgtggtcctccttcttcatctttttctcctttctttctctttcttccttctccttctcctcctctctcccctcccaacaaatccttggggtcagcaaggggctggagcccaggatggagtgtgtctgtcatatttgagactttcaccccagccccaggagttccagtccctgrgccatgccatttagccataaycgagggtagaagctggcagatcctggaacagaagtggatgtggcagctgctgggtgatggtggggacccctgtggatagtgagctgagccgtttgggtaatactatcatgctttgtctccccagctctggcattgcccrtgacccctcagaaagaatggctgcacatggacactgtcgagctggagaagctccactggacccaggacttgccccctgtccggcggcagcagacacaggaggtgaggagggccacctggcctacaaggggtgggtgakatagggcaggagaggagctgctgctcttgccctcagaactcaggcctttctattgcccagagcctgagaagcatctctcctttgctctcacccacctttaccatcactctgcctggcccccaaggccagataagccccatttctggtagaagtagagtcagtacctaagtcctgaaaggcctgggattaaaggtggggagtgggtgtgggaaggttgctggagcccccagaccacagtcctctttctcttcccattagaggatgcaggctcgrttcagtcttcagggagaactactggcccctgacgtggacctgcccacccacctgggtctgcaccaccatggagaggaggcagaggtgaggcatgggactggagaggatggggcagctcttttaacaaccccatggaaaaggatctctggtcaactgcctttgaccttctgtgtgccctgttctagttcatgcctttgctgtgcattcagtttctttttttggagacagaatctcgctctggcccaggctggagtgcagtggtatgatcttggctcactgcagcctccacctcctgggttcaagccattctcctgcctcagcctcctgactagctgggattacaggcgcatgccaccacgtccagctaatttttgtatttttagtagagacggggtttcaccatgttagccaggatggtcttgatctcctgagcttgtgatccgcctgcctcggcctcccaaagtgctgggattacaggcgtggcattcagtttcttaggctcaaaatcttgatcctctctccgtattctggtcagttgctagaatttgccgatcttctgtcacctcctcatgatgcctcctgcrctgtggccttgcttccttggtctgctcactctccatgccctccattctccgcccccctgccattccatgtctctcggggctgctgtgctgatttcttctggcccagctcaggccatgccttgcctccagaagtttcccagcttccctctgctcacaraataaggttctggtctcagctgggcaagatattccttctaccttttgtccctgctgaccctgctgctctgcctccttcacttcctgctacaccactctgctggcttctccccacatacctcctgtgctcagggccctccaggactccactcgctccaggaaatgcctttgccttttgctccatgtcaggccatcaaagctctacccatccactgagaccaatttaattttccaggttcccttctctctctctcctgtccgccggtcgcaaattaaacatcagttatcacgttcctctgcatctgcctcatggcatggttacttgtatgcaagtcttatctttaccggcttgaggctccatggaaagcagggcagatttcacttatttatctttgtctttcctgtgataccttgcttggtgttttgggggcactgtgctgtatcctggctgcttctgacttcttgtccctgccccagagagcggggtattccctacaggagctgttccacctgacccgcagccaggtttcccagcagagagcactggcactgcatgtgttagcccaggtcatcagcagggtgagtggattgccagcctggtcctgcccacccttcccttcaccccacagcctcagacttccccatctcctgcccttttcactctggctcactagccagctatgtgcttttaacaacctaggatcataggggggcaaacgaaggattagggcaaagcctctagataacttcagcatcttcagcaaggttttaccctcctgccctcaggcccaggctggtgagtttggggaccrgctagcaggcagtgtcttaagcctccttttggatgctggtttcctcttcctactgcgcttctccttggatgacagagtggatggggtcattgcaaccgccatccgtgctcttcgggctctgctggtggctcctggagatgaggtaccacagggataggaatggggcttgggctgggaggtgccagggtccatattcctgttyctgggcatggccccattgctaaggctttgygggcaagatgtagaatgggatggcaggcgtctccctcatctcctaaagtccctaaagcccaggaggcttgcmtttatggtttttattggggagcatcctctctactcctggatccatttcctggccccttcagcattgccccccaactcccgttcctctggcaggagctcctcgacagcaccttctcttggtaccatggagctttgacgttccctctgatgcccagccaggaggacaaggaggatgaggacraggatgaagaatgcccagcaggaaaagcaaaaaggaaaagccctgaagaagaaagccggcctccacctgacctggcccgacatgatgtcatcaaggtaaagggacagcttctttcccatcccatggcccaggggacaagcacatgctggaaagaggggccatcaatgcccagggtccagctgcatttgtcagtgggtttctctctccaactcccaggggctcctggctaccagcctgctgcctcggctgygctacgtgctggaggtgacatacccaggacctgcggtggtccttgacatcctggctgtgctcatccgcctggcccggcattccctggaatcagccacargggtgagaaaaaagggagcagggaatgggcaaaaagcctagctgrgccttgtcttgacccacagcctcccttcctcccttttayctcctgtctcccataggtcctggagtgccctcggctgatagagactatagttcgagagttcttgcccaccagttggtctcctgtgggggcagggcctacccctagtctatacaaagtaccctgtgctactgccatgaaactacttcgtgtcctggcctcagctgggaggaatattgctgcccggctggtgagcaggacacagggcaagggatgggggaatgcatgggacagggttgggttgggagctaaacatggctcctgaactctgggtggccagctcttgccatcttcttcctctctgatccagttgcttagaaatgcaacagaaatcaccaggcatgaacctgtttactggagcctgtttaytggagcctggtgcatcatataggtatactgtggtctcatgatgtaataggaggtctccctgttccctagacccagatcagaagggcttcatgcacataggcattcatcatctatagccaagtagccctagagaaggtgcccagcaagccttgctataaagagggagggctgggtgtagtggctcaggcctgtaatcccagcactttgggaggccaaggcaggaggatcacttggggccaagagttcaggggccagcctggmcaacatagcaagactcygtctctacaaaaaacaaaaacaaaaaattagctagatgtggtagcacatgactgtagtctcagctactcggtaggctgaggtagaaggatcacttgagctgggaggtggaggctgcagtgggctggttgcaccaatcactgcactacagcctaggcaacagggcgagaccccgtctcaaaaatactactactggccaggtgcagtggctcacgcctgtaatcacaacactttgggagaccgaggtggtggatcacttgaggtcaggagttcgagaccagcctggccaatatggcaaaaccccacctctactaaaactacaaaaattagccaggtataatagtgtgcgcctgtagtcccagctacttgggaggctgaggcaggagaattgcttgaacccgggagatggagggtggagtgagccaagatcacaccactgcattccagcctgggtggcagagcaagattccatctaaaaacaaataatagggccgggcgcggtggctcacacctgtaatcccagcactttgggaggccaaggcaggtggatcatgaggtcaggagttcaagaccagcctgaccaagatggtgaaaccctgtctctactaaaaatacaaaaaattagccaggcgtggtggcatgcgcctgtaatcccggctactccagaggctgaggcagagaattgcttaaacctggaggggcagagattgcagtgagccgagattgcgccactgcactccagcctgggcgacagagcgagactccatctaaaaaaataataataataaaaataaaaaaataataggggctgggtgcggtggctcacacctgtaatcccaacgttttggaaggccgaggtgggtgaatcacgaggtcagcagttcgacaccagcctggccaacataatgaaaccccgtctctactaaaaatacaaaaattagtcgggcatggtggcgcatgcctgtagtcccagctactygggaggctgaggcaggagagtctcttgaacctgggagacagaagttgtggtgagccaagatcactccactgcactccagccagggcaacagagcaagactccatctcaaaataataataaataataaaaagtaaaataataaaattgaaattttaaataaataataagaaggaagggcagggtggatgaggtatgactttgtggcaccagaggggcctgggtcagggttgagttaagccactctctgtccagctgagagtagctggacttgagactcacagctgaccctgatccycagactgtgcccatttccagttgagcagctttgatctccggagccgcctgtgccgcatcatagctgaggctccccaagaactggccttgcccccagaggaagctgagatgctgagcaccgaggccctccgtctgtgggctgtggctgcctcctatggccagggcggttacctttacaggtgaggagaggcagggggtaggctccccctagacaccttcagttctgctcttctggccaaatcaaacacctcagccttgctcaaggtcccaagcttggaggaaggataagaatgagtgggagggcttctgccagatgtgaaaaggcttaggagtcaggcccagccagggaagagggggataaacctggcttaaccgtattctatgctcaaaatcattagccgggcactgtggctcatgcctgtaatcccagcactttgggatgccaaggtaggcgtatcacgaagtcaggagttcgagaccatcctggccaatatggtgaaaccccgtctctattaaaaatacaaaaattagccaggcgtggtggcacacacctgtaatcccaactactcggcaggctgaggcaggagaaccggtttaacctgggaggcagaggttgcagtgagccgagatcactccatcactccactgcactccagcctgggcaacagagaatgtctcaaaaaaaaaaaaaaaaaagcattggtatctgtgaaatcacatttaaattccctgttgggggcagccttgaaggacaacatcctttccattctttagggctgagccttccaagagtgccccactcttcctcctcatcctcctttatcaaactgcagatccctgggtcagggccatgacctgtgtctcatgtctccacttgctttcatacagtgaaaatcagtccctgttcttccctagggagctctacccagtgctgatgcgggccttgcaggtggtgccgcgggagctcagcacccacccacctcaacccctgtccatgcagcggatagcctcactgctcactctcctcacccagctaaccctggcagccggcagtacccctgctgaaaccatcaggtagtttatagccaggacccacaggacaggtggagggctcctccacagggctggggtggctggagtgtaaaggggcgtgaggcagccagatcctcactgtggcmccctttggcacttttgtagtgattctgctgaggccagcctctcggccaccccttccttagtcacttggacacaggtgtctgggctccagcctcttgttgagccgtgtctaaggcagaccttgaagttgctgtccagacctgagatgtggagagccgtgggcccagtgcccgttgcctgcctgttgttcctgggagcctactaccaggcctggagccagcaagtgagtgcctcctgccggctgtccaccaggcccccgcaccctgccttcagctacattccacccgttgctccctctctgtgtccatctctccactcctacttccccatttactatcttcccttttaattcctacccttcctcctctttctacctccatatccccgtggagcttcccaggagccatgttggtggggaccagagagcccacgcagcasctcagccttcctgtagcctgtgtgctccctctttatgccccctacacatcggggccttctctcccttcagaaggctcagcctgcagaagcctccaaatgtgctcytttgggctgttgggatggtggcattggcctgggtacacagggtctaggagaatgaatggctgggccatcagctcagtgaattccttggtccaccagccaagctcatgcccggaggattggctccaggacatgsagcgcctgtcagaggagctgctgctgccactgctgagtcagcccacactgggcagcctgtgggattcccttaggtatgtactgtgtttggtagctgggggaagcaggggaggaggcaatttctttccttgtgggattcctgggtccagctcccakgtccatcccagggtgcaggccctcggcccgagggaaacccgagtccctagcaggcagcagtggggtgggctctgaggagtgtgagcagcactgacctccacagccaggccccccgttagtcttaggtacagacccagaagctctttccagcttggcacacgccaggccagagtccccctcagactctccacttcacctacaggcactgctcccttctctgcaacccgctgtcctgtgtgccagcccttgaagctccccccagcctcgtgtcactgggctgctcgggaggctgcccccrtctcagtctggctggctcagcctcacccttcccattcctcactgccctcctctctcttcttaataccctggcccagatccacaaggggctgtgtggccaggtaagtgtggggtgcctgattaggggccaggcaaggggccaagatggcaggaatcagaaagaaagtgggagggtgggatgggcgcggtggctcacgcctgtaatcccagcagtttgggaggccgaggtgggcagatcacctgaggtcgggagttcgagaccagcctggccaacatggagaaaccccatctctactaaaaatacaaaattagccaggcatgatggcacatgcctgtaatcccagctactcgggaggctgaggcaggagaatcacttgaacccgggaggcggaggctgcggtgagctgagatcacaccattgcactgcagcctgggcaacaagagcgaaactccatctcaaaaaaaaccaaaaagaaagtgggagggtgtcccatggggaagggaggccttctgctggcactcatttccctgagtctggagaggggcagccacctggggagccctagaaggcatgagagtcaatttctagatctgaacaaaattgcttttcctcagctggctgccatattggctgccccgggactccagaattacttcctccagtgtgtggctcctggggctgccccacacctcacacctttctctgcatgggccctgcgccatgagtaccacctgcagtacctggcactcgctctggcccagaaagyggtaggtccccctgtctgacaggttctcctgtcatcccattatctccttcctgtttctgtggaacccagcctgcttctgccaggccatgcagctcccactttcctccagacaygccctggacctstgcccttcagcctcacttttatcctcttcctcacttctctctgccacgtccccttctcctgtactaggtagttccctgcttttctgtctgcaggcagcgctgcagccactgccagccacccatgctgccctctatcatggtatggccttggccctgctgagccggctgctgcccggaagtgagtacctcacccatgagctgctgctgagctgtgtattccggctggagttcctcccgtaagtgcttggttggtggcatcaactcagcccttttggacgctgctgcagttgttaacagagcagccctgaatttggagccaggagacctaaattctctttcttccaccgacgacacttaactcttccgagcttccattacctcattagtgaagtgaggatcaggctaaccacacccaagaatgattgtgagacttcagtgtgactgcatggctaaaaaaatggtatctaaatcagttacacacatgtaatagccatccgctactgagtgtttactctgtgtttgatactcccttatgtatttatctacattttaagtattttacttggaccatgagatagatactattattatccttattttactctgaggaaactgaggcccagagaagttatgtaaactcatgcctaggcagctggctgtagtgtgcatcctcttaactgctacacagcactgcgcgggaagtagttaagggagcagagaggcacaggtctggacctaggagcctccaggaagttccaaagagctggcacagcctccaagtgctgtggttccagccctcatttttggcttttgggtcccattacagggaaagaacatcagggggtccagaggcagccgacttctctgaccagctgtcgttaggaagcagcagrgtccctcggtgtgggcaagggactctgctggctcaggcctgccaggacctccccagcatccgcaactgctacctgactcattgctcgccagcccgagccagtctgctggcctcccaggctctgcaccgaggggagctacagcgagtcccaaccctgctactgcccatgcctacggagccgctgctgcccaccgactggcccttcctgccactgattsgcctctaccaccgggcttcagacaccccctcgggactctctcccacagacaccatgggcacagccatgcgggtcctgcagtgggtgctagttttggagagctggcgcccccaggctctctgggctgtgccccctgctgcccgcctggcacggctcatgtgtgtgttcctggtggacagtgagctgttccgggagtccccagtacagcatctggtggcagccctcctcgcccagctctgtcagcctcaagtcttgccaaacctcaacctggactgccgactccctggcctgacgtctttccctgacctctatgccaacttcctggatcattttgaggctgtctcttttggggaccacctctttggggccctggtcctcctgcccctgcagcgtcggttcagtgtcaccttgcgccttgccctctttggggaacacgtgggagccttgcgagctctgagcctgcctctgacccaggtactttctcagcccagcaggacctgcaagggtaccctgcactgggcctcgggggcagtcctgagccttgaggagctttggaagacctcagcttcctcatcttacctcttgggggctttgaggggattaagagaatcaatgaaaagggcttaacatgggctgggtgtggtggctcacgcctgtaattccatcactctgggaagctgaggtgggtggatcacttaaggtcaggagtttgagaccagcctgggcaacatagtgaaaccccatttctactaaaaatacaaaacttagctgggcgtggttgcgggtgcctgtagtcccagctactcaggaggctgaggcaggagaatcgcttsaacccgggaagcggaggctacagtgagccgagatcgcgccactgcaccccagcccagtgacagagcaagaccctgtctcaaaaaagaaaaaaggaaagggtttaacctggtgtctggcatatagtgggtattcattactattaataaggcatagctccttgcttatcagtgctacaatctagataagaagagatttactgaaaacctacatagttgtgaattattcagatgctaggtggtatcaggattcagagaagggaaagatcaaattgggctttgtggaagaagtggggattgacccaggcactgtaggttgggtagaatttgaattggtgaggaggtagaaaggcaggagattcctaacagaataacataagcaaaaggagcatgacaaagggcagaaggagggaggagagatttctgttgggaacttaaggctaaaaataagaagtgaagtctgagagggcctcaaatattaggctaaggacttaaatttataagctgtaaagagttactatgtttgccaggtgcggtggctcatgcctgtaatcccagcactttgggaggccgaggtgggcggatcatttgaggtcaagagtttgagaccagcctggccaacatggtgaaaccgtctctactaaaaaaaaatacaaaaaattagccgggtgtcgtggtgcatgcctgtaatcccagctactccggaggctgaggcaggagaatcgcttgaacccaggaggcagaggttgccatgagccgagatcataccactgcactccagcctgggcaacaagagtgaaactccatctcaaaaaagaaaaataaaaaagagttactgtgttatggctgcgtgaggtggctcatgcctgtaatccaacattttgggaggccaaggtgggaggattgcttgaggccaagagtttctgaccagcttgggcaagaaagctagacaccatctctacaaaaaattattsgaaaattagccagacctggtgatttgcccgtagacccagttactcaggagcctgaggcaggaggatcacttgagctcaggaggttgaggctgccagtgagctatgatcacaccactgcattccagacttggaaatagaacgagactctattaaaaaaagaagttattgtattttgttttttgtttttaagattttgggtttttgtttttgtttttgagacagagtctcgctctgttgctcaggctagagtgcagtggcctgatgatcttggttcactgcaacctctagctcccaggttcaagcgattctcctgcctcaacctcctgagtagctgggattacaggcacacagcaccatgcctggctaatttttttttttttttgagacggagtcttgctctgttgcccaggctggagtgcagtggcgcgctcggctcactgcaacctccgcccctgggttcaagcgactcccctgcttcagcctcccaagtagctgggactacaagcacccaccaccatgtccagctaatttttgtattttcggtagagatggggtttcaccatgttggccaggctggtcttgaattcctaatttcgtgtgatccgcctgcctcagcctcccaagtgctgagattacaggcgtggcccactacacatggccaatttcatgctttttaatggctgcttctcagttcccagttttccccaacatctgctctgtagtctttaaccctgatccttgtgctagaaggacagatgtttgtctaggacctgatctctgccctcatgatttggtttcatgtgatcgttatccacacacsttatgtatgtatatacattcctaccctccccctcagcacgtcatttcccctgtcacagttgcctgtgtccctggagtgttacacagtgcctcctgaagacaacctggccctccttcagctctacttccggaccctggttactggtgcgctccgcccacgttggtgccccgtgctctatgctgtggctgtggctcatgtcaatagcttcatcttctctcaggacccacagagctcagtaagttacatctccatcttcagaggaaggaagggagctagcaattgagctgcctctgggccagctggggaagaggtaagtgtcaagcaaggccagtggtgggtaccagccctcggctcagtgccacctctccctgttctgcttctaggatgaggtcaaagctgcccgcaggagtatgctgcagaaaacatggctgctggcagatgaggtagggtcagggccattaggagggtgggatattagaggatcttgggggacagagaccacaacaggatctcattacccacttcataagttttctttcctttctgcagggtctccggcagcacctcctgcactataagcttcccaattccacgctcccagagggctttgagctctattctcagttgccccctctgcgtcagcactacctccagagactgacttcaacagtgctccaaaatggggtatcagagacctaggatagttgatatagatggaaagatgggtacgttgtcctgtatccagcctttcaacagatgtctggccagacgaagaacattgtgtcctaatggtaggcaggagaccaaggagcagaaggcttgccttcctgggagcaggttgtttgagctgttttagagcagtgagccctaccattacatcctgatatctggggcttctgaaggtctgtgctgggagtgaagagtggcttagctatttacccgctctttggggacagggcaaactaaatgcatcccttcttacctaactcccaacccctgccctgggctgaggcatatgaatgctatagttgtgcattaaaataaatgttttttatctcctggaaatttgatctggactgatttcagccatgttagttcagggttagtatctgggggtgggttatcccaggtgaggagcaggactgctgtgagagagatggggaagaatcataagtgggaggtaaaaactttgtccacatctggagacaacaagaatgtggggcctgccaggcacagtggtacacacctgtagtcccaactacttgggaggctgaggcaggatgatcacttgattccaggaattcaattccagcctagccaacatagtgagaccccatgtctgtctgtctgtctgtcggtcggtctgtctatctatctatctatctatctatctatctatctatctatctatttctgagacagggtcttgctctgttgcccaggctggagtgcagtggcgtgatcatagctcactgcagcctcgacctcctgggctcaagccattctcccacctcagcctcctgagtggctgggaccacaggcaagtgccaccacgcctggctaattttttgtatttgtagagacggagtttcaccatgttgcccaggttggtcttgaattcctgagctcaagcaatccacccacctcagactcccaaagtgctaagattacaggcatgagccgctacacttggcctattttggtagtttctacattgttctttggtctgaattctaaactttaggctttcttagactgtcttttgctgtgtggattacttattgtgtttgcaagtaaccagagtcagagcagtgtgccaaggcctagccctgtcagtaggtagagagaacccagtcttcataaatggagctgctgaacacagaattatccaataggtttttttgggtttttttttttttttttttgacacgaagtcttgctctgttgcccaggctggagtgcagtggggcaatctcagctcaccacaacctccccctccctagttcaagccattctcctgcctcagcctcccaagtagctgggattacaggcgcgtgccaccacgcctggctaatttttgtatttttagtagagatggggttttgccatgttggccaggctggtcttgaactcgaactcctgacctcatgatccgcccacctcagccttcaaaagtgctggtattacaggcatgagccactgggcccagcctttttttcttttttttttttgagacagagtcttactctgtagcccaagccagagtgtagtggcatgatcttggctcactgcaacctccgtttctgaggctcaagtgattctcatgcctcagcctcccgagtagcaggggctacaggcatgcaccaccacacccggctagttttttgtatttttattagaagcggtgttttgccatgttgcccagggtggtctcagactcctaagctcaggcaatccgcccacctcagcctcctaaagtgctgggattataagtgtgagccacagcatgtggccccaataggttttattaagcaactactgtatcagcaaataccaatgattctcaaactttgtgacaaaaatcatctggaggatattttaaaacagatcactgggtcctaccaccagaagctgctgattcagtacatctggggtgaaacccaagaatctgcatttctaacaagttcccaggtaatactgatgctgatgttcagaacaaaccacacaaccacaatttgaagagcagtggcttaaagagactttgcaaggtaaattctgtgatctcatagtgtgatatctagtgttaagtagggcatagagaccagggtttttttgttttttgttttttttgagatggagtctcactctgtcacccaggctggagtgtagtggtgcaatctcggctcactgcaacctctgccttccaggttcaagcaattctctgcctcagcctcccaagtagctgggattacaggcacctgccaccacgcacggctaatttttgtatttttagtagagacggggtttcaccatcttagccaggctggtcttgaactcctgaccttgtgatccaccccacccccaccgtccccttggcctcccaaagtgctgggattacaggtgtaagccaccacgcctggctgagaccagactttttacaaaatcactgttctgtttacaccttgaattagactttaccaagtagctaactactataacttctcttttgaagtattttgtattaaacataggtctcagactttcaagttaggattttttttttttttttttttttgagatggggctttgctcttgttgcccaggctggagtgcaatggtgcgatctcgtctctgcaacctctgcctcccaggttcaagccattctcctgcctcagcctccagagtagctgggattacaggcgtgcgctaccacgtgtgtctgattttgtatttttagtagagacgggattttgccatgatggtctagctagtctcgaactcctgacctcaggtgatctgcccgcctcagcctcccaaagtgctaggattacaggcatgaaccaccgcacccggcaaatgatcatttaagcaaatgatcgaagactcaagacacaaaactacctgaagggagtggctcccacatttgtagggtaccttacagagcaatttcccttcatatgattttgcaggtggtggggaaactctcagggcagttgtggcctgtgctacatcacccattgaccagaggtgccagtactagtgctcaagatcaatcgatcgatcggtctacctacctatcatctattgaccttcagtgctactaaaaacactcggatcttctaacgtctggtccagtctttcaccccatcacagtgagaggctgtgcacaggggtaacacaggcaacggaattatatgaggcaaacacagagatccaggtttctgggagtagcaatgaggttcagccttgcagtcacaaaggcaccactaaaaggcacaagtaatggcaggtaatgaggccttacttggagcagtttagagtacttcccacgtgtggtgacgcatgccacacactcaccaccaccaccactgccacaaatgaagtgcacactccactgctcctgtcctcaggaacctggaagcccccacctggtgtccgaggtgtggctcccactttaagcgtggggcacctcctctccggcctcaaacctacccgagctcccagcaggctgcggcacatctgacggctggaaactagaacccctgggtggggactccttaaggctcctcccggaagcgtagggacctcgctgcccacacgcccctccctttcctcctctggcgtcctggggtctgaggtgggcgtggccagaccagctttaggtccggggagtgtctcgccagcggcagcacacccctgtaagtggtggccagggctgccgtggcaaaatgagctgtcaactttaggttgacaggggtgtggccgcgaccgcaagggcttttgttgccgggtggacccaacagggatgggctgctggggacagctgctggtgtggttcggagccgcgggtaagtgctatctggcggtcaggggaccgtccagcctgaggcactttcctaggcttgggggtggccggtcaacaggccaggtgtcagtggttcctccagaggcctcgaactctcacagccaaatttctccggtccgtgcttctggagtgcgggccgagaagcgccaagtgcgtgcgaatcccagagtctggatcacgcagcttgggaaggaggaacattctttggggtctcagcaccgccttggggcggggccaccaatctaagttgaggaaagcattggggaggctgcaggaccaaattcattgcggcccctaagttattcactgggaaaggcgctcgaggagagaaactggcagacctatcagcgcgcacccgcggggcttctgcgaccggagtcgggtagtggcttccaggctgagagcgcggctgggccgggtgacgggtgtggccgcgaccgcaagggcagctgttgcggggttctctctttctttcatatcctatttccacccgccttaacgtcctgcgccttctcccaacacctttcaggcgccattctctgctctagcccggggtcccaggagacttttctgcggtcctcgcccctgccgctggcaagtcccagcccccgggacccgaaagtcagcgccccgcctagtatcttggagccagcctccccgctgaattctccgggtgagctttagacgcctccttcctctttcgctcaccataccagacccctctggcccagctaggggctcgacgacccttgcctcgctccttgctctcaggcaccgaggggtcttggctgttttctacctgcggggccagcggccggcatgggcccacacagacacaatgtgacggggcgtacgcggggaccagcgtggtggtgaccgtgggggccgccgggcagctgagaggcgtgcagctgtggcgcgtgccgggccctggccagtatctgtaagtgcacggcggaggtagggtggacagtgacctgctagttggaggtttcaccctcagggtaacgaagtccacgtgcgcaccgacttgcgtcttggactattccgcggggaggtccaccttgagtgcccttcaaggtggcagtagtcgccaccgagttagcccttacccggaacctcttacaccgagcggaaggcccccaaccagggcggcgccaaggggtgcttgagcctccccacatttccacgaaccctcctgaaataagtgtaatatctgatttttcggtgtgcaaacctacccttcccatcccgtcagagtcgattgcagcctccaagtccctcagataaaaaataattctggagcctcctctgtcgccaacttctgcccggagcggccggcctgagcaccgaaggccggggactcaccgtccgttccccgcaggatctcagcctacggagccgcgggcggcaaaggcgccaagaaccacctgtcgcgggcgcatggcgtcttcgtctcagcaatcttctccctcggtctcggggagtcgctgtacatcctggtggggcagcagggagaggacgcctgtcccggagtgagcgcagccagtggggatggggcggcgccggcgccgggggcgagggctgcctgggggccgggggagcgtgctttcctcggtgccgggtcaccagcacagcgaggggaggctcccgggccccgccgattccctcccccgctgcccgcagggtagcccggagagccagctcgtctgcctcggggagtctcgagccgttgaagagcacgcggcgatggatgggagcgaaggggtcccggggtcgcggcgctgggcgggaggtggcgggggtggcgggggcgccacctacgttttccgggtacgtgctcccttcggcgctcagcgttggggtcccaatcctctccccaggggcgctcacgcaccggctctccgtccgtcccttggggtccccctatccctgcgctgggctgggctggcctgggctgggctgggggcccctgcccttatccaggccccctgggcgggagccctctcccagtggcagtgcccctggacagctggagggcgcttcctggaacacgccgctggccccacaggtgcgcgctggcgagctggaaccgttgctggtggcggccggaggcggcggtcgggcctacctgaggccgcgggaccgaggccggactcaggcctcccccgagaaactggagaaccgctcggaggcgcccgggagcggcgggagaggcggggcggcaggtgagggcgcgggccgcggggagaggcgggcgtgctccccgtgtggctgccaaccttcctgctgtcgctctgcaggtggtgggggcggctggacgtcgcgggctccctctccgcaggccggccgctcactgcaggagggggcggagggcggccagggctgctccgaggcttgggcgacccttggctgggccgcggccggcggcttcgggggcggcggcggggcctgcactgcgggcggaggcggcggcgg

SEQ ID NO: 8927 - DNA, 54469 bp, Homo sapiens
ccgtaagattttattaccatatttttactgaacgttttctatgtttaggtacacaaatacttactattgtgttacaatcgcctacataatttagcatggtaacatgctgtatgggtttgtagcctaaaagcaataggctatacgatacagcctaggtgtgtagcaggccataccatctagtttctgtaagtacactctatgatgcatttctcagaaygtgtatctggtgttaagtgacacataactgtattttgagattcatccatgtattacagttgcatgtatcaatagttatcatttttaattttttttaaactttccagttttgaaggtatgccctcctgctgtatctcaataaattacaattgttccacgggataaaaaagcytcacatcaagagggactttggggtagtagtaccccctggagatacaataaatgctgcttggggatgaaatgatgaggcatagatcctagttttctaagaatcctccaaaagagtactatggtaagcaaaacaatggccccaaaagatgtctaagtactaatccctggaatctgcacatgtgttacatgtcaaagggattttgtgggtgcaattaaattaaggatcttgagatgattatcctagattatccaggtgagcccagtgtaatcacaagggtccttgtaagtgaaagactgaggcaggaatgtcacagtcagaggagatttgaagatgttgtgatgttgcttttgaagatgaaggaaggggccaatgggtcaaggaacgcaaatggtttctagaagctggaaaaggcaagaaacttgattctcctgtcaagcctccagaaggaatgcagccctgcctacacctttatttcagtccagtgaaattattttcagacgttgacctccagaacttaatcartttgtgtagttttacactacatttgtgataactttgtgaaataaaatttatgagaggtcattggttgactgagctcctgcactaggccccaacagaccagaccaaactagaatggagtcacttgtgctaggrgccacataaccaaactgaacttagaaatgggtcagttttccaaaaaacaggaaattcatagcaaccaacctaatggggcccagtcaacttgatcaggcatgataaggaaatcccctctgcttgaagtcactttgaaacaaccaatctgcttattgttccttgttccttatttctgcttacttcagccttttctgcctgtaaagcccatcctctctgctcagctcattgaagagcctttctatttcatagatgggatgctgcctgattcatgaagtgccaacaaaagccaattagatctttgaaatcaatttgttgaaattttgttccttaacaatttgttatagaagcaataggaaactaaaacaataaccaatcttattaaaaacaacaacaacactgatgagtctgactgcttctatttcttcttcctgtttgtgacatgtggtcttacaggagtagaagcacrttggctttggatgacctgtcctagctctgttcctctgagcttggttatctttttttttttttttttttttttgagacagggtctcactctgtyacccaggctggagtgcagtggcaygctcttagctcactgcaacctctgcctcccaggatcaagtgattattgtgcctcagcctcccgagcagctgggaccacaggtgcatgccaccatgccccatgcctggctaattttttttttttttgtatttttagtagagacaggatttcaccatgttggccaggctggtctcaaacttttgtcctcaagtgatctgcccgccttttcctcccaaagagctggaattacaggcatgrgccaccgcgtcctcagttctcatcttaaagaagcaatgatattwacttcgggggctgtggaaaggactgaagagatatacacaaagcacctaccacacagtaggcttttaatcccacctcacscctgattccaagggattaaatcctggctgctagtggcctgctgtgtaattttagctaaactgcctcctctccttcaatctgttccacaaggttaaagggagatacttaagtccctgagagtgtttaattagagtttgcaatgtgactggatrctgttggttgaaaagtgttatttagaggcaaagtgctgttatttttgagcagataattgtttcctgtcctaagttgtttaaccttgtaccgagttcccttctctgagataatgacattgcttgagagggtaaagaaatacttcacctaggtgttgtgagttttagttaattaacgcttttgaaacctacacaagcctatcataaaaggctaaacgttgattatttacctttcatatrgttgtcacttccrgtatcttaatactatctagtaaaaattggcattgcagcattggatcaggtaatatttactttataatcgtgttgggggctctaacttacractatgcaaaaagctttgtgctttttacaagaaaggggttagggaagtattgatagctattgtttttctaccatggcacaayttataacagatttacatttcaaatcctcatctcatataaaaccatacaaactgactaaaaaagctaaaattrcgaaatactgagagaggtattttacataatggttaacaagtttttaaagctagcatgtatcaagacattatgtgtcaggcactgttctaaacctcatgcrtgcattaaagctaaagtaggcataggctgggtgcggtggcttacgcctgtaattccagcactttgggaggccgaggcaggaggattgcttgagcgcaggaggtcaaggccagcttggcaaacaaagtgagaccccacctctaaaaaaattaaaaaaaaaattagctaggtgcagtggcaggaacctgtagtcctagctacttgggaagttgaggtaggaggatcacttgagcactggaggttgaagctgcagtaagctacgatcatggcactgcactgcagcctgggcgacagaggaagaccctgtctcaaaaataaataaataaataaataagttcaagtgattctcgtgcctcagcctcccaagtagttgggattacaggcacctgtcaccatgcccggctagtttttgcatttttagtagagacggggtctcatcrtgttggccaggctggtcttgaactcctggcctcaaaggatccgcccacctcagcctcccaaagtgctgggattataggcatgagccaccacgcccggcctacaaatatgtttaaaacatagaacatgccctaacaaaggtaatcatctttttatacgtttaagtgccatgtatatttgtatatcttttttctcttaattcatgtcctttgttctttggggtcatttttttttttattgatttgagtgatctttattctaaaatacttggaaaaatacaagaaagcatgacaaggggtcctgattaaattctcccctgccttcaccagcacattgccaggttttgttgattactcaaaaatgtcttatgtcttgaatacatcaacttgtttaatctctgccaccaccatgctggttcctttcagctttcccaataaacaatgttattttccatcctcaggtctttgcacacatgtcctctcagcccagaacgctctgccccgactctctgcgtcgttggtatgcgtccttcaggctccagttgaaatgcatggccttggagagcccttccctgcctatctgatctcgagaaagattttccttcctttcttatattctttcttccagcagtctcttccgatcattcatagcacttatcaccatttataataatatacaatgtgttaaatcctttgcactcagttaatgaatatttggaaagtgattagaatagcatcaggtgcattgtgctacgtaagtgttgatttaaacagcaactcacatactcttcacaacaactctatgtggtagtgctattaatacccccattttacagatgaacaaactaaggaacagagaagttaagcaacttctctaagatagcacagtagtgagcagcagarcctaactacaaactcagtctggcaccgaagtccataacctaactgttctctatatttccttttgattccaggacctrcatggtactgtgtgcctaacaggtacattcaatamatatttgtttaataaatgaaggaacagttctaacgggaaaataaaagttacctgtaatcctaccacatgttttgagattcattctatagatatttcttctaatatgaaaatagacttttaatcaaaatcttaactttttgaaatcattttgaggagcatagattaggtatcaatgtgcaatatatttaaccttgtattcattattttaaaaaattataattacaagtcaatgttcttcctttaggcagggggaggagggcggaggagagaagcataagtctttggttaagggaggaagggttttcctaaaatattctggcccttcttatctccaggaggaggttgcaaaacttaagtttgaaagtttagggaagggcagagacgtttcagggacaagattaaaaacaaattatacttattcgaggctgggtatggtggctcatgcctgtaatcacatcactttgggaggctgaggaggaggatcgcttgaacccaggagttcgagatgagcctgggcaacctagcatgatcctgtctctacaaaaaaaaaaaaaaaaraaaaaaagaaaaaaaaaattagccaggtgtggtggtatatgcctgtggtcccagctactcgggaggctgagacaggaggattgcttgaacccaggaggtagaggctgtggtgagccataatcatgccactgtactccagcctgggacacaacaagactctatctttacaaaataaataaataaataaaatttaaaaattatacttctttggctgggtgtggtggctcatgcctgtaatcccagcactttgggaggcygaggcaggtgggttatgaggtcaagagatcaagaccatcctggccaacatggtgaaatgctgcctctactaaaaatacaaaaattagctgggcttggtggcacgtgcctgtastcccagctactcgggaggctgaggtgggagatggygtgaacctgggwggcggatgttgcagtgagccaagattgcrccactgtactccagcctggtgacagagtgagactctctctcaaaaaaaaaaaaaaaaaaaaaaaaagacattatacttctttaaatcaatgtgttttaaagtttatcactggaattactttcagaaaattaattggtaagagttttctaaatgttcccaaagcacagcaaaggtccgtggtttacagcacacactaggctacatcaatgggaaaattggataaaaagacagggctaacctcaccaaagagcaaggaaaaccagcaaagttttctggtaaaacacaggcaggaagtttctccaaatactgctttactcgcacttttaaraggctttcctcccttccccccaacttctaaaatagtttcaggataacaaatttgtaacagctggtcatcaaattcatgcgcactcccaaaaggacgacagccctaagactgactataaataatacatccatctggctcttgtaggagtattggattgacttgttgcccatcacagtgtctcccttctgccaccccacaatgacagggtgaagctagacagcctcactgaatggtatatggttacagttgaggcactgcattgtgggtaccccacatttctgagataaagttagctgatagaattaccagagcataatcaaatgcagtcattacagagggagcctatatcatgttacctttgaaaatattttaatctagaaacatcatacactgtatayaaaattcatgaatccctgacgcctgggcgtggccttggacatattattctgagccatctcctattttctttcatatgtaaatgktattcttgagctaggaataggagagaaagagaaaattgaaacagccagaccaagtgtttttgaatgctcttaaaagacaaaaaaaaaaaaaaagacaaaagtttgtatcacatcagaagttccctacrtgctcttcaaagctgattgcttgcagttaaaagaacccagaagaagcaggcacrccatgattttgaagctccktttttgttctrttattcaactgcagtcaacttccaactgttgaaaaaaagatgatttagaattaaagggttgcttgtctgtgtcgcaaggcccttcaacttgttcacctgtgatatccagagactccaagatgttggtgagtttctattgcaattgccatattgccatggttttgcmctttgtgttgactgtagcattgtgctgtttgaagacagagcagcatactgctttgtgtagtaaaaattgayggataatgtacttaaagcttttagatgtacactattcacattctaaatgacagatacaaaaaggaataatcagaatttagattgttgaatcattgcctccaacagccaactcttaccgtgacaaagtcagtagggctgatcttagaagtgtaggacttgtgagtgttacgtggttgtrctaactggtaccttagtggaggggcagataaggtaagtagaaacaatgcctgctttctcctccatgtctgggtcctacacatagtccccagtttgcctggtttgtagaggtttaaacacagaacagagggtgttgggaatgagacaaagagattgtcacaggaacatggacccacggttttcctttggtgatgaaaacaatcctgtcaatatggaaaactgtgttatcacaaaatgggcttagcgaatagaagaaatgtcacctaccagccggaaacaacaattcgctgaccatctttggcctcttgccactaaggagttttggttttcccatctgtagaaattcttaattgagtccatcagattcccagtcatcctagccatggttaccttcttctctaagttggcaggttagtgagcttaggctagcacttcagcatcaaatttagacttcatrataaagtaaatcacacagggaatagctgtcagcatggtgaccaccttgttgtycattcctactcagggactggcctgaagtgttttcacagcctgggtcactgtgatgtcctggccctgtttgctcaaagtgttcatctcagagtgacttgtgaggtattgctgagcacataatggtcaagatagctgcataagcaggcgtggccccaaatgtagtcacctgamttcagaaaatcaatttggattctacagaaaggttctgttggattctgagyggaacctctttggatrtgcctttggatttcaagattgagccaagtgttgacatgggaagatgctccagttcctccagttatctcaaagaagctcattaccttgctaagggtatggaytgtccttttccagaaaaaatcctcttgatattttgcatgcacacatgcaaaaaataataacaacagaagctgttttcctgtatgtaatgagagtgttcctcaggtttctggtttatcttaatggtatctcactccttttcttttcctttctttctttctttgtctgtgtgtgtgtttgtgtgtgtgtgtttatgtgtgtgtgagagagagagagagagacagggtcttgctctgtcacccaggctggagtgcagtggcatgatctctgctcactgcagccttgacctcctgggctcaactgatcctccatctcagcctcccaagttgctgggactacaggcatataccaccactgctggctaatttttaattttttttttctttgtagagacagggtcttgctttgttgcccaagctgttctcaaactcctgtcctcaaggaatccttctgttttggcatcccaaagtgctgagattacaggcatgagccactgtgcctggactttttttctttttcttragagccagagcaaaattcaaattttatcagttttaatkaattatattttaaaagtgggaatttggccaacaaagtatctttcctttctatacaagaagggtatggmgtttggcaatgagctcctgaaaatgtaaagaaagcatgaggataactttgggactgatacttgggtcattaaaagtcttgcaaaactagaatttgttttcttcttcttccattctctctgtaggcatttaaacatactctcaggccaggcacagtggctcatgtctgtaatcccagcactttgggaggctgaggcaggtggattacttgtgctcaggagttcgagaccgtcctgaataacatggtgaaactccatctctaaaaaaaaaattaaaaattagtcaggtgtggtggtgtgcgcctgtagtcccagctactcaggaggctaagggaggaagatcagttgagccatggtgttgtcactacactccagcctgggtgatagagtgagaccttgtctaaaaaaaaaaaaaaaaagatactctgtttttttttgttctaaaaaattagacaatattttgtttaaacttgcttagtgatttatttatttatttattattttttatttttttgagacagagtcttgctgttgctcaggctggagtacagcggcatgatctcggctcactgcaacctctgcctcccgggttcaagtgattctcctgcctcagcctcccaagtagctgggactatagggatgcaccaccatgcccaactaatttttgtatttttagtagaaatgggttttgccacattggccaggctggtcttgaactactgagctcaagtgatccacctgcctcagcctcccaaagtgctgggattacaggcatgagccacctcatccagcctgatttttttttttaccttcaaatatatttatttacagattgagttttaaaattgtcttaaagttcttgtagagattatgtcttttttgttttgagacggagtttcactctrtcgccaggctggagtgcagtggcgcgatcttggctcactgcaacctctgcctcccgggttcaagtgattctcctgcctcagcctcctgactagctgggactacaggtgtgcgccaccacgcccagctaattttttgtatttttagtagagacggggtttcaccatgttggccaggatggcctccatctcttgacctcgtgatccacctgcctcggcckcccaaagtgctgggattacaggcatgagccaccttgcttggacgagattatgttttacatatgcaattccttcctttatcctttaaatatccccacggataaggagtgcctcacctctggacctgggcattcttcagtattccaatactgagactggttttgttttttcatttttcaacaacaatgtatggaattcttactctgtgccaagccctatgccgagtactttagtgccttatttcaggtattgctagtcctatttctcagaaaaggcaaccgagactcacaagagttaaataacttgccagatgacacacagctagaaagcagagaagccagagtattcagatccatgcctctccacttctgctttcccactgtgcctttcactttcttgggaagccttttcccttgttcttcaacttggattagaatagcctgtaattcttctcatgaagacatgcctcactttatactaaatgttaccctctttaaatgatttaaaataatcctgcagtgatattctcctttctctccacctctctaaacagagcatctgtttaatttkggttctctaacattggcatgtgtctataaattaagatttttgtacaatgtctcacagatgcttttaccacatttagtttgtactcctttttttcttggaygacttagttcaaaaaaatttattttggtcaaacatatgattttagcttttgaggttacctaataaatcaccagcttatagactcataaaaatttggttggagagagaacctcagagatctgctcacccaacataatcattgtatgggcaagggaggctgccagcagctgtggtcaccctgggctggtgctccaggggagagggaatctcagttactctacytaaaacttgagattactacttctgaggaatcatcccaaaagttcacaaatcaggaagagatatctgaatgggtgctttaaattttgtttaaaaaagagaaaataggactcataccaaatggcagctggttttactccagccattttcaggaatatccccaaagagtctggtaccaccagaccgccgcctgggctgtggtggctggcaggggttgttcagggaaggcagcctctctgactaggttcctgcctgagtccaaattagaaaagggacatttggctgcagactggcctccaggtgtttgaaagcctatttgtcccttggtcacatttcttttttttttctttttttgagacggggtctctctctgtcacctaggctggagtgcagtggcttgatctcggctcactgcaacctctgcctcccaggttcaagcgatgctcctgcctcagcctcccaagtagctgggactacaggtgcttgccactacacctgactaactttttgtatttttagtacagatgggggtttcgccatgttggccaggctggtctcgaactcctgacctcaggtgatccgcttgcctcagcctcccaaagtgctgggattacaggtgtgaggcaccgtgcccggccccttggtcatatttctgtaagtccttctctgcccttctcagacatgcaagggaaagtcaggagaaggggaccagaaggtctggagggacaggtgaaaaggcaccagaatggagaaggtgggtgttacatgtgagctaggccagcttccatcgccacatggcttagaagactgtcagtgacacgtggacaaggcgtggctctggtagttaaaaaaaaaatcaggccgggcgcggtggctcacgcctgtaatcccagcactttgggaggccaaggcgggtggatcacgaggtcaggagatgaagaccatcctggctaatatggtgaaaccccatctctactaaaaatacaaaaaattagctgggcgtggtggcgggcacctgtagtcccggctgctcgggaggctgaggcaggagaatggggtgaacctgggaggtggagcttgcagtgagccgagattgtgtcaccgcactccagcctgggcgacagagcgagactccgtctcaaaaaaaaaaaaagaaaaaagaaaaaaaatcaatcctttacttgcatcccaagttcctactttgggagaataaactccaaatactatctcctaagggaggttgataagtatttggccattaactgtagactaatgtcatcctcaaaatttaataaatgaaaaatgtaacactctctttttttttttyccccattccttgctgttattctactgattgtgttaacatagtgtggattgaggttgggtcagcttgtggttgagcttcctgccttcctgtttgtaactgaatttttcaaattaaaaaaacatccactttgttctggcatagttgtatayattattccaatatatttaacaatgaggctgttctcatttcacacagaatagcacacagtgaagacagtcagtgagaaccagagctattgttacaactgacagcagccagctcaggaggcagaggacgagagcgatcgggctgcacacacatggatgaggctgatttttcagaacacacgacttataagcaggaggatttgccttatgatggggacctctctcagattaagataggcaatgattacagttttacctcaaaaaaggatggccttgaagtcttaaatcaaattattttcatagcagatgaccctcaagagaaggctatgcatartgagacttgtggaaatacagctgtgaccatacccctgggtaaaattactgaaaatgctgccaacaaaaaagacgagaaagagaaacaatgcactgcagctcttcatattccagcaaatgaaggagacgcttctaagtcaagcatttctgatattttacttcatcatctttccaaagagccattcttaagaggtcaaggcattgattgtgaaaccctcccagagatctcaaatgccgacagttttgaagaggaagctattattaaaagtattatttcatgttataataagaattcttggccaaaagaacaaaccccagaactcactgaccaactcaacccgaaaagggatggtgaaaacagcaataagcctggttctgccaccacgacagaggaaaatacctctgatttagaagggccagtggctgctggagatagcagccatcaagaaaatgtgaatgttctaactaaaaccaagggtccaggtgataaacaaaaaagttatcaagggcagtcaccccagaaacagcagactgaaaaagcaaattcaggcaacacgttcaaatacggccaaggtcaagttcattaccagctccctgatttctctaagattgctcccaaagtgaaaattcctaaaaataagataattaataaaccacttgcaatagctaaacaagccagcttttcttccaagtcgagagataaacccactcttgtgcaagatagtctagaaaccacgcctgagtcaaactgtgttgaaaaacaacatcaagagcagaaagggaaaatcactgaaccttcacaacaaatccaggtaaatgaaacagtctcctgtaaacacattaattgggaccactgcttatctctttcagtgtgggtttttggagggtgaatagagcttggttctagttccaaagtttcattcagcaccctgggtcaccctggatgagtgacgtggccactccgactctcagtgtcctcaygagaagcatcacaggctacactgacaaaaacatataagagaataaaatccaaattccgcaagccggaatttggctctcctcacttaaacttagctgccttccttcaggagtcatctgcagttacctggctggtccagaacctcttcccaggccctgagctctctgagttcctgccttgcgtggcacatcccatcttgacttgccaaagacctgcttgttttcatggcctccttcaattcccccttgggccacataacttttcaggtctcctaagtcacaaccttttccacacttgtttagtcgttccatcagagtgtgtatctcagcctgctttggatcttaatagcagaagcatctgcttcctccactagattctaaggctctggagggcagcaaccttatcttcgcctttccattgcctaatttcccccagaggcctggcctcgtgtcttaacgtacgttatgcccttagttattmatgctaagtccaatggaattaagatcgttagtaatggatttcaagcttgttatcttggtaatcatttggtacaaaactttgttaatgcttaatttatgctattccccctttcccttacgccaacttctcacactcccccaccaacttctcaacatgctgaggctcaggatctcattgatgtttgaggcccaatagtaaggtaaatccatmttaataatcaaaatatacattttagttcttgggcactttgcctagagtgcatgatctttcctttgagccttatatgaaggtgtcctggactgaaccacactgcctgtttccatttccattctctctctttttctgtaacctaaccttggaagtgatttttctctctctctcttttttttaatttccatttccattttcacacttcagctcccctctctttcaactgaatgcctggggagtttgagcagaaccccctacatccaaacctgagccaacagcccacctggccatgactgggatgctctctaggtctgagagaaacctacacccccgtggtattgggaagtgtcggggttccttgttctgcttgcaggagaacatcctcattgtgtccagttctcagtgccccgtggttagcaggagcagatggatatcaggctcttctccctctggtatgggggttckaggtcaggtatctgattttttccagttctgtcaattcagattggagaattggacactgcaggtttcatatccgtcatatagttgagatgtctagaaagaccatagtccattttgaccarctctccagcactagcrtgtttctgagctttatgtgttgggaacaaaggaaagaccccacaaggtgaatcactctggaatttaaactgttcaattagccagtggtgagtagaaaaccatcactatcttgacacacagtktggaacttaatgcatcctctgttattctctagagtgtggctaccatgagttttgtgttagtgacagcaccagcaacagagctggtgacaagaccagccatggtccctacccttgtgaaacttatagtctagttttaggagaaatgtttcagcatttcacataccagtatcaaacacaatggtgataacaggtaacatgtattgttacatgcttaccacctgcctgatactatggtagatatttaacatttcatcctcataacaaccccctgaggcaggttcacttactatccccattttcctgccaaagaattgcaggcttataagtgatgagacaattacttgggttgcccagcaagtaagtgtcagagtggaattcaaccttggcatcatggctccggctcttgactgcaaacctgggctccctctatgatgacagaacatgttgggtcattctgaacggtggtgtcattgatcaatatcracagtaacgttttcttaccctttaattgtgcagatggagcccatagtacatatccaccaagaacttctcacaggtactaatgttttaaaacttctttgagatatatatatatgttttgtttttgtctttttgagacagggtctcactctgtcacccaggctggagtgcagcagcacaatcttggttcattgcagccttgacctctggggctcaaatgatcctcccacctcatcctcccgagtagctgggattacaggtgcatgccaccacmcctagataattttttttttttgtagatgtggggtctcactttgttgctgaggatggtcttgaactcctggcttcaagtgatccccccgctttggcctcccaaagtgctgggattacaggtgtgagccactgtgcctggcctagataaatattttgaaaaaaattaaattttaaaaatagtaagtggtggtgactgcaacagctttctgttttcagtacttaataaaactgtgataagttgagatgaatggtagcccaaatgtgttctttcttgtataggaatagaatctgaggcaagtstctctaagttgtcaccaacctctcagaaaggcacttcctcaagttcttcttacatatttcaaaagatatcccaagggaaacagatgtgtcagaagttgaaagaacagactgatcaactgaagactaaagtaatacttttaaagcttattataaacaatataagtaaccaaattcayacatgagaaaccatgccattaatgagagattgtaattttttcactgcaggtacaagaattttccaaaagaataaaacaggactctccttaccatttgcaagacaagaagctggtaatgaattttatcccgtttttaaaatcttgattagagaatatggcttggataaagataaataactttatagtgccatgttttctctacagtggtgggagtggaaatgttttgctaaagattaaaccatctttgtttatgggggctaaaagagcttagaattctgtttctctatctatttagccctctttccttctcaggggatctattacttatggctattactccttgccaggttactcataattaatctgacaccacgggaggttcaagagaagaacccataatcagttataaagrgtgggcctgtccgcagttgatgggtactggtgaattcaggttataaraattgccattacctggaaattaaatatgactttgaatactcayaaaatcaaccttgaagcaatgtttttcaggtcaaaatcttttcctttcatatccttgctagttgctgcatttaatcaaaccattaatttatgtcatcaccacagcagtcatgttgtcagtgccaggatcawkggaagggggtggagcaatggggtgaagggtaaggctgggagaaccagaagtatgctgacctgacattgaagatgtagttgaggccattggctcatcaacaagggataaggtcagaagttctgaygtaggcacaagcaaggtttagggagggctgtgcttcagaaacctagcagcatggacaaaaaccaggggacccaaatgctaaaagacacagttgattattctctcctttatcctgttaattaaatcattcattcaacaaacatttatcaggcactttctatgtcccagaccctgtaccaggcactaggaattcaagatgaataaacaattccttttccaagtggtttatagtctcttaggaacagtggactggtaaacaggcagctaaaatgcagctggagaaatgttacagagaatgctaatggcagcctagaagaggctcacctttgccagtgaggggacatttggaaggcttcctggaagtcacttctgagctgggtgttgcagaaggaatagggatgagcttggcaggagaccaaggggtattctagaaaaagaaaacagcaggtgcaatggcacaggggtgaggaagtgctgccagtgtgaggagctgtgggcactgtgatttaccatacrgcacttgggagcrcgtggtgacatgggggtgggggaggagacaggggaggtggacaggggtacttcatgaaggcctttaagccatgcctgaggctgagtaattgggcagcattgaaggtttttttttttgtttttttttttttgagacacggtctcattctgtcactcatgctagagtgcagtggtgtgatctcagctcactgcaacttccactccccaagttcaagtgattctcctgcctcagcctcccaagtagctggagttacagrtgtgcaccaccgtgcctggctaatttttgtatttttagtagagacggggtttcaccatgttggctgggctggtcttgaactcctgacttcagggtgatccacctgcctcggtctcccaaagtgctgggattacaggcatgagccgctgcacctggctgcattgaaggttttcaagctgacaaatgggaagcaccatgggggcaaggctgaaggcacagagattggttcggaagccagaatccaggtaacaagtcaggagggcctgaacgaaggctggcaatgaggctggagatggggacaaatctgggggtttagggaaatggtggcagatggaaagggctgaagagaggaagggaagaggcytggatgagctccagatttctggcttgggtaaccaaggtcaggaataaaagtagaggatcccgtttagaatgggtgtggaaggcaagcaggaggcaagacgtcaagttgagtttggggcattttgagtttgagctacctttgggacatctaagtagagggctccagtaggcagttagaccagtggatctggcctgcagagctgtttgggtgagaaatgtagatttgggcatagttgtgagttgacgctggagtggatgagacgggccaggcaaaatacacagagtgagaagtgaagagggcccaggagagactcgagggaaatggcagctggggaggagcggaggcggagaagccaagagaaaagggggtttgaaggagaggggagtgggcccaaataagaagtgcattggatttggcaatcaagatgttataagggtctttggcaagcctggttttgattgaagtggtggatctggaagccagattgcagggattatggaagaaacaacgataagcaagatctccagaaagctaggatttcaggaattggaagaacacagaattttaaagggctgagcagagcagagaaaactggttctgtcaggagccttcggaagcctggatgcgggaggtttcttcctgatgttatcaggtatgtgaggatccctgctgaccgagaggagagtaaaggtggctcctgacattatcagcctgtggtctgggacttccaggcccaggtggttcagtcttgaaaaaagccagacagggctacaagcaacygcctcagcctgagcagcactacacagcagaaagcatttggattttggagcggatgtcgtgcctctacttattggttacacaactgtagacatgttacagcatgtcttccctttcagagttgttatgagaattcagtgaggcacayttctgcctaggaaattgtgccctatcttctgcaacataatgcaatttaaattccaagatcctgaattataatttgtgattagcttttatctcttttctcattaccctctttcccttgaacacataattcttcctcatggcctcagctgccatcttcaggcttccagttcstaagtgacttgtcctgacttctcatctatagctccaaatgtttgtgtctctcttcacttcggacatcccaccctcactgcaaactctaccttgtccaacatcaatatcttcgagcctgttagcctttccaaattccccagtttagtcaggtctaccacattcttctcacttcccaagctgagaaactcaagcattgtctgtgagayttacagtgtcagtcagggttctggcagggaccagatggttactcaaatggggcaacggaggagagtttaacaaaggcattaktttacaacagtgtgggcaaggctaagggaaaccaataagggatggaaaagcatctcctggaaggacccgtggggagctcccctttggcctgaaggaacagaggaaaagcaggtcctagagcctaaagagagcagytgtcactgtgggactagctgacaagccctgtggcttttggtggagggacagagtcaactccatgacggcacaggtgaggaagaaaagactcccatctcatcctccaactcctctctcctgctgttgccttccatcgactaaaaccaaccaaagccagggcccaggggagcctgtggtgcagtccattamaggtcagcacagagaaagaggatgaacctggggagaaatgtaaaacatctgccacacctgccgctttttatctaccctttagccaatatgtttccaaactcttgtttattcatttttaatattaataagaattggctgggagtggtggctcaygcctgtaatcccagtactttgggaggccaaggtgggtggaccacytgakgtcaggagtttgagaccagcctggccaacatggtgaaaccgcatctctactaaaaatacaaaaattagccaggcatggtggtgcacacctgtaatctcagctacttggaaggctgaggcaggagaattgcttgaacctgggaggtagaagttacagtgagctgaaatcacaccactgcactccagcctgggtgacagagcgagtgactgtcttaaattaaaaaaaaaaaaaagaattaataatctgtcaagtatgtactatagtcctggcacaatgcattatctcatttagtttttataatatgaggcaaggagtattaccttaattttacagatgtagaaactgaagcttagagagttcaagtttactaaaatcatacaatgagtaagtgacagagtctgaacttgcacccagctgtgtctgatcctgtaacctcaccgagctatgtttctgtcctgggcaacctctgtccaattcatcccttcctctccattttcatggatactgcctggtccaggccctccagagcatcctttatgcctgatttaagttgcactccttccactgggccttggcaaaggtctctctctctctatctatctatatctatatatacatatatagatatgcactccagagctctggctttggtatatatatatatatatatatggagagagagagagagagatggagtctcgctctgttgcccaggctggagtgcagtggtgcaatcttggctcactgcaacctctgcctcctgggctcaagtgattttcctgcctcaacctcccaggtagctgggattacaggcacgcaccaccatgcccggataatttttgtatttttaatagagatggggtttcaccatgttggtcaggccggtcttgaactaatgacctaaaatgatctgcycacttcggcctcccaaagtgctgggattataggcatgagccactgtgcctggcctttggctaagtactctaagccacagtctcttttctcaatggaataacatctctaagaccaggaactgtgcctgatgcaattttttaatctcacacttctggcccagggccagaaatagaaagtgctcagggaatgtttagtgactggggatgtggaactgaagcctccatacatcttcaacatgcccctaacccgcacagtttaaacattcatctgcttgaggctgcacgtagtgaygtctggaagacccattcacagctttggctaaatcttcctgctgttccttccccatctcatcctccaactccccacagactgaaacccaggccatgtaactacagttcctttttaagatctatgtgccttcagacatattgctagagctccaatttcctcctttgtaaaagtgggataataaaatatactttactacatttacaacattgatgtgttgattaaataagatgaggaatggaaaaatgctttgtaagctaaaaaccattctgcaaatatacaggattatgaatgycccactaaggaaggccagaggcctctgagtgggttctgagagagaaatcagaagtaattgtacttttgagctgtgtgctgtgagggtttgtgaatgttgagatgacccttgggttgtctgtagtttagatgtcagactctgagacaaaacaatttatgctgctgggagaaggatggcagctttgttttgacactactgtagggtacacctgctttgtgtttttgggaaaacaattacacacacaggcttgcatgtgaatgattccagtgacttcaccgctgcaggtcctggagaaactgcagggacaccttgaactgctggagcagaactttctggccaccaaggacaagcatctgactttgcagcagcaagtccacaagcacgaatcaacaatcgttggtgactttgatccagaaaggtcagatttaaaccaactgtgtaaggtggaagggtcaaaggtgatctccttcaggtgggattctgatgtggctgctggcttagtgcttggagagccactggtctagggtcagcagaaactgtgtcaccaatgaacaaagtgtcacctaataccacagacagcatggaggacctgttgagtgtaaggtgctgtgctggacattgactcagatggaacacccaaaatgaacaaatgcttcctggggcagaggcattgtaccaaaattttgcaatttgttgaatatcattataatkggtttggagacccagaggagcctaagaaaaccctagaaaggctcacatgataaccacagagggccctcttctcaagttcctcctctcctctccctctcagctttttcctctcttatctatctctccccacacctgcctttattgtccttgcctggttctctcttctgtccctctctttccccttttctttcccattcactgataattccaaggcacactgggcaggagggggtcattgtaaagttaattggtgtcagggtgagggacctacaaatcctgataaaggaaaagcgtgaaagcttaaagttaaatgatttctgagttaattcacattagaatcttgaacacacactccaaactgaagtttctaactggtagtttttatggcactgtattctcctttctccattccagataattttaagctgtattccaggactcaaggagaggattctttccctataatttcctggtataaattaaaagaaactatttagtaggcttaatatttgtgagtttagccctttctattsatagcattttaatatggaattgttgttgccaaattttttaatggtttacatttcagccctagcgttctgtggcattttttyccccaaggtatggttttacttttccaaaattaatggaacctctgtctacctttatttcagcactgagtaattagacagtaaggatgaggttttaatattgatttttttcccaaaggctttttttggggggagaggaagaaagaactctgcatgcttctgctatttaaaattaatagagtaaggatatttattttccaaggaatcttctgcttgggcagtcattttaaagacaggtttctgtgcacattaagaccaaagttattcaatgtcttatttatatcctagttacagccacactgtgcctggcatgagtataaataaaaagagcttcaactgcaattacattccatatatgggagaagctttcaacactggggcaagggagggacccagmctttcccaaatctcggctraagtcacctcaggacaggcaaagactgatcagctccagaatagtccccttgttctcaaatgggcataatgtgacaaggaacagaatcccatacaacccttgggttcttgatatgtcgagaaccttataagtgttgagtccaaaggctaatgcagagggctttctggaggggcaagaattctgcaaattcattgactagtcctttgtttacatcacctgctgtgctcttattaaagccttctcattattacctttacaaggtaatgtgcaaaaatatttgcttggatttcatgcatcttgcttgtcagaatgtagtccaatagtaatttgcttctttcacatattaacttcagaagccaagaattcaagaaatggggttctaccttcatcagccacttctccctgagagtctcagcataaaatcttatgttctgctttaaagaaaagatcacaacttccctcaaaaatgtctcttcyatctccaaatccccatgttttcacctcctctcccttccttagtctgctctccaacctctctagccatggtccttgaacccatccctttctacttccttgaggccttgctccatcattttatttcttttattattattatttttattattactattattattatttgagatggagtcttgctctgttgcccaggctggagtgcagtggcgcgatctcggctcactgcaacctccacctcccaggttcaagcgattctcctgccttagcctccagaatagctgggattaaaggtgcatgccaccatgcctgactaattttttcatatttttagtaaagacggggtttcaccgggttggccaggctggtcttgaactcctgacctaaagtgatctgcccaccttggcctcccaaagtgctgggattacaggcatgagccaccgtacccgggctcatttcttttaaactttcagtctctccttgtcccctgtttcattctcttctgcctgcaagatcccaacatagtttcctatattttattcaattatcactttgtttttttcatgcttagatctttgtcccaccacttattgaatagggcagcctttccccactggttgaaaaagccccttatatcagatacaaaacctccacatgtatacagaactgtttctattccatcccattgatctatgtgtctatttctacattatccacataaactattataggttagtgtatatttagaaatgtttcttctttttaaaattttcttatagctattcttatacactcatgttactaataaactttataatcagctcaccaaggttcttaataaaatttcatgaggattttgcttaggaatgtattgaatttataggttagattgggaagaactgaaatctttgtagtaagtattcccatcacgttttcttcatgcagattttacacatttttttgttaggtttattactagctattttatagtgttctgagtattgtcgacagatgttttctctaattgatgtcataggaagtatttccatattgtatatttaacttgtactgggctaccttatgcaattctcttcttagtgttttgttgattttttagttgattgtcttaatttttaagtatgacaatccatagcatctgaaaatattaataagctttttactccagaatatttgtattgtactttcttttctctccaattcttatctatctcatttctttttctttatttcatttgctaggttttccagaacaatattggataattaatattagtgaaagacagcattttttttttttcagacaaagtctcactcttgtccaggctggaatgcagtggcacaatcatagctcattrcaacctcaaactcctggactctgggatcctcccacctcagcctcctgagtagcagggactacaggtgcatgccaccactcccagctaattaaaaaaaattttttttgtagagacatggtctccctatgttttccaggctagtctcgaactcctgggttcaagtgatactcccacactgtggtctcccaaagtgttaggattaccagcgtgagccataaaagacagcattcttgtcatgttactaataataatgagaactctcctaagtatgattcaaatagataagcttcatcaagagagttttcttctattcctagctttctagaattagggcttttgttgttatttaattcaagaaaatgtttaatcaaatgggatttagaaatctagtttttctcctttaatctattaatttagtggaatatgttaataaatatactaacgttgaaccacagaatgagttgggcaattttcccttttcttttttttttttttattgagacggagtctcgctcctccaggctggagtgcagtggcgcgatcttggctcgctgcaagctccgcctcccggcttcacgccattctcctgcctcagcctcccaagtagctgagactacaagcatccgccaagttttctgtatttttagtagagacggggtttcaccatgttagccagtatggtcttgatctcctgacctcgtgatccacccacctcggccttccaaagtgctgggattacaggcgtgaactaccgcgccgggccccttttcttttcatgttctggaagagtctaataatataggacttatctgttgcttaaaagtcttggtagaattatgtttagtgaactccaaggttctatacacgtgcttcggggtctgcatatacttgatttaaatttctcctttaaaaatatatgttgaaatatatgctttcaaactgttataaattacattttaaactatgtaatacataaaaattaacatattagagacattgaaattttttttaaaaggcttggtagaactcacccattatcccactcttcatgcctttcatggagtagatttttaacactttccatttttctctggttgttggtcttttcatattttctacttttttaaaagtgaattttaataatttatattattctagaaacttgcccagttcacctaaattttaaatggtgttgatatggatttttcaatgccttttgatttaaaatttttcctatttttcctttctcattcttaatgttatttgtttttcagacttccagtggtttgtttcatagatattttggaagaaaacatgttttatcttattgatcaaattcttttaagtctcatttatttctagtaattttatgaatccttttctgtggtttattttatattcccttttctatcttcctattttaaatagttgattgatttttgattttttcccccaataatgcatttaagactagaagttttcctcagagtactgctttaactgcattacattggttttcctatgttattctctcatttgtcattgacttgtaagttatgcctaacattcakttttatttcctacttaatccaaagctatttaggtattaaaatttctaattaaacagggttttttttgggggggggctatctttttgttgttaatgtctagtgataagagaatgtaggtagtataatttttaatattttggattttcttgaaattttcctttgtggactgttacgaggtaaatttttataaatgtaatggatttgaagaaaatggattctctttgttgggtaaaatatatatttatatacacatacacatatattcatatggattagaacttgttaattaaattattcagatatctaatattcttcctctttttaaattagcataacaagtaattccatagaatcacagttcttagaatcccttgtaagggatctcaaaatcatcaaatccagataagtaaggtacaatattgttatcccaggttataagtgagacattggaggcccagaaatactaagtgatttatacaaggatacgcagctaatggacagcaggtgaagatcagagcccaggctgtcagagaaactatgaacagtcatgcgggctcccattatcctttgtgacagaagacaggccacattaataatataaatcaatgctgtattcaagaactgtcattattaattagaatgccaaccacatagcccagaagatgcctgtgtgtttatgtttacttagaaaagtggaaggtgaaatcttcaaattggagatgctgcttgaagatgttaaagagaaaatggatgaaagcaaatatacttcagctccttcccttcctgtgagttctccagttaccctggatgacttggcctccaccttctcttcactctcaaatgaggtaatacagcaatgtacagtctaattttgtgccaggaaaaatggtgtttttgcatttatagactcctaattcatggattcactgaattccatttttaatatctcatgaaaatttaactttccaaagtcccatgaattatattattttaaatggaaccagcttttaaagattagaagctatttcaagtgttaatttttgaaacatctttatagtttaggatgtaacaatgctgtttaaatccattaaaccaccgaagagctatttcttccaaattaataagaaaatttttgtagatcatgcctggaagaaataattttttttcttcatagttttgtactcaccaggctggagtgtggtagcacgatctcagctcactgcaacctttgtctcccgggctcaagtgattctcctccctcagcctcccaagcagctgagattacaggtgcatgccaccactgcctggctaattttttatatttttggtagagatggggtttcaccatgttggccaggctggtctcaaactcctgacctcaagtgatccgcccgcttggccttccaaagtgttgggattacaggcatgagccacctgaaaataaagaatagcacactcagtgaaataattatttcccatgaatccacttctgcattttccttctctcaagttaaattcttttggatttctacttatgcaagattgggaattcaaattaaccaccactgtctttctatactttttgcctttgtagcctcaactatcagaacattcagactaaaatcaaaattctgagaaacagaatcatttaaataaataccttaaattgactctttagtttcatacagtatttgaagacacagcctggggctgatattcaaacttgaatgaggattttgtcaaagcgaaggacaaagtgacaaagattatgtcaaggttagcccttccraagaagtgtttgcctcctcaaagcacttacttgcctggcaaaatctcactcattcaaggcccagctctagcgtcaggtcatttatgcatccctagtcagccaccctcctcacccccaagccccccaatcccccgcacctggaggaattcttggccccggcctctgtgtccccgcagcactgggtctcgtttgtctctgtgactctgcactcatctttgaatcctgaatgtccagctgaaagcccaggagagtcgatgcttcatagaggaagccctgagccaccgtggatgtaacagcccatctcaaggcacccaagcagtttccaggctcacagcggctgccctgctagtcttggacctgcaggagtcacaagtctttgtgaggccacctcagggttggccctgccctctacctggcagctccctggggtctggatctgctcttctttacttggtcccaagtttacagctactgttgtgaaatgatgagaactctctaaataactttgtggtaagtggttctggaaagagtctagtgctggcatccttcattcactcagcagtatgtattgctataggctagcacttttctaggtattggggataaaacatgaacaacaaacaaatcacctgccctcaagatgcttacatttctgtaagagagacatatacttaacaaattaagccaggtgcggtggctcacgcctgtaattccagcactttgggaggctgaggcaggcggatcacgaggtcaggagttcgagaccagcctggccaacatggtgaaaccccgtttctactaaagatacaaaaaattagccgggcgtggtggcgggcgcctgtaatcccagctacttgggaggctgaggcaggagaatcgcttgaaccygggaggcagaggttgcagtgagccragattgcgccattgcactccagtctgggtgacagggcaagactccatctcraaaaaaaaaaaaaattaaattaacatataattatgaaatgttaaaaagcacagtgcagaaaataataatacattctgcgtgactctgaagccagactacctgggttcacatactggctctgtcacttattagttttgtgatcttaggaaagttatgcaacctctctgtgcctcagttctctcttctgtaaaatgcagataataatatttgcctcacagggctgttatgatgtttaaatgagttaatataagtaacgtactgaaaatagggcctggctcacagtgagtacattactcctgggtgttagctatcatgactattaagtaatgggatatgaccaaaagtaactaaatgcagaaggtttgaattactaagggagaaggtttttcagagaaggtgagatttggactgagtcttggaggatgagaagacagctaggtaaagagctgggggagacaggggtggggggacgccaggcaggatgttatggtgccttaggggtgctgtagggatgctgaactgattttgagtcacctccagtgggactgtggctctaattcaagtctttctgtgtggctcccccagattcccaaggagcaccccggccacccttctgggcctcgaggctcaggtgggagtgaggtaacagggacaccccaaggagggccgcaggaggcccccaacgaggagctctgtgagctggccccgcagacgtgagtcctagccytggagccccagcagacacaggacacagaaagaggccccttcctcatgcagcctccaggaaggcccatgaggctcccacaggaaaagcagtcttggaccacgagttacaaagcctggtagcctggctcctcacctgccccaccagcagggcctggccagcctctgcaaccctctgggcagagatctgagggacgggacagctgrggctgggggacgcggggagaggtgaaggtcaagtggccgcatgaggcccayagcactctctgccttaggttgctcgctcccaccatcccaggggtgatgccaagtgattccaaatagtggagctcccaggtagctcaagaactgattctaacattcaaactgctttttttttttttaaattagttacctaaacggtcattatggagatgcagctgcccagaacaagccagaccaagtggccatgaggctgtcttctaactctgkggtaatgtcctgcagcyggggcctggctgggttcttctcattgttggctctttaactaaaaccagtgttgctgaatgtgactgtgaaattggcataatcaagatcacttacctcttcctaatggcatcctgggtgtcagtgctggtgatggctggtactgctgacggtttcccactttctgcactcctgagaatctcggcaggcgtacctagaccggagcttctccaacttctccgagcctatgaatcacctgcagatcttgttaaaatgcaggctctgaatcagtaagtttggggcgagcctgcaattctgcattgctaacaagccccaggtgatgccaaagctgctggttctggtctgcggaccacattttaaattctgagggtctagagattatttcatttcgaatgaattggaaatgctgggattaccaaccccggggtcttaaatgatattatattataatattataataagcagtaaacaatgatataataattatgttggctcagagctttacagtttgcaaakactttttgcagaggaagagtagtttagaaaggtgatatttgttcagggtaaatgataggtgatgcccgggtctccaactcaggtggaggggcacctccctgcattctgctaatgtaaatctgccttaaatgtcagtggaggagtaaccctgtaagctcagcaatgataaaatataaaaattaaaaaaaaaaaaccatgggaaaaatggatgaaaaaaccctttttttttaaattataaaactgatacatgcttattacaagagaaatgagaaaataaagaaaagtataaagaagaaacttccactgagaggaaaatcaatctaattttttttttttgagacagtctcgctttgttgtccaggctggagtgcaatggtgcgatcccrgctcactgcaacctctgcctcctgggttcaagtgattctcctgcctcagcctcctgagtagctgggattacaggcatgtgccaccacgtgcagctaakttttgtatttttagtagagaggaggtttcaccacgttgcccacactggtctagaactcccgacctcaggtgatccacccacctcagcctcccaaagtgctgggattacaggcatgagccactgcgcctggcccattgctaatattttagtgtatatccttccagtctttttttctcctatatatacattttggccaaaataggattttactatatatattgttttatgcttttcatttaatgttatattttgagcagctctccacatcacttagaataaactatcgcttcatttttgatgactgtactatatttcattatactaatgtactctgacacatttagacaatctcttattgatggagatttagttttttccagttctttgatatcataaacactgcttcaggtaacatcatttgacatgcaaacwtttgtagttgatcatttccttagaataaaaccctaggattgcagttaatggttcaaatggtacatgctgaaaattctgataatctggcctttaggaagtccatgggggtttataggctgagggcagtgcgtgggaatgttggtgtccccagtttgagcctaccccagacatttttttctttttccaacttttgccaaatgcataagtgaaaactgatatctcattattttaatcttgctatttttgaaactcaatctattttcatatgtttcttggccactcgcacctcctccttgacaatattgatattttaagttgtttacaaaactgaaaccaccatcaattaaaaaaaatgtagatagacaactgagaaaatattaagggcaaataatgttcattgttgagaacttcattatatcaaatgctgtgacaaattccccaaggagcagaactgtggttaagaacacaagcatactggccgggtgcagtggctcgcgcctgtaatcccagcactttggtaggccaaggcgggtggatcacttgaggtcaggagttcgagaccagcctgaccaacatggtgaaactctgtttctactaagacataccaaaattagctgggtggggtggtgtgttcctgtagtcccagctacttggaagggaggctgaggtgggagaatcacttgaaattgggagggaggtggaggttgcagtgagccaagattgcgccactgcactccagcctgggcaacacagagaaactccatctcaaaaaaaaaaaaaaaaaaaaaagaacacagcataccagtcagataggtaaaagttaaaatcccagctttcccacttactcatgatgcaaccttgccaaattgcttaaatccgccaggcctcagatcactcaccattaaaatggcgacaacgtgccaggatggttggaagtattaaggagactataagggaagcacctggcacatcatgaacaactagcaaatggtaacaggaaaacactgaaaccctccaagaaaattaatggacaaaggacatgagctaaaaagtcacaagtaaggccgggcgcagtggctcacacaattactcacaattaaagtaatcccagtactttgggaggccgaggtgggcgaatcatgaggtcaggagctcaagaccagcccggccaacatggtgaaactgtctccactaaaaatacaaaaaattagctgggggtagtggtgggcacctgtaatcccagctacttggggggctgagccagaagaattgcttgaacccgggagctgagattaggccactgcactccagcctgggcaacagagtgagactcygtctcaaaaaaaaaaaaaaaagtcacaggtaggaaatacaaccaataaatcagcatataggaacagacttatttcctttagtcacagaggaaatgcaaattaacacaaaaggtgacacacccctcccttcaattaacagaaacattttcaagtgataattcctgatgcagaggaaggtgtggtcaaactgagccgtccacactgttggtggctgtgaaatctgtacaacttttgtggaaagcaatttggcaatatgggtcatcacacaaacatgttcgcaacctttggcccagacatttcctcaggaagtaatccaagatgtggaaaaagctatgtgtacaatgatgcttctgccattgtttataatgatgggaaaagtacatttattttttacttacataaagggtaagaccttagtcaaaaatacacagtgggtggtaacagccctcacaggtcagtggagtaattgttttgtgttaaagagggacatataaccaatcatttaggcccccagacagtccctaaaccctgttttaattcatagttgaatatatttatttagaaaggcttttagagctctactagccagcggtcagattaatagatctaaaaattatgttcctaaatctgttcattatctggcgaagcttggagtaatttgaaactaagggaaagataaaaaggggaragtattctgtcatctgtacaccagattttaaaatctgtttagaggaggaaggaagcaagccagggtggaaacttccattcttcagcccaggccattagaggcgcagccccgactgagtgacacatcagaactaaggatgggctctttcttctttycctcctgtccccctgcgcctccctttccccaactggaggagaggtttggcgagtctctctgcctgaggtggcaagttcagccggacctcagctgcttgctgggctgtgcgtgtgcagccgcggcgtgagtcacatcctctatcacatctccatctgtgtgctttgtggcgcaggaggatcccaacggcactccaagaaggcaggattgtgcagagatgacggcacccagtccgagctgtgccttctgtcgcaggctccttgaatggtgagggcttcttgtggctacattcccagggtggattggagtcagtcctggcatagtaactccagtgagagtgggcggcaactaactgaggccactggctgagttatagagtcacagatctcaggcctgggcacagagcccagcctccctcgcaccctacagatcctctagcagtggtcctcaactggggagaccatcaaaatcaccatgggmgattttacaatcatgcacatgcctccatcccacctactgtctcagcatcgccagcggtggggctctggtaggaatattgcttttaaatctcyccaggtgattccgataagcccccttggttaagaatcatggttacagcccacggagggtggtcctgtaggcttttgatcattgcccacatgggggattcttatcctgtataacaaacagctcccaccatccctactctctccttatgawgagcaaaagtcttctctgttgggtttcacctgagccccccagtcccaggaacaagcctcatccctcttctcagggctgatttcttcccattcctaaggacgaaatcttccagagctaacaagctgtaaatcatgtaaaatcctcaggagaaatcctttgtttttgaaacacccattggtgcaactattaatctgtgtcgattcagtatcatttatttgaagcttctttcaggtagcgagagatgttacctctaagctcactgtggactccggccaaagctcggctcattgacctttggaaggtcaagagtcagggaggcagcaggtgtttagcaaccactgttatatgtacgtaatggaytctaatagaagcagatgacagggtctgaaagactgaggcttcctgttagaaagcattccattgtgggaatgggcacctgccttaagagttctaatgagtgtccacccctgaaaaaagaaactgcrtgaagctygtgctaaaaatggtcatgtgtcattgtgtgtgggtcattaaaccaccatgtcagtcatcagctttgagctgccctttaatccaaggggcactcatgaagcttactcactgagtcatcccaggcctactatttttatttattgaattaaagtctaattttggatttttaaaggttttactaagtataatgaaagtattttgacattaaagaaccatttttattaagcactcaaggtactaaatttctctcttctaaattcctagtctagaccctacagaagtacattaagtaccaagacagggaccaatgttccagactaaataatacttttttatgatagacaagctggaaagacaagcamaaccaagtgtaaaatcaaatctcacagtgaatccactgctggggagtgatgagaagatacacatgacttatgaattaaaatcttgtaayttacataatccctgaggaattattgattgaagggaggactatatattctttctgttagaagattaaatctctctctgatgggacttgtcctttatgaagcttgctgaggtacatactgttttcaggatatttgtaaattgtttatatataagtggataaattacatatgtataaaatgtaaaatatgcttatccctttatgttatttctgatgcaaaactttggatttaagtgtgtactttagctgctttgtcttgttgaaaaactgtcttctccagaggaattatgtttggccagaagatttgagtacacaaaggagtttaaaagcagaaaaagtcctgtgttggactgcatgcacttgagtgagatccaagtttcccactttggagagcagatgttcaaatgccccagaggagaagggtggagacagaaaatgaggtgtgagaaaatatgtgactcaagaggacagcatgtttttccaagaggagggaaagagcctggcttctcagccccagccccacaaacccgcagccccatcccttctccgccaacagcaggccagggcacagcgcggcgagcatgtgtttgcccagcaatgccttgggctcaaaccctagccctgggcaatctgcctcatttatgccaggatatctcgggcacagtgccttccatactaagaatgaacaactttccctgggggctatgactgtatcccaggagcttagcaagagctttgttcagaactgttattaattcgaattcctttggaggagttgggatttctgaggaggagggaggaagctgcaggtgggccacaggaaggctcctgaacaatgtccattgcagttgcttctttctgacgccacctggtggccatgtgcaactaaaatcaccttcacgtgctccctcagcctttagtcccacagacacccggcaaagcccactttgctggagttgttggatgtaatcagcttgtacttccaggaccaaagctacgtgacccattactgacgtatagcatagtttcttcccctggtaggaactgtttgtttgtttgtttgtttgtttgtttgtttttgagatgaggttttgccatgttgccctggctgaccttgaactcctagtctcaagccatccaccctccttggcctcccaaagtgctgggattacaggcatgagccaccatacccagcctggaatggattttgatgcatgaggaaaactccaaattttataattccatacttcaaatgtgttttgtgaatgtgtatrtgatgattagatattaacctcggcagaacaaaacatttatttttcatgtcttgtatacattttcttttttttttttttgagtaggagtctcgctctgtcacccaggctggagtgcagtggcgcgatctcggctcactgcaagctccgcctccygggttcccgccattctcctgcctcagcctcccgagtagctgggactacaggcacccactacggcgcccagctaattttttgtacttttagtagagacagggtttcaccgtgttagccaggatggtctcgatctcctgacctcgtgatccgcccgcctcagcctcccaaagtgctgggattacaggcgtgagccaccgcgcctggcctgtcttgtatacattttcttatcaggccaaattgtgctggggtgcaatttcttgtagaaaagctctcaaacaggcaggcagaggagagctctgtgtagaggatgacaagcccctcctacactgttccaggctctaatataacaaaatttaacgtttcaactttaccaaaactttccctatctattggaaatgcactaaaagtttacaggatcttatgcacctttttttaggaagcaaaacgtggagaaaaagggccacggaaggatcaactgtggaagattttcaattgtccttcatgaaaaggcaccacactcagattcaactcccagtaagttgatgggcttgggctgggtgctcatttttcagtgtccctccccatggggtctgctcgcagtaggcaccagcttgccatctgccactccaagagcatttccctacactaggatgttgcatgttgtatttatttatttgcaaaatgtaaagaattaataggctgggcatgggggctcatgcctgtaattccagcactttgggaggctgaggcgkgtggatcacttgagctcaggagttcaagaccagcctggccaacatggtgacattccatctgtacaaaaaaaatacaaaaattagccaggtgtggtggctcacgcctgtagtcccagctacttgggagactaaggtgggaagattgcttgagtccgggaggttgaggctgcagtgagccatgatcatgccaccgtactccagcctgggcgacagagtaggaccctgtttcaaaaaaaaaaaaaaagaaaaagaaaagaaaagaaaaaaagaatcactttcaataagatgtggttaagtagagtaaagcatgaacacctgtttctagctgaaaatgaaggactccatggactcaatcacaagatgtcattcagtctgtccatcctcatccttcccacatgacccataactgtacctggtaaggttactggctacgtgagaattgctgctgctttggatatatgcatttcatagaagcaaagaaagttggagctgggaggtgccccagtacacgcaattcaatggcttttagtcataagatcctttytttcaaagatagtttaaggagagaaacatctagcagaactgccctgggagaagaggtggggctggaggcctctgctcaggcagcttctgagcttaaaaatcacctctgagcctaacctacctacccagcttgtctccccagcttatgcaccaggaagctgcactggagagctacccaggctttcttacatctgcactgcctgtggcccagagccatgcctccagctctgccttctgttatgtcacacttggttctgcactggcttctctgtagatgacacatttccaaataataatagggttmattgattgaagacgtattatgccagatggtataacaaagtaggggttttccaggtgtaatcggagggtccctggggtttcctgaaaccctttcgggggggccaccaggtccttcctttaccagccatatagctgtgcaacgctagtattacaggcaactgatggagatgcagttatggaatccagttgccttttattaagccagatattcaagatatttgccaaaacgtaaaatgatgccactcttctcactaaattttttagaaatagttattttcattaaaaactgctattttgttaatatgacatggatttattactttttaaatgccataataaataaaattatcttttaaacstctcagtttaaaattctaaaaaaaaagcgccttggaactgctcatttagttttgggaaatctaaatgattygcacaagcaaaaaatgactagtaatctatacattagtacttctctaccaatccatctgcagtggactgaatgttgaatgctagstgttctcyaatgaggggggattttcacctcaggtatataaaatggtatatattatcattttatggtagattaaaaccacagaaacaaaggctgtttagggtcctcaattttaagagtgtaaaagggwtctggaatcaaaagtttgaaaactgttgccagtgtatgtcacataactctcacaacatccctgtaatgcaggaatgattatctttattttatagataaggaactagaggctcagagaaattaagtgacttgacaggaccaaagagtgagtgtgagtgagtgtattagctatctatagttgtgtaacaaagtatcccagaacttaaggctgaaaacaacaaacatttatcatcttagagtttctgtgggtcaggaatttgggagcactttagctgggtggttcaggctcagggtctctcatgaggtttggtcaagwtgtcagccaaggatgccgtcatctgagggcttgactggggctggaagatctgcttccaagatggctcactcacatgagcattggcaggaggtctcarttcccygacatgtgggcctctccaataggctgcttgagtgtcattatgacatggcagccagcttcccccagagcaagtgatccaagagagaaataccgagatggaagcttcagtgtctttcatggcctaggtttggaagttatatgccatcactaccgctttattttatttgttagaagtgagtcactaaacccagcctatactcaaggagagaggaattaggctctacattttaaagagtgtcagttgggtgtggtggcttatgtctgtaatcccagcactttgggaggctgaaccaggattgcttgagcccaggagttcaagaccaggctggacaacatagggacccaatatttaaacataaaaacaaaacaaaacaaaaaaaacacagaaggttgaggcttatgattgagccactgcatttcagcctgggagcaacagaatgaaaccttggctcaaaaaaaataaaaatagcacgttaaagaatttgtaaacatattttcaaccatcatagctaataagtagcagagccaggcttcaaccctgggccttcaaactcattccatttgctaatatgaaatggatttgttattatacaatgaagttactatatattgtataatatgttaaaagtcaagatgtcagccagggatgacttcactttaatgttaaaaatgagtctaaccatgagttcagtaaggcaagaagcattggaagaggctttgtcactgcagcatctgtcctgcagcgagatgttgcttggacattcagtcctgacatgctcacccgcctggccccaggctttcatactctggccttacctggagtgctgttccgtccacagcctgccagacaggttctagacctgcaccagatacacatgctgtctgctactagcttctttgagsctaagagagcaaagtcatgattcaggttcccttataggcttatgaatgtcacatagaagaaacccatctttccagttgtctggatgacaaaatacaagctcttggccacagcagggtctgagagaaagaatgtggatgtatcaggccaactatggaaaaacaaatacaaatacaaggttgtctgatagttcagtgggccaaattgccgcagatccattcattcagcagacctttactaagcctaaatatgtatgctacatcttgagattttcatacaagaaatgttaattatcaaaacatttctcagttgtcagaagggaatcccaaatgttaccccaggctggcaactcctcttggtgacacagccgggacattaagcactttggtgccaaacacataccctgcacagttacagctctgctctccacaccatattttatgactataatcaagacacttacccttcattcatgcaacttgggctttttcagattctgatacaggacacagcttctgttctgattctggcactgaaatgcagagtaacaaatgtcaggactgtggcactaagattcctacctcccgaagagcctgcaggaaagaaccaactaaaggtaacactcacctggggcctcagaaaggcgagtggggacagtcactgttcccaggcaattaactgtatttttaatcttttcttcccagaatttcattatagatacaacactccaggacagaattactcaaatcatagcaaaagaggtgcctttgtccagccccattctttagatgaaagtaaaaactcttcaccctgtaagtacatctcctgcatgaccccatccatatcaacaacctaatgtcccaggtatgggacattcacatgacactggccactgcttccatctgggaagccctggcctctccattttgctgcccaggtcttgtgcactcacctgacacttccaaatccagccctacatctggatggcaagaggctgagctggggctggaaaatatgaaatcgcagtgaccaaggactttgaaagttattaagggctacaccagtgcaagttggtagcaacccataaatgtttgctgaacaaataaatgacttactggataatcactactattattgttactattcagaggtggctaatgctttacatatatccctactaagagtcagcatgtagagaagtagactatttttacactccatagacatcatgttgctaacttccaatgcaaaaatttgctgtctttgaaaaaaaattaaaaccctacaaacacatatttaaaaagatgaatgacatggctgctccttcccaagctcttgaaagaaagaaactcatacccaaataaggagagctcaaagcaaaatggggtaagttcaaaaagcagggcaaagtgtgccaagggaacaggaaggagggaaggaaatactcctagttttaccactgaacgacagctatacctggttctctgacaggcgctacatccttggcctcataccttcagagctcttcctctccttctctgggagagggcaccagggagaatgtttcttatctttcttgatggtcagtgcccaagacttaagaatgtcatttacctgactgacctcagctgtgtctcccctccccacctccagctgccacatcctccaattgcatgtattcttttgaagtgacagtcactaagactggagaagccacaggacagatttcttcactatctccttggttttgaggtctacagcctgtgacacttgtcatgccagtatacgaacgagggctgcaatggattcatccacaatgtgatcttgaactccattagctaactaagggggtagaagtcataaggaggcagcttttcctccaggttacaaagacccttacagcaactagagcagacagaaaatggagggggctgtggcaggaggttgtgagctcatctgtggactggaaggcaatggattttgtctggaagctgtagatctgtacactggactagaaccggaccaggtgacactgtggtgctttctaactctgagtttccagtaaaatccaaaattacatttggagaccaccaaagaatcaagattgrgctcattagtgcctcttcatcatgccccaagtctaggtggtcagcatgactaaatcttggtttctggcttctgccctgccttgcatgtctgagggacaatctctcccagcatcctttgtccaacgggagcctcctgagtgtgagtgaagcctggctacttgacaccaatgaataagacaggagacctggagggagaacgaggggaagacagagagaagaagaagaagagggaaagggaaggggagaagggagccttggtgacagagaaggcagatttcttggccactgactcgtcttttttcctttwtctgtctttcttcttgttttccatggtgacttttccacattttccttctgtgtttagactctattttctggaattgtctttgtaacataatcattaatttctactcctagaatcttaactcctaaaattgaagaggatttcagaaatccatttggcccaacctcttggaagatattatttctccatttatcagatgatgtggttgttaaacccagagaagtcagatrtcatgcacagatcacacagcaagcacccagggaacctaaactccyggtttctatctgctaataaaaccttttttgttgttttgttttttgagacagagtctcactctgtcacccaggctggagtgcagtggcactatcttggctcactgcaacctccacctcctgggttcaaatgactctcatgcctcagtctcccaagtagctgggattacaggcacccaccaccacacccggctaatttttgtatttttagtagagacagggtttcaccatgttgaccaggctggtcttgaactcctgacctcaggtgatgtgcccacctcggcctcccaaagtgctgggattaaaaacatgagccaccacgcctggcctaaaactccctttaaaattgaatttcttttcctaagttcagaatacttcatagaaagttctttattaaaaatttcatttttagagacagggtctagctctgtcgcccaggctggagggcagtgatgtgatcatagctcaatgcttccttgaacttctgggctctagtgaacctcctgcctcagcctcctaagtagctacaaaactgtaggcacatgccaccatgcccagctaagttaacaaaaaatgtatagttagtatggaaggggtttatgaattttttttttgtagagacagggaagactggtcgcaaactcctggcctcaaacaatcctcccaccttagcctcccaaagtgctgggattacaggcgtgagccaccgcgcccagcaaaagttctttgttgtctatgtttcccagttttctgatttattaaaattttatgaaatatttcattcatacaaaaagttcaaggaatgatacataggcaccatttggggctcatttttgatactctgaatttaatgatagctaacatttttcagcttttttaaaacccaarcggatctgttctcagagagtgaattcaaaatcctttaaaggtgaacatgagcccacaccaggaaagtaagtattatttcattatcagtaacraaatatttctcattggttgggtggatacagtgtacttgatagtgcattaactacctaccccaagrtaacctagatgattaggagtagagccaggattcaaacctaaacctatctaatccttcaatcattcatttgtttattcaataaaccaagtcattgtactaggtactgagaacacaggacaaagtcagccactgtccctgccctcacagagcttacttttttggcagagaagccgcatagtctttgtaagtgccaagaaggggacgtacaaagtcccattgatctaatttgggggctcagggaagctgagcttcraaggataagtatgaacgaactagcaaggggatctgggggcagtgaagaacattccagtctaggaaagcttcctgttgtgagaaggcacttggcaagttcaggaatggtgtggctggaacccaaaagagggagcggcagtggagcaagatgaggctgatgaggaaaggttggtggaattgtcagggccagaccgtacagagacttgtcagctccaggaagtatttcagaatcttaggagcaagaggaagccaattagggtattttttttttttttttttttgctgttaattcatttttatttttagagatagggtctccctctgtcacccaggatggagtgcagtggtgatcatatctcactgcagccttgaactcctgggctcaagtcatcctcccgcctcagcctcctgagtagctaggactataggtgcacattwaaaaaaaaaaatttgtagagacagagtcttgttatgttgcccaggctagtctcraactcctgacctcaagtgatcttcccaccttggtcacccaaagcactggaattacaggtgtctggccccccagtgaagttaaaaaaaaattttttttgaggcagggtcttgctttgttgcccaggctggagtgcaatcttggctcactgcagccttgacctcctcrgctcaagtgatcctcctggcacagcttcctgggtagctgggagtacaggcatgtgataccacagctagctactttttttttttttttggtagagatggggtcttactatgttgcccaggctgatcttgaactcctagcctcagcaatcctcctacctcagtcacccaaagcactgggattacaggcatgagccactgtggcaggcccacccaattaagttttttaatcagggaatttaaaaatttcttagtgttttaaagggtcagtctagctactgaaggagtggaaacgaattagaggagttaagattggaggacaaaggccaaataagaggccagtgcaataattcaggtgagatgatgcagcttgaccaagggtggtggagatggaaagagaaaagtctgtgtattcattcaagagctatttaagagacagaaccaatagcgcagcagagtggctaacaattcaggctctgcactcagagccactcagtctgaacctactaccctccaccatagtctagcacagtgtttaagaacgtgacctttggagacttcttggttttttttttttttttttgagatggagtttcactatttcgcccaggctggagtgaagtggcacgatcatggctcactgcaacctctgccccaccaggttcaagtgagtctcctgcctcagcctcccgtgtagctgggattataggcacccgccaccatgcccagctaatttttgtatttttagtagagacggggtttcgctatgttgaccaggctgggctccaactcttgacctcaggtgattcacccacctcggcctcccaaagtgctgggattacaggcgtgagccaccatgcctggccgacttcttgggtttgtcttggttctgtgtccttgggcaggttccttgacctatgtgtgcctccatttcccygcatgtaaagtgggaatcataatggtgccaaactcattgaggactgagtccatacatataaagcacttagaatggtaccaggctcataataagtactcagcaagcgatggctgttatactgttgacagtggagactgatgggatatggggagagagaggactctgcaccactctgctatcccctgcccagagtatttcattagttaggggccccggatgctggaccacctcttgcctggaggatcaatccaatgtgttaaaataacttgcagaaccaattgatgctcctatggtaggggagagggatgaaaggatattttctggagatgatattcctcacaagtgttttatgcaccaaagtaatgcttaacagaggaaacctgaagccggaggaagctgtgagggtggctctatgactgctcwgtcaacaggcaagttctcatggcatccctcagggccactgctcatgcttgagaaaagcctaactccaggcagtgcccttcacagactatgyaaataacccsctagagccatgctctgcacaacctkaacagcccagtggccctgcacccctcactcacctagtgcagacttctggcccatccctgakagagaaccaatcacagtgtagcaggcaaggggagcctgtttacttcaaaaggagctgcttttattttttgactgcttctgcctccttggggtgaaagctcactggtgccagaatgaactcaacccaaggtacctgcaattggcagttttgtgtatttgttttataaaaatgcaaggtagaaagttggccccaaaaggccggacgcggtggctcaggcctgtaatcccagcactttgggaggccgaggcgggcggatcacgaggtcaggagatcgagaccatcctggctaacacggtgaaaccccatctctactaaaaaaaaatacaaaaaattagccgggcgtggtggcgggcgcctgtagtcccagctactcgggaggctgaggcacgagaatggcgtgaacccgggaggcggagcttgcagcgagcagagatcacaccactgcactccagcctgggcaacagagcgagactctgtctcaaaaaaaaaaaaaaaaaaaaaattaaaaaaaaaaaaagaaagttggccccaaaagaatgaaaacggaataaaaaatgtgtttagagtcttgcctctttctgtactagaggaaaaggagatcaattccgggagaaaacacccgcatggtcatggcaacaaccattttctgaagcccagctgcggtcagccacatgggagtatgagagctaggagggcagcgggtgcacgaatccacccacacccaaaccacacagagccattacctaccacagagctgacgtgaacaggagtgtgcttgagggtggcgcttgacacaagtatcaatgtgcttttgtcttccagaaaaaaacttcaggctttcatgacctacagctcagaccctgcaacaccctcaccccatttctactcctgcaggatttctggaagcaaatccttatgtgactttgatagcactgaagaaataaaatctgaggtgaggacttagaaaatcattcgagaagcattgcagctcgtaagtttgatcttgatgcccacagaactggcagctcttaagttattacagtatcagagcttcagaaaatgctctgctaaagacaattttgtgctcagaactaagctaaagacacacagcctcagcagycgcaaggtttgyattattctaaattggttccaagggaaatttcctggagaaagtgatttgtgggtggtgcctcagctacaggatttccctggccgggggttgaaggcactgggtctgttccagtgacactgtgatcagagttgccaacagtttcctatttcaaatcactaactcgaatccccaggccactttcaaatgtttccatacrcatgcgctgtatccctgaataccctctcagtggttatggccccccaatccccatcaatggcckctaagagctgttctttttttctctttctctgcggcagggaaacagcccagctggcggctgacctcaccctctgattcatgctcatcagtcacgtgctggtctttttttcaatccctttccctaacaaatatattccatctcagactggtctcctaggaaaccaaccctcaaaaacagaaatagaccaagaggaaaacaggaatactccccaaattccaccttgtaatgtttaataatgagagaacccaaagaacagaaacagcagttagtttrtgtaattaaaatgtgtggacttttcctctgtagattttaaactcggctttggatcatgccctaaggacagcaaccattttgaaagaaactacagatcaaatgattaaaacgattgcagaagaccttgctaaagcacagaggtggaggaatcgactgaaatactagttcaacgctaggctaccaaggattcaaaagaaaaaaatgcaaagaaaacttgatcttcccccaaaatgtattttacttactacacaatttaggaagatgactttctagagaaaacacagaaaccataagaaatgggtaacacaaagtacttaaaggaaaaagaaaaaagaaaggacttctgattcttaaaatcaaaagcaaccaacaagtatttattttaaaataaatctatgttcttcttaactcataataaaagaaatcaaaacaaaacaatgaatttccttttatctattagtctgaaaaaagattaaagtttgaagaaaccctgtgtcagtgaggatggagggaaactggtactctcatatgctgttggcagaaatgcaacctttttggaagactatttggtaatatctaccaagttccacaaattccaaatcatgtaccttcagagcagcaattccacttctaggaatttcttttacatataagccacacaatgtggcatgatatatgtacagggaagggcactggagcactgatggtaacaaccccaagggggaactaatctaaataccccctgtgatgattcataaatgacaatactttgtagccaccgaaaagaatgaggttggattatctgcaaaagtcagtgaaagaagcaagatgcctaagcatatatatagagagttgtaacctctggggtctttctatgttgcccaggctggacttgaacttcaagcaatcctcccgccttagcctactgagtggctgggactacaggcacacaccaatgtgcctggctcttcatttgtgtatttttttttaaagggcatacgtattttcaggaaagatacctaaaaatctgaagtgaacctctagtaaaggaaactgggagttttgggggagaaaggggtttttaccttcttttctgtactatatgaaattctcacaatatacttataagtcaaaattatttgtttaaagatcgcttgaagtcagaaatatgtgaaaataatagccttaatgaaattttggaaaagacaattcattaaaactgtgtaccagagattaagtacattttcatgcagaccagagcaggcttttttttttttccttccagatcaagcttttgctttccttctttaagagtgatttattacctccttagtgacagcacagcagggtattggctctttcccccttccctgaaacttctgattttcattcaccctagacattcaacaaatggtttcccaactcccagagtttggctcagtggtcaggagggagttgaatctattcccactttagattttcgtgccaatgtgagcagctggtattcgtctagctggctggagaatggactgtttttaactttggggtttgtaaattggtttagggtgccctggaagagataatgcacaggtcagtctgaaaatacctctgactttatggccaaatttacttcaggctgtggcactgtaaggaagatagcaaggaaccatggctggtattagaaaaaacagagcttaaactgtgtatgttctattaaataaaacttatgggaggtcatttttttggactaagctcctacaggggaccccaacagaccagaccaaactagaatggagtcactcatgctaggtgccacgtaatcaaactgaactttaaaataggtcagtttaaaagaaaaaaaaaagacccagaacattcacagtatcccattagaaggggccccgtcaacctgagctggcataaggaagtcccctctgctttaacccatataaagacaccttttgttccttgtttccattttcttctgtttttttctgcctataaagcccactcctgtgctcagcctttctatttcatagataggatgctgcctgattcataaattgctaataaaagccaattaggtcattagacttaatttgttgacattttggtttttggcagttccaagaggcttccagtatcatcacatatctaaatttaatcacaacttgctaatctgttttgtatgttagtaccactatctcatccccaagtttaaaatcatatacttctctggcttgaagtgttcttatatgattcattagttcttaaccttttttgggctcattttttgggaatctggtgaaagctatggagtctcccttcccccatgctctgccttctcgtggaaaagaatacattcatttttaaaagttcgtggacaccatgaaacaaatccatggaaccttggttagaaacgtctaccattaacgaatatttctaaatccctcaaattaacatttatagaaattggtaattataatcatttttgatttaaaaatatggcccatttctgctttatcaaaccatattctaaatgtaattttccatttccttgaagattaggggtcattatgagcaatcactgcaacacgactaatctaagaaatagcaaaaaagggcaggcaatgcccttaaggagttccacaaagacactaggctctgatttacaaggataattttatacttactgatcctgtagtcttggccatctcctccctcatgcaattcttgtgtcaattctaatgacctctcttctaattctgttcgagtaataaaccagaaaaacaagcttgtgaagtaaaagtaatggtacccctaatgctggcatcaagggactcagcattgcctgagggctgtaaagaaacacctggcagtctccagggtgcacaggcctctcagtatttactccaaggtctagctgtgctctggccgctggaagctgccagcaggatgcaatgggactgtctatagagggctttttatcatctttttattatttttttttatttttattttttttgagacggagtctcactctgtcgcccaggctggagtgcaattgcgggatctcggctcactgcaatctctgcctcccaggttcaagtgattctcctgcctcagcctcccgagggattataggcacccaccaccacacccagctaatttttgtatttttagtagagatgggatttcaccatgttggtcaggctggtctccaatccctgacctcaggtgatctgcctgcctcggccttccaaagtgctgggattacaggcgtgagccactgcgcccggcctatcatctttaagacaaagttctagccatcccctttagttaactattatagtttgcaaaagaaatctcatctttttatcctattataatcttgctgttaatgaattatataaaataggcctaatttgtactaaatacgaatatgtgtttatatttaatagaaaaaacattgttttggtgttaaaaattttcctatagaaggaagacatttcttgctcctttgattttagaagaaatctgcttgcattccaataggacttacaatgggtacaaatacctagggaagaactgagttatggaggtgtcgtatcttacacaataaactgtggggtcaggccctttggggctcaaatccaagacttttgagatcttgtgaactcctattgtgatcctggagcagtaaaggctaagggtctaggaaccaggataacaggattaataaagatatccttatttatttactaatatgattgaagaatgtgaatccactgtactttataaataaagcacatttcaacaggaagcaaatctgtgtttcagagacagtgaataaatggtttccattggttgcaacaacaaaaaagtctttttctgggtcttgaaatcaaaacctgtaatttttttttttcagacagggactgactcgcccaggctgaagtgcagtggtgtgatcacagttcactgcagcctccacctccttggttcaagcaatcctcctgcctcagcctcttgagtagtagctgggatcacaggtacgtgtcaccacacccagcttttttttttttcctttttttgtaaagatgtggtctcacttttggaatattcatagaacgaaaaaaaaaaaaaaaagatgtggtctcactatgttgctcaggctcgtctcaaactcctgggctcaagtgatcctcctgctttggcctgtaattgctaattctatgggggaaaaaaaatcagcttatacaaggaatttatgtgagatgacgtcttatggcttcaaattcataagagattttgtaaacaaagggtctctgcaattcaaagcttaacatatatgtgaaatacaggactcaaaacatccgatatcagtgtgatcagggtaaagtggtcactgagatgtcaagtgatcaaatgaataaacagtccagtgtttgctgtcatcacactcttagttccatttgttccaggccattggattaatctaaatacctattccacacatgttctgaccctggagagggagttactgaggcacacaaagatctcagataaaatgcagacaccaaaaactaatcctcttactggagatatattgttttcatgcgtagtttgcaaagagggctgtttattgtgccaggcccttcctttccatgcactcatccacaccaagttacatccatctctttgtgtcggtttcctcagctttaaaataaagatgataatcacagtacctatgctcacaggaatacacgagaagatggaatgaattaataatagaaagcactaagtaagcatttgtatattattactttattatcaatacttagtaaagttgtaagattaacatatcaaaagttggccaggcacaatggctcacacctgtaatccccacactttgggaggctgagaaggaggattgcttaagcccaggagtttgagaccagccagggcaacacagtgagactgtctatacaaaaaaacaaaaacaaaaacaaaaaaacccaaaaattagccatatgtggtggcccatacctgtagtcctggctacttgggaggctgaggcaggaagatcactatcgcccaggagttcaaaattccagtgagctatgatcacatgactgcactccagcctgggtaacatagcaagaccctgtctctatttaaaaaaaaataaataaatttctatgtgtaaaaaaccatttgaaaatagtagaagattcaacccacaaaggaactacaaaaatattttgacaatgtgcagtaactatatgaagaaaatgaagattctgaaggttatgaagatttaaatgaaaagacatttcacattcctgaatatcaaagtttcaatattataaaagatgttgatttttcctaagttaacctaggaacaatgcaaatcctatgaaaataccaaaatggctttttttgggaactcaacaaaaggatactaaaattcatctagaaaaatctgatagaaaatttctgaaaaataatagtaatttaggtggattgaataggaacttcttccactacatattgaaacataccatgaattgaaatagggaaaaagaaatacaaaacaaactgtaggtcattaaaagagaatccagaaatagaccacaatacaaatggaaatttagtctatgataatggtggtatttcagattagttggggaaagagagattatccaataggatctggtataacatctggctgtttagaaaggagtgaagctggaccactatgaaatactccatcaagtcagggttctgtgcaggaaacaaacttctctagatatttcaagcagaaaggcatttaatacagagaattaggtcgttacaaaaatcactgaaaaagcagtaggagcagaaactggagacccacgatcattttaccatctgtgacccaaaggacaggaagctagtgctgctgccacagcattaactcatacccacgaagcaggcgacaagacactaaaatgtggagtctggttgctacaaacaattcctgtctgcgggagattgcttactggcatagtagatggcctctgcctccaaatcttgaccaagtgcacatcattggtagaatataaactgttcagaccttacttatcctagaacctgaaaaacttcatgtttagcctttcatcccctgtggtatggggtaaggaggcatgggacgtcatgccaagtactaagagacaatatctagcacacattcttacactaaaatcaattccagatgggtgagttacctgtaaaaaaatagaatgaatctatcaaaaatttataatcctggagtgtggaaggtatttctaagtagcatgtgaaattcagaagccaaaatggaaaagcgatggatttacttaaataaaaattaaaaatggatatccat

SEQ ID NO: 8928 - DNA, 23769 bp, Homo sapiens
gtgagatattgcagacttttttccacagctctccttcttaacacatctgaaaaggcagttttaggagctttctagagcccacaatatgctccttaaaagcggtggctaatgcctgtaatcccagcactttgggaggctgaggtgggcggatcacctgaggtcaggagttcgagaccagcctggctaacatggtgaaaccccgtctctactaaaaatacaaaaacattagccgggcgtggtggcacatgcctgtaatcgcagctactcgggaggctgaggtaggagaatcacttgtgcccgggaggcagccgtgtcagtgagctgagatcacaccactgcactccagcctgggtgacagagtgagactccatctcaaaaaaaaaaaaaaaaaagagctttggttttcattgttcaacatctgtgtggtatatttttctgtttctaaaatccatttgttgtgcatatcttagatttttgcagaaatgaaattacaagatctggctttcctctggcatctgaaactgggggatttgatatatacattttagaaaatcatcagtgaagaacatatttgcaaaaagctcctatagccatgttctttcattttaaggtgaatgatttgcagttggaataactaaccacaaggaggtgtgcttcttttgacctaaatttccttgaataaactaacaagtacaatatatatggtttattctggcttttgtttttatttaaaatgaccaatgaataaaattacacaacatggatgtagcattttaaaattacctccttcaattataaaattgacttaatattttgtacacctacaaggtgcaaggcacactgctgggctgtttgttaacggcatactatactctatgtcttcacaagtcatttgcatagaaaggtgcttgaaattctgtgtgatttgttaaaatcagtaattccagatgggtttacttcaaactagtgatacagtgatagaggcaggaggcagagaaattttaggcagaaaagggagggtccctgacaaaaccccaccctcaagccaaaaagcctgaaaccgcagcccaaagtagagaacttctctcccttttgtctgctcaaatgttgctttttcctaaattacccatggcccaccctgcccgccatcctgtgctataaagaccacagactcagccagcagagaggagaagcaactggacgtgagggactacggctggatgtcagagagaagtggcttgatttcagagggacattttgatggtgtaactttggagaaaaatccagccagagatggcaggacttcaggggaaggttacctacccagcccatccccttttctgctctccttcctgctgagagccactttcactgggaataaaataccccgcatttaccatctgtgaattcttttgtgtaacctcattttccctgaatgcaggacaagagctcaggagtcatgagtgcagatacagaaggctgtgacactggccctttactcttgcctagggcagctgcctcacgcaaaaaggcaaagggcccactgagctgtttacacttaagccacctacggatggtagagctaaaagagcactgtagcatgtcctctggggctttgggagtcacaggccgcccctcagtcactgctgcagggccctgcacagagtttgctcctgctggagcccaaaagtgctcaccctgactcctgcatcctctcacctgcatgctccctcccacgaggggtggaacacagtgtgtccaagtgatggagtttgatcccagtagcgccgaagtggccgggttgttccagtgctggtgctctccagtcctcaccctcgttcacttgtgcgctccctcctgtgaggagttgtgggcagcaggctgagtaaacacctctgacgtgggtcccatgaaggggtcagggaaatatcctgcttcggtcgtccttcaaaaagtaactactgcattatctattttttaataagaaatttaaatattaaaatatgttaatgacattagtccaatgtctacggatctcacaccacatagtccaaacttcctcagacagaaatattttcactgttcaaaaattctgccacactgggaaataaaggagtagacatgggctgacatttgaaaatctattacctgtattttttttggtaatagaatatgattataaatctcaactttattactgacttaaacaaggtcactaaagcatttcacgaagagttcctgataatgggtaaccagatatctaggactagatactatttagcagctgaaaatgatggcagaaaatatatgggcagcaatagaaaaagaatgtgactaaacatttttagcaatttgatataaaatatttagattttaaaaaatctgtataaatggatgaataggttggattttacggaaaaaaataggctcagttcaattagagactgaactgtaacatgataaatcagaatcaatgatgacaagttttatatactattttaatagcacagaaaacaaaaccaaaaaaacctattacctattggcgaaacgactgatggaacatctaataacttttaaatcaagttaagcctaaagctgcctccttacaaattttaagtttggcctaaaggtttctcaacacacagtgaattgtaacctaactgcatgtgtaaacaggctgtaacctactcttataccaatcactgtgttgcagcccatcaaaggcagccaactgttcgaaccttgttcaagtaaggtaaacaccaagctgtaaccaatccagctgtttctgtacctcattttcttttcctgtaatttatttgctttttttgtccataattctttgatcatgtggcagcactggagtctctttgaacctgttctggttgggagaggggcacatttcacaaattgttctttgctcattttaatttgtccaaagtttttcttttgacacaatgaactctgattctgccaggtgtttctgggaaaattgtttttcagaaaaggcaatgaacatttttgataatttgctactacacgtgtgtctggaattggttccttccggtgggttcttagtctgacttcaagaatgaagcctcagaccttcgtggtgagtgttacagctcttcaaggtggcatggacccaaaaagtaagcaaccctaagatttattgtgaaaagtgaaataacaaagcttccacagcatggaaggtgatccgagtgggttgccactgctggctaggggcgccagctgttattcccttatttgtccctgcccacgtcctgctgattggtccattttacagggtactgattggtccattttacagagtgctgattggtgcatttacaatcctttagctagacacagagcgctgactggtgtgtttttacagagtgctgattggtgcacttataatcctttagctagacagaaaagttctccaagtccccactcgacccaggaagtccagctggcttcacctctcacaagcaacgttatgtttctcatcttctaacagagcgttctgtgaaggtctgagatgctcctacatttctagtctcatggaatctcgtcttttttcaatctgaaaacaaaatggaaatgtttttgcctcaacttgttttttttcttaaccaaataggattccttatggtaaaaataactgggaaaatggtggctccaactatgttttcacaaaaaattgtagcttaagtgaaatgcaaatgttcataaagtcattttgctattactaaaataatttatataccattgtgatgattcactgatttaattaatgaattcataagaaaagtaaaatcaaagcctatggaataagcctggaatattttggtatcagttttgcttgcatatccacaaattatagatggggctgtattttgtaaaaaaaaaaagaactgtgtcatatctacagcataatgaataaacgatgtgaacagaaacttcacagagaagtataagtgctcaatgaaaatatgaaaagattcacctcattaggaattagaaaataaaaaaatgaaagcaaggcaatattattgacctatatttacttgaatttatcaacaaaataactggtgaaactgataggattataaatcatcagattattgtttatttgtaaaagatagttgctcctaaaatattttctaaaataaagaagattatgaaaaatattaagaaacctgaattgatattttgtaactatatgttcccactttggacagtttccatttttttttaatattctgatgtcatttacattttattttataatcatatcccataattgatatcttagttttacgtttgaatgggttaaaatctcaatgccagtttttttagtttttcatttttcccatattaatacctttattgctgagttatttactttgattactcttgattgagtggactttttgcccaagaaagatttttaagaagggttcttgggtattgtgttttttgagtttttgctgatttaggagaatcctgccccaccagtttggctgtaatattatgggatcatgcttttgttctcagccttttttacacactgcacattgccatcagatgccactgaggagtctaaggccactattgtcattcccttgtttttatgcctgggtgtgaatatagtctttatcctttatgtttagcaactttaccaggatacacattggtattcattgctccttgtcaatttttcctaccaaggactctccagcctcacttctcatcacctcctttgctggaggcacacctgccttgccaactacttgcccttctgtgaacttattatgcttcttcatatccctgtggcttgtcagaggcaagtgaaatttcttcgtgctctactcccactcttgtcatttactgccaccattctagcagatttaccttctcagcatcttctcactccccaggtgacacaaccactttccccttccacccttgaaatgtaacacagatccttagtattacagggaattatcattcatatttaaaactctcctacccaggactgtgagctccaaggaaagggacgtgtaacttacatccacttaacgacgcaagcaatttaaagccaagagttcttgttggcaagaattgggaaagttggacggacagtatacaattaccgagcagccaataaacaggaaaagtcatacagttcgaatgttctgaccaggcggatattctgtctttaagaaacactaatcatatacctgggaaagaaaaaaatcttgggccccttcaaactgggaattactcagggcaaatctgcctcctattctatccaagtcacctcttttgctgacaaagaatagatgcatattctgattgcctcctttagaaagacttatcagaaactcaaaagaatgctactgtctattacctacctggaagcccccagttggggggggcggggcttgcttttaacggtctccgcctttctggaaggaactaatgtactttttacatattgattgatgtctcctgtctccccaaaatgtataaaaccaagctgtgccctgaccaccttgggcacatgtcctcaggacttcctgaggctgtgtcacgggcatgtcctcaacgttggcaaaataaactttctaagttaactgagacctgtctcaaattttcgaggttcacataccgtaggtaaaagtgtcagaagcctaaaggtgagccagtggaaaagcctgaagacccctgcaaggttattagctaagcctccataacgcaggcggcaagtgtccaggagtctggcgtctgctcgcctgcaccacgacctccctcctggggagaaggacatgcatggtaagccatttctccatttccatactgattgcttcctctcaccaccacggcccatctgcgaagcaaaactaatcctggcgtggaacaggccgcctgagggaaacagctagagcccggcgcggggcggagctggttgtgcgcatgctccgtgcaggcgcaggcgggggctgagcgccgtcgggttacgcctgcgctccgggtgagcccgcgcctgcgcctttgcggccgtgattcggtcccgctgtcctaggcgggatggtgccgctgtgcyaggtaagggtggcgggtgtgcgtgcgggcctgggtgcggagccctcctcgacgtgtctctccygccctttccctccacatacccagccttggtcagtcggacctccccactagcccccaacctggccggcgtcttgggttcgggggcgcccccgcccccgcccccgggcccttcctgtctccgggctttactgcgactgccccagcagaagtcgggtcctctccgagaactcttgtcagctcacggcagcaaggacggactcgttctgaaggcgcctccaccttttatgaccacctctttcccagattattcgttttgatgaagctaaaattttaatctaaaaagaaatgcacctcatggagaattcttgtgaagaactgtgcttcatctgtggatttctacacccttgatcatttgcaaacctgtaattatttcgtaaagagttgtttgcacggagtgacaggtgcctattttacttcgtcggatcccttacataccaggctgctggcacaagtttgttctagcaaattccagtctgtcgtgtgtttcaaacctacttgcttctgtaaatgtcagatttactatgttgcataacttaatccttagcgtctggggacgatgttatacagaccggaatctaaggtcatttgacaaccgtgagaaacaggtttttcgcttatttattcatttattttatttgtgtaactcatctcttgactcaaacatttgttctttgcttacatatttataaaaggtgctatacttttatgtcaattaaggcaggcttaacatgttttcctagaagataaatacttaggattttaatgatggcacacttaagtttgtaaaactaaaaggcatccagaaattagtctgaattgtatttaaaacaacaagttttcagaatttgaacttgtaggtatactgaaattttttacgggttatttaattttctttataaaatttgtctttgattaaagcaatacatttggaaaatgagaaaactgctcaacattgacagtcagaaaacgagtatgagttgttattaaaagcattttctttactttcagkttgaagtattgtattttgcaaaaagtgctgaaataacaggagttcgttcagagaccatttctgtgcctyaagaaataaaagcgttgcagctgtggaaggagatagaaactcgacatcctgggtagttaaaaatttgtagaatgcatatgagtaacacttaratattttcaaaatacataaatgatmaaagtaaaaaggttaatttcgatttccgtgcttaatgtcaaaaagaatcgttagttgtattttttttggaacacctgaaaaactctaaatgtgcaccgtattttaagaaaggttaaagatattttaccccaaaacacagtgaaccgcagagggacatgattatattctctttgataatttacaaaacactgcacatgtcacttctgcaattttataacattaaatgaaattgttacaaattctgttaaaaatgtgtgctttaaacattttgttctgcccctctctttagagagctcaacatagaaatttctaagattgaaagaaaaatgagttacaacaaatcctagatgctgctgaatttgagtttttgtaatatttaattttttttctggttcttgaaaaacctataattttacttatgtcattcccacttcaagttctttttggaacaaaatataaaagtgacttatttgagggtgattcaggaatattaatggtgtyacttagcttgtataggtgtttaacctggaagtcctagttctgtgtaaaagatactccataataagtgtttaaaagcaaaccacttcatgatttcgtatcttttaagttgctcttacagtggcctgataatcaataaaacacagtggggtctcccattctgctttacctggagggagacagcaggtcttgtatacgttttcactgtgcctgaaaagaaagcttaccattgttcaggtataaaggaacagctaataaagctgtgttgcaggtggctttatgacctatgctatctttttcatctttctaagcaacttaatccatattcgagtaggataatgtgtacaggcatagtttgtgggcagttatacttgtgcttgaacacatggatagaaggaccctggaaaggccatgtactgattggaaacttttcttttgacctggtttgagtgttgcctccagtctggtgggttttttgtgcatttttttgttgtttaattccccaaggcatacaacatccaataaagagttgacagcagtttaacgtatctttgtggtgtataagtatgttcttcagtggatatgtcctttctccatatactatgtgtaaatttaattggtaattttgcaggtgatgctttatataattatatctatgtaatatctctaattgcagctgaagcgatttgaggtctatcatagcgttgatactttgagtcatattttttcccctttagattggctgatgytagaaatcagataatatttgctgttcgtcaagaatatgkcgagcttggagatcagctcctcgtgcttcagcctggagacgaaattgccgttatcccccccattagtggaggatagtgcttttgagccatctaggtatgtgagatttgtttttcttaatcagtcgtgtggggaaggatcatacagatgataaagtgtatgtggtttgctgttaatgtatattctttgtaagtctgtctgtaccaaatctttattgatgcagcaactcttcattggtgccaacagatttatgaatatctagcaccatttctgcatcaagtctattgtaagcagtttaattacaataaacatatcagtttgatatgtttcatttaacatggtttattgagatcttatgtgtcaggcacagtgacatattaatatccatattttgcaggtaaaaaaacaaattcagaagacttaaaaaacttgcctttgatcacatagctaatcacatagctaataagtgaaagagccaaattaaaaagaatttatttaacttttaagttcaggggaacttgtatcatggcggtttcttgtacagataattttgtcacccaggtattaagtctagtgcccatcagttattttttcaatcttctccctcctcccaccctccaccctcaagtaggctccagtgtctatggtttccttctttgtgtccatgtgtactcaatatttatctcccacttgtaagtgagaacgtttggtatttggttttctgttcccgcattagttggctaaggataatggcctctagctccatccatgtccctgcaaaggacttgatctcgttctttcttatggctgcatagtattccatggtgtatatgtaccacattttctttatccagtctaccactgatgggcatttaggttgattccatgtctttgctattgtgaatagtgctgcagtgaacagacgtgtgcatgtgtctttatgacagaacgattatatttctctgggtatatattcagtaatgggattgctgggttgagtggtatttcagtctctaggccaccctgtcttccacaatgattgaactaatttacactccctgcagcagtgtataagcattcctttttcttcacgtcctcgccagcatctgttattttaataatagctcttctgactggtgtgagatggtatctcattgtggttgggatttgcatttctctaatratcagtgatgttgagctttcttttcatatgattgttggccacatgtatgtcttcttttgaaaagttcctgttcatgtcctttgcctacttttattggggttgttttttctcataaattttaaaaaattccttagagatgctgatgttagacatttgtcagatgcatagtttgcaaaatttttctcccattcggtaggttgtctattcactctgttgatagtttcctttgctatgcaaaaactctttagtttaattagatcccatttgtcaatttttgcttttgctgcaattgctttttgagtcttctttgtcattaaatctttgcttgttcttatgtccagaatggtgttgcctagattgtcttccagggtttttctagtttttggttttacatttaagtctttaatccattttgagttaatatttgtatatggtataaggaaagggcccagtttcagtcttctgcacatggctagccagttatcccagcaccatgtattgaatagggtatcctttccccattgcttgtttttgtaggtttgttgaagatcagatagttgtaggtgtgaagctttatttctgggttctgggttctgtttcatttgtctatgtgtcctgttttgtaccagtcccatgctgttttggttactgtagccctgtggtatagtttgaagttgggtagtgtaatgcctccagctttgttctttttgctgaggattcaagaggttttcaaaagacagcatttgaactcatattattggactgtctgtgtacttttttccaaccacacttactaatactagataatagctctcccggccatggaaaatgtagaaaaatttcacagctaataatgcctgaaaagagagctaatcattgcccaggactaaaggaatagctttattgttatggctgtgttgcaggtggctctttgacccatgctaccttgtcatctttctaaacaacttagtccatattcaagtaggataatgtacaagaacattgttcagtatagtgtggagagatcaggcttcttataagtacagacagaatgaggcttaatttattgtcagctgaggaacaaacagtagaaattaacagtcatccctgaataaaaactcttggtaagttaggaatgaaagaagactttcttaatttgataggatttttattcaaaatcaggagtaaatatcatatttaatggcaaaaacttggttccattaaagaaaggagcaagccaaggatgcctttttatcttttttcacccattttttccccaccctcctggagggcagtgccacaagaaatgaagaatcaatctgtaaaacagattgcctctcatgtcaacactaggcttctttctcaggcctactatctggaaataatagaagaatctcttgtcagayatgtatctcaatgctatttagaaactgtggtcaccatatcaccaccatgatttcaggaggttctaaaaatgcagttttttggaatttcgaatttattcagaaaactataggctrccattaaagggatatttgtggtaattacagctgttctttgaaaaggttacgaagattactcaaaagcattgtgtgttacttgaatgtgtttcgcaggactggtattatgcatttttaaaacctgccagctaggttttagtagtctcgtaaaatcagaagttgtgggaactcagtatggtttgaaactcgtagaccatatttatattacctatattttattgcaagaaaaagaggtggaagacacttaggcggcttgtgtagcagatgaaaaatcctggaatccagtggtatataaagaattgtgctgtttccgtggtggaaaggagataggaaaaagaacattggcttaactagtactccttggttggaatttcagcaccttgagtgagttccttaacttctctgagccttctttctctcgtctttcaattcagatgaaaccttacaggattaataattatattcctcattgcctgcaagattctacctacctgtccagcctcagcctgcccagttctctccgttcgttctaggttctggagcacatcacaccctttcttgtcccagtgccttggcattggccactccctctctctgcctgggggcctgtgccctggtttctttacaagacttcctccttatctttcaggtcgcaacttttcatagaggctcttgagagaaatctcccccagaccccaggttctgtctctgaagcctatttacttccataagttatccctatttgtaattctgagtttctcctgtaatgctttgtttctcctatttgaatgtaagcacgctgaggaaaggagcttgagcttctttctcccctgattgatatctagtgcctggccctagtctctggcccttagtgagtatgtagtaatgtttgaggaattaaatgagaaatgcatggcaaagggctttgcacaatacctagtaagtaagtgtgcagttcattcccttatttcctcagttacttacctggggttttgccagtttgtgaagggaacccagttccagtagaatcactgtcacttctgttcttccttttttgttggataaagaaaaagacagctttaggtgtggtgcttggtaccatagtggtgagaggggatgggcatgtaggtgaaagtggcaatacctccactgtatcttgatgggagatatgaatagcagttacagaatttggaatatattggcattgagacagattatattttagtgatcatgttaataatggattactttttatgtcatgcctgattcattatgaatatttatacacataattgagttttgttaatttttacacttgcttatttttatcattcagatcaaatcatgcctcctaacacatttaatggtggggaaaaaaagaaaagaaactttttatctgaggaatgtgagcccgtcagataaaacattaagaggcacagaaaggcactggaatgaaatggcagtcatgtcactccccattaagctgcatcattaccttttttttctttttttttttttgagatggggtatcactttgtcgcccagactggagtgcagtggcatgatcartttcagctcactgcaacctccacctcccaagctcaagyaattctcctgcctcagcctcccaagtagttgggattatagatgtgtgccactaccgcctggctaatttttgtatttttagtagagacggggtttcaccatgttggccaggctggtctcaaactcctgaccccaaatgatccacccgcctcggcctcccaaagtggtgggattacaggtgtgagccactggtcccttgaagccacttattatgagggctgcagactagctgaagctaagaaaccataaagtccatatgctggacactctaacttgtacccaccctatagttcaacagtgtacagccaatcagtgatcaacattatctctgtatgccagtgagaattcttggtgaaactttgtatcattgtatcagcccactttttgttccctttgcctttacaaacctgcttgcaacaaaggccgagggagtgctccccaaaggaactccccaaggtatcttagaagcatcctgggccactgtccttgatttgactcatgtaaactatattttgtgccayagcctcttccttttacatcgacataatgtagaaaaaaatataaattgaaagagcctataagttgttgagtgttttacccctaggacttctgttaaggtttgttaatgtattatttctaggaaagrtatggatgaagttgaagagaaatctaaagatgttataaactttrctgccgagaaactttcagtagatgaagtctcacagttggtgatttctccgctctgtggtgcaatatccctatttgtaggtgagttgtaattttcattgcatctatcactgtataagacaatagaaattagcatgtgctttccatgttcagtgttaacggaggagtttgaaatactgaactttaaaccaagattaccgatgatggtgggtagacttttttttagttcttgttttgttttagtaaccttcaaattaacctatattaaattacaaggcattttgaaaagtaggataaaagtcattgttaggagagagaattctagattttccaaaattgaaggtaaaaatgtacttgatagtcctgggaacataaatattttccttttaagtatctattagtcagaagaggaatattgcccrgtttgccaggtgagtgtttttagtaagcttgcttaatcagtgctcrtctttgtgaagatctgttttattttcctaatcaaattttgtttttagaagatttcaaagtagttttagaagaattggtatgctgcttgtttactrttaatttactattaaaaatattccttttttattaacgtgctatttcttttgtagggaaaaaccttattttaattgttttctytttcttttttttcatttttaaagggrctacaagaaataactttgaagggaaraaagtcattagcttagaatatgaagcatatctacccatggyggaaaatgaagtcagaaagatttgtagtgacattaggcagaaatggccagtcaaacacatagcagtgttcyatagacttgggtatgatttcctttatcactctaaaagttaagtgtaattgttttccatctttgtactaactctgattcttgaatctttcttagtaattctatattaccatgagaggaatattcatgtattatttttggaggacaatagggatggctgttagtacctttagggactgcctagtgagttttgatattgggagagctcttgttgcctctgttgctgtaacaaactgcagttgtgccaagacttgcaggccctatgacaatctgtgacagattctttttgatataaatgcctcgaaagtcattagagtggtttgcctttttgtacccctaaaaagagaagagttcttggctttaaaaagaagccagtaattgagactgtatctatcatactctgttagttactagtttgttattaataaccagtagttttattaatggttattatcactcctattacttgatatgtattattttaaattttgtattatactcgttaggacataactttgtatttctaggcattacttggcactgtgccttgttgagtcagatgtttgctctatcaatgaaaggattttccttggtgcccatcaggagggtttagtggatagattctaacaaattagctgtagcatcagcctcatctactgcctctgctgaatgctactgcaattaattactcttttctaactrtatgtttacgtaaaatagaactacagtataattctaagactgcatacctggattttttttcatctgtctagcagattctttaacacrtagattcagagatgatggtgatttttttttctcttcatcttgttaaagcttggttccagtgtcagaagcaagcataatcattgctgtgtcctcagcccacagagctgcatctcttgaagctgtgagctatgccattgatactttaaaagccaaggtgcccatatggaaaaaggtaagttaagaaaataacacattttagcatgtggacctgatttttctcaggaatttttagataaatccccccatatttatggactttttactgactgtagtatcttgttttctttatctgtgaaatatcttctttccaagatttgttaagcatgaaaaatatgtgccccaaagaatgcatggcacacagtaagcctcaatgagtgataacagtgagaattcctagtctggactgttggaggggttcatacatgaagttattttccttggattataattcccttgaattagagggtctttctgttggagagtgagaataatgcattagctatttaggtaatggctaaaatagaaattctttaaagtgaaagaggcttttcctagaggtcctttttagggaagaaaaaaaaatggtgagatattgctccctctgagaaaatgcagtgagtggatttaaaaacagaaataggaacttctggcatgttttctgtcaataagggcaagtaattctctggttaaatagagcattctgatgggatgaaaaggcccaactccctagtttytcccctggtgtagtaacattaacagtgggattgttctgtggttgcacattcaatgtctagaattgtctagaattgcctacagcgttgtggttgacagaaagctgaggagttaatgaacagctcagtagatgaaaagaccagagcagagagccarggcttttaaagggcacttctcccctccttcccaggggacctgcctcagtcagtggtagaaataagcaagttggactcataaccagggcctgggaaatttgatgaccatgttttcagaataaaattgaagcccattgttagaatacgtagggattagaggatagaatatgtgtgaaaggaaacttagtgaagctcagatatattgttcccttgctytgaacaaggctgacacaacaggaggcaggcccccagagagcgagaggtaggaagagcattctaagatcagctgcaagcctggaaggcaggggtagctttcttcaccagggaggaaagggtgcacagtcagtggacagaaagtagatgggagcaaccccagaaatacaggtaatgagcaggagttggggcatattcttgttttcatgctttgaggactagttgggcttcgtattttgcttttgtttgtccatagagagtccgaggaagtgcaggagttcagaggacagttgaatttgaattcctctccctacagaaatggaatgtgactagagagtgagaagagaaagtgatatgttctccttacccctcctttccacaaactatgtaacttctagtctggttctagtctcggcctgtgctttgagatcatctgtgatatagggaagggtggcaggtaggtagagtgcatatgtcaaagaacagctcataccagagggcagctcaaacttgtttaggaacttctgagaggtgaccacttaattcaacagctaatgaagatatctgcctttggaaaagcatatttagaaatgttgaagtagtaggtatgtttggaaagaaaaaaaaatgtttaaaactaaagactttctgtcttcccctatgtaaccttgcccatgatgtctctcrtcatgattgttaaaagaggagccattgaaatagatgtgatattcatttgtctgatttattcaaatatattttatattcgtatagtagaatggtctatttttaatacctgttatgattttgttttttagraaatatacgaagagtcatcaacttggaaaggaaacaaagagtgcttttgggcatccarcagttaatcacttatgtttttagagcatgcartcttaactttgttaaactattattattgatcacattttgatttttttctctccacatcaggatagtttactgaagcacaatctcttatactagtgggacaaaagggagaaaaaggaarcaagataaatgggtatgtaggatgaagggttatttaaaatggaactaaagatagaaggaggactgtaggaagaaatggaataatttaaatgtgaggaaagatatctgtggtagacatgtccttccatgactaatttctaattgtaactcaacacacattgaggtatgggccctcctcagtgactttaactagctcagaaacgtactcccccaccaaccccacctcaccgcccccyatcccggttctgggagagcattgttattaaggatgcatgacaggaatgttggmagaactggaaagtattaaaaaagcattatcagacagtcttgatattatacattttcagaaatatattaaaaataataaactaaaacccatgatttcaaaagtttaaaaagagtattttctttttttttaaattgcctaaaatagttctcattatggagatttctgggatttcagaatctataatcttaccagaaaactttttgttgttttttattagttgttaattttgtatcaatatacaaatcagcacaaaattgtcataaagctaactagcaacaaggtggtttgtgttgaaatgtttaggtaaacaatgccccaatttttaactggttaagctttatagtattttgatagacttgtacatataagtcccatatagttcttaaatttttttttccagctttatttaggtatacttgacaaaaattgtatgtatttaaagtatacaatgtgatttttgatacacatatacattgtgaggtgattaccataatccaactaattaacatattcctcagctcacatagtcccctcttctgtgtggtgagaatatttaaggtctactctcagcaaatttcaggtaaacacatagctcataaaataataaaatacaggcaaaatttgggcagtcggcatcatcacaaaatttgcattatgcatattaagaacaaaagctatactttcagacacttagattgaaggatttttttcttatgtctgggacaaataagaaacgtagtaatcctatttgttatatgtagtgaaaacatcttttacctaaggaacccatttattcaacaaatatttattgaatgcctgttttgtgccaggcacccacccagtgatctttttctgccaacctaaaataccttgaggaacactctgcatcttatctgtggctgggacccataggacagccacactgactttaggaatcacctggttacatcagttgatgcttgttcattagtccgtctggagagattgggccagaaggatactggaagggcagacaaaccctccgcctacttcctctgccgggttcgggttgcctgtttggtctcagccttaccttcacagttcagtgtcactctggcttgccatcgagcttccgcctgtccccattggagagaaggggtgggtgttggctgttgcattatatctaaaagcacattatcatggggttactgggtcactggacatttctaggattttggacataggttgttaaatggatgttatgtcatatgcaatgttgataggtatatgtggatttcaagactttcctacttagatatttctttagaagttccttattgagggtaatgatgtttttaaagaacatagaacattctttatgttttaaaagaatcatgccttcattaagtaggctttattctaagtttggaactgagactgttatgcttttaaagtctccaacagagaggttaaggagttaacctggggcatgccagaactgggatggaatggccttgaaagattttagtgcattgcacttgacttagataggatctttactgacccttgcttacttaggagtggcagagttaattggtggttcagatattaaggggctactgtcactctgatatgtagcttttctatcatctctgtaacttagcttcaagtaactagaagagtaatctaaaaaaaataattagcctttaatcagattgcctgcagtgtttcttggtcactttaaagccgtgactttgcatgattgctaggtaagttcacttaagaaataggaaattcaaattatttatgtttcaagtatttttgaacaggtggtaaaatgaaattgatttttatcatctttgaatgaaagtaacagcagatattcaatgagtgacttattttgtggacatttttgtcctttggatatgatgtatagagtcacaatatattttcagccttttttgagaaataagtgatttagacatcttacacagttactgagcacctggtacagtgaagatctctcaagaatgatttgtgtgatgtagttcggtggatcatccagcagagggcagtagagccagagccatagtaaaagttatagtaaagttgctcttagcaacttgagtcttacttagatttaattttgcatagaaccaaaagttcagtttagtagccattttctttaaagtcaggctgtagtggttccgaaatgaaaattaggccctgattttatgtaagatgatgtccaatctttaattgacaccttaaaaatattaaaagattatgataggatcaggaaggagtttttgaaaatgcaatttgtagtttttaacaagtgatgtagaataaataaaaagaagtactttttaaaaagtaagtataaaattattttccagttaactatgggatataaatgattgctttaatacaggtcttcctaacctgtacagcatttcctaacctgctctgtgaaaaacaaagaaataaaacttagtgctctctttctctaacattttattttttaagagctgggagggggggggtctcatgttgccggccttgaactcctgggttcaaaggatcctccctgcctcagcctcccaagtagctgcaattcccacattcagctctccaagattgtattttaatgtgagatatatagcagacacacttattgatggttgtgctgcagtgagctgccctcctgagacggctcagcacaactgcgatgggcagggaggcatgtgagagagcgccgcagacatgaatggagatgctggtgcatcgctatttatggcagcacacacacactttccaccctgtctttgcattactctgccatctgtacagcgatggcagtctgtgagcccaacgtgtacttactttataacttacagcatatttatttcagcatatttactctttaaaaatatttaaaccttcctgcttattatgattttttttaaactgtgcagatgactctgcttttgcatgttgcagcagtttggctgattttttttccctctctattccaagcacacattttatttcaaaaggtaagctttagagcagtgcttctcaacttcaatgcaatatgaatcacctggggatgctgtagaacttacaatttgacttgaatagttttgagtggcccctgagatctgtgttttttaacaggctccaggtgatgcagcaccatctgtccctgggccacactttgaggagcaatgctttacactgtctcaaaacttcgaaggcagtttaagagtcttacaaaagaagatccttgtggtcactgctagaaacatagactggacacttatggcaaattaattatagcctcagtcttcttaaattgagtcttggatgtgagcaaagtgaatgtataagataaaaatagtaaaatatataacttataaaagcccaaagaaaatggctttattttcaaaacaattgtaacaatattcaataatgtggtatgaaaaaagtgggttacaataatgaaacttttctgtttgttatacttggatatgagaaaaactactaactgttgactacaatttaatttttgtttctcataaatcaaatgaattctgcaactttttgtacaaacatgcatttatttttacagtttttgtggaaagaggcaaaacacatttaatcaaaaacatcaaacaccacatttgaaaaaagacttatctattatgtataaaggaaaatatccaagacaatttctttaaaatatatacaattctaacatagttatgcaatatatacattcatattttgacttaatctgccaaaataaacaggtacatatgaaactttatttacataatggctacagtttcagtctttagagttcaaagaaatagttaagattttcacctatttcatacttttcccccatgtttctcattcacctctagaggtttaaattaacctttcaaattgattaaaatgggtatgcctgaatgtacacaaaagggcattgttttatgtgtgcaaattgaaatattaaagatggatcagggatctcagtttaaggaatcctgccttctgtatgatgatgtcttaatttttgagattttcatatattgggttatagctatatatcaggacaggtaaatacattataaaattataacctttataataatttttagtataatcacttgtgtgactataataaattggctttagttttactcttcacagttttaataggtaactattttacaagaataacattgctaggtagaaaaatttctgttcagttaggagttcttattttgctgctgaaatgagtcatgcacaattttaaatctctgtagtttcttcataagctattttactatcttactattttataagccttgtgttgcagtcaagtttttaccacattctatagaccttgtctgtacaccatttatgaaatggaaatttgaatatgacatcttttatgccctctacttacttttaaagcaaaaatattgttgaataggaacacatagcttttatttaaacaatgttttttccccctaaatttcttgtatgaatacttacctttgcttaaaagtgcttgagaaatactgccccccaggaggcatttgacaatgtctggagacattttttgattgtcatgactgcggggggagcatgctctggcatcgggtagctagaggccaggaatgctgctaaacataccttctaggacagggctgctgtcctacaaggtacaggacagcccctgcaaggaagaatcacctggccccaaatgacagtagcgcccaggttgagagaccctgtcctggtgtgataaatggtgcagagacaagtggctaatggtttatagtaattcaactactccctggaaacagtgtaaactaggctgattacctaaggcaaggctaaccaaagctttcaagttccgtatatgtatgtttagcacttatttaaggaagtactcacctaaaggaggtgagacagagtaaaaggaaggatgtgctataattgtttgtatagcacattgaaaagctagtatttacatatacagtactaactttttttttgtttgtttgtttgagacagagtcttgccctgtcacccaggctggagtgcagtggcgcgatctcggctcactgaaacctctgcctcccgggttcaagtgattctcctgcctcagcttcccgagtaactgggattacaggcacctgctactacgcccagctaatttttatattattagagatggggtttcaccatgttggccaggctagtctcaaactcctgacctcgtgatccaccggcctcagcctcccaaagtgttgggattacaggtgtgagccaccgtgcctggccacattgtctttttaaatagtcatttttttgagacagggtcttgctatgttgcttaggctggacttgaactcctgggctcaagcgatcttcctgtctcagtctctcaagtagctggagcttcaggtacacaccagcaccactagctgttaaatattctttatcaagctaatgactagtttctccagtcttttttttttttttttaaataaaattttgttggaatgaagcagcaaattctcacagctgttaaaagaattggactctggcatacctaactggagaataccatgctgttttttctataaaccgctggcattttatgccttttttgtttgttttgtgttgtcaactacaaagtaattctgtaaacagtacagatagccctggactgccaccacgggccaggccagggtagtcaaggttgtccatatgcacatgggcagataacctgttttcctttgacatttttttccaagtcaaattcttggaggattgtgtatttgtattataggaagtccagatcatagacttttaaaactaaaagcatcactgctgaactccagctcagtcttcccattttataatgaggactctgaagtttatagaggtcaaggacttgtccaaagctttagatatgtagtgtctgtgcccttttcctctaagtttctcctagagaatgtgggggctcaggaacagagaaaataaggtgcaaaaagtagaaatgggtggtgtttctcaaagtgtggtccatctgcatcctagtgactg

SEQ ID NO: 8929 - DNA, 43203 bp, Homo sapiens
agagatacctcagcagttgggaaggggttctgtggctgctgcatcacaggcacacatgttcacacacatacaccctctacccacacctgccaccttttctgttcccctggcagtctggctgttcctcagccttgtcatgtactgtttcagatccgccaccgtgatgatgctctaccttttgcccacgtggccattgcagtagagggtcctggctgggccagcccggacaatgtggccttgcaagtggccaatgccatcatcggccactatgactgcacttatggtggtggcgtggtgagtgccagcgcgagcatgggacctcgccttcagggaagagagggtgctggggctgtgtgctcctgtgcgtgggggtcacagtgtgcgttgaagacaagagggtgggtgctgaccacctatccccctggcagcacctgtccagcccactggcttcaggtgctgtggccaacaagctatgccagagtttccagaccttcagcatctgctatgcagagacgggcttgctgggtgcacactttgtctgtgaccgaatgaaaatcgatgacatgatgttcgtcctgcaagggcagtggtaagtggcagcctggtattcctaggtgggatggcggctttaaccagcacagtgggaggctgagagatgacacactggctcagaatgaataccacccacccccccactttaggatgcgcctgtgtaccagtgccacggagagtgaggtggcccggggcaaaaacatcctcagaaatgccctggtatctcatctagatggtgagtcctacagctcagcggggaggggtagagtacatcttgccagcgacagcaccaaggtggccactgctcctaactaaccaaggttagaaaggaaaactttgaagaccacgccatgccccatcaccccacccttggagatgcaggcaggtgtgagacaggtccacagcccatcactgccataataggtgaccatagaagagagggctgtgatctgagtcagcatgaggtcagggaggtccttgtcaacctgaggctggagattgtttgtgtacctgtgggtccaggattgggctgggtggacctctgagccttctctcacccttaaaggcactactcctgtgtgtgaggacatcggacgcagcctcctgacctatggccgccgcatccccctggctgaatgggaaagccggattgcggtaacatggacccctgggagaggttctggagtcttggcctggcagacacctgggaggtgtagggttggggcctggcatagcgcagcctgctcctataggcatccctggtgtcctaggcagctgtcacctgcaggggtagcatagtgggagggcagggcataggtgctgatggctgtggagatgggcggggcccatggaggtctatagcagggatcccttctgcctttcctcttttgggctggggacagctgcatgctgcctgtgggagatctctgctagttggatgatgctgactggctgaggtggtggccaggtgcccgttagccagtatgccctctgcctcaccctgcaggaggtggatgccagtgtggtacgtgagatctgctccaagtacatctatgaccagtgcccagcagtggctggatatggtaagtggcctagggggtctgctctttgtttatttcctcaggccgttctcttggcctccccttccacctctgctcccgcactgctgctcagcttacagagcagccagttaaggccccaagcagctctccccagtcccctggctgccagggagttcttgctcagaaaacctgtcccagcagttccttgactgcctgccaaggtgccttcatcaataccctgcacccgtcaggtaacgggcacctccatgtggggtggggcttcaagggccagaacatgaagggacaggctcagcacccctgggggaatgttctctcctctctttccactcaaagcctgtcttgtgctgctctgggcagcatctccgagctgggtgcggcacagggccaggtgtccctgtgcaggccaggtaccccaccctgacgctccaccctatccccacaggccccattgagcagctcccagactacaaccggatccgtagcggcatgttctggctgcgcttctaggcgggaagcctatgtaagcaagagggcagggccggggtttgtggtcccccccccaccacaaacacagcacttcggctcctctaacctgtgccacaggtgaccaccaataaaatcctctgctgagaagtgtgtcatccctcttttggcattggcatggagtccatggggcagtagatggggagcaaggacttccctctagttctgtggctcctggatcctcctgccttcccacaggctgatgtgtcctcagccaggggcaagcgtgggggttgcagctgaggccggaagtctttgatgcctacagggagctgagcccagatgtttccactcagccacttaggggagttcctcagccagctggtcccaagattgggctgtgggagtccataggaagtgtaaacccagcctttgcccctgtaggagtcccagcctggaatccctgcaggctcaggtgggaaacccctcactgtggaccttgtgccaagtcaccccctggtggtccctggtggaccagaaggggccaaggggtgtctccaaggatgcctcttgtgtgtgtttactctgcattctgggaggaggatagcctggggcatagtgttctcatttggtttctaactgctgcctggacaagcagggcaggaatcctttgcctccgctgactcaggctccaagaatagccctgagctcagtggggcccgagccccctccctctactacatttgtcccaggcaagtccagagctgctggcctgacaatcccctccccattttcctgaggcagccaggacctggtacagctcttagctacctagtccctctgttatctcttttggctctggtccccatggtgggtgcgcaggtaggctgctcctcctgcaccccccagtgcttccacagtcaggttctctgggatcccagggggaagttgaaagcgaggggcccaattttcctttgaggaagtcgctgcctggcagtcacaagcagggtgctgggacaaggtcttttagaagatggctgttcagaagtccccccagcatcgtagcttggaagtagcccaaggaacccttgtatcactatcaccctgccccactgcctttccctcaccattggttgccatacgttgccaattcggagacatttgttaagcaccttctacggcccgggactggggcattgcgcagatcattctactttgtgaacggctggagagaagatgctgggcagcgcagaaccctgacaggcccaaccctgggtgctcatggaggtgcaacacccaggcaggggaacaagtgccaagtctgttgtcaagtttgagctcctggaggatggggcttcatttctaagcccagcctggcccttagaggctacaggtgtgctggacacgagagcttgagttgctgggagtggtctggttctaagggaccttgcgtaccaagccagggactctggtctttaccctggagccatgctggggaggtgtgttggaggttactgtgaagagaagtgacttggtcagagttgagattcagcatggggactctcaggccatatttctgtatcagtcttggtgagctgtgctgtggcagaacagaggtcatggccacacgaactggagccagctgtaggggacacaaagaggactacattcccagcagggctgggagacgcggaggcacgagtgggttggaggagggtaatcttccatagtccagtgaggagtttggtggtgtccagggtacagtgggatgtgtggggctgggacctgataaagaggccctggttggaaacagatggggtgaggtagtgactgaggccagggaaggaaatgttcagggaaagcttgggagggagaaggatgtgctctgggggctccaccgccctgatggggttgcaggtaggcactggcctcgggctgtgccctaggctgtgttcctcccaggaggccagagctggggcttcagagggccacactcctgctcgtgagtctcatagaagctccagacgtggagtcattccaaccttactcctaccttctcaacagcctctcccagcaccctttgagagaccctctcacagcagcctgtcctttcttttggaggcacctcaattctgatgaggtttgcctgagcacccaccctcccagctgggcctcctgtctcccctaagactggcccacgtgtgcacatatgtctgtaccgtactgtccatgccactggcctgctcttgcccgccctggctgcacgggaggaggtgacagtcttagggggaaggggctgcctgtgtgataacatacctggttctctgcagccccccacctggagcacaccttgcagggatggggggtcctgggacatggctgaggagaccctgaccttggaataaggtcatagcactatgccccaggatagtttggggggtcagtaataagggatagagccccagccttccttgggcaataggaaagcaggcagcatggatggtcttcactgcctccagctctggccacaccagagtcctcgggctgtggaggagtccagccagtgctgtccccatatctccctgtggatcccaggggaggctgtggggccgggcatattagaaggggcccagcagccttggtgagtatagatgtgctttctgggctgcccagagttattcaggattagcaggaaaaaaagggggagcaggacccagatgggggcctgcccttcttagcagtgcctctctgccttagtgtcacccatctaatggagagatatgcatatacagagccccacctccttcggacagtggccctggcgtggtgtgtgttggaggactgtccacagcctcagaagcgaagctgggggagggtgtgaagtcagcctgggtaaggggacaggagtaaggtagggggcagttatgaagctggaagctacaggtaccatgagggcagtgaggaaaggaggaaggggcccaaggggacctcggcctggtaggggagatgggtggcagggacctacaagaaaagtagatggaaggagaggatgcctgtgggtgaggacatgtaggtagggggacctggcctggggcatggagggctcgattcctgagagatgagctgtcactgtgggtggtcccgccctccacagatgggcggccccctccctgcaggcacagctggattgcatctgcctgtgacatggtaggggatgtgggacactgggatgtatgcataagcatgacacaggttctctcctccttccggcttatcccctacaaagagggggtgagttacttggatccaggccaaggggaccttggtttccctaagaccggcccagagtcactcatttgccagggcttcttgcctgtcaaggagatccgggtggggcccaggaggcccaccagacagatggctgaatcacaggagtggccggcgggacccatggcctgagggcttgtctgggcacccccactggattgggggtgagtcatccccaactgcagccccaccccccacggcgctgctgccttgtggctctgcaggaacctgtccactcctcagcctggtcactgtgattgacctaaagcagccaagacctgtgaccttagatggagttaggggtactccctcagcatctgcccatgcagaaccttctgggaaattcccagaagccacggggggtcggggggtttatagttaagtgcgtcatatcgtttgtctgggggaggggtggggggggcggcgacctctcagggatatgggtgagggcgggtgcctgggttcccgcctgccgctccgccccccgagatcagggacttttctctgctctgcccgagagactgcagcggcggcggcgggagcgggcggacgcgcaggcaagaccaggactcgggctggaggggcgctgggctcggacctgccaaggccacgggggwgcaagggacagaggcgggggtcctagctgacggcttttactgcctaggatgacgctgcggcttctggtggccgcgctctgcgccgggatcctggcagaggcsccccgagtgcgagcccagcacagggagagaggtgggcaccgcaagggaggacccggcccggggcactgcaccgtgccaccctccgctccactcggccttcatccccaacaccccccgcccacaacccagccaactccacgacgccccgcggattcctcctaattctgggactccccgaaccctccgcgatcggtgctgggttccctaaaccgcctcctatcctgttcctacccaaattctggctccctggatgcgtgcggggtcccctgccttatgccaatccacgccggcccctagaggctgacctcagtcccaagtccacacccgtgctggcgactctccctcccccgcacacccccaaccctccgcgggagtctgctctgggacccaccgagctcaactccctccaaggccctcaggctcaggccgattcggccctggtttgcataagatgaggcctactctccccaccatcccaagtcccagtgaggccaccgtgcgggtaggcgggtggttggcctcccagaagaggccctgatctctcctgcccgccccagtgacctgcacgcgcctttacgccgctgacattgtgttcttactggatggctcctcatccattggccgcagcaatttccgcgaggtccgcagctttctcgaagggctggtgctgcctttctctggagcagccagtgcacagggtgtgcgctttgccacagtgcagtacagcgatgacccacggtgagtaggggccctgggggctggggaccacgagatccccaccaagactccttccccagagagggaggagaccctggaaaccccaggccaggtctttgcagaaacaagttttggggaacctagagaccccctagccaggacctcctttggagacagaggtaaggattccctaggtagaaccttcgtgccctgaggcacctccaggctactgcaagacaggaaggtgcaagacagtgaggctgtgttttctgatctggagatggggagcccaggagggggcccccacgcctgttggattctccacgttctagccctctaacccttgcagccgttcaccagaggtgctccatctggccagcatccactttcctacatctggacccctcctcctgcaattatttaattaagcagcatcttgttccccacagactgtgagcccctaagggctccttcaggtctgcccaggcccacctgcagatggtgcacaaaggagcccctggggagtttgttaacctgggggttccagaggcaagtgggtgtggagaatgacagaacgaagggacccctcaagagagcctgatacccgtaaccctcaccctagaggcctcctcaaggccagggccagaagagatcctgagtcctagcctgttgccacccctaccctccaacaggacagagttcggcctggatgcacttggctctgggggtgatgtgatccgcgccatccgtgagcttagctacaaggggggcaacactcgcacaggggctgcaattctccatgtggctgaccatgtcttcctgccccagctggcccgacctggtgtccccaaggtgatccctacccctaccatgcctcccaagatgaccccaaatgaagtgtccaggggaaccgtgatttgacccctgcacctgtcccaggtctgcatcctgatcacagacgggaagtcccaggacctggtggacacagctgcccaaaggctgaaggggcagggggtcaagctatttgctgtgggtaaggaccgagcaggagtgacaggtcagctggggggtgggggcagtcagagagcatgtgggtgactgagtcctgatgggtcgtcacttcagggatcaagaatgctgaccctgaggagctgaagcgagttgcctcayagcccaccagtgacttcttcttcttcgtcaatgacttcagcatcttgaggacactactgcccctcgtttcccggagagtgtgcacgactgctggtggcgtgcctgtgaccygacctcgtgagttcctgcccacacggtgtaccctgacctagaccccggaccccaatccccmcttggcagtgctgattccatcctatgtgctcctgaccccgaccccaacyctgcatcatacatgcccaccccaatcctcctgcctgatcccctgatcccgcattcccagcggatgactcgacctctgctccacgagacctggtgctgtctgagccaagcagccaatccttgagagtayagtggacagcggccagtggccctgtgactggctacaaggtccagtacactcctctgacggggctgggacagccactgccgagtgagcggyaggaggtaggatgtcaggagtgataggtggtggctggggacttggctgggcaagataaagtgacctcttgccctgggcaggtgaacgtcccagctggtgagaccagtgtgcggctgcggggtctccggccactgaccgagtaccaagtgactgtgattgccctctamgccaacagcatcggggaggctgtgagcgggacagctcggaccagtgagcaattctgccagcctctgaccccattcacctaacccccgaccccagtaccccctcccacttctgactccatgaatccctggtgggactctcccccagctgccctagaagggccggaactgaccatccagaataccacagcccacagcctcctggtggcctggcggagtgtgccaggtgccactggctaccgtgtgacatggcgggtcctcagtggtgagtgagagatgtgggctgaggggagtccccgcgcctcagacaaggctgtagagtcctgagtctgcaaggcccactggccccttggtgtcccccatgcaggtgggcccacacagcagcaggagctgggccctgggcagggttcagtgttgctgcgtgacttggagcctggcacggactatgaggtgaccgtgagcaccctatttggccgcagtgtggggcccgccacttccctgatggctcgcactggtgagaaggctgggcactttcttcaggctgggacgggcaggcagggcaaggcccggaggccactgacatcccatgtgccctgggcagacgcttctgttgagcagaccctgcgcccggtcatcctgggccccacatccatcctcctttcctggaacttggtgcctgaggcccgtggctaccggttggaatggcggcgtgagactggtcagtgcgggggaaggratggacaggcaagggtcagggcatggcctctgytggtctgaccctgttatcttgcaggcttggagccaccgcagaaggtggtactgccctctgatgtgacccgctaccagttggatgggctgcagccgggcactgagtaccgcctcacactctacactctgctggagggccacgaggtggccacccctgcaaccgtggttcccactggtgagggctctgtgggctgggccagtgagtgggggaggtgtcggagccccaggctgcctctatgctgtgctctccaacaggaccagagctgcctgtgagccctgtaacagacctgcaagccaccgagctgcccgggcagcgggtgygagtgtcctggagcccagtccctggtgccacccagtaccgcatcattgtgcgcagcacccagggtgaggtggacgcagccagcacccccaccacacacactgaagttccagcctgaggggtctgagtgtacctccagcsctctccttccacacctgggtccctatagtctcctccctgtctcgttatccatctgcttcccaagatggcactgagccctgaactgtcaacagggtgtgtctgcccctaccctaccccaaccaatctcctccctgccccacaccccatccacggctttcacctctgcacagccacaagctcaatcacctgtctttctgttaccctagtggtgaccactgtacaccaacctctcattgcatgtccccatccagcactgacctctgccatcccacatcagtgtctgtcaatggctcatcagttctcactgcagtccactgactcctgtcatcctacatgctaagatcccacagactcctgtcctccagtgtccctgaccatcactggcccctttcatcctatgtccttgtcttgcactsacttttttcagccatatcccagctctctggtccccaccaccccacatcccmmcccccmwggcccttctcactctgcgtccctgtccatcactgccatcgtcccacatccctgtctctttctgacccctgcccacctaccctgacttctctcttaggggtkgagcggaccctggtgcttcctgggagtcagacagcattcgacttggatgacgttcaggctgggcttagctacactgtgcgggtgtctgctygagtgggtccccgtgagggcagtgccagtgtcctcactgtccgccggggtgagtactgcaggaggcttgtggaggacagctgcctgcctcactctggtcctggttctgacttctgacttctgtctgtaactcctagagcyggaaactccacttgctgttccagggctgcgggttgtggtgtcagatgcaacgcgagtgagggtggcctggggacccgtccctggagccagtggatttcggattagctggagcacaggcagtggtcagtgtggggtgtgtggggggactgccaaagggaccaatgagggtatgggtgccagaggggacaggcaggagccatgccagcatttccctctgacctcaggtccggagtccagccagacactgcccccagactctactgccacagacatcacagggctgcagcctggaaccacctaccaggtggctgtgtcggtactgygaggcagagaggagggccctgctgcagtcatcgtggctygaacgggtcaggccctgcccccgtcccttggctctctgcctccattgctctttcagacccccatgccttcccttgcagacccttgcttctccccagaactcctgcctcccccttcagaatcccactccctcctccctcagagacgctgcttcctcttcagtttcagctgtctccccttaagccctccccgtattcagattcctccgcttctctcctaagactcccacagcctttgccctcaaatatccaccacttcaaccctcagacccccatcccttttttgctggacccaaatctcctctgagatttacactttctcctccatcagacctgctcactgcttcctaaaacctccacctccccactcctccactggacctattcaccatctcctctatcaaattcccgtctcctgttagactcccatcatcttcccctatcagatagccccactccttcctgcctgttccagcagactccccattgcctctccccactagacccactgggcccagtgaggacggtccatgtgactcaggccagcagctcatctgtcaccattacctggaccagggttcctggcgccacaggatacagggtttcctggcactcagcccacggtggggactggggtttgggagggggcaggtcagggtggaatgggggctgggggtttattgggggtycaggtggggctctggggcacagagtttgctagccctggagctgcctccatccctgttcccaggcccagagaaatcccagttggtttctggggaggccacggtggctgagctggatggactggagccagatactgagtatacggtgcatgtgagggcccatgtggctggcgtggatgggccccctgcctctgtggttgtgaggactggtgagtggaccctggccagctactagccacaccgcattagctaccctgccctgctgtgtgttcctgattgcccagctgcctccacccccctgctcagtgactgtcctgtccacactgacccaccccacactgattaagtgtccacccacggtgacctcctggtggccccacactgcccaccccaaggcactgacctcctcctcctcagggctgcctaaagtgacctgtccacactaacctcacactgactttcagatcacccctgcgtcaaccattcctgcactgcctctctgttctctaccaggaccccttaccttgcctctgtccccagcccctgagcctgtgggtcgtgtgtcgaggctgcagatcctcaatgcttccagcgacgttctacggatcacctrrgtaggggtcactggagccacagcttacagactggcctggggccggagtgaaggtatggctccctgacgccacccctgtccttcctggctgggactgctcacccctaaccattgctgtatgcccacctggccaggcggccccatgaggcaccagatactcccaggaaacacagactctgcagagatccggggtctcgaaggtggagtcagctactcagtgcgagtgactgcacttgtcggggaccgcgagggcacacctgtctccattgttgtcactacgcgtaggcagagcatgcgctggagagcttyggatgggtggtgtggatggtttggggatccgggcttgtgctctggattggagaaaggaccaggattggtagtgagcctttgggggcagggtctgagaggagggagaggggtctgagaggctgggcggggtgcgtgtgccagggtgggcctgggattggtgcaggggccatgggggcagagcctccctgattcctgagctttctctccagcgcctgaggctccgccagccctggggacgcttcacgtggtgcagcgcggggagcactcgctgaggctgcgctgggagccggtgcccagagmgcagggcttccttctgcactggcaacctgagggtgagaggtgtccccaggaggaagttagggaccaktgggggcagggctgtggcagactccgcaaggtaggcgaggacagtgatggtgggcggggtctgtcactgggggtctgcgggatccgtgacagtaggtaagatcaatcaatgaagtgggtgggatcaatgagttcatggagggtcagtctggcagggtccgtaaagtgggcagggtcagtgaggatgaggaagatcagtcaggagggtgaacccagttaacagagccagtgaagtgggcaggccctttaatgcccccaggtgtcactatcccacatgctcttggcccccaccctcacgcctgccccaggtggccaggaacagtcccgggtcctggggcccgagctcagcagctatcacctggacgggctggagccagcgacacagtaccgcgtgaggctgagtgtcctarggccrgctggagaagggccctctgcagaggtgactgcgcgcactggtaagcctgcctcaccttggcgtgctcctcccctgctgatgacccaccctgacttcctgcaccccgactctgagtgactcctcctgtacccctacccctcaccctctgaccctgggtgaccccagcatgacctcccatgatgcttcaataagacaaaccggacccaggatctcagatctctcccttctgggttctcaggactcagcctctgatcctcgatctttcattcctccttcagagtcacctcgtgttccaagcattgaactacgtgtggtggacacctcgatcgactcggtgactttggcctggactccagtgtccagggcatccagctacatcctatcctggcggccactcagaggccctggccagggtgagggggaggccaggatttgggtgggctggcagttggggctctgtggagacagctttttaatcaagttctgtctcctgcagaagtgcctgggtccccgcagacacttccagggatctcaagctcccagcgggtgacagggctagagcctggcgtctcttacatcttctccctgacgcctgtcctggatggtgtgcggggtcctgaggcatctgtcacacagacgccaggtatagtgggcrtagtgggaagggcagaaaggtgtgtctgggtgggctgcccgcttcagtaacttgttccccttcctacagtgtgcccccgtggcctggcggatgtggtgttcctaccacatgccactcaagacaatgctcaccgtgcggaggctacgaggagggtcctggagcgtctggtgttggcacttgggcctcttgggccacaggcagttcaggtttggccctggggcagccagattctacctctccctgaggccccccacccaggctccataccagttaccatctcctgaccacccaataggttcaggcattctcccagctctctcacaggctccagacctcacctactgcctggctccctatcctgccatcactgctgactccctaatagatagggtttggtcacacacaccctgatgtgtttctccaggctctgtgcacccccatccctgctctgtcatcctcctcaggctctgtgtttccttccaccccaggttggcctgctgtcttacagtcatcggccytccccactgttcccactgaatggctcccatgaccttggcattatcttgcaaargatccgtgacatgccctacatggacccaagtgggaacaacctgggtgaggactgcagcaggcatggactcctggggctatccactgggagcttggtgccccagggttctgacatgtccttccttccaggcacagccgtggtcacagctcacagatacatgttggcaccagatgctcctgggcgccgccagcacgtaccaggggtgatggttctgctagtggatgaacccttgagaggtgacatattcagccccatccgtgaggcccaggcttctggtaaggagtaggctgatggggaaggggtctgggaataggggtggccctgaaaaggctatcatgcagccactggaccccaccttagggcttaatgtggtgatgttgggaatggctggagcggacccagagcagctgcgtcgcttggcgccgggtatggactctgtcyagaccttcttcgccgtggatgatgggccaagcctggaccaggcagtcagtggtctggccacagccctgtgtcaggcatccttcactactcaggtttggaagaggcctctgggggactgggtggtagaatataaggggtctgggggttcttggtagaaatgttcaacctcaaagagaccctatgtccgcagccccggccagagccctgcccagtgtattgtccaaaggtaagagtccctcatcgagaggtgaacagaggctgcacctggggctagccactctgacccacatctgacatgtctttccccagggccagaagggggaacctggagagatggtgagtgcccctgcgggcggggaatagagaatgggttgagtgtcagtggggcaggagaggttggcagcacaggtctcactgattacccttcctagggcctgagaggacaagttgggcctcctggcgaccctggcctccyggtgagtgtcccccacatctgtccctgcaccctgactggcttatccccacctaactgctatcttctttcagggcaggaccggtgctcccggcccccaggggccccctggaagtgccactgccaagggcgagagggtgagtgtggagaccatcgaggtttctctgaggcactcctcaaagctgtctcggggtttttacaagagagaaggaagaagcagagttagaatcatcgggaattcctagaagcccagctggaggttataaaccaccacagagactttgggggacactctgaaatagaagggccagtggggcctctagccccgctgcagagcctgagcagcagctccaagtcccagaggcagggaagccctctgccttgtcgctgcccttgtgcctggaattgggctctgtgaagctctgaggggccatttctctgcctcactgttccacccccaataacacttgggggtcagtggggtaggcgaccccttgttgatggggtgaggcccctccagcaaaccaggggccttgggggagggtcccttcctgtcctgacctcttcacctcctcagggcttccctggagcagatgggcgtccaggcagccctggccgcgccgggaatcctgggacccctggagcccctggcctaaaggtgagcaagcyttgtcctgcaggtcagggtgggcgctgcctgagtgggtggggtggctccgactgttctgcctctggcctccatttgcagggctctccagggttgcctggccctcgtggggacccggtaaggtgccttcccttctttgctctctaagtgtcttcccagggttcttccacagggtgggagcctggggtggtggtgcagtgcccacgttgacattcgcctgagcccaagcaccaccctctscyctgtttcgtcctcagggagagcgaggacctygaggcccaaagggggagccggtaggtgaagggggaagggaggcggccgggatgtcccagggaggagcaggactgccccacaccagaccctgtgcagggcctaaggcgcgaataggaatagctggacatgtctaggggcttcttccagctcaaggcccccatagcctgaatcctgcccactgctctctgtccttacagggggctcccggacaagtcatcggaggtgaaggacctgggcttcctgggcggaaaggggaccctggaccatcggtaagtgcagggtatgtggaggcaagtgatgtgtastggggggaccaacacsaggggggcgagagtgaggtctgtggggttgcaccttatactttgtctcctccatcagggcccccctggacctcgtggaccactgggggacccaggaccccgtggccccccagggcttcctggaacagccatgaaggtgacagcctcatgagtgccatgtgatgcrgagacctggtgaccccatttgaacccacataacccctgccagttactctggcccttgtgaccctttgattacccccatcctcaccatgacgcctcagttctcccaaartccttgaaatccaattggaccccatgaccctcatcactyctggtatctttgggagtgaggygtggcccagggtcatggggtcgtcatctgttttctagggtgacaaaggcgatcgtggggagcgggtaagtgagggacaggttgtgctaggggtggcttggagtctgattcccctgttcattccctgacctgctgttctctcccagggtccccctggaccaggtgaaggtggcattgctcctggggagcctgggctgccggtgaggggccttgaggctctgctgggggccctgctcaggggtgtgggtctctcctggggcagtggttgggtgctgggcttcatagttcttggctcatatttttactcacttmttcctagggtcttcccggaagccctggaccccaaggccccgttggcccccctggaaagaaaggagaaaaagtaggaaggctgacttgatgatgtcccagttctggggtgggaggctgcgtgctgggggcagggcctcccttcggtcttcccacccgtgtgtttctccttcagggtgactctgaggatggagctccaggcctcccaggacaacctgggtctccgggtgagcaggtgagtggaggggccagggattctgaatatggtgggcacagctccagcccctacctcaatcatcaaccactgctccatcctcatgcccaaacccaaatctctgaacccccaaattcatcccttccagggcccacggggacctcctggagctattggccccaaagtgagtaccagttgggggattcaggtgtgaggggtgctactctgggctccccatggtgttaggggaggctggaagataaggagataagagttccctccaggtcagaggtcgyggttttggagggggtggttggagttwgggaccccttgtctggggtttgacgttcaagccccsccaccaaccctctctctctctgtmtttctctcaccctctctcttcagggtgaccggggctttccagggcccctgggtgaggctggagagaaggtaagtgcaacctggggggtgccaagggccctggaggatctgggcccaactcagctctgacctcttcttttccatcagggcgaacgtggacccccaggcccagcgggatcccgggtaaacccactggctgcaatgctcataccagctgacctggctgtgccctttctggttctgacttcttgcccttgacccctgctacccctgctcctcacccctcctcaatgaccacttatccctgctgatacaggctctaaccctcagccccagggacctggctttgaacctctgaccctgctgaactgaccttgattttcactgacctggtctctgttctcctgccaagtcttacccctgccaacctaaatcccaatcttccctgacccctctccagcccccaccccagcctctagccctgtctgtccatatcccccgtccccacccacctgcacagctcttcccttcctctcctccaggggctgccaggggttgctggacgtcctggagccaagggtcctgaagtgagtctgtgactgtggtgggaccaggagtgggacttttgtgtgtccctcccctttcccttcccctcctgggctcacactttctctacattcaggggccaccaggacccactggccgccaaggagagaaggtgggtcctcggctgggggtggcactgtctggtactagggatgtggcagatgggacactgggattttgggctcctaggtgactccctgacctgtccctgctcctatcctctctccacagggggagcctggtcgccctggggaccctgcagtggtggtgagtgacgggaggatggcgctctgagcacagcacagcccttgagcagtgaccctcctatagaacactatctgggctgtgattccacagtgctgggcccgtgagcaggyygggagctctgcggctctccttctgctagaacctgcccccagactcttggctatgatcctgtgaccccaagaccgccatgcaggtcatgagctctttgtgtcagtccattttgtataaccccttccctgctgtcagcggtgactctgtgacttctgggmggggactgagctgtatgacttccaattccatgtgacctccattccaatgaagactttgrtcatacaaccccaaggcagskccaagctgtatctgtcctgtttgttttcagggacctgctgttgctggacccaaaggagaaaaggtaagcctggtatggggcaaggggaggtttctacagggttgaggtctaggtcatagggcctatctatgggacttggggggtcacaggacttgctgggycagggggttaactggagcctgggactagcactgatggtctttgtcacctccagggagatgtggggcccgctgggcccagaggagctaccggagtccaaggggaacgggtaagtgaagcgaagtgtttagggggcagttggtgaaggttgtcttcctgacttcttatccttccatccacagggcccacccggcttggttcttcctggagaccctggccccaagggagaccctggagaccgggtgaatcaatgtgggaatggggagtgtgacagagggagatgaggtggtgggaccctgactaagtcctgccccccttctgtccccttcagggtcccattggccttactggcagagcaggacccccagtgagtacccgttaccctgggcaacctcaaggcttctggggtcccctccccttgagaactgcttgcttcgagygtcctgcatcacctccctcttgcctcctccacagggtgactcagggcctcctggagagaagggagaccctgggcggcctggccccccaggacctgttggccccygaggaygagatgtaagaggctggagtcgggggagtcayggcgggtaagggagtagggctrttgccagcatcatgggggttcttggaaccagggctgactctcatgtttcacagggtgaagttggagagaaaggtgacgagggtcctccggtgagactccttcccactgtggtttctgatcctttacccttgaactaggatcccagtaggctggtgctccaccagttcatccatccactccctgcctcctgtccagctgctgctcagacccttctctgtcccctctccctgagtgagttagakcctgactgccctgtgcagtatgacttttctctctatcaccagggtgacccgggtttgcctggaaaagcaggcgagcgtggccttcgggtgagtcttggcagagagaagtaacaggggtgatgggaggtgggcatgaaggtgataggaaaggctgaggggggtaaggggtgatgggagtccctgcagggaggcatggggtgatgggaacctctgatgtggattttggagtaatggggaacctggggcagtgtagcgggtcataggggcacctgcaaaatattgggagggtctgtctcaggccagctgctcttcttagggggcacctgsagttcgggggcctgtgggtgaaaagggagaccagggagatcctggagaggatggacgaaatgtgagtcccagcctatgactcctcaccccaaccttaaccctccaaccagscaattcccaatacctgatcctaccccccaaccctgtaatgctaaaccctcccaatcttcacttcctttgacccctgcacacacgcatctgaaggctaccaacattcccatgagtcctcatggtgcttccaaagctctcccaaactgctgcctaccttgagtggccctgacccctgcctttctgcagggcagccctggatcatctggacccaagggtgaccgtggggagccggtgagtagggctggtgtcctgggctcagaagggatggagggtcccctggcgctgctgccagtgtgccttcacacaaggggtctggaggtccaggtgggaagcatggatggccacccatgcctgytgggggctggcattggggtgcttcggggaacttgggggcagagttgagcctggggcaaaccagagccatggcctgggacctgagggctcctattgactataatcatttcctttcccagggtcccccagracccccgggacggctggtaagggctgcgctgggtctggtcctctgtcattgttctcacttgcccctttggctccacatcatgtcccctcattccttccactaactcccacttcccccactgtccctctgaaacctccgcggatccctggagcccctcacagaccctgtatcccctcgccaactcctcttccccttgttgagccattcttctcactggtcattccccccacaggtagacacaggacctggagccagagagaaggtatyagggtctgtgggtggagggtaagaaagaccccagtgcccctcccagcaggttctaccttgggcatggcttggcttcaaggmtgttcctcagcaagcttatctctgccacagggagagcctggggaccgcggacaagagggtcctcgagggcccaagggtgatcctggcctccctggagcccctggggaaagggtgagtgtgattggtcctygggggtgcaggcatgggagggcctgctctgatttcttcctcccctatcctcagggcattgaagggtttcggggacccccaggcccacaggtgagtgatgcactttgccccgtctgccaagtccccatcttaccctcacctcttatctgaccctgttccctccagggggacccaggtgtccgaggcccagcaggagaaaaggtgagagggtgtgggggtttctcaggacrtgagcctgggttatcagatccacctcagccttggtggcctcttaccactctattttccacagggtgacyggggtccccctrggctggatggccggagcggactggatgggaaaccaggagccgctgrgccctctgggccgaatgtgagtcttggtagtcctgcctggttgtccccttcccctaccccttcacatgaggaccctagaccccagcctcattkgttggtcttggccttgacgagctctggggcgagacctgttgtctgtgtcttctcccagagcyctgcctgggtggggcatgttcttgccatgcaggccttaggctcacagggactagagcccctgaccccatgaccatgatgaactgactttgagtctctcctcagggtgctgcaggcaaagctggggacccagggagagacgtaagtgaggggagatgctgggacagagggggctcggggctgcgtaagctccaaccagatyatcatagtcacagcatccgagagagttggtggggggtcggttcagccttgcctttgggagggtctcagtccctggcacacaggttttagtagaatccccctttctgaccttctttgccttgggggtcttcataggccctccaagtcctgggggttcttcccttgggagtctcagcaggggcccccatccatggggtctgtgcctgagggatctcaatgggacctctcagtcctgggggtctctaccctggagggagatctttttggggtcctcttagtccwwggggtgtgccccaagggatatctcagaggccctataaatcttaacaaagactttttccaggggcttccasgcctccgtrgagaacarggcctccctggcccctctggtccccctggattaccggtgagaccagactttcatgttacccccttttcccccttactacsctcacccgatccccgacatccaaccagtgatctgttcccacagggaaagccaggcgaggatggsaaacctggcctgaatggaaaaaacgtgagtgtgtccagggcagctgcggcgaaacctgccaagaaacgccagcacacctacacagccaagatctgtagcaacacatgaggcacacgtgtagacacatgcatcctggcccagacatacagatgcatccagaaacatagtttttttttttttgagatggagtttcgctcttgttgcccaggttggagtgcagtggcacaatctcagctcactgcaaccttcgactctcgggttcaagtgattctcctgcctcaacctcccgagtaactgggattacaggcatgcgccaccatgcctggctaattttgtatttttagtagagatggggtttctccatgttagtcaggctgatcacaaactgacctcaggtgatccgcccgcctcggcctcctaaagtgctgggattacaggcgtgagccattgcgccaggcctggaaacatagttctatatgcacacacaggcagcctcacagacacatagggagttaggtgaatgggccaatttatgccaggatgggctgacacatgcccagataacccacagccataggcacaggtgaagagccacagacaggtcgacaggcacaaacacactggtgtgtagccacatttggggcacttagagacatgttgatacccagacacttccacccagactcatgtgctaagacatggacccaakaccgcatgtggacctgtgttgagacatggtgagacacacatggatggctctgacctgtgacatgtgctaggacatgctggcccatgactttatatggtcacccacacgcttatggtcatacacattgagctacacacaagagttgcagacagatgccaakacacatggctctcaaggcatgtataagcccatgctctttggagacatgtataagcccatgcccatatgcagacatgggccaagatgtgcaaacagaccaggacacacagacccatgggtacatgtactaagacacacatggatatgcacacacccaggacatgtggacgatcaccaacccagagatgcataaatgtggagctacctctagagagccagagtcaaaggacatgtgtgcagttgcctgttggggtgagcaggcctatgcaggcacacccttagacatgtagcagctcactcagacggccacaggccatgctccaagacacacacaaccatggagctacaggcacagaaatacagtcacagtcatctgaaatctagcaaggtagtgtcttgcagccagacaccagtgaatgtttgggctgatgtgagtcctctgcccacagggagaacctggggaccctggagaagacgggaggaaggtaaagtcccccacctgggkyctctctggtctctgcttggagccatgcctgaagcatccttgtcttccttagggagagaaaggagattcaggcgcctctgggagagaagtgastattggasttttctgcaacctctgacccctgaccctgaccctgggggaatatgactccactcttttctgaggtctcagggtgctgatgctggctgcatccttcacagggtcgtgatggccccaagggtgagcgtggagctcctggtatccttggaccccaggggcctccaggcctcccagggccagtgggccctcctggccaggtgagtgtcctgggtcattctgggacttcagagcattagaagccatgatgtttcaatgggcaaccctcctgggaagccatgggcctttgtgacccctttgtgttctgcygtatctcagggttttcctggtgtcccaggaggcacgggccccaaggtgagtgcggatgttgggtagggggcgtggtgagggggctgaccaggctgggggccatttccccacctggtcattcttgttttcagggtgaccgtggggagactggatccaaaggggagcaggtgaggcccccaccttttccacatgcccaggtagccacagcacccacatgtgcacatgcacacccataggctggttcctagcagtttgtcttcatctctccagggcctccctggagagcgtggcctgcgaggagagcctggaagtgtgccggtgagccaggcttgggatgtccccttgactctgttttgcatgcccattggggccaccttgccatccccttccccttgccatgaggctccataggttctgtgctgtgtgttcagtgccctgccccattggggttcttgtagcccacactcaagggaacttgggcagtggggacacaccagaaaggggctcccaggagtctccagccatgcctcaaccaagtgctaaagggtgctctgggcaagaggcctarggaaaagggtstsaaggtgctttcctgaggccgtgyggggcagaaggcaggagcttctctgtcatgggcagcccttcacccagactttgtccccagaatgtggatcggttgctggaaactgctggcatcaaggtgggttgtttaggggctgggggtagggacaagtgggggcccttggggctagtggtgcccacaggcrtaggggctgcggcgacrcaccccgctcctctgacctcttgctgtccctcaggcatctgccctgcgggagatcgtggagacctgggatgagagctctggtagcttcctgcctgtgcccgaacggcgtygaggccccaagggggactcaggcgaacagggccccccaggcaaggaggtgagcagaagtggctcagtgggttgtgccccgtggagtggggtgtagctgtacagccaccagcattctctyttccactcctgcagggccccatcggctttcctggagaacgcgggctgaagggcgacbgtrgagaccctrrccctcaggrgccacctggtctggcccttggggagagggscccccccrsgccttccrgccttgccdgggagcctgraaagcctrdtattcccdggctcccagkcagggctgggggtgtgggagaggcagraaggccaggagagagggtgaggctgggggctggccaggagagtgagggaagaggggttgggaggggtgggaccccccatgggcttggccctcacccgctatttgcatttcagggagaacggggagagaaaggagaacgtggagaacaggtgggctgcgatgggcttcgtggggcaggctgtctggaggctgtgctggggctgccaccccattttcttgtttcctgcagggcagagatgrccctcctrractccctggaacccctgggccccccggaccccctggccccaaggtgatcaccccatccctgccttagtyctgtgactagtgascaggaagccacccttagcttggtccccagaaatatggtagtgtgtgccataaccctggaatttctgaccctataaccctctgtgatcctgagatctgtgatgactcccccatgcctctatgacagagacatctctcccctgtgaccttgtgtttgtaggtgtctgtggatgagccaggtcctggactctctggagaacagggaccccctggactcaagggtgctaaggtcagtgtgtggaatcagctcggggccaccctctgccatggcactagggactgacttgacatctcatccccacagggggagccgggcagcaatggtgaccaaggtcccaaaggagacagggtgaggcctctctccacccttccatagagtccccctcctttctgggsgcacactagaggtggtgtgcatatgcacctgggcacgtggcagggactgggggctcagggcacgacactctgccttcaggrtgtgccaggcatcaaaggagaccggggagagcctggaccgaggggtcaggacggcaacccggtaagtccttgcccaacagccacacatgtgcaagaaggtggctctcacatgtattgtcctgtgtgcagggctggggtctgtactgcctgggactgtctgggtcctgactctgtctagggggatggtgggtggaggggaagttggaactgggaaactaaggccttaaacctattctctgcagggtctaccaggagagcgtggtatggctgggcctgaagggaagccggtgagtggtggctgaagcacctggccccaggctccggaccctccrctaggtgctgctgctgctgtgtgtgtgcatgtctgtgtgtgtgtgtttgtgtgtacctgtgtctgtgtgcctctckgtgtgtgcctgcttgtgtgtgcctgtgtctgtgtgtgcctgtgtgtgcctgtgtctgtgtgtggttgtatgtggatgtgtgtgtgcaggcccgtgtgtgctatctatgagaggcagtccatgggtaggtattatctgtgactggaaagggtgaggtatggaaattgacccccaaggaaaaagcycccagaggttgggaacaggcccaagtgaggcccagwttgaggctcatcagtgccctctctatgtagggtctgcagggtccaagaggcccccctggcccagtggtgagtacccaagaaccttcacctgtcttgcccccatcctgtgccctgccccagtgaccagtactgcctcagtttccttggtggggtgcggctaactccccctcatcagactctttttcgccacaacagggtggtcatggagaccctggaccacctggtgccccggtgagtgaccagggaacactgcctggtgagggtctggaagggctgggataggcattggccacagctgatgagccaggccttctctgtgttaatccctgagccctgttccctgcccttgacccttttctctagggtcttgctggccctgcaggaccccaaggaccttctggcctgaaggtgagtctaggtgtgtggatrggaggaggaggctccttcaagctgtgtccatgcctggggtagtgtgcgccaacctcctgggctgtcatctcctgcaatgaggatgagctccaggagccctggccacgtgggctctgctcatgcagtctctgggttgtttgcagggggagcctggagagacaggacctccaggacgggtgagtggcctagctcacaggttagggtcatagggagatgggtggggttggcactgccctgaactttctcttcctccagggcctgactggacctactggagctgtgggacttcctggacccccmkgcccttcaggccttgtggtgagtgagtccctgtggcccctgtagggacaccgtgttttcactccttggggcccatgttctctcatgtcgtcctgtgtccattgtcaccctgacatcygacttgttctccgtcagggtccacaggggtctccaggtttgcctggacaagtggtgagttctgggggtcaagggttgggctccaggggtcaagggtcgacaggcagccctgacagagctcttccctctcagggggagacagggaagccgggagccccaggtcgagatggtgccagtggaaaagatggagacagagggagccctggtgtgccagtatgtgttctgggggcagctcgctagggtgtggtgcccagctgtgggcctgaaatatgaggagtggggcagcaggggtggtggtggagaggcactgagttcctcacgctgctctgccataggggtcaccaggtctgcctggccctgtcggacctaaaggagaacctggccccacgggggcccctggacaggtgatctttgaccctgacttccaccccctgcagcaactcctctgcctcacccacaagcctgtttccaaatgccatgggggtggcagggtgggggcgggggaggaggaggaaactcactagcattccccacaggctgtggtcgggctccctggagcaaagggagagaaggtgagtgtgtgtggggctgccagtgakggggggtcaactggtgggggccaaggaatcccactgacctctcccscttaccagggagcccctggaggccttgctggagacctggtgggtgagccggtaagtagggaacttctgacagcagatgttctgggggtcctgtctctccagtggcctaacttctgaccttcgacccatagtttacccaccctcatgaccctcagctttcatagtagaccgcatatttaagctctggccccatgcctccctccggagtctcatctttctgtkactgatgcctgtgttgcctcctgacctctgtcaacagggagccaaaggtgaccgaggactgccagggccgcgaggcgagaaggtgaggtgggttggccctggggcctgactactgagcagagaaggctcagtccagacacccctcacctgccattctgtgcagggtgaagctggccgtgcaggggagcccrgagaccctggggaagatgtgagtccggggcctaggcaagggcgagcctggcctgaggagtgtgatggcgggcataaggggccactcttgggccggggcacatgtctgagcccctgagtcgggctgcatgtcccaacatccaggagcctgctctctggatcacagggagccacacactgtcggcttccacactctgagctctgggggccctgtcttggcttctgtgtgcccatccttggtctgtttctcaccayatctgggcacacgtgtgctctggtctgatctcccagatcccaggacacacctgagttcttgtgaacctctccttggtcctgtgtttacaatcctcctttcccctgcccctggctgccagcgttcagcctgtggccatgcctgctctacccgggagtggacgtgttggggttcccctctgagcgcccgtgtgtccgcactcacgtctgtggagccagatgtctgcactcgcgtgtgggctccctgtgcctgtgccatgcctgaactcccacctgtctatggtagtatctgagcgtccctctgtctgtgctgtcctgagataggccatggtcatgtctgagctcctgtgagccaattcttggtcgcatgtctgagttcccatgtgttcatggtcacatcagaactcccctgggaatattttcagcccgtgtctgaactctgtgctcatgttcctaccctctcaaatgctgtttgctgggttttcttagggtcagaaaggggctccaggacccaaaggtttcaaggtatgtgtacccagaagggtccctgctggggtcctggtygtgagactccctgagcttgatccgatgcctcttttcctcaaagggtgacccaggagtcggggtcccgggctcccctgggcctcctggccctccaggtgtgaaggtaagtcaatgccccatcaccagttgtrggggcagcaggccgggcccccacaggaggaagagggagttctgatgagagtcctgggaggggtcctgcattgaccattccctccctttgctgtttttatttcagggagatctgggcctccctgrcctgccmggtgctcctggtgttgttgggttcccgggtcagacaggccctcgaggagagatgggtcagccaggccctagtggagagcgggtgaggggctgggaacagcatgtaggggcatggtgaatccatggtgggtgaggagggggccctgccttgggggttcccagtcttgagggggcagagggtaggagggttcccaagtcactctctgcctctcttgccccatttttctggtagggtctggcaggccycccagggagagaaggaatcccaggacccctggggccacctggaccaccggggtcagtggtgagtagaggtgccctaaagccccacgtatttgatttcctgtcctcgtgaggacttaggatggggcgggccacactgtggggtgttgggggaggcgctttgagagccacaggaccctcacctcactctgacctacagggaccacctggggcctctggactcaaaggagacaaggtaggtgggacaagtgctgctgactctctcttgtgccctggtcacccccttcagcctccactgacctcccatgaccctgcgtcccccactgattcccctcactgatccccggtgtcctgttggtctccagggagaccctggagtagggctgcctgggccccgaggcgagcgtggggagccaggcatccgggtacgtatgtcwtactccacagccgaactcccttcatcccagctcttgcctctgatttccaacctctgagtcaatgaacctaatgtcaccatccagggtgaagatggccgccccggccaggagggaccccgaggactcacggtgggtcccgctggggaaagtgacagtgctgtgacttcagtcccctgcctgtgccctttgtaccccaggactctctgccatcctccctagccctctggccctcctcgtctacccctgtcccctttgtctggtccccactgtttccctcctccccctgatcctcctccgtcctccactgccctggttcctgtagctcacggtcaccttctctcacacaggggccccctggcagcaggggagagcgtggggagaaggtaggaacgtggggaaggtcctggcatgagtgggggggtgagtggatcttgtatgatattagaattcaggygcggggcctccccagtttgggcrggactcacactcttttgcccaatagggtgatgttgggagtgcaggactaaagggtgacaaggtgagtgtgggcatggggagggcagggcaggggccagggtgctcccgactcctctgattcctgcctgccccctcagggagactcagctgtgatcctggggcctccaggcccacggggtgccaagggggacatggtgagtgggcccacgtgtggactgggtctcccctgggtgcgagagggaccccgtggggctggcccagggcatctgagagctcaaactcccagagggtgagggaccttcagccccttaccgtgacttcttacccaaaccaacccagggtgaacgagggcctcggggcttggatggtgacaaaggacctcggggagacaatggggaccctggtgacaaggtacagggaagagggtggtgtactctctgtggggtcctgtggctgtggtggttccacagcwwctgtgagggcaggaggggaggacaggaggaggctttctggggttyagggggaaggggttctgtggctgactatggagtggccgagaggaggggctctagggagggctcaaggccttggtgtgaggttaggagagctctgtggactggccctatgaaggggccctatagggacaggaaaggggctccttgggtgtccccatctgaaggtgcttcagatgggatgaggaacccagtgataagagggcggggcaagggtctggagtccttggggtgagaaatgagccagtctgtggactacagcccccagttccacccgctatggcacaggctgggaggacgtgctgctagggccgttcgggagtgacttgagctctgccccagctggcgggctcgttgtattctaagcccccagcctgatctggtcctgactgaatccctctcctggtcactcccacagggcagcaagggagagcctsgtgacaagggctcagccgggttgccaggactgcgtggactcctgggaccccaggcaagttctgccccaggcccaggcccaggcccaggtccagagccagcatcacacacacacatatcctgggggtcctcttaagtgctgggggttctggctcccttgctgccggccccatgtgtgttcacccgggatctgtgtgtggcctgggmcctggccgctgagcatctgagtggccacacatgcagcggatgggccagtgttggggacagtcccactgaagggctcccccatctgtgtttctcacagggtcaacctggtgcagcagggatccctggtgacccggtaagatgcccctgctcccacaggggccccctgtccccagagggcccccgtcaccatggtggtcccaccastgtggtagcttttgaccttatagtgacccagtgctctcatggtgtcctcatgtcacccagggtcccccacctccacagtagccgcctatgatggtgtcccctgcctatsstgacccttgtccccatggcaagccccagtggctctggcctccagaggtgactcccaccccatggtgttccctacccactatccagggcgattctctttggtccctcactgacctcctctgacctcacatggaccctctccctgctagggatccccaggaaaggatggagtgcctggtatccgaggagaaaaaggagatgttggcttcatgggtcccyggkgcctcaaggtaggaaagaaacaagattggtttttttctggtcaggaaggcctaatgttgaagggcgagggacctggggtcagatattagggcactgggtcagaggttggagtagctgaggcctgtttggagagttagtttcagggtgaagggggtcacagagtgaggtgtctgggaatcacttcttcatctgcttttctccctcagggtgaacggggagtgaagggagcctgtggccttgatggagagaagggagacaaggtacagaggggatgggggctggggggctacgtggcctggggcctaaggctcaccccactgcctgatgcctgcagggagaagctggtcccccaggccgccccgggctggcaggacacaaaggagagatggtgagtgtgggcacgctcagaatgagggggccacgggtggacgggggccaagttcatgtctttttttctccagggggagcctggtgtgccgggccagtcggggrcccctggcaaggagggcctgatcggtcccaaggtacagggtctgtggacagtggacatgacagggagtcaggatggggcagggaagctcatggtcgggtcatgggggtgtagggacaaggaaggctgtagagggttgggactttgggggctgaagtggggctggtctcgaggtgtcaaggtgggttggggtcacagtggagttaggatgaaagcatgggaggtggagggggcatgtgcatcagggcagggggctatagtggagttggagtcatggggatcacatctggttggctcacaggtgcttgggttacagaaggtttgggcattaggccagggagctcatgggagttcagggaggttccagagctgagggaggtcagggcagaaggtctctcatsmttcttctgttcccagggtgacygaggctttgacgggcagccaggccccaagggtgaccagggcgagaaaggggagcgggtgagttgaagccatggtcatggtgaattgaggggagcgwgsactttgggagagggtccatctctggggcctctgattactgactctgtcctatatctccccagggaaccccaggaattgggggcttcccaggccccagtggaaatgatggctctgctggtcccccagggccacctggcagtgttggtcccagaggccccgaaggacttcaggsccagaaggtaaggggccccagctctgactcctgatccctgaaccttccctacccttccaacctcataaccatcttccagcctgcctgccccaacctctgaagctgtggcccccaacctgcctgactctgatccccactgcctctgaccctgctcacttggtccctgtgtctgacagggtgagcgaggtccccccrgagagagagtggtgggggctcctggggtccctggagctcctggcgagagaggggagcaggtgagtagggattccaaggcttgggtcagagatcggggtgacttctgttgtccctgaggtcagaggtcacagcctggtcccatctgttgcacataggggcggccagggcctgccggtcctcgaggcgagaagggagaagctgcactgacggtgagtgtgggcctggrtgggcctgggwgggcctgggtgggcctgggtgggctggggccctacctccctcacccagcaccctgacccctgggccctggctccatgcagtctcaccatagtccctgtattatgtgccctatgtccttcctgtgggccatgggttctttatggtccctgtggtcttctgctcccaggaggatgacatccggggctttgtgcgccaagagatgagtcagcactgtggtgagtggtgcccagcccgcagtctcccactccaccccagcaccctaggcaagggcaggcaggcccctagaacttacagggcaagcagtcaagaagatggggggatggatggatacacagaaggacacatgtgctgcaggactgacacatgacatgtgtccccagtggagggagacacacaggcagatgaggattgccatgcagtgctctcagatgtccagcttggctgtgtggggagtgggatgatggtgggagcagagctggtccccttgggcctgacctggacccggtgggaggggcatcagagtgaagctgtctcttcccgtctctgtctgcaccacctgcctgtttctgtgtctggcctgcttctgtctcttgccttttgttggcctgttcccaacttccctctcctctgccttcttctctttttccatctctctatctacctcccaccctctctcttcctctctctcctgtctgttaccctctcctgctatctctttgtgtatctctacccctctgcctgtgtgtctctgtctgtctctccatcttcccatccttctctctgtcattgtctctctatccctctctgccccctctagcctgccagggccagttcatcgcatctggatcacgtgagtagttttctactcccagaactttcttcaccccaggccctgccctgcctatcaactggggtcctctcaggggggttggctgggatggctgcccatggtgacttcagggccctgaggcccctgctcttggctccaggacccctccctagttatgctgcagacactgccggctcccagctccatgctgtgcctgtgctccgcgtctctcatgcagaggaggaaggtgaggacagctgaacccgtggggcagctatgggtggggccgagacacgcacatgggtgtccatgaatgcagggcacacgccaagcacgtagggtctgcatgcagggcacacgcatgggcactgtgtgcacacagtggaaatcagtgctgcccaccttgccccggggccagcagccactgctcccagcacaccctgccctacctgcagagcgggtaccccctgaggatgatgagtactctgaatactcckagtattctgtggaggagtaccaggaccctgaagctccttgggatagtgatggtgagaatggggggctgcscccagcggggtctggggaggggcaggcagggctgagccctgctgacctccccctgacctttcaaccctctctgattcccacaaaccctgctgacttgaccccattggcccagacccctgttccctgccactggatgagggctcctgcactgcctacaccctgcgctggtaccatcgggctgtgacaggcagcacagaggcctgtcacccttttgtctatggtggctgtggagggaatgccaaccgttttgggacccgtgaggcctgcgagcgccgctgcccaccccgggtggtccagagccaggggacaggtatgggctgagcccccaccgtggggaactgggcactgagcctgcctggatcgggttctgggggaggagtccttgggccagggttccaggtcagggtcctggaggagacgctccctcgcagtaggggacctggggcagacgcccagaccaaagagctgaatatagagccccagccgtggagcccccagtagggtccccttccatgttccctcctttaaagacctaagtatggacccctctgaggtcagagcccccacttcctgttgtagcctccgctccctccccttggcggtgcctctgcctgagcgtctccggggaaggtcagatggctgacgaccgtttccaacctgtcctcaccaggtactgcccaggactgaggcccagataatgagctgagattcagcatcccctggaggagtcggggtctcagcagaaccccactgtccctccccttggtgctagaggcttgtgtgcacgtgagcgtgcgwgtgcacgtccgttatttcagtgacttggtcccgtgggtctagccttcccccctgtggacaaacccccattgtggctcctgccaccctggcagatgactcactgtsggggggtggctgtgggcagtgagcggatgtgactggcgtctgacccgccccttgacccaagcctgtgatgacatggtgctgattctggggggcattaaagctgctgttttaaaaggctcctgttgtgactgtttgggaagatggggggtttcaagggggaaggttttccttggggggttggtattattctgcatgggtacagagtccctctgcccagtcctggtcactgtcttgtgattctcagtccccaacttgtccccggaaaagagtagatagggtgggggctaaggacacccccgggagggatgagtcataggtggggggctgcctcatgccaggaagcatgtaccagctcccaccccagggggctgagggagataaatgggccctgaagcggggtagagggtcagaccacaggacagtagtgcctggccccagccccaggcagccacagcaggctgccttaccccagaagcagctggtggcggtaggactgggttgggtcgggatgggaagggtcttggaggttgagtggatgtggggtttggctttatggagggcttggacccaggggactctgggatctctggctgcttttctgcctctgagatccgattcctgcccttctgtttcctggatcagctgcaagctctcctgctgagaaccgcctgccctcctgtggactctgtgtttctgtctgaatctttctttccatcatgctgtctgtctctgggatggtttctgtctgtctttttcttctagtctccattttgctctgcctccatctccttcatctccctctcttgctgtccctctgtctctggatttctttgtttctttttttctgtcttgctttctgcctctttgtctcattctggctctcctcttgtctccccttctctgtctctggcctggcctggcctctctaacccctttctcggtgtcttcctctctctccatcccccgctctgtcactctgcccttgccatctgtctctgtccatggaccccagttgaccagagcccctgccctgagcccattttctccttgcagcctgacctcacgatgaccaggtgtgctctgctgttgctgatggtcctgatgttgggcagagtcctggttgtcccagtgacccctatcccaaccttccagctccgccctcagaattctccccagaccactccccgacctgcggcctcagagagcccctcagctgctcccacatggccgtgggctgcccagagccactgcagccccacccgccaccctggctcgcgcattgtcctatcgctggatgtccccatcggcctcttgcagatcttactggagcaagcccgggccagggctgccagggagcaggccaccaccaacgcccgcatcctggcccgtgtcggccactgctgagcctgagagagggggtcacagtgatagggccaccctggatgggaagacctggagggcagccacacagctggacggatgctgccacatctgggcatacagtgtctggacgctgccacatctgggcatacagtgtctggacactgccacatggagccactgtcatgcaggtcatatcagatctgagtgccccacagagtcacagtgtgtctggacagcctggacattggacattgctaagttgggtcactgccacatggagtcttgccatgcctgtgtgccccacagacctaatatatgtccggacagcttggatgctgccacgtaaggtcactgctgtggcgagtcttgctatgtctgggtgccccatagtcacagaacacctggacaccgccacatgcagtcatcatcatgttactttcaggagcctcaacacgagagctcaacactgcctccgaccagtccctctgaggcccacaggtctgtcatcccataggccaccacacagagaaatgctggctgagggtcacttgcttgctctgtgccccatgaggcagcacctgccccagatggacggggctgtgaggggtgtctccaggcacaaaggcccgaacacaggaagcctgtgaccatggcagccttgtcttatgggcgcatatgtgcgtgtgtggctgagtctctgacagctgtgagtgtgtgtgagcagggtaagggtacgtgaggggtctgagaggagtgggtgcttgtcccccaaacctgcatgaagcaagaacaactcctggccaggccctgtcctccccacgtacccctgcatccccagcctcgacccagggacatgcagggctcacaggagacagggctcaggctgccggagctccaaccaaactctgtcccacttcacgcacggactgtcctgggcaaaggtgttcacctttccgagcctcggtttccttatctgtaaagcaaagcgacaccagcaagcctgtgagcattgtgtatatagcagacatggaggtcctgcagcaggaggtgctcaataaacacaaagcgactgaaggatgggatgtgcgagaatcccagtggtgtgcacccaggccgcgacacatggtgggtgagtcatacctggcttctctgccttcctccctagctccccggttaactgacctggtcccttggtttggaaggactaggttttgcctgatttcacagcccaactccattgctgggccagagacagaactgactttccaggcagtgtggacgggcttgcccgcagagggggcaggcactctgggctgtgcagacaactctaggtggacatgaaggcagacgctgggtggcatgggcagctctggcgggagagggagactgtactggccacagcgtggccggctgactggagtgggggcactggcgctgccctcacagttgtaagcagccctgtgggggcgggcctacagtgggctggggaggcggggctgcaggagccgcaggagtcgcttctctctcttcagagtgctaggcggggttaccccactctggagctgcagggggcagtggccctggccagtttggttgcaggatggacagaggctcgttaggaggcagctccctgaccgacctggggccggggagcagcaggcggggtaggcacgggacagcgtggggagggtggagggttagggaaagacctggatgaagtcagggtggtgctggaggggtgcgagagtgttggggggtctctcctggtttaggggtgctctgagggccattcatctgtcagtggcccgaaggagggggaaaactgtcgccctgcaagggagagggggctgggccaagggggaactataaatagtgtcttcctccagcccagggggagggaccgccagctggcgctgcccaggccctcctgctctgctctttgctggcctccaagggatcatgtttgtccaggtttcctcttggggtcacaccagtttggggaagtctagaggctcatttaggatgggtttcacatgatgtggctttagcccttaaaccagcacttctagggtgtctgctgtgtgccctgtgccagtcctgagcttctctgaacacctgctgtgtactcagtttggtcatgaacctctctgaaccctttctgtgtgcccttgctggtcctgaatccctaagcacctactgtacgccctgtggcaggctggaaggaggaagtgcagatcagggttcccaggctgcttggtgacatggttctataacctgaagtcagaacttcacactccttgtgagccctgggcccagggagacacaggggacaatcctttgctggaaatggccagaggaagctggaattcctggaaactcctgaacctcccagtggacagcagggctgggggtggagagatatatgtgggaagggaggcagcagagagcagcaggccccactgcagcctgcctgtctctgcacatgctggggtgcaggacttgtgagtgtgtgtgcgtctgtgtgtgcatgtgcagctgtgccagtgtctctgtgtgcatcagtgtgtgggcctgtgtggcatgcactgaaacccctgggtctttatgctgcaaagggtggtttgtgggccagatgtggtggctaatggctataaacccagggctttgggaggttgaggcgggaggatcgcttgaggccaggagttcaaggctgcagtgagccatgattgcactatgtgctccaggctgggtaacaggagcgagactgtgtgtgtgtgtgtgtgtgtgtgtggtgggatggtttggcagttctgtcaggactggccagtagatacagggactgggaagagtttgagctttgagaactggccaccacatggcttctaggctgggacactgggaggaagtccagtggtcagtgcagagggcaccctgggagccaaccagggtcaggccagccaggttcatggtgggcagaggctgagcagaacatgttcacacgtgtgtacagacatcccagcatacttcccacgcctgggacagaacagctggctcactttcggatatactgaggaggaaaaagccatgagggccagagattctaccgggcatccgctgatgctgagagagcagacgctgggacagcatctccatggagaggacacaggggagtgggagcacacatgtgaaggtggactgtgcgattccactgtagtgtggcaggcaaggtctggaaggctgggagttgagctgagtccatgctgcactgtggactcgctttgtgatcttggacccttctccctcttcctgaccctcagtttcccacctgacaaacagggccatgggaggggagatggagaatatcctcagagcagatgtggacggtggccttggggaggaaccccaggcatctcctgatgttgacctgtggccttccagctggacatagggccttgaaggagggtgcctgggtcagccacgggtagactttctggggaagagaggaaggtgcagagctgttgcatttcctgggaaccaggctcatcctgtctgggtgtgaggatgccttcccagagatagccctggccccctgcccaggccagctgtcctctacccccagcccttgattagcatcccaggaggtctgggaagagaatggacaggccagaggaggtgctgggtgtctgtagatatcagaggagatagcttttgcaatgagtgctgcgggttagacagggtgtgggcatgtggtaatgaggtctcagaggccacggtggccccaagatggccttggcagtggccagaagacaagagggctggctgtgtcacgaacagaatgagtggctttggagaagtagggagcaggtcacgaggggcacccagctcatcaggagccgcccatggatgtgctcagatctgctgggactggggtggaggaataagcgggtagatactgcaaaaggaggatgaggaaggaggaagttgttgactctgcctggggcagggtgttcccagggcaagcagctagagctggtttgggggagggtccagatgggcttccagcatgtggacctttggaatcttcagttcctatgaagtgggcaagacatctgtgtcagtcatcttaagggtccttgccaagctttaaagagctgggtggacttggactgatccaaggcagggctgtggcagggagggcatgggagggggtgctacacctatagcccacgaggccagtcttgttgccagtcccatgccctcaacacctggctcctggctgggtacacactgggcagagagaacctgaggatgcagggcacctgccaggggtgttgtggatgacatcgctagagggcagtgtggctcaggttgaagccgtgttggtgggggctggggcagagagtgtacaaagcttggagaggcggggctggggatcccgaggaggcgggaaactgcaggagtccggtgggggccaaacaagaaagtgagccaggggtttaggaacttctggatctctcccttgttccttgtccccagtgcattttcaaagacaagagggagatacaaatatagtaaaaggcaaccataacgtattttaaaatgaatttcttagagattgacatacttaatttatactgtaatactgtaagatagacaatgtgcacatcccattttcctgaagagaaaatgttattaacatattagtttcaaaaaatatgtaaaactttagttaaa

SEQ ID NO: 8930 - DNA, 112955 bp, Homo sapiens
aggctggtaccctgatctcgaacttccagcgtccaaaactgtaagaaaataaatttcccttcttcaagctggtattttgttatggtaagtcgagctaagattttgatgaagttggacttcagaattcttggtggaagtgacagaaacttaatttgaattagcttgagaaaaaaagaatatttcttcaaagaactctaggaaagaaaacaatgggtattagagtaaaaccactggcctctgacacactgcctttgcaacttctccccaaagtgcagtggctcactttaccctgaggttggaggatgatgtggggtggggtgggtgtcaagaggctacaagagaattaaggaggcctctgtggggccacaacctacgcttattattgtaacctgaggttcaccacaaatcatgggtgccttctcatggcagatcaaagcttttttttggcggggggtcgggggtacagaatcttgctctgttgcccaggctggagctcagtggcacgatcttggctcactgcaacctccgcctcccgggttcaagtgactctcctgcctcagcctcctgagtagctgggattatgggcacatgccaccacgcctggctaatttttgcatttttagtagagacgggatttcgccatgttggccaggctggtctcaaactccggacctcaggtgatccactcacctcagcctcccaaagtgttgggattacaggtgtgagccacctcgcctggccagatcaaagcttttatggaaggcttcatggcattgcctgtagagaactggagtgcttgaggtacagccctcaatctttggataatctcaccccaagtcagtaaaagaaacactcattatctctttccttctttccttcagagaatccatatttagcttgcttgcagaaggaaggagtcagggctctttttgttgggggtgggtttggtctcatgaaactttgcattagagtccagttttcctagggttaccattgtgcctaatgacaaaagttatggggttttgatattttaaatattttatatatttctaatattttatttcaaatgtattttctaacaatattcgacatctctggtgcatttatttggtgcttaaagatgcgcgtctcaatcactcctttgtctttagccaccaactagaaactgacaactcgcaaatctggattttcaacccaccccctgggcttcagtcccacacatgctacagcctgctggtcttggctgtctgttaagtgcctcaatattcaacatggctaagattaaacttatcttcatcctcatatccctttctgtttccataaaagccatttcttcctttaggttccatatctcaaaagcctgggttttcttccctcttgtcacaccttgcagcttaagtaatcaccatatcaagattcttcctctgaagttcctaaatacctctctatctccatgcccaccgccaacactttactccaggctaccatcactcctcaccacgattattacaatcttttcttatttctgttctagccaccttccctgcccaagccatttcatgtcaaactagactttttttttttttaagactaaggaacaaagaaacatgtcacttaagacatttgctaagcacccactatgtatcaggtaatggcatgaggtcacaaagatgggttaaacactgtttagcttcatttcttactcctacccaatgtcaactctatccttcagctactttcagtcttcagaaggtaattttttcccttgcctccaggctttcatactgttgcctctgcctacaatactaaaccctttgcctaattgcttcctatttatctatcagtctggtctcagtttagacataatttctccagatggtgttaccaatctctctactctgggttaggtatcacctctatttttttttcttttttctccaactgttagctaaatatccatgtggtgttttaataattcctaaccatagaacttttaaaaataagttttattgaaatatagttcacattgccataaaactcatccttttaaaacatataaaaaacatatgccagtggtttttaatatattcatgaggtttttctgaacatcgtcaataattccagagcatttatttccatcaatacaaaaaaaaacaaaacccaaaacaaaaaaccaaccctggaaatgaccaatctactgtctatatttagaattttgcctactctgaacattttatgtaaatagaatcgcgtaattaatgtgccttttgtgtctggccactttcacttagcataatttttcaagtttatctatattgtagcatctatctgtacttcattccttttaagggtcaaataacctttcattgtatggatatagcacactttgtttatccatgcatcaaatgacggatattggggctgtttctgccgtctattatgaataatgctgctatgaatatgcacgtgcaagtgcttgtatgcacacacgttatcatttctcttgagtatatacctaagtgtagaactgctggttcatatgataattctatgtttaacatttttttgaagagctgccaaactttttcaacatggccgcaccatgatacaatcccatgaatagtgcatgagagttctgatttgtccacattctcaccagcatttatcattttttaaattttagtttttctagtgggtgtgaagttgtatctcattgcagttttgatttgtatttccctgagggctaatgatgagcatcttttcatgtgcatttgtatatcttcttggaagaaatgtctattcaaattcactgcccatttaaaaaactgaattatctgaggccagacatggtggcttacgcctgtaattccagcactttgaaaggctgaggcgggtggatcacttgaggtcaggagttcgagaccaacctggccaacgtggtgaagccctgtttctactaaaaatacaaaaatcagccaggcatggttgtgggcacctgtaatcccaactacgtgggaggatgaggcacaagaatcgcttgaacccaggaggtggaggtttcagtgagctgagattgtgccattgtactctagcctgggcaacagagcaagactccaactcaaaacaaaaaaacaaaacacacacacacacacacacacacacaaaacaaacccaaaaactgagttgtcttttcattgttgaattgtaagagttctttatatactctggatactaatcagttatcagatatgttatttgcacattcccttccatgttgtggactgttacttcactttcttgatagtgtcctttgatacacacaaaaaaatttgttttgagatatggtctcactgtttcccaggctggagtgcagtggcacaatctctgctcactgcaacccccacctcctgggctaaagcaatactcccacctcagcctcctgagtagctgggattagaagcacccaccaccatgccctgctaatttttttgcatttttttttgtagagatggagtctcatttcattacccaggatggtcttgaactcctggcctcaaaggtaatcctcttgcctcggcctcccaaaatgccgggattacacagttgtgagccaccaagcccagcactaaatttttttttaatgaatgaatggattaggtaaccaaaatatcaagtttcttttttctgtctaaaattgtatcaactctgtgcagtaacattgttttcatcatgttgttggcagttaaaaattccttgactaacaattcagaagcaaacgaatgcacaagatgatagggattgtgtgatttaacaggttttggagcaacactgatctggattcaaatcctaactttaagaactgtatccttgggcaaattacattactatttttctttctttaaaatgcgtttttttgtttgttttttaagtgccaggggtttatttccctcacatgtgggatggctcacatacacaacacacaaaggcgttggcaccgtgggagagggcagcacccctggcttctgcttggcctcacagtgtaagaagggagaggatgggttctctctcctcccctcactagggcctaggggacccaggagcaaattccatccctttcacctctcagccaaggagaagccacattggtgacatttagttccaacaattacagtaagtggagaagggattggtctggtcccgaccattacacggtgaaggtatacatagtaaaggaagatacagtttggatgaggccacaatagggtgcagatgacaccatcagaagcatgtgcaggggaggggcagtcactcagcttctgggctgcttagttcctgggttggcaggaagggtagggaagacggatggggctcattgtttggcattgatgatgtctacgaattcgggcttgagggaaacaccactcatgaggaaggcagccacgtcaggctggctggccagctccttgcaggttgccttggtcacagagcctccataaatgataccagtgctctgagccactgcatcagagatgttggacttaagccatcctcggagcttcttgtgtacctcctgggcctgttggggtgttgcagtcttgccagtaccagtggcccacacgggatcataggccaagatgaccttgctccagtccttcacattatctgcgatgacctttgtctgctcaaaaacaaccttctcagtgatgccagcttccctttcatctagcttctccccaatgcaggcgattactccgagtctctctgccagagcatgggccacttttctgcccaatcagctcatctgactccccaaagacacgccttctgagtgccccaggaccacaccacccacgtgactcctaagtctttgaccatgccagggctgatctccccagtaaaggccccattagtcactttgtagcagttctgcggagccacagcaatcttgggagctagcttctgccgggccaactcgttatacgcagtggcgagagcacaaatcaccttggtgtcggcaggcacagtggccgcgttctgagtgccgatgagctcccccagacatttcttccgcccgttcatcttccagttcctccccacgaagaacttcctggagggcgccatggcgctggagctgaggcgctgtaggtcagtgtcagcgcctaaaacgggttttattaatacttggcaaggttgttaggcggattaaatgagatcttgtaactacagtgttttacacattgtgatcatttatcaaatagcagttatttactagtgcaaaggactagcagcaatgttaatatcaatatactgttaccttttgtccctaatttctccatagtacagtttccaatatttctgttttcttttgtgaattgttagaccactggtattggattcggacagaaaggcattcacaaaaatacagttcaatgtgagaataaccctaaagatgtatgcaaaatgctctggagttagagcaccaggagctgtaagcagaatgaagacctcttttgggcttaagaactaagtaaaggggagctgaacaaagattctaggcattttggatttatctcaatgtggcacatatttcaggtttgtaaaatagttcagttgactacgtgtctgtctcctccactagagccagcgtaggtaccatgtcttaagtcatctttggatctccagtactgtggccactctagggagagttgaattgacgcgccttgatcaccagggcagaaaaggattctctggagagggatggggcagtcggaaggggtaggaaaaacctggatccgtttccaaggagctgaaggcagctcagatatggggcacatctcggcgctaatgtcccaagctgctagcgaggaacagagagaacaccggctcttcttcccggctcctggcccggcagggttacttccgggagggggcggggagacaagaggaggcgtgccgggaaggaggccgtttgtagtgtaccaggcggaagtgtgccaaaggtatcggtgctgtcgcttccggtccgggtaaacgaaccttaggtacactggtgtgtggcctcccaagataggcttctgagggcaagtcagcgactgaagacgggagcgccagaatctgtggactcaagagtctagaatcaagtggaaaaaccggaaaaaaggccaggaacctgaatacgacctaatagctgtttccgagggggcaacttccacggagavccttctgccctggtaacggccaaagaggaggagatggcgccagtcagggagcggccgtggcccagacagtgaggaagcgcgaaggcggagcaaccgaggaatcctccggagaagaatcagagccgtcgctaccgccactaccgccaccaccatggaaggagcaaagccgacattgcagctcgtgtaccaggcagtgcaggcgctttaccacgacccagatcccagcggaaaggagcgcgcctctttttggcttggggagctgcagcgttcggtgaggggcccagagaggcagttctgtgccgcacggccgggrcggggtggaacctaggctccgggggagaayctgagcccggcagttgacctcgtgaggtcctccttggggaggagctgctgtcgtggggtggggctgcgaagctacatctttgccgcttttgggaaactagtcgcacctgatcggtcgcgawctggccctttccccacccggcagaatctgatttgtaggtcttatactcttcgattgtggcatcaatctaatcttgtttaagttctccctttgccgttgcttcttgggccgtgcttttccgttttgtcttcctcccaccaaatccaaccccagtgtttctccaccttccgcttaagaaggctttattcgtctcccctccgtgtccaagacttgcatctggcattttgctcccagtcgtagccttatgcctcactctttttgcctattttcactccagtttgagtctgttcttctcgaaacttctcaggtttctagattcttactcatgcgagttttccccttgctttggagtggcaacataatatgaagaaaaaacagtaattctgctttcagaaaatctttggagttctcattttgtttcrtattaatcctctaaccttgttatttctctggcttttagatttttatttataagatgggtatcactgctgctttgattattccatataaaactgtrtgtgcatccggtgagatatttaattgtagcttatatctgttgtatttctgcattctttgattcatgttttatgcttcctgccctaattttcacacctttgctgtgcttcatttctgtgtaaatgtgtattcttggttatctggctgacttaggttctaatgtaggatgtactttaaaaattaagtactttgaaaactaaagaggctttttttacaggctgacaaaatactcacctttacctttatttttgcattttatactcacaaccatattttttttggcccccttccctttattttaactcataactgatacttaaaggtgctctgccttattaaatcagctcctaggctgcaagtgcataatatttaaaaatttgcaactttgactttttaaaaatctggtcttggtatggagcaactttgccttttttttttttttttttttgagacagagtctcgctttgtcgcccaggctggagtgcagtggtcccatctcagctcactgcaacctcctcctcccgggttcaagagattctcctgcctcagcctcccgagtagctgggattacaggtgcctgccctgacacccgactaatttttttttttttttcttgagacagagtctggctctgttgcccaggctggaggagtgcagtggtgctatctcggcacactgcaacctcctcctcccaggttcaagtgattctcctgtctcagcctcctgagtagctgggattacaggcacacgccaccacacccagctaatttttgtattttttagtagaaacggggtttcgccatgttggccaggctggtctctaactccgacctcaggtgatccgcccrcctcggcctcccaaagtgctgggattatagatgtgagccatcgccccccgctgcaactttgactttgaatattaaacctaaaaaactggcacccaagtcctcttcagaaaataaaggaatacgactcactgtaggctacacaagaaaatcattcacatatggtctcatttagtgtttctgtgatctctggagagtcaacaattccctgatctttgtatagttttctaaagtgtaattaggagaagtgctacactatactaaaaaagtaatctctttctaattaaacctgcttgttgtgtgtattttaaatcaatatttgagtgcttaccatgtgccagcaactatgctgggtgtttggatttggaaatgaaccagacaaaaatctctgcttaccacagaaggtagttgtgattaaatgagttaatattctacgaagagsttagaaaagttcttggaacatagagattaaaatgttagcaattgttatttaartattagtcacttttctctccttactttccaatactctattacaaccttacatcatcttcaccatcacagttaatagtcagagtccagacaggaacagatggcacacttgacaggataatctgagtttattttataaagatactattataaagatttaggtatagtggtgtgacaagaaatagtttggtaacctatagctgaacggttaacatcccataaaagagggaatagttacttgaaaagtatggagttggctgccttgagaggaatggtgactttcagccgaagggacatagctagtttcaggtgaccttgagagaatgaagctggaggaatgaatatcctgaccctgttctcttaatttcttgctgggattccccattggccaaacccaaccggaagccaggggcacagtgacctgttggtaaagtctatacaggtcagcctattggagcagaaaacatgatagaggagggtggaaaagtggatctggaaaatatccagcagtaacacatcacgtttaggcaacttcagcatctggattgacagttcagctaacactttggccttctgattcctttacctcttcattctctttagccacctggtcacacaatcacaccctggatcttgtctttactaaaaagccaccacccaggctgggcgygcagtggctcacgcctgtaatcccaacactttgggaggctgaggcgggcggatcgcttgaggtcaggggtttgagaccagcctggccaacatggtgaaaacccgtttctactaaaaatacaaaaattagctgggcgtggtggtgcgcacctgtagtctctgctactcaggaggctgaggcaggagaatctcttgaacccaggaggtggaggttgcagtgagctgatattgtgtcactgcactccagcctgggcgacagagcgcgactccatttcaaaaaaaacaaaaaagttgccagccaggccaggcccattggctcttgcctgtaatcccagcactttgggagtccaaggtggaggatcccttgagcccaggagttcaagaccagcctgggcaacatagcgagacctcatttctacaaaaaaataggaaaattagttgggtgtggtgacatttgcctatagtcccagctactcaggaggatcccttgagcccaggagttcaagactgagtgagctatgatttcgctactgcactctagcctgggaaacagcaagattgtacaaaaaaaaaaaaaagtcaccacacctccaaatcactgattcagacattctgctgtgatcataacccactgttttccagtttgctggctcaaaaatatcaaataatgtcacctagttttttttgaaatctttatgtagttttactaatatttaagttttatttttaaaacaaaattttgtggaaccttttttttcctgttggtaatcaaatacctctttttttttttaacattttgttttctgggtatccacaataagtcaccctcaaatctcagtactgtaaatatcctcattgttcagactggtgatttgttttcttttttggctaaaggaaatatgtatcccaagagccctccatttccctgctccagtctggcctggttcgctaggtctgttggataattactgtcatgggattccataaacactgtcctagggaattccctttgcctctttgttgtgctggatccactgattcttggattccatgatgttttcttgggttactcttccatttaatggatcatcgagaagggaaccttcatcctttctctcattgcttttctgttggtctgtttttcttgggctgcttttaccttgagttctctagtcagcctgggggttataagctagactgccagtgttctaaagccagttcagggaatgaagccaggggatggatctcacaactaagtatgtaggttttaatttaatctcttgtttttcagcatgatactcctgtctttagctgagtctgttgtctaagagtccagagaccacctacttcaatctttccacagtaaaccttgagtcttctgttatggtgggagagtagtagcctggttgctcagagtcagagaggaaatttaggagtctactgcttcttacacagattttgacccttttatttatttaaacttttttctttttttgttttaaggctgcattactagccgattccccccccacccttttttttttttttttttttgagacagagtctcgctgtctcccaggctggagtgcagtggcgccatctcagctcactgcaagctccgcctcccgggttcacgccattctcctgcctcagcctccagagtagctgggactacaggtgcttgccaccatgcccagctaattttttgtattttttagtagagacaaggtttcaccatgttagccaggatggtctcggtctcctgaccttgtgatctgcccaccttggcctcccaaagtgctgggattacaggcatgagtgactgcgcccagcccaccccacctcaccctttttaaaaaaagaaaaaaaagaaaagaaaagttggggtctcgctatattgcccaggttggacccgaactcttggtctcaggcaatcctctctcctcagtctcctgagtagctgaaattacaggtgcacaccaccacatccagctccactcctttattttttgttccgcctgtgcatctgccttcagatgtacctgtgcttccaattccccagtcttcctgggttttgcaacatgaatagtttgtcccttgccttccctattctcgtctcatcctccctccccacccccaggcaaatatcagccttttcggatctgctaagacagttaacactgtcctttagctttccagtttccacagttctattgatatctgtcacctgtttccattttctttgtctttatgtgtttttgccttttttaaaaaagatctttactctgatttttattggatttttggaaggacctgaaagcagacagctgtgttcaatcagttagtttagtcattttaaacagaagtccctgcattagttcttgaattttatcaaaacctcagttcattgactgttccttacttcttctttattaggtcttcttgtttttacttctctccttaccaaatgtggattccaagatctatcattctagtcattttataaatacaccatcacctttcccctccaatttggtcagacttcagcatggttgtatgcagctgcttctcctcttrtcagatctaggtgctttgcatctctcaatcttctgaaatttctgggaccttgatcttttggtttatcctatgtcttgtctgcatctttagactcctttactgagtctttcccatcagcatccaaatagctgaaatatttctcatagtacacaaatattttggggtagagtggatgccgcctttgcccaactttactttcttctctgcttttaccctttcccaaccctttcttcaaatgcagaaactaactcatcttttgaaagcccaacctaaattctgctttctccttcaaggcttacctgcttctcttcagccaaaagtgatttcagcccccaatgaatgcctagagaactttacttcattgtgtttgcctttttataaacctttttgaaaataagtgttttgcctcccctactagactgggattcttgtcacatttgtttatgtagtccaatacccatagttgaagaaataaaccatggttattaagataaacaatcaagacacttcacacacaggttcttaaaaatgttgattgtcagaagtgcatacatgcagatactcagttggataactcacatttttctttatctgcgagttttatttatttttgctgtcacttttcaccatatacatggttaaaaataaacaatattcagcacctttaatgctcttcagtctttccagtctttttttttctttcttttttttttttaaatcctttatgagatgtatatgttgccctcatttcatacttgcaaatattcaggtacagaaagggagaggaactttttgactcaataaggctctctttgtttatttattttttgagacagagtctcactctgttgcccaggccggagtgcagtggcaccatcttggctcactgcaacctccgcctcctgggttcaagcaattctcttgcctcagcctcccaagtagctgggactacaggcrcatgccaccatgcccggctaatttttgtatttttagtagagattggggttttgccatgttggccaggtttgtctcaaactcctggccttaagtgatctggccgccttggcctcccaaagtgctgggattagaggtgtgagccactgcacctggtctatttatttagttttttgagacagggtctcactctgttacccaggctgtggagcgcagaggtgtgattactgctcactgcagccttgctcacctgagcctgggttcaggtgatcttcccacctcagcctcttggacagctgggactacaggcatgcaccaccatacctggctaatgttttgtattttttgtagagtcagggtcttgccatgttgcccaggctggtctcaagcccctgggctcaagcacttctctcacctcagactcccaaagtgctaggattacagacatgagtcactgtgcctggccaaggctctctttaagtggtcactaaatggcatttgtaaccaaaagtaatgtgygtggtggtttttttctttccggaagattttgtctactggaacaaaagcgtgttttaactgtagtaataactatagtgttttaacatccatttgaaattggtaaggcatagaatttgtgtggtttgctaaaaaactactttcaagaatatgtatttgtgaaactattatccttattcttctctaccaccccacctaactaatccgagagtaattgagtatagttcgaatgacctggtgacagtagacgtggtatagaggtataatttgaatatgctttagcctgtactgtgagttagcatcttttctctttctctaatatttgtataaaacagccattttctgaagaatctgtattcattgctctaaacttccaccaaaatttttggagatgtacagccatggttgttttatgtgatagatagatatcactgataacttcaaagtgttctgaaagagagtattttgaggcagatcttaaaggaatcttagtagcctgtcctgtatatttagtagtttcatttgtccacccctactaaccaaaattagtagaagttgtagagagctattgaaggaaagaccatctcttcatagggccaattacttaagcgactcagttataagtttttaatttaagttgtaagtaggagataacttttacagagacaatctttgggttagatattacctcaaaagttttatagttcagtatggaaactgaataggcatgcttcagcatgggtgtatgcagctttttgatggaaagcatcaaaagcacaaagcagatgaagtaaagtcatgctttgatagactaagttggcattgtcatgtttggtttatcacatgtccataggaattttcttcttagatatcatatcagaaaggtcttgggttgatatggtttggctatgtccccacccacatctcaccttgtaataataccccccgatttgtggcaaggtggggccaggtagaggtaattgaatcatgatggggggttccctcatactgttcttgtggtagtgaataagtctcacaagttctgatggttttataaatgtgagttcccctccacaagctctctcttgcctgccgccatgtaagacgtcgctttgctcttccttcgtcttccgccataattgtgaagcctccccagctatgtgaaactgagtcagttaaacccctttcctttataaattacccaggcttgggtatgtctttattagcagtgtgagaacacattaatacatgggtcatggaatatcagcttcaaacttctttgctagtacttttcctttttggaatttattgattctttagcctggttataaaacctagggtttttggcttttctctggtcattactgatttatcttgaaagtttaggcattttttgtgtgtgcttatgcttgcaccttccagtcaaaacatgcttttgaaaggaaagccttctagaaaatagaaaatattcctatacaacttcagtagatgagttcagtctaggaatactctgtgccttgcactgatagaaactgggagtatgtaaataatgaaaaccaaagatctttctcccagagagtgtaccaatgtagctgtgtcatccagtgtagtagccaccagtctagtgtgactatttaaacttaaaattaagtaaaagttaaaatcagtttcttttttttttttttttttttttgagacggagtctcactctgtcactcaggctggagtgcagtggtgcaatcttggctcactgcaacctccacctcccgggttcaagcaattctgcctcaggctcccgagtaactgggattacaggtgcatgccaccatgcctggctaattttttgtattgttagtggagatggggtttcactgtgttagccagaatggtctcaatctcctgatctcgtgatccacccacctcagcctcccagagtgctgggattacaggcatgagccactgcgcccggcctaaaatcagtttcttatttgcacttacccacattccaagtactgtacggtacaaatatagaacatttcatgtctttgaagtattggagtctatgtttgtgattttgtgacagtatttctgttgccatggtagtctgttatgtggtggcatttctccatattttgattagtttcttgtcttgccaggccttgggccaaagttgatagtttgatttaggatgtaaaattatcagggtactactatattttctaattacaatagtttttccaaagtttttcagatatttcttcagcattcttttacagtgattgattgcactgatgtttatggaggaaatggaaagtaggttttatagatttttttttttttgtggcaaaacattcaaaacataaatttagcattttaacgttttttttttttctgagacagggtcttgttctgttgcccaggttggagtgcagtggtgcgatcatagctcactgcagccttaaactcccaggctcaagctatcttgcctcctcagcctcccaagtagctgggattacaggcatgagctaccgtgcccagtcattttaaccatttttaagtgtgcagttcagtggtattacatacattgacattgttgtgcaaccatcaccatcatccatcttcaaaactttttcatcttgtaaaactaaatctatgcccactaaacaaaataggtgcccatttgctccccgccccaatccctggcaaccaccattctactttctgtctctatgaatgtgactattcttggtacctcatgtaagtggaatcatacagtatttagcctttttgtgatgggctattctcacttagcataatatcttcagggttcatccatgtgcgtagcattgtcagaaattccttcctttttaaggctgaataatatcccgttgtatgtatatataccacgtttggcttatccatttatccatcaatggacacttgcttgcacctttgtgaataatgctgctatgaacatgggtgtataaatacttgtgggagtacctgctttcaattctttagatatacagtatacctagaattagaattgctgtatcatatggtaattctatatttatttgtttacttatttgggggaactgccatactgtttcccagatttttaagctctgttaaacttaaaaacaaatttatttcttaggaagttgatattactcagactacctgtcctgtatttccctcacttgtaccatggtgctgaaatgttaccagagagtatttttacagctgtataggtgaagcctctaagataaaccttatttctctttactggaagttaacagtattgctacaagggatagttttgtagtgtttgttatgtacatactcttaaaagtactaatttaattttcttcttctggtagagtatccaaaatgaaattagaaaacaagtatttttccttttggtgggttttctgttaacagagtttgcataatggtttttacttatttttttctcaagcccacagcacaattcttttttctattttgtgttcattgcttcctagttgtattttctgtctcagtcatagtgtaatattttaacagttatcttcaaagcaagagaatatatttggaactagacatgaaaacatagatgttttgagcaaggctccatctcaaaaacaaaaaaactaaaaaaggccaggcgcagtggctcatgcctgtaatcccagcattttgggaggccaaggcaggcagatcacttgaggtcggggttcaagaaaatatacatgcttttatataaataagcattcagagatttaattaccactttaatgcgttattacaatactttaagttagacatattacatttatgtaagtttgaaaaatttgagtcttaagcactgttaacatatgctttgtatgtacaatagaattctcatctggtttatatgggttataaaactgagcaggtaggcagaaatagagaccagtgttgaaagaagataaattttctgtattttggctttcaggaagcctttgcatgggctaaccatttgtttcaaatgaaatggtttcaagcttggcattttctatttttaaagcaagactgcctagtataaataaggcccacagtgaaaagattatcgagtaatgcttgacttggtcattcccaactgaagttggctttatggatctaaatttatttgtctttttcagggccattcttgagattaataccaacattcataggtaattgaggattattattttggatagggattcttgtcatgaaaaaattggggcaagatatcttagtaccatcttatgtgtgaccaacaactatgtagttcagccaaaattcatttgtcagaggtcattatgatataggattatttaaaaatgcttgtctcagaacttctgggatttcraagaatcygggaagaccccactgtgcagtgctgtcattggccttattgattcctttcttttattttgattcaatttcagtttattttagagatagggtttcactctgtcacgcagtctggagtgcagtggcaggatcacagctcactgtaactagggcttcagtgatcttcccacctcagtcccctacccccaccccctgaagctgagaccaaaggtgcgcaccatcacatcctgctaatttttttttttttcctgtaaagactgggtcttgctatgttgcccaggttggtgtagaatttctggtctcaggtgatcctcccaccttggcctcccaaggtgctgagatgacaggtgtgtgtcattgcacctgacccttccttttaagtaattgtttttagctacgaatatctttcctcctaaggaaaatacttgttttccttttgattatatatttagctcttatggagatggctgtgaaaatgtaagttgactgaacttacctctataagggaacttttttgcttctagaaaatrtatttatgtatacccaagtgtattttgtgaatctgggagcttgctaggagatttatgattacttttcttttacaatttttttttttttttttggaggatgggagttgttttatcactgctttggtgaagatattagctaagtttgatttcatcttggtttctgtgtttcaggccatcttgcaaaagaagttatattgaaaaatatttttaggtagtgatggttatcttatgtgcccctcagtttatttttttcttaattagtatcctttcaaaccatttttcttcccaytgtccgagaaaattatcaagaagtaatttgttgtaacaaatctagcaatttatctcgttttgtaaaattctcataaaggattagataaaagaagttaaggtagttgatgacttaaaaaattactttttctgtttgaggtaaattagacttgttctttctttacccgtctcatgaaaatgattttttcttgatatgggaaattctgacttttctagctctataccacatggttgcagggcatatatctaaaatattgttttgtttgaccgatttgtagttttctttttaagagttctttttactctgtgttctgatgtagtcttccttcccagaactttccccaatatactataaatctttgaaaatcttcatttagtaaataatatcgttcactcatcgaaatgcttaaaaaatgcagcaacctgacacttatgttacttttcaagtgttattgaattatctgtatttccagaactttattttctatttgccagagctctttggtactcagtgaagtattttaggtaattctgcttaatttgaggagtttttgtgtaggattaactagcagctgtaatctgcttctaattcttggcagctaatgagtccttaggcgcctgtctgggtgtgtgcttgcattgttgagggcctgctcagtgattttggttgatttggcagttttagaaatgttagtatagaagtgagtcttggagcaacagtgcaccattaaacaaaaaagggagcaagtactttaggatctgctgtgaagtataatgaagggcttagagcatgttagtgaaaggattgctgggccatagcctgcctcatattcatcacatagtcatggaaatatcttttgaaaagactgatataaaggcctgttctgctactgctttgtgaaatggaagattggaattagatgcttaaatggaaaatgttctcttgttgcagcctctttgaaatgtgctgctagtgggagctgcagcttcctcctgctgactctgagccccaggcttcagttgagatggtcctttcagaaatgtggagcttagtccaagcctggatttcagtgggtagcacctggcatctgtggctagaaagtcctatgaagtgtaagtgctttattctctccttataaagaatcccttttccttccttgattctcttccttcccttccttttttctgctgtttagcagaggggaagaacaatgagcaatgtactgtagtttgtagggtatcaggatttggttgaattttctttatgactcagtagccaaaacaagatttcattttgttttcttttttgagacagcatctcactctgtcacccaggctggagggcagtggtgtgatcgtagctcgctgctgcctccagctactgggctcaaccaatcctcctgcctcagcctcctgagtagctaggactacaagtacaccatgcctggctgatttttaaattttttttagagacaggatcttgctatgttgtctccaggctggttttgaacacctggccttaagcaagcctcctgcctaggcctctgaaagctcggggattacaggtgtgagccaccatgcctggctggatgtcaacaattcttaaactctcctggaattcaaaataaagtgataattatgacccttaacatttagtatgggcaatgtcatcacgggtgatttttcgttgacgatgtacttagcagtagccttgatacccaagtttgccaaatgattctttaggggtcactctcatatttagttattattctgaaaaaactaatacagtatttgaaaggagaagtgcatttgaccagtgggtaagacagtatcaaagtaaataagggtgcttgaatttagaagatagtgccttccttttgcttctacttgatacatttgcacaagagtaagtcaatgatttttctaagactaatttcccatagcattgtcctgagaaattcatatagctgccatccatagtttaggttaaaaaaaaacccaaactagataataacataatgagcattaaaaggtgcaatttccaacttgcagaaaaataatttttttaacgagaggtaattttcttacataaagtgcaccatcttaagtgtgtaactcaatttttttcttatatgtatattttaagtaatcgcaaataacatcaaggcatagtacattctattactctagcagatacctgaatgcctcttcccagtaaatcattcccctcccataaccactattctgacttacatcaccacagatttgttttgcctgttttttaaaaaatagctttagtgaaatatagttcacacaactacatttcactcatttaaagtataccgtttaatggtttttaatatagagatttctttatccatcaagttttggacattttcttttttttttttttttgagatggcgtctcgccctgttgcccaggctagagtgcagtggcacgaccttggctcactgcaacatctgcctcctgggttcaagtgattctcctgcctcagcctcctgagtagctgggattacaagtgtgcaccaccacgcccggctaatttttgtatttttagtagagacggggtttcaccgtgttggccaggctggtcttgaactcctgacctcaagtgatccacctgcctcggtctcccaaagtgttgggattacaggcgtgagccaccatgcccagctggacattttcatcataccagaaagagacctgtaccccttggcctgccacctcccacctcattgctaggcagctactaatctactttctgtctstagagttttgcctattctggatatttcatataaatggaatcatatagttcatgatcctttgtgactgtcttctttcagttagtatgatgttttcaaggttcatccatgttatagtatatattattacttcactcctttttatggctgagcagtattccattcaacatatataccacatcttatccattcattggtcagtggacattgggactgtttccactttttggctatcgtttgtgaatagtgctataatgcattcatgtacaagtgctgttgaaatttttggattatatgataactcttatttatttatttttttttagacagaatcttcctctgtcacccaggatggagtgtgggggtgtgatttctgctcactgcaacctctgcctctccagctcaagcaatcctcccgccttggcctcctgagtagctgggactacaggtgcacactaccatgcccagctaatttgtattttttctagagatggggtttcactatgttgcccaggctggtttcaaactcttgggctcaagcgatcctcctgccttggcctcccaaagtgctgggattataggtgtgagccactgtgcctgggtgataacgctctatttttaacctttcaaggaatggcatcctgttttcaaaatggctgtaccattttacactcctaccagcagtgtataagggttcctgtttttctgcatattcactagtacttgttgttgtctgtctttttgattatagccatcctggtgggtatgaagtgatatctcattgtggttttgatttgcatttcctgatggctaatcatgttgagcatcttttcgtatgctttttgaccattcgtgtatctttggagaaatgtctattcaagttctttgtccatttttaaaaaaacttttaggttcagggatacacatgcaggtttgttgtataggtaaagctgtgtcataggggtttgttgtacagattattttgttacccaggtgttaagcccaggacccattaattattttttccgatcctctccctcctctcaacctcttacctccagttagtcccagtgtctgtcttctttgtgttcatgtgttctcatcatttaactcccacttataaataagarcatgtggtatttggttttctgatcctgtgttaatttgctaaggataatggcctccagcgccatccatgttcctgcagaggacatgatttcattctttttttatggctgcatagtattccatggtgcatatctaccacattttctttatccagtccactgttgttgggcatttaagttgattccatgtctttgctattgtgaatagtgctgcagtgaacatttgcatgcatgtgtctttatgatagaacaatttatattcctttgggtatacatccagtaatgggattgctgggtcgaatggtagttctgtttttagctcttcaaggaatcgccacattgctttccacaatggctgaactagtttacactcccaccaacagtgtgtaagcatttctttttctctgcaacctcaccagcatctgttattttttgctttgtccatttttaaattgggttcttggtgtcgaatgctttcattttagaaatatggtttcattggctttagaattctttcctttttttcttcccattttttagctctacctctccatgtcttctggcatcctcattsttgacaagaagtctgctctagctttttacttttgttcctctgtatttaatgtgtcctttttctctgcttcccttcagtatttctctttatctctggttttcaggagtttgagtatgatatatttagaatttgtttgcttatttgggggagtaacattctctgttgccctggtctaccctagtctttagcatttctgttgtctgccattctctctggtagggcggcctcagtgatcctagtttttcttgtgtcattcattctttgccttgcatctggcaggtattgtgcaaaatagtttttttttcccttctctcagtggtaggagacctctcatggtgttggtagtattattataggctcaagactgttttatgcctgtcccctaggggtagaggtttttcttttacgcttagtgcaactgcagtgagtcttaacctgtactttgagggtgacatgctttgctgccccctccccgtagcctaaggcttttgttcagggaagggttcagtcagagatttttgtgctttttcgcaacagaggctcttcccctcctccaggactgcaccaccaaaggaggtggtcttctgccctacccccagtctttctcttgagtatctggtctgcgaaggtgatctgctgggtgactgtgagttctgcttgtgtctgcgagtcccaggggttctatatgctcatcctagcccacatgcagcctttctcaatttgttagaagtgttagcagaatttttatgagctggttgccaggtgccctgaatttcttcctctgtcctgtcgtagatgagccagtgcttgccttcattttccttgttagaggtctgtccttagatttcagtcaacttggttgccctaagacctcaactttctgatgcatttaagcaaggttattttgtagtttatttgctttcgtgtattgttaacttacggaaagcagtattgtttctgtcattatatatcttaggtggatgtggaactcttctgaggcatttttattcttcatatattttaaataccacaagatattattgctttatataatcagtgttaattggatttacccatatacttcactgcttttccattgttcttcattcattcctgatttctgttttctcttttcctgctaggatttcaattatatgtgtcttagcctttttcactgtgtcccacatgtcacttgcattcttctcattgtttaccttctatcctttttttgactttgtgcttcagtctttttgttttttattgacctgttatcaagcatagcaatctataattcttcagttgtctgatttgctgtttggccttttctaatggttcttaatttcagttaccgtatttttttacttccagaatttccttttaattcttttttatatattccatttattaatggaaattctccagttttgtcttctaagtctttgcatatattaatcagctattcattttttccaactttatttcttttaaccttttagaaatacaccttataawgccctactccttaaacttttccacttgtatcttgtaagaacaaggacatttttctaaaataaactaaaatgttgtcactctcaagaaatttgacattgatatgatggtattatcagtctgtattcaaattttcctaattgctctagttatagatttcaagctttctaaaattttattttctctaatctaggatccttcaagggtaatgcttttcttttggttgttatgtctctagttacctgggtatttttttttcttttatgatgatgatattaaaaaacaaatccaagacaggtacggtggtgcacacctgtagccccagctacacaggaggctgaggtgggagggttgcttgagcccaggaggccagactgggcaaccatgtcaagaccctgtccctttaaaacatatacacacagctgggtgcggtggctaacgcctataatcccagcactttgggaggccgaggtgggcggatcatgaggtcaggagttcaagaccagcctggccaatatggtgaaacccccgtctctattaaaaatacaaaaattagccgggtgtggtggcaggcgcctggagtcccagctactcgggaggctgaggcaggagaatcacttgaatccgggaggcggtgattacagtgagctgagatcacaccactgcattcctgcctgggtgacagaaggagattccatctcaaaaaaaaaaaaaaaaaraaagaaaagaaaagaaaaaacacacataccccacacaaatccagggtgggccattttgtcttagtttttagtatgcctcactatttagatttatctggttcttttctcatgattgcattcaggtcaaacattttttggaagaatactgcatagacgataatttgtcatttttactcaatcacatcaggagtcacataaaatctattggtgatgttttattactttggttaagacatcagttattttagtctttgataattcattatctagataatggttactttgtattgtctgtttctttctagttgttgtcacttggttttgctttttttttccccccgacgtggtctygctctgtcatctaggctggagtgcaatggtgtgatcaaggctcactgcggccttgacttcctggctcaaataaatggacctcccaccacagcctccaaagtagctggyattacaagcatgtaccaccacatctggctaatttctttttttctttcttttttgtgtagagacgaggtctcactttgttgcccaggttggtcttgagctcctagcttcaagtgatcctcccacctcagcctcccaaagtgctaggattataggtgtgagccaatgttcctggcctggctttgcttttgtttgatagatgcttgatatgttgttgttgttttgagacggagtctcgctctttcgcccaggccggactgcagtggctctatctcggctcactgcaagctccacctcccgggttcacgccattctcctgcctcagcctcccgagtagctgggactacaggcacccgccaccgcgcccggctaattttttgtatttttagtagagacagggtttcaccatgttagccaggatggtctcgatcccctgacctcatgatccgcccacctctgcctcccaaagtgctgggattacaggcgtgagccaccgcgcccggccgatatgttgtttaagaaaagttgaagagataaatgatgtttccttcctgagatgattttcttttgcttctggcaggtcttttttttttttttttttttgagacagagtctcgctctgttgcccaggctggagtgcagtggcgcgatctctgctcactgcaagctctgcctcccgggttcacgccattctcctgcctcagcctcccgagtagctgggactacaggcgcccaccaccatgcccagctaattttttttttttgtatttttagtagagatggggtttcaccatgttagctaggatggtctcaatctcctgacctcgtgatccgcccgcctcagcctcccaaagtgctgggattacaggcgtgagccaccgcgccyggcctcgcaggtctttatgacagggacagatctctttgaaattcaaaaagtaattgagcagattctaagctgtgtttcaacctttttttgttttgttttgttttccaagacagggtcttgctctgtcttccaggctggaatgcagtggcgtgatcatggctcaccgcaacctctgcatcctgggctcaagcagtactcccacctcagtgttcctgcccacaccccccagtagctgggactacagacrtgccatcatgcccagctatttcaccttgttgcccagactggtcctgaactcctagggctcaagcagtcttcctgcctcagtctcccaaagtgttgggattacaggcgtgagcccctgtgcctggcctactttctgtttttatgagtcttgctactttaggtaccttatataagttagaatcattcagtatttatcttttagtgataagtgtattttcacttagtataatgtccttgaggttcatccatgttgtaatgtgtgtcagaatttccttccttttgaaggcttagtaacattccactgcatatatatacattttgtttatccatttatccatagatgggcatttaggttgcttctatctcttggttattgtgaataatgctgcagttggctgcagttgaacacgggtgtgcaaatatcttatctgtttgagatctttttttttttttttttttgagtttagctctgttgcccaggctggaatgcagtggcatgatcttggttcactgcaaccttggcctcccgagttcaagtgattctcatgcctcagcctcccaagtagctgggattacagtcatgcgccaccatgtccggctaatttttgtatttttagtagagatggggttttgccatgttggccaggctggtctcgaactcctggcctcaagtgatcacccgcctcctaaagtgctgggattacaggtgtgagccactgtgcccggccctgtttgagattttatattcagttcttttagatatatagccagaactgggatttttggaatatatggtagttctatttttaattttttgaggagcctccatccccttttccatagtagctacaccatttacattcccaccagtgatgcaaagggttctagtttctccacattcttgataacacatattattttctgaggtttttttgcttcgtttttttggatagtggtcattctattgggtgtgaggtaatattttgttgtggctttgatatgcctttccctatggttggtgatgttgagcatcttttcatatgcctgttaaccatttgtatatcttctttggataaatatttattccagaaatgtcatccaagaaatcactgtcaattgcaatgattatgaagcttttcccctaggctttcttctaagagttttatagtttcaggtcttacgtttaggtctttagtcctttttgagttaactttyatatgtgatataagggactaactttgttctttttcaggtgaatattcagttttcctagcaccattgtgtagtcttggcacccttgacaaagatcatttgaatcctttacaggagggtttctttctgggtctattccattatattggtctgtgtgtccatctttatgctagtacccatactgttttgattactatggctttgtaataagtgttgaaattagaagtatgagacctccaatattattcttttttaagattgttttggctatttggggtctcttgagattccacgtgaaggaaacaattccattttttgcagaaaacgtcattgagattttggtgaaggttacattgaatctgtagattatgttgggtagtactgaaatcttaacaatattaagtcttctagtctgtgaacatgagatgtctttcatttattggtgtcatctttaatttctttcagcaatgttttgtaattttcagtatacaagtcttttgtctccttggttaagcttattcctgagtattttattcgtttttattctattgtaaatggaattgtttcttttcagatttttcattgttagtatgtagaagcaactaattttaatctgttaattttgtgacctgcaactttgccaaattcatttattaagtcttaacagtcttcttatggaatcttttgggttttctacaagtaagatcatgttgaatgatcttacattatatgtgaccagagattattttacatcttcctttcaatttagatgtcctttgtttttcttgcctaattgctctggctagaacttcgaacactatgttgaatagaagtggcaacagtagatatcctagtcttgttcctgatcttacagttttgaaaagctttttgtcttcactgttgtgtgatgttagctgttggtttttgcatatatggcatttattactttgaagttgtttccttcctggtttgttgagtgtctttatcatgaaagggtgtcaaagtctgttagatgctttttttgcataaattgagatgaccatgtcttttccttcttcattctgttaatgtggattacatttattttcatatgttgagccacccttgtattccaggtataaatcccacttgatgatgatgtataatcccttcaatatgctgttgaaaagccaggcgtgatggctcatgcctgtaatctgacttatttgggaggctgaggcaggaggattgcttaaggccaggagctcgaaacccatctgggcaacatagcaacaccccatttctaaatttaaaattttgaaaataaaaatttaaaaattgagaaaaaatatgctattgaattccatttgttggtattttatcgagggtttttgcattactattcataagggatattattagtctgtaattttcttttcttgtttcttcatctagctttggtatcagaataatgcttgtctcatagaatgagtagaaagtgttctttcctcttcagtttttggaaagagtttgaaaaggattaatgttatttctttacatgttttgtagaattcaccagtaaagccatttggtcctgggcttttcttcattgggaagtttttcattactgatttaatctcttggcaagttataggtctgttcagattttctgtttcttcatgatttagtcttgttaggttatttttctaggaatttgtttatttcatgtaagttattcaatatgttcacttgcatttgttcataatactttttataaccctttttatttctgtaaaattggtagtaatatcctgacttttatttctgattagttatttaaatcctcttatttctttctttctttctttcttttttgacatagaacctcactctgtcaccgagactggagtgcttgtggcatgatctcggctcactgcaacctctgcctcccgggttcaagcaattctcatgcctcagcctcccaagtagctgggactacaggcagctgccatcaggcctggctagtttatttatttatttttttgtatttttagtagagacagggtttcaacgtgttggccaggctggtcttgaactcctgacttcaagtgatctgcccgccttggcgtcccaaagtgctggrattaacaggcatgagccactgcacccggctctctcttatttcttaatctagcttaagctttgtcaattttgttgttgttgttgttaattttgaaatactttacttttaaaataggtcacaacactaagcttttggcccattccgccattgtacaagctacagatgcttgcttagcagccaaggggcactcttgagtagcatatcagaaaagtgaataaaaatccatataaaacaaatatttaaatagtttccataggaacatatataatgtgtgacctatatcctagtcttccatattgccacatccgtatgaacccaactcttaagaaaagtgaataaaaatccatataaaacaaatatttaaatagtttccatagtaacacaaataatgtgtgacccatatcctagtcttccatattgccatgtccatgcgaacccaactcttacgaaatcccttaattcaagctggactcatggttaacaattacaagagtgatatctacatattaatactagcagaagcacaagttgctgattgatgtttcattctattttcccaagcagaagacacaggatgctaatgtcctgttcctctacttggggtgggagatcgtgcttctagatacactgcatgagtttcgatgctggtcctgacatcacatgtagattgttggcctctggaatccattaaaagtacaagtagcagcaacagtgtcagcgcccatgtttttaaagagcatccaattacctacatatattttgggcagatcacagtgctcaacaatctgatcaaggccatcacatgttcttcccatatactggatgaataatacttctcactgatctaggtctcttttgcagcaggggctttacatgtgcatgatcataaaggattgattaaatgatccatatacttcatcattcatgtaatacataaaggtctgttcgcttgactcatcttcctcttcagagcctgtctgttcttttttttctttctttctttttgagacagagtctcgctctgtcacccaggctggagtgcagtggtgtgatctgggctcactgcaagctccgcctctcgggttcacgccattctcctgcctcagcctcccgagtagctgggactacaggcgcccgctgccgtgcctggctaattttttgggttttttttttagtagagatggggtttcaccgtgttagccaggatggtcttgatctcctgacctcatgaactatctccctcagcctcccaaagtgctgggattacaggcatgagccaccgcgacggccctgtctgttcttttaatatgatttttttggcaatgaaagctgatgccacatgaaatatctgcctggctcagctgtgactctcactctagagtctggtggaaaatacttgtctgatgctgggttgattacactggtaatacttcagatttaagcctcacgtcctcagatccaggaaagcaactgccagtattaagcagttacattctgaaaccaaactcaactcccgtgtcaaagacacagtggacattggaggctgcctgcatgaaggtctcaggattggtacagctacttcctacatggaagctgacaccagtgacatcaatatttagttcttttgctcattccaaaagaagcctgctggctttgagcatggcaccagatttaacactgatgtgacgggctgctttgagtgtgttctggcaactgacatcaacttgacctcattaccgaaaatcatcatctggactccattattggcagtgtacttaatttgagacatttgtttacaagaatttgcatacataaacctctctgggggcatccccagaatctgcaccaattgtatttcagccttgctagcacagtcaaatcctgtcccgatggcagcaagagtcttcatgatggctctgctgtcattataattgactgcataaaagggggtgacatgaggaagagcttttaactatcttagatgtgtctttagaatgtctctaaggtccatgacatagaaggcatcctaatcatcatcagaagaaaattcattaattttttggtccagaatgtccttggcagtaaaaccttcatcaaggaagcaagtggcagtgaaactcttcattattaaactcttcatggtttcttgatgttcctctgaaacacaacaaaatggaaaactaagagatggaattgaaagaaatatttccagcttctcacaaagacagttctccaggaattccaaatcctgcctcttgtgccctcagagcagcagtggaaacattctcagagcacctgggtaccacagagagtgaagatgctgctgtctgagccagagctacaggacctctctgctgtgcctgtcagtgccttacttctgcccgccagagatgctggcccaaggtagtgctggagctgttggcagaggggcggccagtgactgtggctgccgggactgaccttgttgatctttttgtagcattcccttgattttcctatctattttgttaatctttgccctaaatctttattatttccttctttttgctagctttggatttagtttgttctttttatggctccttaaggcataaaattaggttgttgatttgagaccttttttcttttttaatgtaagcatatatacagttatacattttattcctcttagcacagtttttgctgcattctataagttttggtatgttgtgttcttatactagttcagtttagttcagttttatactagattttatactagttcagtttaatatgcaacattggggtttttgttctgttttattttctaaacataaacacagaaacacaatacaartgtataacttagtgaattactatatgtggatgtccttttagccaccacccaagtcaagaaacatcttcatttgtctgaagatgttttctgatttcccttccttgacccattggttttttgagtatgttgtttaatttccacatatttgggaaatttctagtttcccttttgctgttgactcctagttttatttaattgtgatcagaaaagatgttttatatgatttcagtctttgaaaatttattaagacttattttgtggcctaacgtatcagtctttttaaggagtggtatatttcttgtttccttcactgggtcccaactcaagagtttggagtatttaccagggcttctcttcgatatttctgaattccagtttttatttccccagtcttgagaggctgtccagagcccttcagcttcttagcctcttgtcttccactttcaaattggcaaatgccatgaggggaaaagtggagccaaagagtgaactgaactctctgctcttccattcccttctttctgggaactgtggcctcatattttagctttggtgtctttaaaaaggttytttgtagggagtatttagtgaattttttgtgttgtttttttttttttttttttttttttttttttttgagacagtcttgctctgttgcccaggctggagtgcagtagtgtgttcttggctcactacagcatccacctcccgggttcaagcgattctcctgcctcagcctcccaagtagctgagattacaggtgtgtgccaccatgcctggctaatttttgtatttttagtagatatggggtttcaccatattagtcaggttagtctcaaactcctgatctcaagtgatctgcccgcctcggcctcccaaagtgctgggattataggtgtgagccactgtgcctggtcttagtgaatcttttctggtagtttatgaattgatgtaataccagatggtctgttataaccaaagttgaaacacccgataaatgtcatgagagagatagctttattgtttagggagcatatggacatgaaactaactcctgtgtgttgttaaaaaagctttgctaccttttctaaacaaattttacagaaaaaaatcttacaggccaggtgtgattgttcgtgcctgtaatcctagcactttgggaggctgaggcaggcaagcccaggagtttgagaccaggagatagcaagacctgtctctacaaaaaataaaaaaaaattagctgggtgccgtgatgtatgcctgtagtcccagctatgcaggaggctgaggtaggcagatcacttgagcccaagaatttgaggccacagtgagctgtgatggtcccactgccctccagcctgagtgacagagagaggccctgtcaaaaaacattttgcaagatctgtatcacttttttaaaaaatygtatataaagtacaagttatttttaataaacaggtaattacaaaagacactttaaaaatattcaaacagccaggtgcagtggctcatgcctgtaatcccagcactttgggagaccaaggcgggcagatcacctgaagtcaggagttttgagaccagcctggccaacatggtgaaacgctgtctctactaaaaatacaaaaattagctgggtgtggtggcacatgcctgtaatcccagctacttaggaggctgaggcaggagaatctcttgaacctgggacgtggaggttgcagtgagccgagattgtgccattgtactccagcttggccaacaagagcaaaactccctctcaaaaaaaaaaaaaaaaaaaaaaaattcaaacgtcatcaaaggagcttgaaaaataaatctcctgtgcatccctaccctccaagttaaccagttttgcatctctacctctaagattactggtttgcctgggggcaagtaattgttttgtttttttgcttctgcccttcatttttgaggtctctacttttaaggagatagaaatgtttaaagtcagaagtacagataattgagaatgatatggttggtgttttctgtcatttagtttctgcacaattttttttttttttttttttgagacggagtctcactctgccgcccaggctggagtgcaatggcatgatctcggctcactgcaaccttcccctcccaggttcaagcaattctcctgcctcagcctcctgggtagctgggactacaggcacacaccaccaagcctagctaatttttgcatttttagcagagatggggttttaccatgttggccaggctggtctagaactcctgacctcaggtgacccaccagtcttggtctcccaaagtgctgggattataggtgtgagccactccgcccagcctacattgggatttttattgttgttctgttttattttctaaatgtaaacacagaaacacaatgcagatgtgtagcttagtgaattactatatgcagatggccttttaaccaccacccaagtcaagaaatagaactttgagcacagggctcacacctgtaatcctggcactttgggagacccaggcaagaggattgcttgaacccagaagtttgagaccagcctggataacatagtgagaccctgtcccatttttataaaaaaagaaaagaaatagaactttactggccattccgctccagaagcttttcttgtaccatttgacataaccgcttccctccctctaaaggtaaccactgtccttttatagtaatcctttgtgtttctttatggttttatacttagtggcttagtgggcaatctcacacttcatagttgagtccagctggttttttttttttttttttttttttttttttttttttttttttttttgtgacagagtttcactcttgttgcctaggctggagtgtggtggtacgatctcggctcactgcaacttctgcctcccgggttcaagcagttctcctgcctcagcctcctgagtagctgggattacaggcacccaccaccacgcccggctaattttttgtatttttagtagagatggggtttcatcatgttggccaggctggtctcgaatttctgacctcaggtgatccacccgccttggcctccgaaagtgcaggggttacaggtgtgagccactgcgcccggcctgtttttttatataatgtattttgagtgtcttaatctgcaggttctctctgttgttttattttatttttaagactgtctcactctgtagcccaggctggagtgcgtagtgtggtcatggctcactgcagccttaaactcctgggctcaagggatccttcccctcagcctcctgagtagctgggactaaggggcatgccaccacacgtggcagatttttcaaaaatttttcatagaggctggtctcaaactcctggcctcaagtgatcctcctgctttggcctcccagagtgctggggctacaggtgtgagccaccacacctggcctctgtaggttatttatctgttgaagtatcagggccatttgacctatagagtttcccacagtggattttgctgattttattgtcatgattcagttctactctcccttgtttttccggcaaattagctgctggatctagaggctcaatgaggcacagatttgattcccttgttattgtggtatctcctttcatcaagaggcatatagtgtttggttttctggtggttctaattgtttaccactgtgaagcagattaccccaaaacttaagtgatttgaaataaaaaccattttattgtatctcataactttgttgatcaggaatttgagcgggctcaaatcagcatccaggatgctgattgtgctccttcagttttcatccatttggtggttgggctggtctggaggttctaagatggcttcatttacgtgcctgacagtctggtgggaatgactggaagcctggattcagttcggcccctctagctttccatgtagtctcagggctcttccacattctctccagcagagtagttttaagttttcacaggcagtggctttcctcagagttaagtgttcaggataccaaggcagaagctccaaagattcctttgacttaaccttgaaagtcccagaatgtcacttcctgccatattctatcagttaagcaaggtatcaaggccggtgcagattcaaaggcatgtagattctacctttcagtgtaggattagcattatattcgcagctatcttcaatccacctcattcttttttgtgtgtgatgtaactagctgttattgttcagtgcttaatccattaattgtgggttgtgaagtgttaatattctaaatctgttatttctttacttacatgctgttaggttggtgccaaagtaattgtggttgttgccattagaatacttctataaagtgactcttctctgttaggttacttaggagtacagtttatataggaaaaccaagataaatacgtgatttttacccttgtaagataatgagtttatgtctgcttgtaattgttaccaaaaatggcctgtggtggccagtttgttttttccttgtatcccttgctgaatcctaaattgtcctgtctctggccagctggttgcctcctttgcctctcagtacttttgaaatgactctagtagtcttattgtcttctgtcctttctagtatgacaggatgtatcatgggcccatcttgtgtatttaatattggtatcttttagtgggaaattgaatttaaagactacaatgtaggcactagggatgcaagttgttactgagttggacagtatgtttagggctttcagtggatagagctagggaattgtatatttttatatatctatataatatatataaattatctacacgtgtatgtatacaagtgtagaaaagtatgtatataaatagtgggtataaatacttaaaggtaaaatacctcatgaatttatagagatattgccttttcaactacagcactataaagtttttaacttaagcctttttatgtctacacctcctttcttccatactgagaatccaggttgtgagggacacagaaggtgacagagtatcttataattactcagtagctctgtcycmcattaacctagtcagtagcctcagactaacaatactaacactactactatcagtatatacaccaaaaacaagcatagttttgcatgtgctctcccctttcttccacactgtatctgtacagagcttgtaatcattacataccacttctctttcgactttcatttattcttaattgttgtaataaactatgtttaatattcatccccagtccttatgttgatgccttgttctctctaatcagtttgattttttaaacagattgtttaggaagggcttataggaataatatctacatttttgcaagtaacagtttctggcctttataattgaaaatcggtttgacttgacataaaatctttgtcacattttctttcttagcacatctttaccctgttctttcttctttcatgaagtgttcaagtcacagtagatgataatctaattttttcctttataaatcagttgctctttttatatagatgtccaaattattttatctttttctttaagtatattaattttaccagattatgtctcagtattggttgttctgcgttggtatttttaggtatatgatatactctttcaatgtatagtttcatgtctttctcccctaccccccaacatttcagaaaccttttcttttttttttttaagaaacggggtcttgctctgtcacccaggctggagtgcagtgatgggattatattcatttatttactcttcctcttttgataactttgataccaaatttttttaattaaaaaaattagtggcaggatcatagtgcactataacctcaaaactcctgggctcaaatgatttttcctcctcagcctcctagtagctaggactacaggcacataccaccacacccagctaatttttaaattttttgtagagacagaatcttgctatgttgctcaggctggtcccaaactcctggcctcaagtaagcctcccacctccacctcctaaaatgctgggattacaggcgtaaactgccttgcccaaccaggaacattttcttgaattacagtttttgataattgttctgtttccttgttttgattttcttcttcagagatctctgttgtctatatgttagatatttgcctatgttcaatatttgtcatttcctcttaaatgttttaaaatttttttgtttaaaaaaaaacactccttttcatgtgtttctcttaagacattatctgatgtgtttagtcacatgtgaaattcctcctagtctttatctctgaagggatttttttaatttctgatttttttcctgagatttttacctaatttctgaaatgttccttctcaattctattcttccgtatcttgtatcattttcttaatgttgtttagctcattttgaagtaataggctaggtttttaaacctgtttttctggtcttctttcctcgtaaggtattactctgcttattttctctttcagccatatatgacatttgacctcagttgcttattttctgtgaaattagtttttctgaatttctagaaggaggtttgattaaggataatacttccaaccttttcttccttcatctctattatacttgttctatattattttgttttttttcatagcagtttttcctcaattggggtctcttcctgactgtttggtttcaaggttttataaaggctaaactgttggcatccccttcacacttatacttactggctattggattgggtcaaacctcctcctttttctttctcttttttttttttttttgagacggagtctcactcagccacccaggctggagtgcagtggtgcgatctcggctcactgcaaccaccgtctcccgggttcaagtgattctgccgtctcagcctcccgagtagctgggattacaggcacccgccaacatgcccagctaatttttgtattttagtagagacggggtttcaccatattggcccgactggtcttgaactcctgacttcaggtgatctgcctgccttagcctcccaaagtgctgggattacaggcgtgagccaccgcgcccggccaaacctcctccattttcaactgccatcctcagattggctccttgtactttccagtgaatctctgttggttcttggtgtttctctgttcttaggtccagtagacaccctgttgtttgcctctgcttccacatttactgagactaaaaccacacaggtcttacagatgtcactggtttgtctccttccacttatattttggggttcttgtagatacccttggagataactagacaacacctagttttgttgctatctaatgctctgttttttttgagggatttgtggagattgtataaagcttcatagaatctttttgctatttaaaaatatatcagctaggcatggtagctcacgcctggaatcccagcactttgggaggccaaggcaggaggatcacttgagtttaggagttcaagaccagcctgggcaacatggcgaaaccccatctctacaaaaaaatacaaaaattagccgggtgtggtagcagacacctgtagttccaactactagggggctgaggcaggaggatctcttgagctcaggaggttgaggctgcaatgagctgagatcgtgccattgcactccagcctgggtgacagagcgagaccctgtctcaaaaaataaaataaaaagatattaacatgagcaaagtaaagatattctgatggtctattaaatcataggtgtgcttgggttactggttaatcaatggctaaaatctttggaagatttttttacttgagaaaggaaaattggtgctattagtactacattaattaattaaacatttgttgaatacatttaagacacgatgtttggactaaaaagtacaaaaattagtaaaatatactatatctgtaaagaagttaacacctcatgcttactttgcaccccttatttcattgaaagctaaggttggggttttttggtggggggcgggaggggtggtttttttaaaaacagggtcttactctgttgcttgggctcaagtgatcctctcgcctcagcatcccaagtagctgggatcacaggtgcatgccaccatgcccagctaattttttattttttattttttaagtttttttagggtctcactctcacccaggctggagtgtggtggtgtaatctcggctcactgcaacctctgcctcctgagttcaagctattttcctgtctcagcctcccaagtagctaggattgcaggtgagtgccactacacccgcctaatttttttgtatttttagtacagaccgggtttcaccatgttggccaggctggtcttgaactcctgaccttaggtgatctgcccgcctctgtctcccaaagtgctgagattacaggtgtgagtgactgtgctgggccccagctaatttttaaatttttttgtagaggcacgggggtcttgccatgttgcccaggccagtgtcaaacttctgggctcaaacaatcctcctgctttggcctcccaaagtgctgggattataggtatgagccacacgcccagcctaaagctaagttttatgtcagtaaatctgtaattaggaaattcagggtctttattttccatttactttaggaacttgtacaagccatttattctacctgtttctatatcttaacttgcttcgtatcaatctttggaaagatcttgaaggatacacaaggattatgtattacttgtgaagagctctgtcttcataagaaattgaccccttctctttacaatagacactattcctaaattgaggttgaaatttttttcagtccattattgccagtccatgttagtcttcttccagaggctgttgagtgtagaattggattagaattaatctaattaattagttgtctacaatctactgcacgatattgtttccaaagttgtcttcaaaatatgactcccctttataattgtgactggctactagagagcagattttatactttggttctttttattatgtctatagataagtttatttttccattgaaaatgatttcagtaacatgtgtagcactttgccaagtagtaatacatcagaaaataattgaaggggccaggcacggtggctcatgcctgtaatcccagcattttgggaggccgaggcagggggatcacctgaggtcaggagttcaagatcagtctggccaacatggtgaaacctcgcctctactaaaaatacaaatattagctgggtgtggtggtgcacacctgttatcctagctaatcagaagactgaggcaggagaattgcttgaacctgggaggcagaggttgcagtgagcctagattgtgccactgcactccagcctgggtgacagagtgagactctgtctccaaaaaaagaaagaaaataattgaaggatgtgaaatatttacttgagccaasatagtttttctgctattttgtcgggaactaataattgaaatgtagggctactgagaccaatatgaagtatattctcatatttatagatatattaaaacagcttctggattcaattcttagagtgaacaaagctttattttaagcaagaaaagagaagaaacatgcagccatagattaggattggaaattatacagtgacattttagtttagtggagacttttgggacatttttcttcatactcttgacacccacacagtcattcaaatcaacaagattgtatctactaatttaactgatagctctcatgccttcctagaatgagtcagattttaggtaattattttgttgaacagggcctataacaatgtatattgaactgttggctgaattactgggtaatttagcttgtcagatttttctttctttatactttgggctaaatatgtttatataagtattgaggttatgtcattaaaattagaaaagtagtcttctttaagacatctttgtctaatacgctttcaggttcatgcatgggagatctcagaccagttgttacagatccggcaggatgtggagtcatgctattttgctgcacagaccatgaaaatgaagattcagacctcattttatgagctccccacagactctcatgcctctttacgggactcattgctaacccatatccagaacttgaaagacttgtcacctgttattgtaacgcaggtaaatcctgtgcttctcattagagaaatttgtatggccatttggatttatcaggattgttttaattcgtattgctaggccatgtgaggtaatgttaacttcattacagatgtactgctatgttcttgtaagtggatagaaaacgaaattgttaatcttttgtattaatcttggagttcatttggtttcaaactaacttgataccagaagtggataaggtgagtatgtgttttcacaggcatgctaggtcagaggtttaggtagttgccttttaagaaatcctttcagggctgattggctttagtaaaggtctcatgaatgaaacgttgaactagagcatctgtcctttcccccttggacagggaaatacattagataggaaaactggaaacttctgtgagtacgtactcacatgtgttctctgcctggcatagaagtgcccttaaagaggaggcttttcttaagtcttcaagatgacaaatgcaaagagaagggaaatggcaatccattacttgagaactgagtcaraggtctgactttattagtagctttgacctttggcatagtataatttatatgtctgtgaagttctgtggtattgccaaataaaagtaaatattgatatattttgaggaatgtctatagtctgttgtttctgacttcttttcttttctttttttttagtttttaaaggttaactcttaaatttcagcaatttgtagctaacccaaaaragtttacatcagatgtatagaattggaggttgggagaaatgggggaagggggttagtcttagttgtcatattgtttggaagaaatgtttctttgcttcccaattaatatttattgtgaccctatttctgttcatctgtcttcatttatttaatctctcttattcagctggctttagcaatagcagatcttgccctacagatgccttcctggaagggatgtgtgcaaacactggtggaaaagtaagtaatttgtattgactctatattagcatttggaattgccattaacctacacagagaaatttgttagcaatagctagatatttgactatttccctgaactcttaacatagaattatgttattaacctttgttagattaaatgaaacttatctaaaattttaaatactactgaaatatattgtgtgggatgtaaaagactagtratttatgtaacacacacttcttgaattaattgcagcaaagtcttttattgccttgtggatcactctcactaactggcatgacagccattttgtaaaaatatagaatttaagattatattaaatgggaggttgttatgaatatgtgttcttactaattggagtttgtttcacgtttatcagaggggcaatattctttttagacacacagagcttgctactttgaaacaagtattccttctgggtcctggcaagataaccttgatatttgcttgcatttggttgggaagttatttttgaacaaagtagaattactttttacctccaatatagtgtgtcattaaagcattttacggataacttattatttattttattttattttgagatggagtctcgctcttgttgcccaggctggagttcaacggtgcgatcttggctcactgcaacctccacctcctgggttcaggtgattctcctgtctcagcctcccaggcggctgagattacaggcatgtgctactacgcctggctaatttttatattttcagtagaggcggggtttggccaggctggtctcaaactcctgacctcaagtgatctgcccacctcggcctcccaaagtgctgggattacaggcgtgagccacctcatccagcttggataacttttttaaaaattatttttatttttttggagacacagtcttgctgtktcacccaggctggagtgcagtggcacartcatggctcactacaacctcagcctcgacttcccgggctcaagtgatcctcccacctcagcctcctgagtggatagcttattttttaaataaaatttttattggggaaattgatacatgctccttgaaaaaattctaacagtatggaaaccttcaaagtgcaaaatgaaccccrtcctctctccctatccttatattttatttttgaaacagggtctcactctgtcacccaggctgaagtgcagtggtgtgatcatggttcactggaacctgcaactcttgggctcatgagatccttctgcctcagtctcccgagtagctgggattacagatgcataccaccatgcctggctgattaaaaaattttgaatgtagaaacggtctccctgtgatgcccaggctggtctcgaacttgtggactcgtgatcctcctgccttggcctcccaaagtgctgggatcataagcatgagccaccacaactggcccttaaccctgtattttataagcaaccactattaacaattggctatgtagagtttcctttatgcattttaaaataaataagtgcatatatattttaatgtacatatacctatatatttgttcacccatattcaatatgtttcatacatgtttttcacttactacattatggactttttttcatgttaggacatatagatatcatgttcattataatggctatgtttcattgaataactgtgtcctttttttaatcttaactaattatggaggacatttatgtttgtatcttttttctcccccttaacagtggtgggaatgttgcttttgttgttgtgagttactctgatggctgttatcttatgtgattgtgtattttctggctataaataacatatctccacttttttcttttgcagatacagcaatgatgtgacttctttgccttttttgctggagatccttacagtgttacctgaagaagtacatagtcgttccttacgaattggagctaatcggcgcacagaaattatagaagatttggccttctactctagtacagtagtatctctattggtgagtaagtttgaaatactaagttgctgcataaaggcagaaagccatggcggttattttgtaatcaattgcattattgtgaaatagctttctttgcaaaatttaatgatgatgctttggtatttatgtaacaccttaccatgacaacatactttcagaaactatgctttttaagtttctgtataatcctctwaaggtgacgttatctcttttatgaatgaaaaatggactttagagttacacaactgttaattcagaattggaactaaggccatctcattatttatcttgtgctcttctactgcttaatgctccaaactgttggctgttaataaaggatcatgcaaagggaagtgtgtataaatctactttactaagaaaggatcctttctttttttttctaattgatacatgatagttgtacatatttatggggttacatgtattacttttattttttgaagcagggtctctgtctcctaggctgtagtgcagtggcatgatctcagcttactgcaccctcctcctcctgggctcaagtgatcctctcacctcagcctcctgagtagctgggactacaggtgtgcgccaccatgcccagctaaattttttattttttgtagagatggtgtctctccatgttgcctaggctggcctcgaactcctgacctcaagtgatccacctgccttggcctcccgaagtgctgggattacaggcgtgagccactgtgcccagtgacatgtattatttttgtccaagtatgtaatatgtgatgatcagatcaaatcaggtgatgatcaaattgagatatccatcacctcaaacstttatcatttctttgtgtagggaacattctaaatcttctctttcagctattttgaagtactcaataaattattaactatagtcactctgttttgctgtgtaacactataacgtatcctttctattcagctgtatttgtgtacccgttaatcaacctttcttggtcgtcccctccccgttacccttcctagcctctgatcaccgtcattctactctttacctctatgagatccattttttttcactccaacatagcagtgaaagcatgtgatatttgtctttctgtgcctggcttacttcacttaacataatgtctaacagtgccgtccatgttgctgcaaatgacaggagattttattctttttgtggctaacgaatatttcattgtgcacctataccattgtttctttatccattcagccgttgataggtacttaggttgattccatatcttggctattgtgaatagtgctgcaataaacatgggattgtagagatcttcttgatatactggtttcttttctgggtatttacccagcagtgggattgctagatcgtatggtagtactattttcagtctgttgagaaacttccgtactgtttttcataatgactgtactgctttacattccagagcgttcccttttctctgcatccttgccagcatttgctattgatcttttgcccattttttaatttttaatttttttttttttttgctattatttgggtttcttatatattgtggttactaatctcttgttggatgggtagtttgcaaatatttcctcccattctgtaggttgtctctttacttggttgattgtttcttttgctgtgcagaagccttttagcttgacctttgtcgactttttttgctttagttgcctttgattttgaggtcttacttaagagatctttgcccagatcaatgtcctgcagcatttccctaatgtttgcttgtagtagttttatagttcacatcttacatttaagtctttaatycattttgatttgatttttgtatattatgagagataaaagaaaggattgtctcttaaagatgaactgaaaggtgatagaagattttacttgacctttgaggagtatcgcattatggatgagctaatacacattttttaaaaaattagatgtgattaagctcctttcagttagttgacatttttaatactctagagcaggagtgtgtaaatctatagtttatgggttggctgcctctttttgtaaataaagctttgttggaacacagttatgcccatttggttatattttgtccattattttggtctacatcagcataattgagtatttttcagagaccatatggcttgcaaagtgtagacggtttatctggttctttatagaaaatgtttactggttcctaaagtagatgctaataaattgattagcccatatctcatttttaagtctttatagtccagcttaattttctcaataatgtggatacaggttgaatatcccttactgaaaggcttgggaccagaagggtttagggtagggtaaaaaaagtagtatttaggatttctgagtttttaaaattttggaatatttgcattatactttgtggttcagcattcctaatctgaaatgctccagtgagcattccctttgagcgttatgttggcactcaaaaagttttggattttggagcattttggagttttggattagggatacttaacctgtagtaaattatttttcagagatgtgtttcagtatagcaagttcatagatcttttagtttgaaaaaaaattaaaattctattaaaaattgtgttcagttttgtattagaaattcattggagggctgggtgcagtggctcacccctgtaatcccagcactttgggaggctgaggcgggtggattacttgaggtcaggagtttgagaccagcctggccaacatagtgaaaccctgtctgtactaaaaatacaaaaattagccaggtatggtggtgcactcctgtagtcccagctagtcgggaggctgaggcaggagaatctcttgaacctgggaggcggaggttgcagtgagccaagattgcaccactgcactccagtctgggcaacagagggagactccatctcaaaaaaaaaaaaaaaaraaagaaagaaaaagaaaaaagaaattcattgaaaaataattcttttaagttaaatatatgtttttcacttagccatttattttaaagaaatagttttatggaaaattagaaaatatgtacagcaaatttcactcaaaccatctggagatcatacagttaaccctttaatacatatcctctatgaacatatttatggatatatatacagattttttaagcccaaatgaarttatactttacttattcttctgcatcttgctttttcagtcatctgcttaccttttcaagttagtaagttttcatatcatctgataaacccagaccatattcacatttcaccagttggtcctaagatattctttacaggctgggcgtggtggctcatgcctgtaatcccagcactttgggaggccaaggctggcagatcacaaggtcaggagctcgagaccatcctggccaacatggtgaaaccccgtctctactaaaaacacaaaaattagctgggcgtggtggcatgcagctgtagtcccagctactcrggaggccaaggcaggagaattgcttgaacccgggaggcagaggttgcagtgggccgagatggcaccactgcactccagcctgagcgacagagtgagactccatctcaacaaaaagaaaaaacaaaaaaagatactttttacaaagaatatccaatctgtaactatgccttgtatcaggttcttagtcacagtcccacattctgttccttgtttaaaataacatgacttgttgaagagattgtaccagtcattttatagaattatcttacctttatgattttctgattgcctctccttcgtttcctttagcatgtttttcttttctctgtatttcctctaattggaagttgtatctaaaacagcccttctcagtaggggttcctcaagagaattaagcctaaagctattcgttatatgtaatgaattctttcctctacattaataatggttctagctatataccgcccttaggataattaagaagatgggcactcagataattttctgaagggcttaattctrtacaattttttttttttgtagatatagagcttctctatggtctcaaacctggtctcaagtgatcctctctccttggcctcccttaatgatgagattacaaacgtgaaccaccacacccaacctataggatataattctttcctagaatcctgattgagaaaaactgagaggcttagaggattagttttttaaagttaaatattttgggctagaatatatcataggtacttgatgctatgtcttagtatatatacagcgttcagttgaccttctattagtgatgctagggttgaccactggattaagatgaaagtctgttccttccatttttaaagttcactttcctcctttgtaatataatgtagtttgtgtgatggtagcttgttagtttatgaatgttcaattccctatcagactttagcctaattgttttacattccagtagataatccctaccttaatcaataatttcattatgggccaggcaatgtggtttatgcttataattccagcacgttggaaggctgaggtgggacggttgcttgatgtcaggcattcaagaccagcctgggcaacatagcaagagcctgtctcaaaaaaaaaataatacattaaccaagcatgttggcatgcacctgtagtcccagctactcaagaggctgaggcaggaaggatcacttgaccccaggagttcaaggtggcagtgagccacgattgtgccagtgcactccagtctgggcaacagaacaagactgtctctaaaaataataataatttcatcatgggttgcaaaatgatatttgactatttctgttatttcttgtacatataagttggcattcttatgagctcctactagaaaggtaggataaatcttaattcttttcaaaatgaggatttattttaaagctgccttgaatttttttttttctggctttgtctttttgaagtatgatggactcatgttcatttaggtccaaccaggtgtctcctttccaagtttcagaatcccattctttaccaktcagtttcctaactttcacatgagaagtgtggagggactgtaaattcacctgttgtttgtaattcagcaagtcacacaactaagtttggtatacgagtttcagcagtactaactttgtagctacaaaaagtaagagctgcttttagactgggcgtgaaagctgtggtgctcagactgtggcctgaggtgagagttaatggacttgaatttgtcattttctttttgtaagcacttgtgaatttaaaataatcccatccacatgtattttgtgtcatggttactgccacagcagtcaactacagcagccacttgggcattcaaggcacgtgcctgacttagcacatcatgacaatcaatcacaggtgatattttgaggaactgtgatgcagtctgaaaaatatatttcctgtggtgcttaaaaatgtctctaattttgtcatgtagcttgtcatgttatagaacccaggggatgaaattagtccaaaatggccaagaaaaaaataggcatgtggctgtaatgccaggttccaaacccctcttaagaccttttctcatttagtttcctgcacactctcctttaatgattacattctgtcctatttcttgttagtattatacttttgtggtctgtcctaatggacccattcctaaacatggtgttgaactttttgaagttttaaacgtgtttctgcttgctctcatagctaaactgaacctgtgcttctaacatttttgtctcttcactttctattttgttaatctaagatctcaattcttatttatccctgctatctttttactggtgagctcttctggactctgtggcatttatcttgaagcttttgaggactttaagaggcagatttttaacatagcatagctctcaaagaggaacagaagataactgttagttctgatgttttagaatgtatgtttgatttaatttgcagaatttcatcttttcaaagagattagttttagaaacaggtttttttcagaatttggtctttcagtttgagtcartagttagaatgtacaagcaaatccttccacttgtacacatcatgtcttattaaaattgaaatatcattcaggaagtctaaaggccaagtgattatgtaatgagtttatatcaacagcatcaaagattcaattgagagtttgagacaggttgagggggagagagaatgagtatcagctcttaaagagaaatctctcagtggctccagttcatgttaagggaacttagttactccgttcattttgctactttcagccttgaaccgtattaaattaagtgctcctgtgcatttattagtttacgtattacatatttaaatatattgcatatattagtgtcatagtcttttctaaaaattctggccattttagtgcctggcatccctgaatattttctttctgagtttcaggggaacaaagaaagtcttgagtaaaaaatatctagaagaacttaatggggccagaaccatatttgtgacattttcttatctcatctagtgtgttttctggtgacttttaaagtgttgttttattttttaatttttttgtagagacagggtcttaactttgttgctcagattagtctagaactcctgggctcaagcgatcctcccacctcagcctcccaaagtgctgggattacaggtgtgagccactgcacgcaggctctgatgactttttacaaatactttcccctctaaagcaagggctcttagttctttcctttcctgccattcttccttcttttttttttagacagagtcttgctctgtcgcccaggctggagtaccatggcgcaatctcagctcactgcaacctctgcatcccagattcaagcagttctcctgccccagcctcctgagtagctgggattacaggtgcgtgccaccacacctggctaatttttgtatttttagtagagacggggtttcaccatgttggttaggctggtctcaaactcctgaccttgtgatccacccacctcagcctctcaaagtgctgggattacagccrtgagccaccacacccggcccctgccattcttccttctataaatacttggatatttactctgtgcctcttgtggctttagatagtgacagatgtctcagaagtctatatcctagacataaacttatgtgtatactcatagttacgtggttaatttctctgcaagttagctgcaactccacctttttccaacaagcatatataatgcaatatgcacaataaatgaaaatgagcggaagtgagtctgcatttagttagcaatcaagttctgatgttattcattacaaatgatgtatacttcaagctgacatgcttaaaactagtaaaatagttggttcatgtgtgatagatgattctgtttccccatgctgttaatatttcatggctttctttggtaatacacgaatcattatccaggtaaattagtatatagctagttacactgataataatgtataatattagtaagatagattattgttgcagtctgcctaactttacaggcttttgaaatataggaagtccttgatattaatcatatctttgttctatgtatgtaagcaagtttgggaggtagctatcgtgtaatggttaagatcatagactttgaagccagacttcttaagtttaagtcctggctatgctgtttcctacctgtgccatattgggcgagttacttgactgtctgcctcagttttctcatcagtataatggggataatagtatctgtttcatattgtggggattaaatgatttaatacatataaagctcttaaaacagtgcctggtgcacagaaagggctcagtaaatgttgcaatgactggtcagcttatttttcatgtacttttcttcctccccctgaaatgtaatggcctggaagagagagaagaaatagaaagagtcaagtatattaatatacttggacttcctttcttctgtcttctgagaaggaaaggtggttttttgttttgttttgctttgttttaaaggtagcttccagacccgaatatcttaaatagccttctgtgggaatgagctggtatacagtcattcattaacccctcacttctcttcatcttagcaacctagcattctttggagcacaataataaagacagtcatcttcaatgtaggtttatgtagtagatgaagctttgaacttgggaaattttcctgtgtagtttatatctgcattgtaaccacaaatatcactatttagatcttatttaataatacattatgggatttcacccccactctcatgcctcctgaaccccatggaaattatatttctaactcattgcttgcaagagctttttttaaaacattctttgcctagaaaaagatgcattacattttactttggaaaaaatatatatcacaaaaacagactacaaggagaaacattgagttttagtctaattctgttttatctcttttatagtatttatagtagtatcactttctgtgggatgacatgtttattattctattgccaaagctgaaacattagcttttcttgtggaaatatacagtggtatgcctagcttactctagcttattatctattctgtatcaaccaggtatataagtaagtaaattacttgtaaaataattttttggataatgcagaagtgggaactaagaaattagtaagttatttctgaaacaacttgggtaagtctgtaacctctctctacttcagttttcccattgagaaagtagagacaataatagcagctacctataaagttgtatttgggkattgtgttagtccagtctcatgctgctataaagaaatacttgaggctgggctcagtggctcatgcctgtaatcccagcaccttgggaggccaaggtgggcggattgcctgaggtcaggagtttgagaccagtctggccaacatggtgaaacccgtgtctactaaaaatacaaaaaaattagctgggtrtggtgatgtgcatctgtaatcccagccacttgggaggctgaggcaggggaattgcttgaaccagggaggtggaggttgcagcgagccgagattgtggcactgcactccagcctgggcaacagagcaatactccatctcaaaaaaaaaaaaaaaaagaaaagaaaagaaatacctgaaactgggtaatttataaagaaaagaggtttaatcagcttatggttctgtgggctgtacaggcttctgcttctagggaggcctcaggaaacttaacaatcatgggggaaggtgaaggggaagcagacacatgttcacacggccggcaggagagagaaggaggggggtggtgctacacactttgaaacaaccagatctcgtgagaactctatcacaagaacagcaagggggatgttcattcccatgattcagtcacctcccaccagaaccctcctctaacactggggattacaatttgacatgagatttgggtggggacacagaacgaaaccatttcggggattaagtagataagttgtatttagaacagtggtgcctagctggatgcagtggcacatgcctgtagtcctgcctgggcaatgtagcaagaccctctctcttaaaaggaaaaaaaaaaacagtgacacttaaacttaaaaagcactttyaaccgttggctgttttattgccatctttctcattattatacttgtaaggtgattgaaataatggtttaaatatatagattaacattattcattttaagtttttttctctattcagatgacctgtgtagaaaaagcaggaacagatgagaaaatgcttatgaaggtttttcgctgtttgggaagttggtttaacttgggagttttggacagtaacttcatggctaacaataaattactagcactcctttttgaggttttggtaagtaatgaccttatttatcaaagtatttctgccaatcacttttcgtaactaacctgctgggacataaaaacgtttttaaatttttgcacagtaactggaaggcgtgtattaagaatgcagcaatgttccttccttgctacgaggtaccaaattagaagtatcagttttaatactcctaataggatatagttatgtttaagaggaaaacartcttatatgttgatacatgatttacatattaaaatccaaataaccattggtatctttttccttgttttaaaaatatamaattatgtatttcaataatggtcattgaatcctagacatttccatgatataattatgtgtgcatcacaagtttaggaaaaaacagaacaggaagaattaaaaattatgtttagtgcatccagagacaattatagattaagatattatctttgtagttgagattagttaaacatcgtatatgcaaaatggatttgggtttttgagattagtagaataagtactaatgtctttttatatacttgtgcrtttcttctttaagctttgaaagtagcagtgcctagtaatatagtcttggtagataggagttagggagtgattagaataagattacattttagaacaagaaacataacattatctcaagcataaatattattgaaggggtctttggagacatgaaaaactttgtctctttctgctggagggtttccttcaatgaagatatattagtatggaagctgcatgtattgtgaatgtatgccgatgcgctattactcagaagatagtaccatgatgctagattgatgmcactgtgaattaaagaaaagaaagacatttttcaaggagacatttggcatgtcattggtgtgtatttctgtgtcatttttgcatcagaagctaagccttaggaaaattaggatgccaatcattgttttgcttgccattgtctgtctccatttatgttggtatctttcctcaataatgataatatttattatcacgtcaacaaatagtgtgaagagtaatcactgtaaataaagtcatgtcccacttttgtttaaaaaatgtacatgtgattacatataaatggaggacagtgtagaatacacttcaaacttaacagtggtaatttctgggaattggaattggagtaaggaagaagttaattagtgttccaggattatattatctcctctactgatccagtgtcaggactcctctgtcactagtaagagtgtttatctagagtcagggtaaaatatattcttatttttacattcattcagtggtttaaaatcatgctactttttttctttttagggggagtgtcacagggagtcagggtgtctccctgtcgtccagactggagtagctccattggcatgattgtagctcactgtagtctcaaactcctggcttcaagcaatcttcctgcctcagcctcccaagtagctgggatataggcatgtgccaccatgcctggctaatttttaattttttctagagacagggtttctctttattgcccaggctagtcttgaaccggcctcaagcagttctcccacctcagcctcccaaagcactgggattacagatgtgagccaccacacctggccatgtcacattttattttgctgtatgtttggaccatgactttctggtacaactttcccccaacagctcttaaaaaaaaaaaaaaaaaaaaamcctaaaawttaaaatacttcatatatacaaaagaataagtatgaacacttactrtttatttatttatttttgagacagagtctcctccctctgtcgcccaggctggagtgyagtggcacaatctcggctcacggcaaccttcgccctctgggttcaaatgattctcctgcctcagcctcctgagtagctgggactacaggtgtgtgccaccacacctggctaattttttgtatttttttttttttttttttttttttgagagggagtctcgctctgtcgccggggctggagtgcagtggcgccatcttggctcactgcaagctctgcatcctgggttcatgccattctcctgcctcagcctcctcagtagctgggactacaggaacctgacaccacgcccggctaattttttgtatttttagtagagatggggtttcaccgtggtctcgatctcctgacctcgtgatctaccggcctcagcctcccaaagtgctgggattacaggcgtgagccaccgcgcccggccaattttttgtatttttagtagagacagggtttcactgtgttagccaggatggtctcgatctcctgaccttgtgatctgcccaccttggcctcccaaagtgctgggattacaggtgtgagccaccatgcccagctcgaacactgactttttataacttggtaatataatgagaatctttgaacctactattcaatctaagaatacctaataaataatttgcatctttgtgctctcccaaacctgcttatatacctttttgtcccactggagattttaaatatccttttaaaaaaattattcaaggaagactaatacgcccttactaagtgtattcaacctctcaactgtactctcttcactagaaacccgggaggattcccttcttggaccttttggtctgctctgatttgcatcagttgttctttagatctactccctgtcatcttgggacttgtctttactgtgctttctggattaggttagctgtttctcaaaccccctcaaataacttcttcagaaaagatataatggaaagtaaacttggaatttttgcatgcctgagaactatttttattttgctttcgatcttgattgatggctcagctaggtattaagttgtaggctgaatattattttccttcaaaatttcaaaggccttgctctcctttactagcatgcatcattgttaatgaaaagtcagagaactctgaattctgctccttactattacctcctcctctcttcccctgaaattttacagacctttgtttaactctggtattctgaaatttcacaatgatgtgtttaggtatgtgtctttgatacttgttgagccctttcattttaggtagtacttgagtatcagaaaaaggatggaaaagatttttcacacactagaatagggtagggaacacatggctttccatttggaggggctggtgtgaacaagaacatggagattagaaatgatacgaccatgacttcgggacagaaaggctgatttgcttgacatataaggaaatagaaataagattgggaagattgatggatgttgtctcatggaaggctatgacttgactgttacacatttaaagtacatgttcagaaagaggctataattgaaagaaagaaagaggctctaattgttttcctattacatttatccatcactrtcttcaaaggattggttccaggaccacccactacccctgcccctctgtgcacagtttccaagagatgcagatgcccaagtcccttatataaaatggtgcagtatttgcatataacctatccacatcttcccatatactctaaatcacctgtaaattacttataatacctaatacaatgtaaatgctatgtaaatagttgctatagggtaatttttaaatttgtgtttttcattgtattattatttacttatattttgaatattttctatcgatggttgattgaaccctagggtgtgcagggccaactgtagatcactccttagtgatcatacttcttgcttccctattcctgctacctccccagcaacaggataagacctcgtctaacctacatgaagctgcttcggactgtgtatgctcagctctstatgccattgagaatgtggagactaacttgccattagccatgcaactttttcagggagtgctgacattggagactgcctatcatatggccgtggcacgtgaagatttagacaagtgagtaattgtttaagtctggagccctgggtttaccyacagtctggtcattcttttaagtcactttttattattcgtctgtcatttgtgattctcagtgattctgtaaagtacagatagtgcttcctaaagatgctctactatgctcttctgaacctagagtggcaaattgggtgcagggtttgtagaattaccatagaaaggtaaggctttaaaagttggagacaaattttaaaatatcaagtgtgatttgatgggagtttttattcaaatgttttaataattgagaatttgaactgacaagtcacttgcgtaggagtgtacgatctaggtaaaggtgtctgtcatggggattgtgatacagcatagtaaataatcactagatgtcccttagactgaggaaccttttatttatttgattaactgtgcctgtatatacttataatatccagatttctgactcattgttctcattcccctgtcttctacagagttctgaattactgccgtattttcactgaactatgtgaaacttttcttgaaaaaattgtttgtactccaggccaaggtcttggggaccttcgaactctggagctgctgcttatctgtgcaggccatcctcaatatgaggtagtgtttatgctattcaaaggccattattctccaagttgtgtgctgcatattayctatatttcattacctcgtgcccaaatttttattgttgagaaattacagtcttgtttttaattaatgtgatttcatctgttttggaatttttwaaaaaaattatatttgggtttctgcattgtgtccatttctrttttcttacctggttggctgggctgttgtaggcccctcaaggaactcgttagaaagcaagcctttccaatgaaccccttgtctagcttgacttattctctagagygttacagctaaaaaacaccaaattctaactatacctccacaagtcttaacacccccaatttttctccaaatgatggatgagaatgacaaagggattgaaaggacttaagggtctctgtcattcagaatccttgacatcctacttaccgaggtttgctagattttttaaaatctcatttatttgagaagttttacctctttatagtataagaaatgagaaagggtcggggttggtggctcacacctgtaatcccagcattttgggaggccgaggtgggcagatcacctgaggtcaggagtttgagaccagcctggccaacatggtgaaaccctgtctccactaaaaatataaaaattagtcaggcgtggtggctcacacctgtaatatcccagctacttgggaggctgaggcaggagaattgcttgaacctgggaggcagaggttgtagtgagctgagatcgggccactgcactccagcctgggagacgagcgaaactccgtctcaaaaaaaaaaaaaaaagtgagaaagaagtgctcccaagttgggcattgttttaaatagctctgttttggatccttgatgggaaaaggatggtagggatcctcttactgtgccttaggcacagtggtcctgtgactctcggcctgttttctgttatcacatacaagacaacgtttatttgttttacataatgttacgaggatacctagatttgaatggaacccaaarcatttctgggagaatgtaacaccacgcagttatcactcctttaaacagtaccatatggaaaagaggctacgagtaaaatcccaggctttttctccctttctctcacactcaaggaaacaggtgaataaaagtgacatgaagctgaatcagttatgttcaggagttacagatggtttgccaagtaagaaatgttctaatctcaaacattcaatgaaatgatttcagaattttcagaaaagtactttaaaaaagacttctggccgggcgcagtggctcacgcctgtcagcaccttgggaggccgaggtgggcagatcataaggtcaggagttcaagaccagcctgaccaacatgatgaaaccccatctttactaaaaatacaaaaattagctggggtgatggtgcgcacctgtaatcgcagctactcaggaggctgaggcaggagaatcacttgaacccaggaggtggaagttgcagtgagccaagatcacaccactgtactccagcctgggtgacagagcaagactccatctcaaaaaaaataaataaataaaaataaaaagacttctggctgggcacagtggtttatacctctaatgaggttcatacctcttaacacttttggaggctgaggtgggaggattgcttgagcccatgagttcgagaccagcctgggcaacaaagcaagaccttgtctctacagaaaatttaaaaaattagctgggtgtggtggtgcacacctttcatcccagctactcaggaggctgaatgggaggatcacttgagcccaggagtttgaggctgcagtgagccatgattacaccactgtactccagcctagatggcagagcaagaccctgtcgctacagaaaattttaaaaattagccagacatggtggcaagcgcctgtagtcctcctagctactcaggaggctgtgtggaaggattgcttgagcccagaagttcaaggctgcagtgagccatgattgtgccactgtgctccagcctaggcgaccctgtctctaaagaaaatatatatatcttttgagacagggtctcactctgttgcctaggctggaatgctgtggtgcaatcacagctcactgtagcctcagcctcctgggctcaggtgatcctccaacctcagcctcctgagtagctgggaatacaggcatgtgccacctacatgcctggctaatttttgtatttttttagagatggtgtttcgcgcctggctgaaatttgttttaaataaaataaaactatgtggtggctcatgcctgtagtcccagcactttgggagacctaggtgggaggattacttgagggcaggagttcaaaaccatcctgagcaagatggcaaggccctgtttctactaaaaaaaaaaaaaaaaaaaaaaattagctgagcttggtggtgtgtacctrtagtcccagctacttgggaggctgaggcaggaggatcrcttgagctcaggagtttgaggcagcagtgaactgtgttcattccactgcactctagctggggcaacagaatgaaactccgtctctaaaaaataaataaaaataaagacttccatgtctgttattgttttctctaaattcaaaattcagtatacttttggaggcattacctcaggactaaatggaatgtaaagccagtcattctaaatggagatttgggcctaacgtgggaagacaatttggggagataatagtaaatctgctagagaaaaggtgacttcttaactggctccactcatattatttaaaaatatatctttcttcctatatggtcgtggtgataataaaatgtcttcttattctattcctttcccattcaaataaatcatctcttttaacctaacaggtagtagaaatttcatttaacttttggtaccgactgggggaacatttgtacaaaactaacgatgaagttattcatggcatcttcaaagcttacattcagaggctgcttcacgccttggctcgacactgccagctggaaccagaccatgtaagttcccttctctacctcttcaaatcttaatttcttcctcttgtcagtgccaacttgaaaaggaactgagaagatagataataaacctggctgggcaccctggctcatgcctgtagtccagcactttgggaggccaaggcagatgaatcgttagagcccaggaattcaagaccagcctgggcaacatagggaatcccctgtctctacaaaaagaaataaaagaaaattagctgggcctggtggcacacgcctgtagtcctagctactcaggaagctgagttgggaggattggcagactctacagcttatactgaagaagtcagtaccagtataatctgttaggtctatttagggaaaaaaaaaagcaaaacactccagctaaaccagtaattcttttcctgggagtatatcttaaatctgcagaagaaaaaaacagctattttatatacaaaatgttatctgtaaaagtaaaaattataaacccatgtacagcagtataacaagagttatatgaattatataagaagagttatgatttagcaacttgatgcagcaattaaaaggtagtgaaatgatgatatggtaagagaaaaatcagaatgtaaaattatgtactctcttttttttttttttttttttttttgagacggagtctcgctctgtcacccaggctggagtgcagtggcgtgatctctgctcactgcaaactctgcctcctgggttcacgccattctcctgtctcagcctcccgagtagctgggattacaggcacccgccaccatgccaggctaattatttgtatatttagtagagatggggtttcaccgtgttagccaggatggtctcgatctcctgacctcatgatccacccacctcagcctcccaaagtgctgagattacaggtgtgagccaccgcccctggccaaaattttgtaccttattaaatagtagaaaataagtggttagatgaaaactaatacaaaagtgaaatatttgtgtgtatgattttgccccatgaagatacacattttttaaatcttatttatactgattttgtagtttaaaagaatatagaaatctatttgcttagaaaaaaatactagaaaattattagtttattagaaaactcttcaaacatcatgcttagtctcttcaaattttgccacatcgatttcatcctgttggttggttgaatccgtcctttaatctaggacctgcagtaagttttattgcttacaattaaatcccacgtgctgttctcttaattttaatgttagtattgtgtttgagtcatggtattttgtatctccacacaaccttagtcatgatttagtctggtggttttcaractgcacccacccccgctattttttaaagtgaagaatccaactgggcgtggtggctcatgcctgtaatcccagcactttgggaggccgaggcgggtggatcacttgaggtcaggaatttgagaccggcctggccaacgtggcaaaaccccgtctctactaaaaatacaaaaattagctgggcatggtggcaggttcctgtaatcccagctactcaggaggctgaggcaggagaatcacttgaacccaggaggtggaggttgcagtgagccaagattgcgccactgcactccagcctgggcagtagagcaagactcagtctcaaaaaaataaaataaagtgaagactcctgtcttcaaccacattttacttggaagcctgatttataaagcagggcccctttggtttaaatggctctgtgcttgatcccttttttgcctttgctaattctgtggcaccatttcccttgcgggtaatttcttacacttgtaagtgtatagcgctttataatttgtatagtgctttataatgttagccattatctcatctgagatagccatcgtttcctcctcattccttcaccttaatttcttcatcttaaagcaaggagcttgaactagattagcaattctcaatagtactaagggcttttcctaggtatttgggcccaagattcttgtacgtgcctttaaccatcttataattggtaactctgtttacagaagtgtgtcagaataggaaagatacagaagtgtttggaataggaaaccatggaatataaatgatctttaaattttttaatgacaaatttcaaatgcacagcaaayataaaataatgtcatagagaatatctgtatacctaccacctaaattccactattcatattttactatgcttgttttttatatctgtccacctacatgaaatgttttaagtttaaaattctgggctgggctcacatctgtaatcccagcactttggaaggccaaggcaggaggatcacttgaacccaggagtttgagaccagcctgggtaatatagtgagaccttacctctataaaaaaattttaaaaattaactgaggccaggcacgtggctcatgcctataatcccggaactttgggagggcaaggcgggcagatcgcttgagctcaggagtttgagaccagcctgggcaacatggcaaaaccctaactctacaaaaaatataaaaattagccaagcgtggtggtgcatgcctatagtcccagctgctccggggctgaggtgggaggattgcttaagcccaggaggtcaaggctgcagtgagccgagatcatgtcactgcactccagcctgggtgacagagcgagaccttgtctcaaaaataaaaataaaagtatattttctgtgtgaagttattgtgacagtggttgattttggtagatcttgaaacataaatcttcaatttgtttgtcactaaagagctgaccttctctagataggcttatcacttaatttactacttcttccaggtcacttctcactctccccaagccacatttttccaacaacaaaacaagctgtagcttagaaatacaaaacacagcagggcatgccggctcacggtggctaacactttgggaggtcgaggtgggcagctgacttgaggtcaggagatcgagaccagcctggccaacatggtaaaaccctgtctctactaaaaatacaaaaattagtcgggtgtggtggcgtgtgtctgtaatcccagttacctgggaggctgaggcaggagaatcactggaacctgggaggcggagggtgcagtaagcagagatcgcaccactgcactccagcctgggcgacagagtgagcttccgtctcaaaaaaataaaaataaaatacaaaacacacacacaaaccaaagattttctcctggtaaaggcagagaataggttgtcttgacttggcatacctcacaatttaggaaaccctctgtctaaaataaaataccctcgtgatttaggcaacttttgttcattgaaacttgactgcttaatggtttttttcttcttcttgattttatagaggtcattgaaagccgcagtgagtttaaagcagatgttatctgatttgatattttaggagggggttcctgaggagactgatgactttggggagtttcgcatgagggtatcagacctggtaaaggacttgattttcttgatagggtctatggagtgttttgctcaggtaagcctatttggagattgtttccagttttactagtcaccttaattgtattcacttctgtgtcttctgtgaatgttccatcttatttcttcaattttagtggctgaatgagataatagatatgcaagtgcctagcacrctgcctggcatatagtagctatgtttatttaacattttacaagtcagttgcagtttatggatgattcggttatggtttactctgtatgcttgcactgattgctgttccacttgtacasctggaatagaagatcatagataagcattaaagcctctaggatacttatagggaatttggacctagccaggaacaataggcaagtgtttctgctttagtaattacgtaccaactcctggtaactcttgtagttatttggcattatctttgtccacacttatggttagattcctgtgcagtttcgtcccagaggtgactatgctagagtagaagattcatagtccaggggttttcctgacaatcactgagtaacattttacctcataaggttacaatcatcatcattccatatcacttaacattagtttaatttcaggcagttttcatattgctgtattatattctaatgagctctgaaataccactttggaagctttgtcacagcaatactaaactaacctaatttttttttttttggtaactcagtcattttttgtatatttgggtgtaatatgatctaaaaagtattaataaaagtataactattttcattatattaagcaaagcatgcttattgacccatctatgaagagttgaggattcttagaaagccacttaaatgagatccctggatcttagacagatgacctctgctcagatttcagctcatctctctttagctctatggctttgagaaatcctttgatcttctcaatcctttgacttaatttacaaattatgtaaattatcaatgttgttcaagatatagtctgtggaacaccaaccccatgagatattttttgccaaaaaaaagttahtaattaaaattaggaaatggtataaatagtatattaaargctctgtgaagttgtataataagagagctgtttaattttgcctttcctagcagtgtctgttatttcactataaaaatattatttagtcacattctgtaggtggatataatctgggaaattgtggaccagaacatctctgagtattctgctaggtgtacctttttttaaaaaaattaattctgcttggatacagtattgtgataggtgcttctaaacagctgctttttaggaattcagtcagtactaccagtgttgatgcagacaagtagttaaaacaatagaaatgtaaagccaatacatatatagaggatttacattgtatctctattttaagtgtgtttatgtatttatcagttattatcaggaccaggaaaagacactcatatactgtgttttgtttttctcatagtagtcattttctgggggcagatgataattttgataaactcttgcgggtctaaatgggtttatttcaaatattaaaatagttactcctagttagtgatgatataaaaaaaagaaaataatattctcatctggcttgagaggtaattagatttagaaacaagaagcaggatttactttaactggattttttgttttgtttgttttggcattctgttttccttttaatggatccataatccacctcttcttctctagttatattctactctgaaagaaggcaacccaccctgggaggtgacagaagcggttctctttatcatggctgctatagcaaagagtgttgatccgtgagtgtctcataagtcttttgctgggaactctaaatatcaagaggaaggaaaatgacactattttttttttcttatatggtatatacctggagactttcagaacttcttacttctgttgtgccgtctagtcttctgacttctagagtctagtccagggtagcctgaattgctgataccatgttttaacagcatttcctagagttgaaattattttattcttgatgctaggaatagaatgctgatttatttttccaactgaggctcccttgtgaaagttggtatggtaaagaatttgttagactgtttaattgttggtacttgcttaaaagcaattgaatagacactaatttgggtttcctgcttttgtgaccttgggtaagttattcttacaaaattaattacattgtttcagagaggcaaggcataggcaccttttcacctaaaagagccagatctaaagggcaattactgtttttgttattgccattgaaaaatttcaaattattcaaattttacttctaattccatagaaattctatttatgacacgaagccctagagacaaaatttactttgtgccatgagtatataaatcgatgttaatatctgccacgctgaattgtgacctgatacctgcagtcaagctctgtattcagtcttgattggagagatggttaaggcagatatttataaaaagcacaatgcttctttcttagctgcctttcagggcctcgtcagtggcatattgtttctaatccagtaaatattcaaggaggtcgaataggtttatttttctctgttaagaagtcctggtccttaattatgtaccacactatttactcttaaaccaattttggtgtcattttgaaccttctgtgacaagtctgaagattattaaaatcattaatgttctaactaatatgtcttggtttgaaaaatgatggctagatagtcttcgttaattgacttagtgtccctaggaaacataagtcataaatgagagatttgatattttttttgtttatatgcatttcaagccaactgcatgattataattttttagtgcatataaaaggacttaatagactagtttattagcagagggtggtcttgctgtaatccaggatattatttacattttaaacatctttcatttctggattaagttctgccactttaggggtatcctccactctactcaaaaggccgttagccagtatattttgtgggggacagagggaggagagggaacagataaactcatggagctatggaaagtgtttggttaactttaattttccctcatgttccaaatcggggcaacttaatctattcctgcagcttattttcttgttctttcaattagtgagctgcctacccatacttaacctgttcttaaagtttccaatatccagctataagaaatcttttggagcaaaacaacagagaatggtctatgagaattattcattcatctgtttagccattcagcaatatttattgagtgcccactatgtgccaggcactgttctaggtgctgcagctataggactaaataaaatagattctttagaagaagacattcatccacagtaaatgtctgcctctccaatttaaagagcctgcatttgatagcttgatgtgtctgtaggcactttactggcattcagaagattaaggagcagtatgcttttcctgaaacaatatctttcatttctatcttttcctcttttttgargatttgaaaatctttcataacaaataccaagtacttttatcttaatggttgtttagaaagaagccctttagcaatgctgtgtgtcrtcacagcctgttatttggccagaatataacctctgaaatcagtaactgtgagtacttaccgcctgtactcagggaaaacaatccaacacttgtggaagtcctagaaggagttgtccgcctcccggagaccgtacatacggctgtgcgatacaccagcattgaattggttggagagatgagtgaagtcgttgatcgaaatcctcagttccttggtatgtgtaatctctctcctcygccacttctaacttgtcatttttctgatttttcttctcatctcttacttttgcatgtgttttcctttctgtttttttaacacggagtgtttatagaaactgagagtaaacaatatgttgtaagttagtgcttatttgatataacatttataatctgatctgggagaaggacctttgaaagattagatctacagatagggaaacagtgaacaatttgcttctagtactctgtttaagcatgaacatttctatctctgttagtctttggcatatgcttgagctaatcagaatctcttacaattttaacatactagaagctactcaaggaccaaagcaaaggagataatttttcacttgtaatacatgcttcatttaaaagccaagaattattcaaaactaaataactgcaaattaaaatgaagacttatataacctctgggtgtccttattgacttgaaaaaataactaaagatcgtaacaactttagaattgaaggtaaagttagaaatgatttattctaacctcctctttttatagacaaggaaactgaggcccaaagagacgaaatgacttttccagggtaatatatatcaagccctgacatttaagagggatacattctgagaattttaggaataccaaaatttgtgattagtattatatcattaagtttgatgtgtttcctgtgtatatctttattatcgcctttttacttgattttattttatacatctgtttttagtgactgaaacacatgctaaaaagagtgaatgtgttctttgtttctatacactgagctgctttctaagttcaacgtactatttcttttttttgttgtttttgtttttgttttttgttgttttgagatagagtctcgctctgttgcccaggctgaaatgcagtggcctgatctcagctcactgcaacctccacctcctaggttcaagtgattctcctgcctcagcctcccaagtagctgggattacaagtgcatgccaccatgcccactatttttgtatttttagtggagacagggtttcgctatgttgggcaggctggtctcgaactcctgaccacaagtaatctgcccgcctcagcctcccaaagtgctaggattacaggcgtgagccaccacgcctggcccaacatactatttccaagtgatttcaatatggctgttttttagttcttagatttctgcactttatctggctcaacatttggctttcttttctgaaccatttttccaccaagaaacatagtagatttgtttgttttaataccttcagttaatgtccagaaagcagcaaatctaggttgacttgcagactcttatcaaaagatttatcattcagtgccaccttgcagtatctcattcagatttgtgcctcagcagtagacagattgctctatgttcatactcagaatagtcaaaaccacaaacacccaatttgggaatcacagaagtctacattattagagttgcttgggctaggttctagattctaggtcttttgattcctagactaaacagggtggggttttggttttgtttttttctttttggtggaggtaggcagattgtgctgagtttgggcattgtattgatcattagactagaaatggacataatggttttaaatgggctttaagacattattattggccaggcatggtggctcacacctgtaatcccagcactttgggaggctgaggcgagaggatcatctgagttcaagagttcgagaccaacctggccaacaggcgaaacctcgtctctactaaaaatacaggaaaattagctgggcttggtggcgcatgcctgtaatcccagctagttgggaggctgaggcagggagaatcacttgaacccgggaggcggagtttgcagtgagccgagattgcgccactacactccagcctgggtgactgagcgagactccatctcaagaaaaaagaaaaaaaaagatgttattattttgattctttccactttttcacagtttgctacaaggtcaatataaagtactcacaatgacctttaacaacacatggttttttgcccaggcgtggtggcttacagtggtaaccccagcactttgggaggctgaggtaggcgtatcacttgaggccaggagtttgagaccagcctggccaatgtggtgaaacaatcgtctctactaaaaatacaaaaattagctgggcttgacgcatgcctgtagtcccagctactcaggaggctaaggcaggataattgcttgaacctgcgagatggaggttgcagtgagctgagatcgtgccactgtactccagcctgtgggacagagtgaggctccgtccccaaaaacaatatatggtttttctaaggtttttttcctatagaaaaaaaatctgatttttataaaagaagataaaaagatgagtagaattagctctatagaaattcaactttatgataaactttcttggagcacttacatttggtaaaattaaaacatactgaattaattcatctagaagtgctaaagattcatctgcctatttttaaggccttttgtaactagaaagaagcaagtataaaagtttcagctttagacaactatccttgtcctgattcatataggctgttttaccaagtaattcatccctcggtataattgtaactccctgagctttgcattctttcttacattgccatattcttaatacctggattgccatatatgctcttaagtcagtggtttacaaactgctctgtgaatccctgggagttaacgttgactgccctgagggaagaaatggaagatgaaatagatgggtctcagggcctgttgacaatatgtaagtgagatcagctctatttttatgtgttttatttattgtggttctgaacacatttcactttttaaaagggttcttttgctttaaaaaaagaaaagcaagtatacctctgttttaataaactagaagttttcctttagtttcagatatgtaatctctgcttggcttttcttcttagaccctgtgttgggctatttgatgaaaggcctgtgtgaaaagcccctggcttctgctgcagccaaagccattcataacatttgctctgtctgccgagatcacakggctcagcactttaatggactcctggagattgcccgctccctcgattccttcctgttgtctccagaagctgctgtgggcttgctaaaaggtactcacttgatgttaaccactaatagtcacctcaaagccactacctggggtaatcttacatctgtcatatcccagtttttcagttgcaatgtacttagtgtttaagaatttataagatgaggaagatggcttttccactagaggggatagtgttgactatatgtacatgcattcttttcttggattatcttaagcctatataattaattaatactacttgcggyatatatagcaccgacctagatttgggtagagacaacatattcaaactaaacacggctgctttttaagttggaagaataaaaagggagaccaaagaagcattgccataccaaagaggtaaatgggagttgaaaggtagtatacatggatcagtgccatgagtagaagtcaggggtcctggtctcttagcagcctttaaccattactgatcagcttatactgagtgattgtctatccagaggcaaacagccattgtgatgaggctcggacttaatagaagaactagagatattaaggctaggggaaaagacttagaacagcctttaagcatggtagctatttttaaatatttgaaagatggtcttataaaagaaggatcatatttattttatgagtagtcacttgtcagccatttatagggaagcatatactggctctaggaagaaaacacttaaccatactttctgaacacagattggggtgccctgtgaggtaatgaaattcttatcactggtaaatcagagagattgaggtatattaaaggattgggtaaaataacctgtgtgatatcttctaagcctctgtgacttgttaaacaattagccttggcaagagtggatggcttatttgtgaattctgtcctttgttattcatatgaccagattccttaccagctagtgtgactgtgcttttttatatcagattttctttttgtaccttgggtttttgttgtttcccttcataggcacagataaatcagagtcaaatatycttgtcattttctagtggaatttattaaccttgacattgaagtgaggtctaacctgtagtacaatgtggcctcccaattttcagtggtatctaatagatgtagaaaatggttttcaatttttatttatttatttattttagagacagggtctcgcttgttgccaagctgggatgcagtggcatgatcatagctcactgtaaccttgaagccctagactcaagtgaccctcgtgtctcagcttcccaagtggcaaggactacaggtgcacaccactatgcttagctgattttttaaatttttaatagagacagggtcttgctatatagcccaggctggtcttgaactcatggcttcaagtgatcctcctgccttggcctcccaaagtgctgagataccaggcatgagccaccacacctggctgaaaactttttaaagtaacatacttttctataggaattaattaaaaggaaaatcatgctgaaattaggcttttccctcctagttttaaagaaaagtctaactcgtctatggcttatagatggccaagaagattcactctgtttttttaattcaaatttgaaggtttagggataaattactgttctgttgaatgaaacttcaggaagtgaaaacatttatattcaaggtgttttttgacctagaagggacctaggctaatacgtaatcctttggatttggggaaggtgtttcagcagttggtggggttagaatggggattgcagcaagagggaggctgagtaggaaggrtctggaccttctgtctccacttgaacctaactgcctcttttggtttttctttttaacctattttattggagttctaagtcaagatttgtttaggagggaaaaagaaagggggtaggaggcttttgtaacttttttttaaaatgaaagaaaggcaaatttaactgttactttgctgttcaagtcacttatttcataaagaaactgaagcccaaagaaaatgtctcttataacctcacagagagtgttatggtgtaagagtgaaatctctaattgcagcccattcttctaaaagcattatgtcagaatttctcttgtgataagaattgctggaagtatttatcaaaaataaagactctctttgacccactaaatcagaatctctgggaagtctgagaaacattacactatggtatacattttaaaatagctttgccattggctttgtgaaggagattttaaaagtctttgacaaatattaacttcagttgtaagtgttaatcagtcttagccttctgagcccaataaagaataaagaaaaaacaactgtaaataacaaagtgttgtcattttaaaaaacaatgctgatcttttwaaaagaatggaaccaaaccagttcgctttttctggtcactcacatgatgtagtccagttaagttacctcaattcagcgtttatttttcatttgtatcttcctttgtttttcagggacagcacttgtcctagcccgattacctttggataagattaccgaatgtcttagtgaactatgttctgttcaggttatggcattgaaaaaggtaagtccaattaaggaaggtgtgaaacaaatataagatgtttacatgttaaaaatgaaaagatgaaattacttatttacagatcttttgtctacctagaaaatccaagaaaatgcactaagaatttattaaaattaatgtaatcaaaktagctgcatacaataaatatttcagaattaatagattctcattatatcagtgttaacagaaaaaccaaattttataaaatgttttaaagaggtttgtcctgagccagtatgagtgaccacagcccagggaaacccagtctcgaggagttctgagaaagtgtgcttgaggtggtgggattatggtttggttttatacacttcagggatgtaggagttacaggcaaatacataaatcaaaatatggaaggtatacattggtttagtctaaaaagatgggctgtcttgaagtgggggcttacaagtcataagtggattcagagattctttaatctgcagttggttaaaggaacaaaaagcttggagctagcagaaaggaatgtttaagttaaggttgctatgtcagggtcagccataactctgacagtttaataagattgatgggctatagatgtgacttaactcttgccttctgtggcctcagatcttgtttataatttggtaaaggagtctttgatcagccgggtgtcgtggctcatgccagtaatcccagcattttggaggcctagacaggtggatcatttgaggtccggagttagagtctgaccaacatggtgaaaccctggtctctactaaaaatacaaaaaattagccaggtgtggtgacgcacacttgtaatctcagctactcgggaggctgaggcgggagaatcacttgaacctgggaggcggaagttgcattgaaccgaaatcgcgccattgtactccatcctgggtggcagagcaagactccacctcaaaaaaagaaaaaaaaagtctttgattggtcttatgatctccatttaacattaatgctggccacttgcacctaaactccgaaagatagggagtataacaaaacatatctgacctcccttcccatcatggctgagagctccgtttttaaggtttctctggggtccccatggcaacaggagggacctattcagttggtgggagacttaggattttatttttagtttacattggtaatcatcagttagaaaatgtaatgggaaaagaattcattcaagttagcaatcaacgcctgaacctaccatgtttccttaaaggatataaagatgtcaactcttctccagttatatttatagtgcaataactttagacataccaatgggatttttagaacttgataaaataattctgtagttcatctctgatgatttactaatgggagtatctaagaaattttaggaaagaagagtaagagacaatttgcttaaaatatattacaaagctataataattttaaagccttataatataaagctaaatatataatcttttacatattgtgtaacataacatatatacaatctatattatgtaatatgtaataataataattaaggtaaatgggaaaaaaatcaaatgatactgttttctactcctcagtaatcagacagtaaaatgtagcaatatgtagtcttggccaggatgcaataagatggaggaaaataatttgacaatataaattaaaatttgcgccatttgagtaacttttaggagtttatatacttttaggactttatataaggaaataagcagagattgagacaaaggttgatgtatgttgcagtgttggctgtagatttgtacatgtgacaattgggtgttaatgtccttttgtctcttcagctgttgtctcaagagcccagcaatggcatatcctcagatcccacagtgttcttagatcgccttgcagtgatatttaggtaagaaaggagactctggatgccttacttgggttaaaggctcaaatgaaaccattgtatattgaagtaagcaagtattttttcctcatacttccaagtatctccctatgtttggagactaattaagccagctgttacctgaagttctggggcaaaggcaaattctaagaattcattcctggtaggtctttgtgttaaaatactctttaaaaagtggaaggccgggagcgatggctcacacctgtaatcccagcacctgggaggccaaagcagacagattgcttgagctcaggagttcgacaccagcctgggcaacgtggcaaaaccctgtctctaccaaaaatataaaaaattagctgggtatggtggcatgggcctgtggtcccagctatttgggaggctgaggtgggaggatcacttgagcctgggaagcagaggttgcagtgagctaagatcacatcactgcactctagccggggtgacagagtgagaaccccatctcaaaaaaaaaaaaaaagactctttaaaaatggaattcttttggtctccagttctgtggagaccaaaagaccaaactttcacatatatcatcattccacatgcatcagaatcacctgggcttatcaaaacacagattgctagatcccatcccctcagtgtctgattcattagatcttgggtaggacctgaaaatttgcatttctgataattcccaggtgatgctgatgattctgcttgctaatccagagaccatactttcagaaccatcgctgtatatagtgtatgggtacaaaaatataatgaagtttcttcagtgatcaggtgaaattaatgcatctttgaagtgaagaggaggagcctaatgattaaaaaggcatttgagtgacagttttcaaagagtaattcttactgagtaacataatttataatttttgggacccatgtataactggaatgttatagtaatcattgtgtagaagcctatgtgggataaatatttaaaaaggtgatgtgttactagttattgtcaacagatatctttctctcagttggtgcaatgttttccttttataattaggagagccctattaacatgcyattctgagaacctattaacagtaacccttatttcacagtaaatgaaagaaaatctgaaatagatgtaaatacttgaattaaagttaaatttttattaagttgctgttgagctttttaaaactaaagagtagctttcctttaaagtagtttgtagttaattatgtgtggtttttttttcctgcttttcttcaaattgtgagctatcgaactagacagaggagttgtatttgactgattgtggaaagtacattggattcaaactagaactacaacatctttggactacagttcctatagcttttagtcttttaatgcaaggaatgaagcaatacttggtttctagtagtggatttagacaacctgtgtatatttttttgttaattaggaagaaactacatattcaggtttggttttgttgttgttgttgttgttgtttttgtttgtttgtttttgagatggagttttacttcatccgcttgttgcccaggccggagtacaatggtgtgatctcggttcactgcaaccactgcctcccacgttcaagtgattcttctgcctcagcctcctaagtagctgggattataggcatgtgccaccaccagcctcccaagtagctgggattataggcatgcaccaccaccagcctcccaagtagctgggattacaggcatgcgccaccacgcccggcttatttttgtatttttagtagagacgggttttcaccatattggtcaggctggtcttgaactcctggactcaggtgatctacccgccttggcctcccagagtgctgggattacaggcgtgagccaccacacccagcccatatttgggtttataaagggaaaaatggaaaagayagccatagtgcctcacagcccatctacccaaagttggattgaatttgcgtgttctattggaagtgacttaaaggtggccaaaaaatgataggatgatttaaaggatgtgcttataaaggtgatgtaagtaaatgactttatcatctggttttctttatttggtgaaaatgatactaagtaagcaagcagggatcagggctctgggtcctcagtgaaattggtctttgttcactattttgggctgttgtcttttcccaggcataccaatcccattgtggaaaatggacagactcatccgtgtcagaaagtcatacaggaagtaagtgctaatggatgcttgtggaatcaaggcttgcttcttttttccttacagggctttgggtaactcacctgagaagatactgtcttccaagttcatagggagattcagtttgttgatgtggtttcaatgaaatgagggacagagccatccaaatgtcttttattttagatttgataacaaaacaggctgcaagggaatgccttgaaagaccagagaagtggtagaaagagattcactgtgtgactcctagagttactaggaggcctgatcaataccagcagaatatttttgacaaagctagtgacttcgttttcctcagtgatgacatacttcccctctacttttttcactgaaggttatrtgaggatcaaaagtcatgttttaagaattgcttttgagacttcagaggacaaattacatcaacactaaatactcttaagtgtccaatggtctcaaatgatgccatttccttaactctagtccttttgttcaaattcttccaccttccaggaactatctttaaacatctcttcctatatagctcgtaccaattcttttcatagcctttcgggaagtctgaagtttaggaaattgtgtatctctgtcwtttagcaaagttagacatgctcttccagttctaaagaggcactgttttctcttgttaagtgatagggttttgtggtgggtagtctattgaacctgagcatgctggccatgtgtgttcctatacagaaagttttgtcccagttatttaaaagctaaatgaggtgttaccaacttagcagtttttcaggtcctagttgttgattattttctttcttgtgctcttttacttttgacccagatatggccagttttatccgagactctaaataagcaccgagctgataatcggattgtagagcgttgttgcaggtgcctgcgctttgctgttcgctgtgtaggcaaaggatctgcagcactgctgcagccactagtcacacaggtaaagttatctgttgcggggggacgtgttccatgtacagaatttgaaataggcagggtgcggtggctcacgtctgtaatcccagcactttgggaggcctatgcaggtggaccacctgaggtcaggagttcaagaccagcctggccaacatggtgaaaccctgtctctactaaaaatacaaaaattagccaggcatggtggcgggcacctataatcctagctactcgggaggctgaggcaggagaatcgcttgaacccaggagctgcactgcactccagccagggtgacagagcaagactccatctcaaaaaaagaatttgaaataggagcctttagaacaaaaactttgctgatgaaatgaaacacttttgtatttattaacaaactaaaaaaacacttgaaagagattagtgcctgtgataggtacattgtctataagggaaacagcctaaaatcgcttctgtatagtagctatagcagtattctaagtagcaacacagtccattgtgaaattctgtgaagcgaatgacttgggctcagtacttatatactaatggtaagcatttttatattgagatccttggggaaaaaatgtagcaagtcagactttgctgtttctttgcccaaagggattttcttcaatcttggccacagttagttgtccacagaagtctcttgtcaaaaaataaatttgactcttttagtcattaagattgatatgtaattatgatggtatgactcactaaatgatgttctctaaaatcatattctcatctagaactgtatgagatgcctatgcttaagtcactaagtaattgtgttgatgttaaccttagagcagggccaggatgccagtgcctagggcacaagatttagggacacaaggcaaagtgccaatcctgcatttgcaggactctgaggtgctttctgaaattttgtacccatgctgtgaggaaaacagtcacagagctccaggctagagtcataccccacccaacctgaagtgaccatgctccacctagggagaggagagcacctagggtgcagattttaaggaggtcctggccttaagaatgagttccccctggccaggtgcagtgcctcaygcctgtaatcccagcactttgggaggccgaggtgggtggatcacraggtcaggagttcaagaccagcctggccaagatggtgaaaccccatctctactaaaaatacaaaaaattagccgggcgcagtggcaggcgcctgtagtcccagctattcatgaggctgaggaaggagaatcatttgaacccggagggtggaggttgcagtgagctgagatcgtgccactgcactccagcctgggtgacagagtgaaactccatctcaaaaaaaaaaaaaagaaaaaagaaaaaaagaatgagttcccccttaaattctgcatcataggtgccctcaaccacaggcacaggcatgctggtgcggtgttggtacttggataaccttgcctctctaaattatagatttgattaaagattgtacaggtaaatatttcaacagaattttaatttttagtgatttctctacttccactatatgctgagcacaataatgtatgttcgcatttaggcgattgccacctctggtcaagtgtccccttcagtgcaatacattctgggtctactacaacttgatagactgcccctttgctgttggaggataccctcatgactttgatactgttttttaattcctgccagttaagtatatgactaacccaatagagtaggtagcactattatataggaagtgtgttctagagtcagtacatgtgacaaaaatgaaaattatccttaaaaaatcccttaactcaggagccagcaattgatagtcagtggccttgccacctatttttgtttttgtgttttttttaatgttttactgagctatagccataattcatttaagtattatctattggtcatttttgtgctacactggcaaacttgagtgggcagaagactgaatggtggataagatctatactttttacaaagtagccctttaagaaaatgtttggcaacccttgacttaatcattccttagtagagcatataattttgagtttacaacatggaatggattcatagctcccatctcatgctcattccatggcatatgccaacagaagaattaagttactgtatcctttcagtcccaagttcatagagttgaatttatgtaataagatcaatacatatgtactgtggtggcattttaaataggtgagtgtacaattgtttcttaattctgggaggatagtggagtaaaaattctaaacaaatcatttaagcgcatatcgtggccgggcatggtggtgcacacctatagtcccagctgctcgggaggctgaggtgggaggatcccttgagcctggtaggttgaggccacagtgagccaagatctcaccactacactccagcctgggcaacagagcgaaacccagtctcttaaaaaaaaaataataatgtgcatattgtgttaaaatttttgctgtgttgaaatccaaatatcttcgtagaaaacactattttttacttaaaagataaaataggtttaggagcaactcaaaatttaaacaatgctttcactgtcttctccaagatgaaggtgtttgatactgttttcccaactgtggctatatatcctatttaaaagtatgacttatctacagtgcaaatgagagcaacttttacgtactggatgaaatattctgtgctggggttttgcaaataatccatgagttccctgatagcttctagctttaactcttatacagcattgtcttgggaagatgaaaggtcaaagggttggaagaatagagaacctgaaaatcattgagatattgagccctgtgtttcacaaaatagtgctaagaagctttatactatgttgccttaaagagaagaagccaatctatctctgaatttcttcctggagacagcttcgtaagttggtactttttgaaggacgaagcattgaactaattgttttktccctcaacagatggtgaatgtgtaccacgtacatcagcattcctgcttcctgtaccttggcagtatccttgtggatgaatatggcatggaagaaggctgtcgkcagggactgctagacatgctccaggtatcttttccatgaggagtgtagaygcatcaggcctagagggtctgaaggcctagcagcgtattctttaccatgtctttaattctgttgcttctttatgttttcccccaggcatgttgatttcctaataacagggaggtggaagcttcccagttgttctctgaacaggcctgtttgagagaatgagagactgaccacatgagtgtaatgattattacatgttactgcctggtttatgctcttccagagatagggtgtttggaggggggaggaggtgagaaaaatgaatctctaagctcaagcattattgtatttttaacttcttgcctggaacagccaactgactagtttacttagcagcagggagggttttagaattaataatagcattggaaacagctcctcagatactgcttttccctcccttccagccacagaggggaatattgagttgaagaatgttgtttcttttcccaagatgtcttttcatttaaaattgatatttcataattattataaaaacttccactcccttagtggactatacctaaatagaatctttgctttcagaaatttctaaaactttgagatgacatctgttgagttttatcagctaaaatctgttttctcaaccctttcttaaatgtggacttcataggtgaaaactgtttatgtcaactgggaaggatttatgtgtttcttttcctgatcagattctcattacaatctttttcttttcccagctgtgcttttcttctttgttccttttgtacttattgtaataaatatttggcaagtctgaatgcygtggcatttctgaaaaagcatttcttttaaaatcactgttttgttttaggcactgtgcatccccacctttcagctyctagaacagcagaatggtctccagaatcaccctgacactgtagatgacctgttccggctagccaccaggtaaatccttctgaagagcccatttcttaattgctcatcctatcactgcttagtcttgccatctgacccttggttgttttattcttgtaaaatgaagtcactggagtaagtagattaatgattcataacccaraggtaaattgcaagctgatatatccccagcagtgacgcagagtattgcgggaagcaagggataaaggagctgagttcctgccaggaaggagggctcacacacaagacaatgcagtgtgcctggcaaaacacttgactagatcatctctacagtcctctgtaggttttaactgttcrtgctgttgcgatttcatgtttcacctcaaccttctctttgagaagcttagcatcctttagatataatcagtttcggaataaagaatgtttgggattttaagatgccttagcagttatctcatactgtatttctcagctctactcacagcctactttatcagtagcactgataatatgattgccaaacttctgcttgaattccttagtccctaactaaggaatttgaaccaaaactgttaccatatcagcattaaaaaaaaaaaaaaaagaaaaatcattattttcgaaacaacaaaagcccaactgttatatcatttacaaatgcaaagtaatgttgacttgattgtttcatcttaggattgattttttttcttttttcttttttgagatggactctcactctgttgcccaggctggagtgcaatggcatgatctcggctcactgcaacctctgcctcctgggttcaagtgattctcctacctcagcctcccgagtagttgggattacaggtgcccaccaccatgcccagctaatttttgtatttttagtagagacggggttttgccatgttgatcaggctggtctcaaactcctggcctcaggtgatccgcccaccttggcctcccaaagtcctgggattacaggcgtgagccaccgtacctggcaggattgaatattgaaccctttttttttgttagtttttggataggttagaaaaaccttttttttttctttttctttttttttttttttcagttgatagaattgttggatgggctgtcaccctctgttttctttttttttttttttttttttttttttttgagacggagtctcgctctgtcgcccaggctggagtgcagtggcgtgatcttggctcactgcaagctctgcctcctgggttcacgccattctcctgcctcagcctcccgagtagctgggactacaggcacccgccaccacacccagctaattttttgtatttttagtagagacggggtttcactgtgttagccaggatggtctcgatctcctgacctcgtgatccaccctcctcggcctcccaaagtgctgggattacaggcctgagccaccacgcccggcacaccctctgttttcttagggtatgtattccttggaaaactagtccctaaaaatgttctttatacaaatgatgaaacaagtttggagtatactgtacctttttctgaagagattctccctgtatattaaaggaacttagaaacctgatagtagtttaaaggaaaaaataaacaagcaaaactactttcaaaatccagcagcatttcccaagcttacctgaacacacaaccttttctttgagggattcctgttgacatcctgggaactggaattctgtgaactttagtttgggaaatgctgttctagcatctttaggactttttaacctaggagagtttctacttgtaggtccttttgactggtctttcttgatttataaaatcttagttggaaataggatgtggtgacacgtcttttaatatactaatcttaagatatggtcctttttttttaaagagcaactttaggttcactgcaaatttgagtgaaaagttgctcccatatacccctccctcctaacacacacagccttcccctctattagcatcccccaccagagtaatacaaacagtgaccctatatgaacacatcattatcacccaaagtccatagtttacattaggcttcactcttggtgtacattctgtgggttttgacaaatgtgtaatgacatgtatccactgttatagtatcatacagaatactttcactgccaaaaaaaatcctctatgttctgtctattcatcccttcttccctgaaaccccccaccaaccactgatcttttttactgtcttcatagttttgcccttttaccctggctgcttttatagcctaatcttgtcatttatacctagtctcactttccacaccaggtttattcagcgtagccctgtcaccttgctgcggagccaagtggtcatccctatcttacagtgggccattgcctctactaccctggaccaccgggatgccaattgtagtgtcatgaggtttctacgagacctcattcatacaggggtagccaatgatgtaagtataaaaatgataccatttctacttaacagcttttatctcctatctctttgtcattccttaggagaaaaccagcatcccagtatttccttacttgatctatattggtagacatatatcatagtggatcattcactagccaaaatatcaactaagacacttgtgctgggtgctttaggctatataaagcagtctaaaactgttcatgctcccaaatcatttggtgtctagttgaagagagaaacaagtttaaagagttaagtaacaacaagatgccagtgtttggtgtttttcatttgtttttgaaacagggtcttgctctgtcgcctaggctggagtacagtgatgtgaatctcaagggatcctcagctactgagtagccaggactacagacattcaacaccatgcctggctagtttttatattttttgtagagatggcatttcaccatgttgcccaggttggtcttgaactcctggcctcaagtgatcctcccaccttggcctccagtatttgattgtcagatgagtgataaaagtcatgattggtatgagatcagacgagggaaagctctagaccaaaaagagttggaataactttatggaaggggagggatttaaatgaagccatgaattagaggtagaattttgatggattagagaggcagatagtcatactgcctctaagccaagatcagagcaagtcagaatagtactaagtttgttagtagacaactaagcagtgggagtagtaaagtgcttcacaggaatttcgaaggtagktttgattagatgtggagtagaattgtagacaggggagagcagtgaagaagtaagtattctgcattctatttaggctattcatttaagaagtttggcagtaaaagagagaagaaaataactagaagggaaaggcaatttaaaaaatatttttctcaaggtattagaaatacatgtgtatttaaagaccacaagaagggccaggcgcagtggctcacgcctgtaatcccagcactttgggaggccaaggcgtgcagatcacttgaggtcaggagttcaagaccagcctggccaacatggtgaaaccctgtctctactaaaaatacaaaaattagccaagtgtggtagtgtatgcctgtaatcccagtttctagggaggctgaggcaggagaattgcttgaacccaggggatggaggtttcagttagctaagatcaggccactgcactccagcctgggtgacagagcaagacgctgtctcagaaaaaaaaaaattaaagaccgcaagaagaaaaaaagggttttttttttttcgatagaaaaaattagatctctgatagacgtcttcaattctaatttcagttggttttgttttgttttgttttgttgtgacttggggttccggctgtgttacccagacagactgtagtggccattcacaggygagatcccactacagatcagaatggaattttgacccactctgtttctgacttgggctgttcacccctccctccttaggcaacccaggagtggttcctcactcctgggaggtcaccacattgatgctgaacttagtacaggcacccaattggtatagcatgctctagcccagaacactgggttcaagctgttcccctacctgcgcctttggagtggctgggactatggtgtgtgctgccatgccaggctgacttagtttttaaaaaaggaaataggaacacaagttatttttcacattaaaaaaaaattaataccatcacatagaagatgaagagaaaaaaattttaaaaattgctaactttaattcttaaccatgttttctgccttcaaatcatgaaaaatctaagcattaatctctgttgaaacccatgttcattccttggatactaataaactccttcattttctttctaaagacaaaaaacttctggactttgtgaatccagctgtcattttacacacacctgcatacacacacacacagccacgcgygcrcacacacacacactttcctattaaagagaaattactaaaggggaaagagtgcttggtctttgggaagttgagactagaatttatctgatgttcctgctttcctacatacagcatgaagaagactttgaattacggaaagaactgattggacaggtgatgaaccagcttggacagcagcttgtcagccagctgctgcacacctgctgcttttgcctccccccctataccctaccagatgtggctgaagtgctctgggagatcatgcaggttgacagaccggtaagattgttttcatgaggaatttatctcatagtccctaaatgtaataggctttggttccttaaggccaaccctaattttgaaactagccctgttttctgtccatggaaccaaatttaggcatattgccaaattagattggtagatgaagaggcccgtaaagatcagtaatttattattgagttctttaaagcatgtttctatgtcactgtcatagggggtatattaccagaagtaagtatcaagcattgaattcagttgtgtggctgtccaatgtgaaatttgttcacttgtgagagatgcccaaatgtcagttatattagttacgtattactcaagaagtatttaatcctttcagacttattctatagcactgtattatttcttggtgatacatctagccagaacatttggaagcacataattgtcaaagtaacccacaatgtacagttggatatatttcccctttggatttctttgaaccagatcctttatcacccacctaaggatggagttgtttttttaaagctatctaataatgcccaagtaatttcagtactgggccacatgaccataactcaggttatgtgtactgtgtgaaagttgagtagaatggtaaagtataatataacctgaaatcatttttaaaatggaatttataatttttaatattaytrtaaaagcagttcaggaaagtactcattgggacctagttaaagtgagctgtcttacagaaccacagaatataaaattgataataataatatataacagatagtacctattcctctctggttcaatacacatgttccatttcaacctgatagagtagcatatttgtttttctaaagaaaagtactttttgagcctccaggaatcagcaaatttaattcaaaagtccttgacctgagggaaaaagtcttcatactctgcttaaacttttttacaaatacatttggttcccaagtaacagaaaacttatgtaaatctaactttatgaaaacattcttgattgtaagcatattgttaagtgcgaacaacaacaacaaaaaatgagaacaagaagtttggacaggaatagaaaccaggtagccatgtactctaaggagtgtactgtatatcagccagacacaatggctcatgcctgtcttcccaatactttgggagaccaaggcaggaggatcacttgacgccaggagcttgagactaccagcctgggcaacatagaccccatccctacaaaaaaaaaaaaaattttttttctttttaattagctgggtgtggtggcatacatctatagtcccagctactcaggagggtgaggtaggaggattgcttaagcccaggagttccagcctgcagtgagctatgatcatgccactgcactccagtctgagctgcatagcaagaccctgtctcaaaaaagaaaaagtttgctatataacaactattatgtatttttaagaattaaggagctgttatgtatccataattaagaaatgcttagtacttcatgagcatttataatacttttgctctggcctattatggccataaatgaatatgatgggaaaatatataatgtaaaaaaaattaggtataaaagagtaattttacagcccaaaactatgactgaagtatacattccacttaagaaagggatgaagaaatattagtgctgacccaaaggacaacaattaaactgaaaataagaacccagaggaagtctgtagaatttttattttagaaaggaaggaagtaaagggagtagacaatttttgtgcatagraaaggcataaagagaattcttagatatacttatataaaaaatatataagtaaattaaacagcaacaagagcaaggttttttaacacaaagaacaggcagatatcacaaaggaactgaatggataggacttattctgagagagatggccttaaaatccttaagattctggactcatatgtctcatatgtatactttctgacatggtggcttagtatactttttgcccctgctctttcaggtatctgaacctttactctggatcacttttgatctttaagctcaagagtttttggaaatctgtttaattttaaaaatatactggtcaagtgcttacacctgtagttccagcactttgggaggatctcttgagcccaggagtttgagaccagtctgggcaacatagaaagactcctcatctcttaaaaaaaaaaattgtttttaattagccaggcatgttgatggacttctgtagtctgagctacctgggaagctgaggtgggaggatcacttgaggctggaaggtcaaagctgcagtgcactgcacgccagcctgggcaacagagtgagaccctatctcaaaaaagagagagcgagtgtgtgtgtgtgtgtgtgtgtgtgttcatgttcgcatgtgtgcatatgtatatatgtcatatacgttatgacaggaacaaaacaatagcctcatcccgaagaaacttcacttctaaggtgtagaaagtcgttttctgaaatgatgcccgctgcccctttgaagggaagtctaggcatgcatatgcagactgcatcaacccagagggtttgaagggctaatgagagcacttttgttgattcctttacttgctcccaagtgtagggaagtaaatgctactaaggaaaatttgtgggrttttgttagtatctgtagggtctcaggtgagtaagctatgcttccttttaaaactcttacccctctttcctatacagactttttgtcgatggttagaaaattccttaaaaggtttgccaaaggaaacaaccgtgggagcygtcacagtgacacacaaacaacttacagacttccacaagcaagtcactaggtgagtgatactgggggttcttaaggaggtgtgggatgtgggaagaaacatatctttatttcttatgtgcccttgggaaatggacaatttatagtttgtttaaccttgaattgcacaaattggcattggaagccaatctggtgggaaaacattcaccatgctgtgtatgtatgtacatatatttaacatatgtgataactggtataagattttttaacggtaagtggaggcactgtttctcccaaaggaaaatgcactgagcagctcactccccgtcaggagatctgtctatatttttctaagtccttctgagttttcatccacattcgggggtcaggaatgtaggtacctgagtaaggcaaagcattggttataaaacatcagaaagtgatgtagatgacagtgaattggagaatgttcaccatgcctaaagatagtcaaattctaatttcaaagaagttgtgtagtccaaacagaacatctgcctgggatacattaggcccatgaggaacttacaatctctggattacagcctaaaatgtaaagtgtgtgtgttttttttactgtgaacatataaatatttttaatacagttacatagtcttcctaattattgttttatagccataaaggtgttacttgatttccttataatgcctctattagtagacatttagatcatttttcagttttttagtattacagataatgtcaaaaatagagccttttccttctactgaatattttcctttaaaatgtaatcaccgaatcaaaggttatgagacttatggtcttaatggtaatgacagcaacttaagttggattttatagctaagtgttcctttgccctgatagtctttttgtatctagagtctttagagttttgtctaaattttagacaatgacttataatcatacagtgtggaaagatatatgggtcaaagaaggaatgttatagcaaggttagtagtagtgaaaaaactggaaatattctaattgcccatcaatagagaaaagttaaataattaacagaagcttatactagtaaatagtcccaaagatgaacaaggaagaagaaatatgtgataatacggaaaaatatacaagataaattgtaaaggttaaaataacagtattacataacctaacttgagcttttaaaataatttgaaaattttttaactgttataaaaatacacataacatgaaatttacagtattaaccatttttataaatgcatagttcagtagggttaagtatatattcatgttgttgcacaaccaatctcaagaactttttcatcttgtaaaactaaaactatacccattaagcaacaattctccattctcccctctccccatctcctrgcaattaacttcgtacttaatgtttgagtctgactactctagatacctcatataagtgagatcatacagatttgtctttttgtgattagcttacctcacttagtataatgtccttaggattcatctatgttgtagcgtgtgccagaattttcttccatttaaaggctaaataatagtccattgtatgcatataccacattttatttatcctttcatctgttgatggccatttgggctgctgttgtgagtaaggctgctataaacacaggtgtacaaatatctctttcagcccctgctttcaattcttttggatacccagaggtagaattgctggatcatatggtgattctatttaatcttctttaattttttkaagaaccatcatactgttttccatagcagctgcaccattttacattcccactagcagtgcacaaagttccaatttctcyacatcctcaccaacacttgttattttctgggtttttgagagtagccatcttagcatttcacaccaagtgtgaagtgatatctcattgccgttttcatttgcatttccctaatgattagtgatgttgagcatcttttcatatgcttattggccatttgttttgtcttcttggagaaatgtctattcaagtgctttgcctatttaaaaattgggtttcttttgttgtatagttgcaggagttccttttatatttgggatattaattccttatcaggtacatgatttgcaaacattttcctccattctttaggttgccttttcattctgttgattgtgtcccttgatgcacagaagtttttaattttgttgtcgcctagtttatctgttttgcttttgttgtctgtttggtgtcatatctaggaaatcattgccagatttcatgtcatgaagttttccgcctaggttttcttgtaagagttttacagttttaggtcttatatcaggtctttgatcctttttgagttaatttttgtatgtggtattaggtaagggtccagcctctttcttttgcttgtggatatccagttttcccagcaccatttgttgaaaagactgtcctttctgcactgaatggtcttgacatccttgttgaaaatcatttgaccatatacaggagaatttattaatgggctccctgttctattccattggtctatgatgtatttctttatgtcaataccatgctgttttgattactgtggctttgtaataaattttagaatcaggaatatgaggcctgcaatgttcactttaaagattgttttggtggccaggcgcggtggctcacgcctgtaatcccagcactttgggaggccgaggcaggcagatcacgaggtcaggagattgagaccatcctggctaaaacagtgaaaccccatctctactaaagacacaaaaaattagccgggcgtggtggtgggcacctgtagtcccagctactctggaggctgaggcaggagaatggcgtgaacccgggaggtggagcttgcagtgagccgagattgcaccactgcactccagcctgggcgacagagcgaggctccgtctcaaaaaaaaaaaaaaaaaaaagattgttttggccacttggggacccttgaaattccatatgaattttagggtagatttttctgtacaagaggttgttgggattttgatggggattgtattgaatctatagattgctttgagtagtattgaaatcttaacaatattaaatctccaaatcgacaaatacagtatattgttccatttattggtgtctttaatttctttcagctacattttgtagttttcagtgtataagtttttcacctccttggttaaattttttcataagttttttttatgctattgtaaacgaaccaacttgtactttaaagagctgttttattataaattatacacatacacagaggctactttctgcacagtaagttttcagaaagatatataagtgagactaggaggggaagggaggcttttcttttcgtttcataactttctgcactatgtgcacttttttatgagcataaattacacttttatgggtaaaatcagatatagaagggaaagaaaatgaactttaagcagtggtacaagagctagttgtcttttctcagaattgatttcttaatgtcactttccaaaatagtttactttctcatcttctggaatgtctccagcaattttgttaatgttaaaatcccaaaccatggaatgctattattttatagttcactaagtggcttaagtagtaagcccagtatgccccagaaataactcacttttagccatagatcaagtgacatgcatgactgaaaaatagcatgtgacccttcatgacacattttgccagaagtggggatttcccctccactgggtaggcatatattgactggggtgaccttaaaaattctttgattgcttttactatgaatcttctcagtagaagtagtattctgtctacaagctgtttcaggggaaagaagtgtagtagttgcttctctctgcttctgttttgcattattccattcagtgctgkttacagtataagggcaggatcgtattggctctaattttcctaaagcaaatgggaacctaggggaaaccctccaaagatggggtttggagtcaagtatgttggtttgaatcttgccacataccstattactttgaacttcagtttatttatcaagtgaaatagggttagtactaccagtctcataaggttattatgagataccaaatggaaatctaaagaagatcttgcacatagtatgtgatcagtgaatgttaactcctttctccttggaggagaaacttctagaatgtcattatgtacttgcaaaactagctggggcatgtctcctgttgactctaaggcagccacccacacattctggaatcccacacattgtagaataagtctttgtcaagccctctttccctcagtgggactaatatwtgacagataaaataatatggtaagtctgaaatcaaggtcatagatatcctttcctaatttaggataaatcttggggcaaggaaaagagacctaagtaaagcagtgctgtgggggaaaaaaaaaacctgttatctttgtcctgtgatatgggaaaataaggtgcaccaccaacctgacctacttgatcttccattgctaaacaagttttgcagctcttcctatagcaggctgtaacatatgtaacatagtggtgggaaatgaacagaagtaagagctaatgtagaggtgctagagaaaggacttgagattgctcatcccctcttagtaattctcttcctctagaatgcctgtagtagacaagacagaaagcccttgaactttctgtcccatgcatgactcagtctcccttttgattttaaggtccgtaacacctgcctcaacatgctactttgtttgccattctggcagagagggtgaactggtttagtttcatttcagcaagtccaagcctgcttttcacatggtactggtaattaattccctagcttttttttttttttttttttgagacggagtctcgctctgtcgcccaggccggactgcggactgcagtggcgcaatctcggctcactgcaagctccacttcccgggttcacgccattctcctgcctcagcctcccgagtagctgggactacaggcacccgccaccgcgcccggctaattttttgtatttttagtagagacggggtttcaccttgttagccaggatggtctcgatctcctgacctcatgatccatccgcctcggcctcccaaagtgctgggattacaggygtgagccaccgcgccyggccaattccctagcttttttagttggtcaacttgaagaaagctgggacgtttcagtctaaaataacattcttgctttccaaatgccagatgaacctatcattaactaagaccaattgggactagaagaaaccctgccatcatttccatttctccatcttggtgtttattctatgactacttgtcacttgcctggggctcttcaaagccaaaaggtgttgaacatgggaagcattgatactggaattagaggccagtaaggggttgaatccctagtcaagtcatcagagtttcattattttctgttacctaccaggtcatcggatcaaaaggatctcatttctcagcactcctctagtaatcttatggggctcgagaaatagtgaccataaaagctttcagaaatatggtggaaggataggaatttggggactagaagccagaaaacagaatctaaaaaatactggcagttaaaaaagtaaataaatagaaagctaagaaatatcaaacgtcagaaggaccgagacagaaaatacagtcatgtgttacttaatgatggggatatgttccaagaaatgtgtcattaggtggtttagttgttgtgcaaacgtcatggagtatacttctacaaacctagatggtatagcctaccggacacctggtctatatagtgtagcctattgctcctaggctacaaacctgtatagcaggttactgtactgaatactgtaggcaattgtaacacaatggtaagaatttgtatatccaaacatatctaaacatagaaaaggtacagtaaaaatacagtataaaagagaaaaaaaaaggtatacctgtatgagggcacttaccatgaatggaacttgcagaactggaagttgttctaggtgagtcagtgagtgagtggtgagtgaataggcggcctaggacattaccgtatactactgtagactttttatagatactgtatacttaggctacactaaatttataaaaaaatttttttcatcaataataaattaacccttggccaggcgcggtggctcatgcctgtaatcccagcactttgggaggccgaggcaggcagatcacttgaggtcaggagtttgagaccagcctggccaacatggtgaaaccccatctctactaaaaatttaaaaaattagccaggcgtggtggtgggcacttgtaatcccagctactcaggaggctgaggctggagaatcgcttgaacctgggagacagaggttgcagtgggccgagattgtgccaccgcactccagcctgggcgacagagtgagactctgtctcaaaataataataataataataataataaattaactcttgcttactgtaacttttttactttataaactaaattttttttaactcttggactcctttgtaataacacctagcttaaaacacaaattgtacagctcattaaaaaattttttctttatatctttataagcttttttctattcttaaaattactttattttttttttttagcttttaaacttttttgttaaaagctaagacacaaacacatattagcctagacctacacagggtcaagatcatcaatatcactgtcttccacctttttacatcttgtcccacttagaaggtcttcaagggcagtaacacacatggagttgccatctcctaggataacaatgtcttcttctggaatccctcccgaaggacctgcctgaggctgttttacagtaaattttttttttttgtaagtagaaggaatatactctaaattaatgataaaaagtgtagtatagtaaatacataacccagtaatatagttgcttatgatcaattattgtatactgtagataattgtttgtgttgtccttttatatgactggcagtgcagtaggtttgtttataccagcatcaccacaagcatgtgagtaacgcaacatgcagttgttcatctctattatactcataggatcactgtcatacatgcagtccatcattgaccaaaacatcattgtagcacataactatagttctaacattcatggagctttttcgtttttttgagacggagtcttgctctgtcgcccaggctgaagtgcggtggtgtgatctcagctcactgcaacctccaccccctgggttcaagcgatcctccagcctcagcctcccgagtagctgggatcacaggtgcccaccaccacacacggctaatttttgtctttttagtggagatggatttcaccatgttggccaggctggtctcaaactcctgacctcaggtgatctacccgccttggcctcccaaagtgctgcgattacaggtgtgagccaccgcgcccggcctcaaggagctttttgatccatttctatgggctccccaccaaggacacttcagttaaacatttggctgaagtgtttgacaccaaagcacttgcagataggattggggcagaagccaagttgacagtgtcacctgtccctcatttcaccctatcgcactaaagttctcccacacttgcatttcagtttcaatactttttctcatgtgccacaaaggaggctgtgaagttatcatttccaaagtctctgctgggcacagtgactcacgcctgtaatcacagcactttggaggctgaggcaggacgatagcttgagcccagaggttcgagcagcctgggcaacacaatgagaccctgtttctatctgttctgaaaacaaaacaaaacagaagtctcttgargaagggtaaaatttaaaacatgtaagacattaggatagcaaaaaaatctcggtctccagcactgtcctaactttcagggttttctgttatcctagtcccttgtgataacacaccacatagcaacttctcttgggttacagatcttcctccttcctgacattgggagcatgagtgatatgggctcacataccctggctgcctccttaacagtcagtattaatttggaagtaaaatgagaaatgtaacacttaaattgaagcttattaaatccacagaggtaatggcaattccaataaagccaaaagacctttctcattttctttcttttttcttttttttgagacagggtctcactctgttgcccagcctggagtgcagtggcacaatcatggctcactgcaacctcaacctccccagctcaggttatcctcctgccttagcctcgtgagtagctgggaccacaggtgtgcaccaccacacccagctaagttttaaattatttgtagagacggggtctccctgtgttgggattacaagcatgagccactgtgcctggccacctgccttattttcattacatttttaggatggagagactagaagaaagtttctagaatgttctgttgaatcaagtcatggagtctaagtcaaggttcttaatgatgtttcagaacttacaatggatggggaaatctggatgtaggaacctaaatggatagctctattttcaccttttctgttggatcgcttagagcagtttcctcccctggtgtttaaccattatgagatggaaagtgtgttttcatctgcattgaatccttggctgtaggcactggtatctgagttagttgagccagggagagggctacagsaaggcaagcatattaagaattgcttcctggctgggcgcggtggctcatgcctgtaatcccagcactttgtgaggccgaggcgggcggatcacaaggtcaggagttcgagaccagcctggccaacatggtgaaaccacatctctactaaaaatacaaaaaaatagtcgggcgtggtggtgggcacctgtgatcccagctactggggaggctgaggcaggagaatcgcttgaacctgggaggcggaagttgcagtgagctgagatcgtgccattgcactccagcctggatgacatgagcaagactccatatcaaaaaaaaaaaaaaaaaaaaaaaggaagtgcttccttctccactgctttagcttttagcttagccttatgttcatttagcaaaaactgttatgaagacagatacagtagaatgaagctggcatcagctggtttcttggtgacagttttggacaaagggaggtcggggggcttttgaaaaaacagggtcagttgaatattgggctattcatatcacataggcatctcctgctttgtctctctttctacatgctttaaccctttcctctctccctcctcctcccacaggaggaaatcctgagcagcctgttcaactagaaaatcaatgactggtggagacttagttgctagaccggcctttgtaaacaaaatctatctttggaagagaatgaggaaacttatgagagccgtagcaaccaagtgttgttgtagcagcctacatttattgaatactattttgttcactgctctattttcataagcactctgtrtgtggacgattttaatcctctaaacagtgttatgaagtagataatattaatagatgaggaaactgagacaaagattggtaacttgttcaagggcacagtggagccaagattcaaactcgggcagtttgtgtccagagtacaccctttgaagaccaccaagcttataacttttctcatatataataatttttgccctgaattacagaaagatctgaagccaggatcgctcaggagacgatggagagagctcctagcagagttgggacggttctcagtgtgccccaatgttgcagttgtttttcagcatattctgtctttctcctcagtcaaggaccaacctaccttttcttttctagtgctgaggaatgtaaacaagtttgctgggccttgcgagacttcaccaggttgtttcgatagctcacactcctgcactgtgcctgtcacccaggtgaggatacatagttcccagcttttgtccggactgtcggactgttggggatgcctgggaatggggataggttttaatgcctatcatgggaccagtcttatagctagagtcagggaaggactcagcagtttaactgtggtgaacagctggaatatacagggcccggattttcttgggcctgggcagccagtaattgtcagtgtctttggggtaccattttcacctccataagaaagtaactgttacacagtgcattgaaacattttcttcccccttccccttacagacacttctaagatggtaagtgtacatggcaacaaacaaataagtatttttaacctggccactttggcgaaaacaacctcaagttgactgttatatgtggtgccagtctcctaaaactgaccctccagatgtaatgagcaaagagcttattcttatcacttttatgacctgaatgctgaagtgccagrttttgaccagggcaggaggtatgaattgaatatcccttatccgaaatgcttgggatttcggaggaaaaaacactttcagaagtgtttttcaattttggattttttgggattttggaatatttgcagaatgcacaccagttgagcattcctaatccaaaaatccaaaatccaaaatgctccaatgctcattcgcttgagggtcatatcagcgttcaaaaagtttcagctgttagggatgcttggcccttacaggagaggaggagcatctttggctcccgatgagcacttttctccacgtgctttccgtctcctggttctgaagcaaagcaagaagcttagctgaaaggagtgggtagtagaatttgggtgccagtttcttgatggagagaagaaaggtagctctcctctaagcccaccctttgatgtctcaaggtgagtttcttctcccaggaggcaattcttgatgaatctgtagcactcactggtagtttctgtgttaaatgcattcataggtaaaagtgatgttcagcagtgccttgccacacccaaaatcatttctcaactttgattgttttaatgagtaataatatcatttgggatgtcctggttttgcatggtgtctgggttagctgacattgatacacctcataaggttgctcatggacagctgtaggtgttcatggttaacttttattgtgcccttactgtgtgtcagggcactgttttaagtgttttagatgtattaactaagataatcctcatctgcttttctggatttgttactatttttcccattttacaaatgaggaaattgaggttcaacaatgtttaacaatttgcctgacagttattcgtggagccagaattcacatgtagatattctggtaccagagtcctcactttgaaccactccgcttaatacagtatcctttcgatagcatctaaattggtgttttgttttgttttgttttcaactgttattagtaggcaaagccttctttcaaaataaaatcgacatgaagcctgtgggatttagcagactgaggcaaagcttccctggttgctttggaatgggaggcctggacctgctggctctttgccctcctgacacatcatcccttgtttccacagcacactcagcattggaagcacactgcagacggtgtctcattaaagcagtagctcccttgaacccacargttaaaacgccagacttttatttatttgtttattttttctgagttcttattggcagacttcagaatgaggtacctgaggaaatatagaaacctctgccttaaggttgattttactaaatgctctattttctggtgcagttattgactgtcttatctcttttgtcaggaatgtcttttttaattagaagacaggaagaaaacaaaaaccagactgtgtcccacaatcagaaacctccgttgtggcagaggggccttcaccgccaccagggtgtcccgccagacagggagagactccagccttctgaggccatcctgaggagttcctgtttgggggtgtgagggaaaatcagcgcggattttaaaaagatggctgtggcctgcccggcgtggtgggaggggagctggtttcctggtgaactttctaaaaggaaaaataattttaagtaaaraaaaaagraaaaaaaggaagactaaacagaaaccagaactgaaacattcacctggtagcaaatgacacatgcacgcacacacacatacacgcacaagcgccagtgcgcacgtgtacacagaaaaacaaaaggacaagctttctgtgaaacaaaatatttacttagggataatgtggggattcacatgaattaaatagctgcaattggaagaagagggtcagggtcatttgttcaggttttctattgttttgtcctctctttcctctcctacccttccttctctttctctctcccctccttttaaatgcaaatgagtagaaatttcttctaccttccccagctgtttcttcccacctttagagttgtttagacaaggaggagtaagcaaggaacttgttctgctttctatcgtggtcacattggtgatgctcrggacctgccagggtcagaatttatggatatctgaaccctgaccccgttcattctctcagtccacttccaatccacatcagtttgttgtctgccttggagagaagagccaaaactggggtgggcgggtgggtggggagtgcaggatataaatgtgtaagtttttgttttttaaggtttttttcttagtgaattattcacccacagacatgagagaaaaaaagagggagggtgtgtggagaaaaaatgtttacagggctaacaagggatgatgtgtcatttagtatgttactaaaaagtgtggaaatgacttgattttaaggggagggtgaggccgaagagggaagcccaaagcagatcttaatgtttcaaaggagtgcagcccttcacagccatcagatatgagggcactgttctgtctggtgttgtagccatctcaagaacaaatcaacagcaacaaaagagaaagaataaatttttaaaatttaaccagtgtttctttgtttttactttcattcactgccttgtagctcggaaatggttcagctagactagctatggaagcagcctttggtacctgatagacatctggggatggagttgaaagggcaggcccctgccctgatgccacagacccttcagacttcagggaagtggttcattctgcactttttattctcctaattcacaccaaagctcatcacgcttacattttacccttttgtgtagcctcagtgggaaagggagttgggttactctttcagttaaacagtgtggtatggtttttctactatggccacccaagtagacagtttcctgacctgcagatttattggtctttaaaaaaaaaaactttattgaagtatcattaacataatttgcatgtgtttaaggtatacactttgataagctttgacataagatacatccatgaaaccgttatcacaatcagggtagtgaacatactctttatttccaaaagtttccttgaacccctaggtaatacctgtttcctccctcttcccatccatccccatttccacataaccactggtttgttttctatcactgtagattagtttgcattttcctgagtttttaataaatggaatcataacagtctgttatggcaattgggctttgagctaatacctgcagagctgtattctaatgtgatagatctggcagtgttgttgatatactgacacttctctgccttttctttgcctgtcactttaactttttcactcctgggcataaatcctcaagctacagaacaataggaattggtgaaacaaatcttccagcataacatcagtggtacacagggttttaatctctaaagaggcaatattagaaggagagaaaaaaacttgagtgtttatagagtgatatcagattccagggatcagcacattaccccagccatccctctcatgttctggctaaataataaaacctttaagttttgtccaaccataggtccttgaaataaccagttgattttgctctgtttaaggaatttggctgttttcacaggcaattgtgtggggaactgaaaaaaatgtgtggaagacttaatgcagccctccttagccactgaaaaacagcatgtggaatgcatatctaaagctatagctttgcaaacagccctgtgttgttaatggtgtcagaacctcactgcttacttaagccttacagattatttgaaagggctgctctgaaactttcggcagagcaaggatgcccatctagattttaatttaaaaaggaactgttcaggatcagctcacctaatggagatgctgtgtttctgcatggcattgtctagtagaaataggatgagtatctcccgtccatgtgggcaggtcagctaactgcacctgaacttgcctaagtcatctccccacagaattgtctgttccgtgataggattagccatgaaatgttggccatgattatgtggaacacagatcatcagcattggggctatttccagcaagactgtactaaaacacagtaacttgtaatccttatgtatctgaagggaattgttataaagaacagtaactgagaatgcacacctaagacataaaggaaactgtgcttttgaatggcatcaacattcatgagtttatttaaatgtctaccttgtgtggccctgatttaagtgaatcataagatgaaagccaaaaccaagagaccttaaaggttcaagattttgcaacaagatgtgcctgattctttgggatagattaccagcaaatgagaacattgccttccaagaatgctctttcagcaaaaatgggaaaagccattgatatcttctactctacagagactgaaaagggtacgttttttctttttttccttttgttttgttttgttttgttttgtttttttgtttttttttttttgagagggagccttgctctgttgcccaggctggagtgcaatggtgggatttcagctcactgcaacctctgtctgatggggtccagcgattctcctgcctcagcctcctgagcagctaggattacaggcacccaccaccatgaccagctaatatttgtatttttagtagagatggggtttcaccatgttggccaggctggtctcgaactcctgacctcgtgatctgcccacctcggcctcccaaagtgctgggactacaggcgtgagccactgcacccggccagggtaggttctttatgtcaaagagctgagagtcttaaaaagggtatatttagttggttataaggatgaacttggtggggacaaggagcttgaaagaagggagagaaactgctggggctaaagggatgcattcatccccaggatgtgggcatcaaggtcctgtgggttccaacttaagctccagcacaggccaccagagcagccaaaagctattaccaaggggagccctagcctggcttgggagcagtgaattgtacctcacactggcctgcctttacctctggagtttgttacatctgtcacttctggatactgttcatccacagctggctactacaacacagagatctgtaagtgacagccaggttttcattgctgttttcattttagttttaggaaaccaattaatacaaattcagggaagatttttggcagttactcaactgctagcagtactggggaagtcagcccactcgtggtcgcgaggggcacctggcccttccaagcttccccaattcatctacactcagtctccctgctccaccattcatcaagggttgcaaactcaaatgcccttagggacacggagagcagtgaaaggaagcaggccaggagaggaccgtattgaactgggagaacattccccatccagagttccagctgatttttgcctttgaggaatgtatgacagtgttttcatatttgccagttttttggaagaagctggaaaccagatatgtgacatctcccttctcctaatctcaaaacattgacaattgcaagagggagtagaactgcacaggcctgtgaagaaaaaggtgcacacctttgtaaatgattgaaaactaagacaaaaggagcactacgtaatcactgtactctagttggtgaagtttaagaggatgcaggtgaataatactaaaaccacggtacctgtgtacatatagatcagggaggatgaagagtaactatgatagaggaacctatcactacctcagtcagaaacagtgataaatcaggttaatagtatgcacccttgatatgatgtagtgggaatgatgcttcacctctgtggtcttccatacaaaaaccatgagaaacaggcggggcacagtggttcacacctgtaatctcagctgtttgggaggccacggtgggaagatcacttgaggccaggagtttgagaccagcctgggcaatatattgagaccaggtctcaaaaaaaaaaagccaggtgtggtggtgtgcacccgtagtcccagctacgtgggaggatcatctgagcccaggagttcaaggttgcaccatggcactccagcctgggcaacacaaagaccctatctctaaaaacaaatgagaaatacatcagataagcccaaactgggggacatgctttaaaaaatggccagtattcctcaaaaccatcaagaccaacaacaagaaaagtctaagaaactgtcatagaccagaggagtctaaggagatgtgacaagtgaatgtaatgtgatatcttggatagtatcctggaacagaaaaaggatatccgaaaaactcatgaaatccaaataaagaagttgagttcatagtaattgtccacatggtttcattattgtcacaagtgtgccatagtaatgtaagatgttaacaattggagaaagtgtgggtccataggaactctattaggaacttttccataaatctaaaaccattctaaaattatttaaaaaaatctgtacaggccacttaaccatgtgaaaagctactcagccttgctgataatgagaagtggcactgagatactatctcacctgtcaggttggcaaaaatccaaacagtgacaatatattctgtggacgaggctgtggggcaaggtatccttgaacatttatgggggtttaatctattttgcgttgctgtaaacgaagacccgaggctgggtaatttatacagaaaaaggtttatttggctcacagttctgatggctgggcatcaagattgggcatctgcacctggtaagggcctggggcagcttccactcaatggctgaaggcagaaagtgggctggagtgtgcagagatgacacagatgaagtgagagcgggtaggtgccaggctctttaacaaccagctctggggggactaagagaactcactcactgtccccacctcgggggacaatataataaatatattaaatatatcaggatgatttacatgcactgccctgatatatttaatagcacaggaatatacacaagagagtgacagatttgaatggtcccaaatgcagctgcaatgctagcccacccttttatgggaaaactgattctgacagttttccagactgtgcacacatttaaaattccacacccttgcttcagccagcttcctcctggaaagcaaagccagccaggtgagtgtttatgaaggcccaactgacccatcagcccagaagccaggccctcccagtgccaatggtcgcaagctgggggcaagtgcttggggagtgggccagttggcatccgaaacagggcctggtggagcagcatgggagcaactggtagtagtaaaaggaaagaaacagctgagtctgtttttaacattcattaatccaaaaatacataaaaattatttctgctccaggttcttggactctcaagaagggggtagctgccagccttgagcatctgatatgatacctaagtgctcactcatattatctcagaggacagggagatgaggaagtgagtctcaaaccagggaaatcagggccatgccctgcagaggccctgtggggggacttggcccacaacactctggcttttgttgccagaggaaatggggcaatcacaagagtgggccacccttaggcaattcctcctatacagctaggccccagggttgggagagttctttccctgctcatggctgaatttcccgagagccaggctgaccagaccagagacagcccaggagagaaaggcccgggaaggcaggggctcgggcctttctccctctccttcttggcccaaatccacttccaggaaacccagaggtaggaccctgcagccagccaggtgctcatcggggctgtcacatctccacatcagtccgcaccgccacccaggaagccagggccagtcaccgtctgcagccttgttattgcatgccagctgggtgcataggccagggcccctggccaacaccaaggcctgctccaggaggggcctgggccacaggctgcaaccgctgctgggactgccagatgtgatggagctccttgaattgctccaccatgcggtctttgaggtctgggtttgagatctgtagccggatactatcagctgaccaagatagctcccctgagaacatctccagcagcagtcgagctgctacaggcaccacctgggaggcaaagaggagatgagacagggagacctgtggcagggctgccagatccagctgtgcatgaggacagccatcaggggtgagtaatagaccgcattctccggctctgagccttgatggtctctggccgccaagttcacactgctcagggagccctgagcctccagcctggggcaagggcctagccccaggattccccagttttcaagccaaggccgactttgggataggggagatgtacctgtacagtaatgagcttcttctctcggggtttgcggtcaggccattcttccccaaagcagaagaagatctcgaagggtggtggggtgttggtctggcccttttggaacaggatgagctctgcatcaaaatcaaggtccctagtcag

SEQ ID NO: 8931 - DNA, 13818 bp, Homo sapiens
gaggctgagatggaaggattgcttgagcccaagaagttgaggctgcagtgagctatgatggtgccactgcactccaacctggatgacagaacaagaaactgtctcaaaaaaaaaaaaataaaaaaaaaaaaaaggtcaggcacggtggctcaggcctgtaatcccagcactttgggaggccaaggtgggaggattacttgagcccaggcagtcaagaccagcctgggcaacacaaggagaccctgtctctaaaaaaaattttaaaaattagccaggtgtggtggcacatgcctgtagtcccagttactcaggaggctgacaagggaggatcgcttgagcctgggaggtcaaagctgcagtagccatgtttgtgccactgcactccagcctggataacagaacgagaccctgtctccctgtctcaaaatattaatgtgtgtgtgcgtgcgtgtgtgtgtgtgtgtgtgtgtgtgtgttttggtctccatcctggctcctggccagacctcctaaagcccttgtaatttcctaaatgataaagtgaagggagcttttgttattcataacaagctcttttcaaccacaactgagtttatgttagtaagttgacttttagaaagcccctaaggttggggtttgttgccaaggtaggcaactgtgtgattagagagttagaacttttagctccaaccctctgacctccaactaatggctattgaatcaagtatgcctgcataatgaagcctccataaaaaaaaacaaaaaagatgagggttggagagctgccaggttgatgaacacatggaggtgcagggaggtgcccagagaggacaagaaagctccaaatcccccttccccgatactttgtccggagcaactcttccatctgactgttcctaagttttatccttcataataaactagctaacataagtaaagtgtttacctgagttctgcgtgctattccagcgaattactgagccagaagagggagtcataaaaacagttaggaggcctggacttgtttgtgattggtatctggagtgggggcagccttgtagaactgagcccttcaacttggggattagataactggtaattatgggtagagtgtcagaactgaattaaactgcaggactcccagttaatatctaccaagaactgaagaattgattggtgtgggagaagtctccacatgattggtgtaagaagtggtgttcttggccaggcgcagtggctcacgcctgtaatcccagcactttgggaggccgaggcgggccgatcatgaggtcaggagattgagaccatcctggctaacatggtgaaaccctgtctctactaaaaatacaaaaaattagccaggcatggtggcgggtgcctgtagtcccagctactcgggaggctgaggcaggagaatcacttgaacctgggaggtggaggttgcagtgagcagagactgcaccactgcactccagcctggccaacagagcaagactccatctcaaaacaaaataaaacaaacaaacaaaaaaaactgagattctttgcaaagagcctggaataacttccttttagtcctggactataatgatgatgataaatatacctcgatgtaaccctgagatcccaagattcactagcccttgaataaaaaaaaggaaaaagaaaaaaacagtatattttttcgttttgcaaatcacagttcccttattaagatggaattgctgccaattacagagaagctatttgcctaagccaaaaatccatgaggttcacatggacttatagttacacaaattagaaacaaatgttatatttaaaaccatagagaaatgcccaggtgatgaaagctggggtgaaggagtctgcacattcatttcaaactgttaaaggatttgtgggccatgcaatggtcccttgcattagagaagtcaaagagctttgtgcaatcctctcctgtctgtgatctggaagacacgtgctcatcacagagctccagctgctccgagactttactcctttcttcagctgcacgcactgctctctcgcttttgttaggaattgactaattcctcctcttcctcttcctcctcctccttgccatctctaggcccagtcagcatctcttgttcatcctctgatcccatgtccagctatggttctggattcaacactagcagcaacagtggcgctgactccactttaggatcaataaatatttttctggctaggcgcagtggctcacatctataatctcagtactttgggaggccaaggtgggtggatcacaaggtcaagagatcgagaccatcttggccaacatggtgaaacctcgtctccactaaaattacaaaaattagttgaacatggtggtgcgcacctgtagtcccagctacttgggaggctgaggcaggagagtcgcttgaacccaggatgtggaggttgaagtgagccaagatcgcgccactgcactccagtctagcgacagatggagactctgtctcaaaaaaaaaaaaataagtatttttctttctagccgtatatccaccttacatggtccctcaactccccaagcccactctgcctgccccatctcctccttccacatcctctcctcaacctagcacttggttggcaatgccttcctcgatcctctgccaaagaccctctagccagtgcttaccctgtctgttctctctctttacccaaagaaatacataaagtttgaccagaatggaaacagagatatcagtgaaaaaaggtgatttggggaagtgtgcaggcctaggaagacagaggcttgttcctttgcttgcttaaaatctttgatcaaacggccaggcgtggtggctcacacctgtaatcccagcactttgggagggcgaggtgggcgaatcatgagatcaggagttcaagaccagcctggccaacatagtaaaaccccgtctcactaaaaatacaaaaaattagccagctgggcgtggtggcaggtgcctgtaatcccagctactctggaggctgaggcaggagaatcacttgaacccgggaggtggaggttgcagtgagtggagattgcaccactgcactctagcctgagtgacagagtgagactccatctcaaaaaaaagaaaagaaatctttgctcaaatatcactttttcagagaacgcttctctaaccactctatttattttattattttattgtattttttgagacagggtctcactctgttgcccagactggagtgtaatggcacggtcatggctcactgcagccttgatctcctgggctcaagcgatcctctcacttcagcctcccaagtggctaggaccacaggcgtaagccaccgtgtctggccagaccaccatatttaaaactggggacaagtcaggctcacacctgtaatcccagcactttgggaggccaaggtgggaggatcacaaggttaggagttcaagaccagcctggccaacttggtgaaaccccatctctactaaaaatacaaaaattagccgggtatagtggtgatcgcctgtaatcccagctattcgttaggctgaggcaggagaatcgcttgaacccgggaggcagaggttgcagtgagctgagattgtgccactgcactccagcctgggcaacagagcgagattctgtctcaacaaaaaaagctgggtgcagtggctcacgcctgtaatcctagcactttgggagtccgaggtgggtagatcacctaaggtcaggagttcaagaccagcctggtcaacatggtgaaaccccgcctctacaaaaatacaaaaattagctaggtatgatggcaggtggctgtaatcccagctactcggaaggctgaggcaggagaatcgcttgaacccaggaggcggaggttacagtgagctgagatcaagccattgcactctagcctgggcgacagagtgagactccgtttaaaaaaaaaacaaaaaacaaaaaacaaaaaactggggaccattggcaataatactcctatgtcccctcttccctactttgttttcctccataggcacctggcgccttttttttttttttttttttttttttgagacggagtctcactctgttgcccaggctggagtgcaatggcgcgatctcagctcactgcaacctctgcctcccgggtttaagcgattcgcctgcgtcagcctcctgagcagctgggattacaggcacgcaccaccaggccctgctaatttttgtatttttagtagagatggggtttcaccatgttggtcaggctggtctccaactcctgaccttgtgatccgcctgccccagcctcccaaagtgctgtgattacaggcgtgagccactgcgcctggccacctagcacctttaatatacttatttatttgtattgtctgccttccccaattagatcaaccatgaagacaagagttttcatttgttgggttctctgggcctagaggcatgtctggcatatagtaagcattcagtaaatatctgttgagtgaacgtatgaataaagaagtgagttcctcccagcaggcactgagaacattgggagtacagggttgcagctctctctgcagcaggagaatgtagctgcaataaagggaagtcaagaagccagagtccagccaggtgcagtggctcatgcctgtaatcccagcactttgggaggctgaggtgggtggatcacaaggtcaagagatagagaccatcctggccaacatggcgaaaccccatctgtactaaaaatacaaaaattagctgggcgtggtggtgggcgcctgtagtcccagctactcaggaggctgaggtaggagaattgcttgaacccaggaggcagtggttgcagtgagccgagattgcaccattgcactcccgcctgggcgacagagcaagactccgactcaaaaaaaaaaaaaaaagcagcagcagcagccagaggccactccagcatctcccctacctggcttgggtcagggagagggcagtgagaagtgaaaactcccagctacagaaaaggaaatatgttggggggaagggagaaggaaaggtgtcttcatcaatgccggggcagggtagatggagccctgggcagggagtttggaccaggaaatctcaatgagggaaatgtgctgtcctcacctctccaagaagcgactggccaaacagagtgacagaggggataaaggttatgcctagggaggcatgtgtcagaggctatcatccactctgttgaacccacagtgaccagcaccaccatcacacaaacatgcctgcatgtgtgcacgcacgcgcagtgtgcaaacctgatgtcagcctcactccctggctcttctgtccacaaacgctgtttctttaagtaccactttcagttcctccaaagaatctacttaaactcttaaattcctgatctctatagattttactaaagatttcaaaggagataagatgagagggttacgttgcacattctaaagcaaacaaattaaaatgttttgttagacatttccatatttttaagggcctccttggagctgccaggctgggagtgaggtttctctccctttctaaaccctgtgcccatcttgtcaccctcctggagctgccagcagacttcagattcttctccgatctacagagcagaaaaattcagccagcccttccttgtcttcctatccacagctgcctgcccagactcatgaaacctgacaaaatgcaaggtcttatcattacctgaaccttggacctgttcaaaaatactagttcctgagaataaatatccctggtgtcttcctgcccttcctgcacacctccagtggcttatcaaaatatttgtttcatgcgcacactgggctctcatttaagaggaatttgggagaatgttattttctaatctgcatttcacaccaggctccccctccttcctggggtgctagtgtcagcagaacctgatggggaagtgaggtctgggaggcagaggaggaaggaatgaggggaaaggggaagtttgggaggaaggcttctgagaagactggtgggagagaaggagagcctgcagacagaggcctccagcttggtctgtctccccacctctaccagcatctgctgagctatgagccaaaccagggatttacagggtagggagggtgggataggcagcrgcattagatcrgaggaatgagatggacagacctgggctgtgggctaggagggcagtcagctggcctagggtagcccgggctggtgtcagggtaaggagaggaagggagggatgagggctgattaatttttttcaccccacaggaggaaaagctttcrgactgctgaaggcccagcaggaagagaggctggatgagatcaacaaggtagaaggaagaactaagggggcagagccagggggatggggcgtggatggggagggcctaccctggctcttattttcccctccatagcaattcctagacgatcccaaatatagcagtgatgaggatctgccctccaaactggaaggcttcaaaggtgagggggaaactgtaggcggtggagacagggctgggggtaggagggttaggatttccacaagaacaaggcaggaacagcagagataaaaagtttacttttgtggtagcaaaaggggaacctgcctttattgccctcctgccacactgcggtccctttcccgggcctgcctctctcagcatcccctctagctccttacamcctagcggggcccctcaactccccaaccccacttcctctgcctgcccctcctcctccttccacgttgtctcctccacctagcagttggttggcaaccccttcctcagtcccckgctgaaaaccctcsagtcagcgcttatcccttctgctctctcccctcacccagagaaatacatggagtttgaccttaatggaaatggcgatattggtgagaaaygggtgatttgcgggggcagggtggtgtgcaggcctaagaagacagaggtctctcctacatgctccattcctcatgatttgggagggggcccacctaccacagtgggaggaaggagaatggggatgcggaagtgggagaggagagagagggtctccccaccttctccccatccccatcctctgcccccagatatcatgtccctgaaacgaatgctggagaaacttggagtccccaagactcacctagagctaaagaaattaattggagaggtgtccagtggctccggggagacgttcagctaccctgactttctcaggatgatgctgggcaagagatctgccatcctaaaaatgtgagtgtcaatttccaacctcccctgtacttacctgttttctcctcccccatccctacccttgtccacaggctcaacatttctacacgttgcccatcatcccttcttccatccttagagggacccttccaaggtcccgaccccatccctatccatagtcctggtccccagaaactccaacccctgcccttcctcttcccccttccaccctcacatccccatccccttctagcctttcctagcaccctatgatttattcccttgagaggagtgttccctgatccctgtgcctcttcccatctcaaccaggatcctgatgtatgaggaaaaagcgagagaaaaggaaaagccaacaggccccccagccaagaaagctatctctgagttgccctgatttgaagggaaaagggatgatgggattgaaggggcttctaatgacccagatayggaaacagaagacaaaattgtaagccagagtcaacaaattaaataaattaccccctcctccagatcaagtcagcttagtttttatttgggtgatttttttcctgggtttgggaaggagagacaggtcttgagggaaaggtggcaaggatttggccatatgaacaatccatcaacaacgctatagtgtgtccactacagcagatggtttcacgcaccaagggggattccagctgtgtaagacagccttaacctcaaagaatgcaggcaggacaaaaacacatgtccaaacaaggtactcaggcccatgacagatttcatgaagagcaaggaataccatgaaccaacattctccaccactataagctttgtcactttgacaaatcactcagcctctgtgaggcttttttctaaaaatggggataaagtgacctatgctattgtgcctgacatatcataagccctcaataatgtttaaaacttgaatgagccggggccgatggcttatgcctgtaatcccagcactttgggaggatggggtgggcagatcacctgaggtcaggagttcgagaccagcctgacgaacatgaagaaaccccgtctctactaaaaatacaaaattagcctggtgtggtggcgcatgcctgtaatcccagctacttgggaagctgaggcaggagaatctcttgaacccaggaggtggaggttgtggtgatccgagatcgcatcattgcactccagcctgggcaactaaaaagcgaactccgtctcaaaaaaaaaaaaaccgaacatacaaacaaacaaaaaacacttgaatgggtagatgaatgaaagaactggtgctattaaataaagcaaagaatttacagctgggcgtggtggctcacgcctgtaatcccagcacttcaggaggccgaagcgggcagattacctgaaatcaggagttggagaccagcctggccaacatggtgaaaccccatctctactaaaatacaaaaaattagctgggcatggtggcaggtgcctgtaatcccagctactcgggagactgaggcaggagaatcgcttgaacccgggaggtggaggttgcggtgagccgagatcacgccatggcactccagcctgggtgacaagagtgagactctgtctcaaaaaaaaaaaaaaaaaaaaaaaaagactggaaggagaaactcattggagacaatgactatggacatcccttttaagaattttgctgcaaagggtaacaaaacggtatgtgtggtagccggccggggagaagggagaagagaatcattttggaagtttgaaaacagaagtcatcttaaatcttactgagcctctgactaaaattctcatctgatttctgcaaacttttctgccttcacttttcataatgaataagccgcctcctttatttagccatatcagcctaggcacaggcccccaaactcatgcctccactaatctgttctctgcacctgagatgtacaccttcttctgaaacttgggtaagttctaactcgttcttcatatctatttatttatatatttttgacagatatctactccgatcattcttcatatcatttttttttttttttcctgagatggagtctcatgttggccaggctggtctccaactcctgacctcaggtgacccacccaccttggcctctcaaagtgctgggattacaggcgtgagccactgctcccgctcccggccctttttttcttctttttcttttttttttttttttgagacgtagtctcactctgtcgctaggctggagtgcagtggcgtgatctcagctcactgcaacctccgtctcccaggttcaagcgattctcctgcctcagcctcccaagtagctgagactacaggcacgcgccaccagtccagctaatttttgtatttttagtagagacggggttttgccatgttggccaggatggtctccatttcttgaccttgtgatctgcccgcctcagcctcccaaagtgccaggactacaggcataagccaccacgcccggcctcatatctcttaataagagtttttctagaaacatttctcaatcaccccaggcataatcatattttatttctctacttctttcttttttttttttttttgagatagagtttcgctcttgttgcccaggctggagtgcaatggcacgatcttggctcaccacaacctccgcctcccaggttcaagcgattctcccgactcagcctcccgagtagctgggatcataggcatgcgccaccacgcctgggtaattgtatttttagtagagacggggtttctccatgttggtcaggctggtctcgaactcgtgacctcaggtgatccgcccgcctgagcctcccaaagtgctgggattacaggcgtgagccaccgcgcccatccttctttttttttttttttttttttttttgagacgtagtcttgctctgtcacccaggctggagtgcaacctccgcctccctggttcaaggaattctctgcctcagcttcccgagtagttgggattacaggcgcccgccaccacgtagggcaaatttttgtatttttagtagaaatggggtttcatcatgttggccaggctggtcttgaactcctgatctcgtgatccacctgcctaggcctcccaaagtgctgggattacaggcgtgagccaccgcgccaggccttatttctctacttctataatatcctgtgcattatctccagcgccttcaaatcatagtcattgaatgatctgttgaatgggtataactctgatgggagcagagagttctagaatcgggtagtaagagacaaaggagggtaacagtactgcatttcacaaaatgaaacccattgttaagaaattacaaattcccaataatttcaaatataaaaatttattcatgaaaattataggttataaaattaaatgtccgtcttagtcgatggttgcccatattttgatgaacgagtcattcctagcctatctttgttcaaatgatttgcatacattatgcaaataggtagaactgcccgaagaatgcctacgctgcgtggtgcggacgaaacgcttcccggggcctttggattggtctgtctagccacctcatttgcatgacgtaatataataactggaaggccccgcccctctggtgcatttccccgctccaaccacctcctcaaactcacggcaaagggatgcgagagctggaactcttaccaggcctgcggaaactcagccctccggcagctaatcccgcccgccagcccccgtcctctctctctttctccctagctgaaggcgccacgggccgtgtgtcgttgccttccacttttggcgtcccaacgtctctccgctcccatctttctactaacgtccgacgcacgctccgcctctttctcccacattcgtcgtgtaaattctgcgtcccaaccgcccagccgacctgcaccgcattcccgccccctcaacacggctcaacggccgacgctgggggcccgcctccttagccaatcggggtcctagtgcccttaagtccctcctctttatgcaaataacctccgcatgctccgcgcgcccggcccttttttttttttttttaaactaaagacagccctggaagtagagggttagggtagaaagtgccccgccctttatgcaaattaaggggcgtgtctaggcgcggagggaggtgggaggtgggagggggtgctcccgggggcggcggttgcccggatgggccgttagtcggggctcagccgcggagtgagcgagggagacgggaggagccgaacccggcgccatccgccgccatcctcccccgccccaccgccatcccgtcccggggagcccctaggcccgggtcccggatccccgcgcacccggccaggtgagtctgggtgaaccgtgcgctgacgcccttttccggcgcgggagaggtggtggcggtggcggtggcggcggcggcggcggtggtgggccggggggaggagaagctgccattagccgccgccattttgtcctcctgctgccgggcctgcttgcccctccccctccggtacctctactccgggacccgcacctccggcagttcattcaggatccgtagtctgcccctaaccacccaccgtcttggcttcagggggtgacccctgcgcctgggtccgtaactccctaccctccgctgcgctcctggcttttcacccccatttgtgggccccctccccggctgccgccccgtggtgggccgcgcccgacggttctctcggaagggcgcttttcctccatattggaccccctcctatcatccagcgctgtgttcccccctctggacgcccctcttcgtgtcgagccactcccactctagaatcctgcttttatcccagcatctttgctttctatgttgctcagtcgccctatgtctgctttttcatttttcctgttcctcgtctcctttctcccccaaccccgtttttcttcttgggcctctgcccccttacttcgttgtctacatcctttttttttttgccattcctgtttccatatattttccacctgctttcgtattcattattttctgttagttttggtctattcgctacatgactcttgtattcgttttcccttcatatatttatcttcacagattggcctcctcaaacacctacgaagcaacatccatcttatctctagcttgtcataaagttctttctccccaattttagctttcattctgggcctgtctggatttccctgctttcttccccactatttctcatctctttacactgttcccgtccataaacgaatgcctggtcactctggaatggactgagagacctgtcgtccggcttgcttagggagctggaggtatcgagtaaagaaacactggtgatggacatttttaatgaggataggaaaacgaagatggctctggccttggccctctgttttctggcccatggttacagggtgctaaggtggctccataatgctttttctcagttcttcatatggtaaaacagtatttcatctggaggcgattttttccaggagccaatacaggagcaagtttaggaaaagatgggatatttcaaatacttgaggttcctatagcctgggagtatgtacagccctagttgttctatgaggatttctctggtaccaacccccattccggctgagcaagctcataaaatccttaaactcccagcataccttcctgcaaaccttcccagatggacacgaggctgctgggctgggagcctggggtacagggccctgggggcatgattagggagcttgtgtccaataaacagggaatctaaagtgttgtttcttcttctctgatggaattgtatgcttcttttttagttttctcttgcttgaatttgtcctgttgtaagtctctgaaacgattttggtggagagagaagagattattacttgtagggaattactctttgtagacaggcacaaagggcagagtgtttatactaggaggatgctggatttttacttagatttccttgacaaaggtgtctgggggaaaggagggaacatggcatttgagctatgagggagctaagtagatcatggttgcttaagaagagtgggcagtttacatagactggaggaaaagacaccagagggcctcatatctgagtccctaatgataatgcaatggagtttttaagtttctgttatggtctgtacaggggacagagactgagacacttgctgtctggcccacaggctctggcacgttttgggggaggtgcctgcaggacccaacatactcaatgagcttccagcgcaatgtccgatcgctcggggccgactgccaagggaaaggatggaaagaagtattcctcgctcaacctgtttgatacgtataagggcaagtccttagagatccagaaacccgctggtgagagtcctgcaaagatgcttctgatggttgaaagctaggcatgcatggggcatacgttttagagctctttaaagggaagtggctgtagtagaaataccaaaagactagaggagatttcccaactttac

SEQ ID NO: 8932 - DNA, 17797 bp, Homo sapiens
agcagcacccagaacctcgtagtagcgctgcaagaagggctggaggcgactctccagccgctgtagctcctggagcacctcgacatactccgcaggggaaggatggctgtggacaaacccaaggggcaatgagccaaagccttcctcagattcccaccctcacagtcaacagggaccacatgtgccctctttctccctggtctcccagagccctggcccaatccttctctggaccagcagagcttctattctcttcaacctccgcctcccaggttcaaacgattctcctgcctctgcctcccaagtagctgggattaagttgcctgccaccacacccggctaatttttgttttttttttttttttttttttttgagacagagtctcgctctatcacccaggctggagtgcagtggtgcgacctcagctcactgcaagctccgtctcctgggttcacaccattctcctgactcagcctcccgagtagctgggactacaggtgcccgccaccatgcccagctaattttttgtatttttagtagagacggggtttcatcatgttagccaggatagtctcgatctcttgacctcatgatccacccgcctcggcctcccaaagtgctgggattacaggcgtgagccactgtgcccggcctgtattttttagtagagacagggtttcaccatgttggccaggctggtctcgaactcctgacctcaggtgatctgcccgcctctgcctcccaaagtgctgagattacaggcatgagccactgcacccagccaaagcttctattctttactcccacccatgagaggatagggagaagaaaatgaactgctcccaccctccccaccacaatcctgcacctacaatggtgaaagactaattctaagaaagagagcaggccttcgtgaactcagaggagaattccgatcaggctcaggagataccatttggatttccttgccatagggagagcagcagttcttctcagctgcctgtcctagcgtcatttacctataccgagagagcccctcctcgcccctcaatgctaacccttcaactaagacctccaagtaatcctttccctcccttgccatggttcatttccttctccccatacttcacttaggattccccacccactaaagattccctccatctctcacttgggtgcatttgtttccggggcaggtgttgggcccgctggggctgggccaggagtgagctccgggttctgggctggggcacgctcctccacttcttctgcctccatgggctcccggggaggtgcttcactttcaactggttctgatgtttgagagctcaaggctactggctccggggtcacagccggtggctgcgggggcggctgactgtgctgcggttggggccctcctcgacactgaaggtaggggagagtcaggataccaaaggcagggtaagactgctgcagaggattactctacaggagactgaacagagaaagtatcctaactagactccctgaaggcatggctctgcaattttatctccgactcgctagcaactagcataagactgacacaaattagatgcataataagcatctgtaatttttttttttttttttgagacagagtctcgctctgttgcccaggctggagtgcagtggcatgatctcagctcactgtaacctccgcctcccaggttcaagaaattctcttgcctcagccttctaagtagccaggcctacaggcgcgtgccaccacacccaactaatttttgtacttgtagtagagacagggtttcaccatgttggccaggctggattggaactcctgaccacacgttatccccctgccatggcgacccaaagtgctgggattacaggcaggagccaccacacccggccacagcatctgtaatatttgtaaataaatttctaacaaagagtagagattgtggtttcctttcctccacaagttggtttcccagcctccacaagttaagagagtagaatcctttaattgaaaagagatgccatgagactaagtctgaaacaaactccccagataccaggcaccaagaggattggcagaaatgagagagcctcacaaagatactttttctgcccaaaagaatgaatactgcagagaagactagattatgaaggccaaaccctgtggatgtggccagtgaagccctaactcccaggctgagagaaaagggagagggagggtggagagagaccctagccagccttgcccacttacctccatccgggatagtaaggtctgtatatccctgatcatgtgctgagccatcaccagccgtacccggggctcactctacaatgagagaaggtttatcagggtaggttacagatgaagccatgagttctaccacctactaaatcaggtcccagccatctctcagccaggtccaccccacctcccagcctccttctcccagatccccttccctgaccctcggaggcccctcaatacctgaatcggggcctgttccatgttgatgtgaacatccacagcagagccgtcactctggggaaagggtaagggaagttgttctgggagaagccaacactaaggcctccacacctccaattcattccctggagccctacctccttttctccttaaagactgagaccaatagcacaccacagggccccctgaacccaatctaaagatggaagcatctatcttattaattccctggtgctaccacaaccaaagctacccacaaaagccctcccctgtggaacataagcttacaggaagattgaaggttccaaccatgacatagctgttggcattccggtcatgaacagaggccccaggcccccgagtaccagggggggatcccccaccatgagtggctgaggcagaccccgtcccagaagatgccccagaagggaggtgagtctgaggaggagcccgttccaccaggtggataacctttcccccaacatctgcagaaaaatagacacacaccaaaacatagtatgaacaggtaaacccatggcctcagttcatccctccagacagtagccccaacctctgaactgcctccccagcccccttactgtattcctgaagcttcttatcatcttgcagaactcgtccctggtaaatgagccgttgtttttcagatgggatgctgacagaggcagcaatgtgctccttaaactcttttacattcatctgaaaagaagaggcatgcacaggaatggaaagaatggaggaaagaggaagaacaaagacagacaaccgagttgtggaggtgaggggtaaaaaccaccacagaatcactacccgtttgtcttgaccgtgagatcattactgtgcaaacccttaaactaaagtaacagctgtcaaaatacagacaataaatttggcttggcgcggtggctcacacctgtaatcccagcactttgggaggccaaggcaggcagatcacattaggtcaggagttcgagaccagcctggccaacatggtaaaaccccttttttaccaaaaatacaaaaaaataagccaggcatggtggtcgcctgtaatcccagctactagggaggctgaagcaagagaatcacttgaattcgggaggcggaggttgcagtgagccgagatcgcatcactacactctagcctgggtgacagagagggactccatctcaaaaaattaaataaataaacttaatgaagctcaggttatagatccaggaaaaataacacggatgaaaaacaaaaaaaaaacacatggacattatattatctgtctggcatccaagggagtatgtgtctagagacatcagtgacccctttccaaacacaagatgataccagtttatttaccagactctcctgtgatttccaagattaaaaaatggcaaagaagatggggtctggtatcaggttaatgaagaaagactaagaagataagaaagcaaaaaaggtcccagcacagtggctcacacctgtaatcccagcactttgggaggccgaggcaggtggatcacctgaggtcaggagttcaagaccagcctggccaacacggtaaaaccctgtctctactaaaaatacaaaaattagccgggcgtggtagtaggcgtcgtctgtaatcccagatactcaggaggctgaggcaggaaaattgcttgaacccaggaggcagaggttgcagtgagctgagattgcgccccagccctccatcctgggcaacaagagcaaaactccatctcaaaaaaaaaaaaaaaagcaaaaagagaaatatttttcctaactacaaactgactcttgggaagtaccagagtatttatatacatctaatcacaagtctatatatggctttcttatatccaggtaatatcacattttagaaaaccatggaccaccccacatgcaatttgtctccaagtattacaggagtaaagacacagatagctatgtccaaggctttaagctcaagagactcaagctatgccataaaaattagtaatttcactcaacagtctatcaaggacctatctccattatgggttctgatttctaccctttaaaaacacagcatagacctgaccaatgtctatcagtaagacacacttgcttagggttcctgtgctgtttcccttcccaaaggccagagccatgcctgtccctttgggttggggtccacccatgatgatgacacacagattcttccttcctctgtatttccctctgcattaagttctatccatgtggaggacagaacaaaatcagcctcactcacaaaacatcagaaaacgttctactggaatacgaacaaagggatcaataaaaagaaaatctgaggccaggtgcggtggctcatgcctgtaataccagcactttgggaggccgaggagggcacatcacctgaggtaaggagttcgagaccagcctgaccaacatggtgaaaccccgtctctactaaaaatacaaaaatcagctgggtatagtggcacacgcctataatcccagctactcaggaggctgagataggaaaatcgcttgaacccaagaggtggaagtttcagtgagtcgagatcgcgccactgcactccagcctggaagacagggcgtgactccatctcaaaaaaaagaaaaaaaaagaaaatctggtgaccagaaaatcaagctcatctctcaggctaaggggcctaaacgaggaaaagctaaaggtgtcttccagaactagtgaggtgtctcacctgggcccccacaataaaggtacgagtttgagagtccaaggtcttcaccaacacctccaagctgtcaggctcctccacagcggtactggtactatcattaggctccatggccgacaggtctctaaagaagaacgaaggaaggaaggcccgctgttgcccagaccagagtgtacccgaaagactccctagcattaatccctgccccaatacctaaaaagtttctcctgcacacacacacattcacacctgtccccatcccccttctgattccggggcacagggagagaaacacaaagggcaggagatcgacggcttagggagctggaggacgagaggtgggaggggctccacgacgccaatcacaataagcagggagccagtcagattaggaaggaagcacgagaccagagactagtgtcatcaccggtcacggcaggacaagcgccccagaggtcggaaaatcctgggacaacgcgaaagcggtggtcgccccacactctgcggagaaagtggtttcgcgcacgcgcgccacgcccatcgaaccctcctaactcactatagacccgaaacggcactcacggggcgacagacctgctagctgactgcccgcgtctactgccttcccacggtgttccagcagaacggcacaactaacccacagccaaacacacacacacacacacacacacacacacacacacacacacccaccaccccgcggctccgcccccgacttccccacggaccgtcacttccggtctcccccaaacctgccaccgacggccacttccgtttccccgatagtatttggggatctcgaagcgatacttccggctccccccaggtccccaagctttacttttgtggggcacgacgagaaagtccgcagccccaaacagtgagtttctgagggcgagtcgggccggggccggcctakgtgggagggagccgagcaccccgaggagccgccaccgctgtcgcccgggggaccgtactacgcctgcgtgcgtcgcactacggatgcgtggacacttaagcatcgccccaccccctcccccctctggcggcgttcacgtctgtgcgcgcgcttgagcgctagaagattgaggtggctaccgtaaatgcctgaaaaacagtcaccagctgggactctaccactgcctcgagaggggctatggacggtcgtatggaccttggactttggagatgggggattatgccacattcatctatgtttaaatcttggcaggctgataatttcaggcggcactgtcctagccagctaaaactcttctccaccctattgccctcgctgcgccctttcttctgtgcctccggaagttactctttcagtaggcgtttgggggcggcactggtcaattttgttctcggttgcttggttgggctagatttcggttctgccgggtgggcgttttaagggctgtgggcgtcacattcgtcggtgtgtggccaaggggacatgacacgttttaggaaaagtaaacgtgctactaagttgcacgacttgtcaagaaaagaggcgcttccgagtttgagaattgggagcaaatggagtccgagtggacagaaagacaagaccctgaccgtggggaatttaaaggccggccagcgtgcttccgaaggccgggggtggaggcattacckcctctccgtgccctcttctcttaacctgccctgggccaagggcctcggccccgcgaaactgcgagtcctccagaaagacacatcgctgttggggtgtccaacctttctgggattcgtagtttatacccaggtcctggttatattttagttaagagttctaataagcagctgtttaatgagcacttgtgccagcccatatactacgggttttgtgtattattttaaaaagccttttaacgagcttttaacattttttaagtgagtacacttagacgaacataagtgtcagaattgacaaatccaggcctacaggactccagatcgagcacttgtactttactgccccaataaaaagctgttaacattttagcttatttttttgagagagggtctcgctttgtcgcccaggctggagtgcagtggcgcaatcacaactcactgtagcctctgcctcccgagcccaaccgatcttcccacctcagcctccctagtagggaccacagatgcacaccaccacacctggctaattttatttttatagagatggggtcttgctatgttgcccagcctggtcttgcagacttggcctcccaaagtgctgggattataggtgtgagctactgtgcctaaccacattttagctttttattacaaaaattttcggccgggcgcagtgactcacacttgggaggatgaggcgggtggatcacgaggtcaggagttcaagaccagcctggccaaaatggtgaaaccccatctctactaaaaatacaaaaattagcctggcgtggtggcgggcgcctgtaatcccagctacttgggaggctgaggcagagaattgctttgaacccgggaggtggagattgcagtgagccaagatcgcgccactgcactccagcttgggcaacagaacgagactcccatctcaaaaaaaaaaaaaaaaaaatkcaaacattacaccaaaatagaacagtattaataaactctaatatactggtcacccaaattttgtttgttttttaactaaatcgcaagcctcagccctcggcaaattttttgtggcagtccatgggatataaatttatcaagctaggtgtggtggctcatgcctgtaatcccaacactttaggaggctaaggtgggccgactgcttgagctcaggagtttaataccagcctggggcaacatggtgaaactccgtgtctacaaaaaattagctaggcgtgatggcgtgcacctatacctcctactcgggaatcatctgagccggggaagtcaaagtcatgcctgggcgacagagtgagaccctgtcttaaaaataaataagtaaataaataatctatcgaggaagatccatctctcacagcattaactgctccagtcacttggtgctatccaaggacaacctatttggcaattcttactgcctattatttgagaacttattacccaccagaaactaagtgctttgcaaacattactattaattatagcaaatatatactttggamttaccatgtgcaagtctttgctaagggctttatgtgcattatttcatttaatcctrtaagattgatgatttgccaattttacagatgaaaaaacagacatagcagttaggggttggtggtgttttgtttgtttggagacagagtctctgtcgcccaagctggagtgcagtggcacaatcagggctcattgcagcctcgacatcccaggctcaagcaatcctccctcctcagcctccctagtagctgggactacaggcgtgtgccaccacatcggctaatttttgtaytttttgtagagacagagttttgccatgtagcccaggctggttttgaactcctgggctcaagccatccgcccaccttggcctctcaaagtgctgagattacaggcatgagctacctgccctgcctgtagttagggtttggacacattctgcctgacaccaacatctatcctctctaacagccagattacatagcctctttgtagtaataaatgttgagtgaatgtgtcagtgaacactgccagggtatacatatttttctaattgtaaactaaagagagcaatccaccgtgccccagcacctgcatcatacctgttctaaagcatttaccaagttgtattgcaatggtttgtctacacagctagttttccctctaacgacttcttcaagatcaggggctatgtcttattcgtttttttatgtccccggggattagctagttcttgggaaacaactgggacttgggattcaaaacagtttgctaagtgaatgaatgagaggcccagtcaagctacttcccttcagtgctgcacagtgcaacaaataaccagctcagatacaggttcaaagaccacaggcttctccctggacagctcagctctcctcataactcctgagaaaccctggacatgccagggtgtactatggagtggttgcatccggaagagggggaggaagtcccaaacactaagtaatccaggtttgggttggaaaacaaggttgaagttactcattagcaggtgaaagggtcaagggtcgaacgcaagggagctgaaagcagagtggactgagcagccagtaggggagagagcagttaaggcacacagagcaccagctccctcctgcctgaagatgttccaccaaatttgggcagctctgctctacttctatggtattatccttaactccatctaccagtgccctgagcacagtcaactgacaactctgggcgtggatgggaaggaggtatggactgagattrggggaagcctatggtggaggctctgagggacttgggtggatggcctaggatgactggagaccatcttgggaaaggaagagaggaagggggtgtgagtgttgtgataatgaaagcaagaagaaaaatatcagtactgtggccatcaatgcagaggcatggcagaattggggggtggggtggttacccaggttgactggggaggggcaaagaggaaaagtcatttaatgactctttgtcatggatccaatccccagttggaaagaggaaggcagccaacacctctacccctaaatcttgctgttttgactgatgaagaggttgaacccatcctgtgctggaacccaccctcttttgctcccttcattgtctctccagttcccagaggtccacttgggccagtggtactttatcgcaggggcagctcccaccaaggaggagttggcaacttttgaccctgtggacaacattgtcttcaatatggctgctggctctgccccgatgcagctccaccttcgtgctaccatccgcatgtgagtggtaaggaggcagaagcatcactgggttcagtctctgcccaaagtgtgagaatccacccaccaagagctggcctcttagctggtatatctactatgcttggcccacggaattcagtggctgtattaattgccctctggagaaagatgtgcctaaccaatgcttggtagcttgaaacccaaggagagctgggcttcaataacaaatacaatggagtaaatagaagccgggacaggccagacgtggtggctcacgcctgtaatcccagcactttgggaggctgaggcggacagatcacgaggtcaggagatcgagaccatcctggctaacacagtgaaaccccgtctctactaaaaatataaaaaactagctgggcatggtggtgggcacctgtagtcccagctactcacgaggttgaggcaggagaatggcgtgaacccgggaggcagagcttgcrgtgagccgagatggcgccactgcactccagcctgggcaacagagtgagactctgtctcaaaaaaaaaaaaaagaagctgggacactatggttggggtgatgctcattctttcctccttgccaccaccacctctgcaggaaagaygggctctgtgtgccccggaaatggatctaccacctgactgaagggagcacagatctcagaactgaaggttggttcttcccagccctcaccctcccttgagtttggttctgcatctctgttctcatacttctcccacctgccttgacaggccgccctgacatgaagactgagctcttttccagctcatgcccaggtggaatcatgctgaatgagacaggccagggttaccagcgctttctcctctacagtgagtagggatacaaggcaggaagggttggagggaaacaagggagggcaggagaactmctcactctgggtcctatgayaccctcccaggaagagctaggtgcttccaggggttttgactggcctgaccccaccttgcccttccagatcgctcaccacatcctcccgaaaagtgtgtggaggaattcaagtccctgacttcctgcctggactccaaagccttcttattgactcctaggaatcaaggtaaggkgttaaaatctcataaaacaggattaggactcacmaagtcttctggtgttacagggtgaaagaggctcgtgtgatgtcaccagagggatgtggctaagagctgtgatgtcacctgagggaggcaggatgggttctgggctactcaaaagagaggtttctgagtttgcactggataaagggggcagagggtcatacgtggagggaaaagagccttagagactcccctttgacacagggaatgaaagaacacgttctcccccaccccattactatcaactttgcttttctccctggacttcccttctgtccttctttttccctccccccatcacagaggcctgtgagctgtccaataactgacctgtaacttcatctaagtccccagatgggtacaatgggagctgagttgttggagggagaagctggagacttccagctccagctcccactcaagataataaagataatttttcaatcctcatctcattctggggtttgtctccagacgtcattcccactcctcccatttcaacattccccctggatcctctaccacctaaactcccagctggacggtgtcagtaagaacagagtggcagtaactctcactttgtagtggtatatttaggatttgatgtgacacagttatttattgctgagtgagcaaacccctagcccccaagtggggactacaggcttcagtgcttcccccacactgcctgagctaccagcccttctgcactggccctcctgccaatactgcctgcactgtccccactccctctggctcccatgatcaccagatccgccctgcaggctccctgtcacctgtggggccctatccagaccccctaatccacttgcctagcagccccactcttccctcgatggctcagatcctgagatccaaggaacaccctgggtttcccaaccactctcttactgcagaggtctgtctatcctgccctggtctcctccaccccaggagagttttcaaaggtagagaggaccctttggtctttattcaccaccatcatacttttttttttttttgcttttaaaaagtggaggtggaaaaaaaaaaaaaactgaaggtgggagaaaagtaaaagcaaaaataacagctggtgaatccaagagcagtgccctcactgtccataaacacaaacaccctaaatagttctgttctctcctgtgtatgaaggggggccctgcaccctcgtactcgggtttcttccccatccctgaggtccctatgcttacaatttgggtcatgcctcacacttttctcctaaagcccacactctcttcaccctttgcccccaccccacggtcacagcccctttcccgggtctcccctctgctcctcaccttccctctccaacccctcactctcccagtcagtggccgcctcatccccattgggctcccggaggctgacagccagcaccaaggcctgcaggagaccaaagaggcaggcgaagtgcaaagggtgggcagtaagtaggctcagaacagcatggagcccatgcagggcagccaggaaggacagtaggccatgtagccagaggcccagcggtccacgcaggcccagtgtgtccaaggctgcccgcagtggtcgtgagcacagggccagcagggcagaggccagcagctccagaagatgcagggtcaggttggtggagatctgcagacactcttctgggccccccaagtaccgggagggagctcctggttccccccgcagccagcccaacagcttctcacgcctaccaggtttctccaatggggctcctggcccagggacgctcagtcccccttcaggggacacccctggtctcctggtgccacctgaatccacatgatcccatctgagtttgggactggcccctccagcctccagtctcccagactcttgagtgctagagataggctggtcccacttgagggaatccattcttttgctccctagctgctcaacttggggctcctccttgcttggttcggaagcagccctagaaaccctcaatgcccccgagtccttagtcttgggatgccccacatcttccatggtttctggggcactatcccagtcacttcctgaattctccgaggagctgtccacccgtctgggttctgggtaaggcgggtcaggcctcattggtttccggcggccccaagggcgaggtagccagccaccaagccgtcgcaggaacatggctggggtgtgtaatgggcccccaaattctgaggctgcttcctggcactactcagactctcaggatctcctcagaagccagagtctttctggctcagaacaggtatttgcctggtgatgcagtcctactctgaattcagaagtggctcctcccttctctgaatagtcatgcagcctcaagtgtggcaagtagtttgcttcctcttcagttctggggtaaaggggggcatacccaaattcattcaccatccacacccccacaatctgagattccaagaatctcagatctgacaaggcctgggtcaccaccagagagtcctctctgcgtttccggatttccttcccagcaggcagcaccccaagtttcactcaccaaggccacaccccaaggtgtcccagaaactggggaggcagtgctccatccaataaagcgggcaggaaggtggccccaggtcctaggtgctcctggatcgtgtagtctttaactgctgccccaagggacctcaaggaataggaattctctttgttaggaggtggaatgaaagtgtccagcaaactccagccagcagcgttcgtcccttgatttagagggctatgatttctacaaagtggcccgactggcccgcgaacacgcagcagagacgcggcctccacaaggtcagaactaagatgtcctcagagatccccagttacgaagcaaagcgcgggcctacttcgggacctacgcgtccgggcgctgtgcgcggggaccgctcccgggcccagcgtcggggccgcggccttggggagccgccgggagccgcgaagcccggaagcagctgcaccaggactggaaggacccgcgggggcggtgccgcagctcatggggcggaccctgcgaatagaccgcccccgtataccccgcgctgtctgtgcgcgccggaccgccaaaccgagattagcaaggaccaggaccttaatataaacccagctccccattttcccgggtttctcatgcttccctaaactcggtcgccccctacagccccctgcccctgggttcttttccacatcccccaccactcctccatttcgcatccaagacttcatgaaaggctttcccagaaaagaaaaaatgaggagtcttgcgacttgaacagccctcccctgcccgtctgcaaatttgaattcctggatttcacaacagtgagctcttcttgtgcctaccacccggcatgagcaagacaagggggtgggtggtgggagagtggggaagtgtgggaaagaaaagtgtagacaaatgggtggaacaaagaagtttaaagtttagatttgggggctagagttctggtcccagttcaactaagtgtacaagcttgataatcgtgggccttcctatcacactggcctcttccagcaaaaccctacccattctcatctctagaggccttgacttcccttatcaccctgcattataatatttgataacatgggccgggagtggtggctcatgcctgcaaccccagcactttgggaagccgaggccggcggatcacctgaggtcgggagttcaagaccagcttggccaacatggagaaaccccgtctctactaaaaatacaaaattagctgggcgtggtggggcatgcctgtaatcccagctactggggaggctgaggcaggagaatcccttgaactcggggggcagaggttgtggtgagccgagatcatgccattgcactccagcctgggcaatgagagcgaaactgcatctcaaaaaaaaaagaaaaaaattgataacatggcactttccctctccagctgtgaactctttgagggttgggaatgtctttacctgtattcttggcacatagtatatggacttatgtttgtgaaatcagtgaattggctgtagtcagggaactcctcctgggggaagtgagacttgcacgaagctgggcaattcttggtccaggggggttgaaagaataggtgggggactcccaggagggtctgggacctgaaagtgaacccagattggcagggaggtgaccttatcatgccacctggagaggctgccccttctgactcaggtgggacttgcatgtggctcccaggcttctgtttggcttcctcaaaatagcttccagaaaagtgaataaaccacaaatggttgatttatttctgactctcagcccgtctctcacgaagacagagcctattgaccaaaaacttcaggatctgcatctgagcagatcccaggaaggggaagtcaaagggcccaggtcagaggcccaagttcagacttcagcagcagactagggtcagactttaccaaagtcagaactcgaggttcatgtaagtccttagatcccgctcccaagccctgtctttctcctccctccttctctcctccctccagctcagtgtggccacccgagggggtctctccctcccagccacagctcgggtatcccaagctgggaaatgtgtcactcggggctggggtgctgatctgtagcctagtccttcctggtccctcttgaggacagtggggatgggattggcacggccctcaccccggggtcccagccccattcctggctcccagccccccctcagcagcagtttgaagcccgggctggagatgggcaccccaagtggaaggttgggaggctgaggaccctgcgacagtgacagcaggtgagcagtggatgtgcggtggttggaatcttggaagtgggtgtcacagttctcgcagtactggagggagggagtaggagacctgcagagaaagaagaaaaagcattaagggcaggggaaggaaaaggggaagagttgaggcctcagagggggctggcagggtagaataggatcttttcagcttttctgctaaggaacaaattgccagctaggcatagtggctcacgcctgtaatcccaacactttgggaggcagaggcgggcagatggctttgagctcaggagtttgagaccagcctgggcaaaatggcaacgcctgctttttttttttttttttttgagatggagtcttgctctgctgcccaggttggagtgcagtgccatgatcctggctcactgcaacttccaccttagcgattctcctgcctcagcctcccaagtagccgggattacaggcacatgccaccatgtcccggcaaagcctgctttctacaaaaaatatgcttgagcccaggaagcggaggttgcagtgagctgaaatcacaccattgcacaccagcctgggcgacagagtgagatgagtgagactttgtctcaaaaaaaaaaaaaaaaaaaaaagggacaaattgccttccttcctacttaacagtgagggatccaggctggtccaaaggtggtggtgagttatctgaattaattgttcactcagttacagatcaaactccttactccacttttcccctccttctcactactgcacttgacttgtcttaaaaacaaatttctttaaaccattgtgggatccagagcagaatagttgaaagaaaaaaatggtaaccagacctagcaaactcttgggcaaggggagggacattagtcataatgactatagctaacattcatgtattgcatactatgcggcatgcactattctagcattttacatatattaacccattgaatcctaacaacaattcttactacccccatttctaagatgagaaaactggaacatgtagacattaggttgtttgcccaagtaagtggaatcaggctttaaatccagggagctcatgtttataaccacttgactatactaccctgtcaacctacacatgaggataaggaaagaactcttcagcactgtgctggggcgtctggtgtggtgtggctgggagaggcagaacacaatgagacatgggtctgagctaaagtttccccttaccggttttccgggctccttgtctctccatggctctccctgaccatgcgggctacctcagggaagccagcttcttcagcgagctgagccgcatccctgccactcagctcacagacccccacccaggcagccccacggcccaggagatagctcacagctgccccctggcccgctcgagcagcacacatcagtggggtccaccagaaggcatcccgggcgttgatattccccccagctcctcctgcctcatgcggttccagcagtctcctaagttctggcaggtccccctcctgggctgccctcagtatccggtgagtcatcttatcctcagcctcaagggatctcccttgtccatgtcttcctg

SEQ ID NO: 8933 - DNA, 14769 bp, Homo sapiens
cacctgtggtcaggaattcaagaccaacctggccaacatggtgagaccccgtctctactaaaaatacaaaaaaaaatttggcgggcttggtggcgtgtgcctgtaatcccagctactcgggaggctgaggcaggagaatagcttgaacctgggaggcagaggttgcagtgagccaagatcgtgccactgcactccagcctgtgcgacagtgagaaactgtctcaaaaaaaaaaaaaaaggaaaagaaattttctgacctatctcatctgatagtaggttataagaccctcattccagaagaggttctgccctatacctgggaggaaggaatgctgtacagagagaccaagaagaatatggccaggccttgctgggatccccccagtcccagtctgtgaccattagatgatactccttttgttcaattacatttctgcacagctgttcattcttcatcaaatctaagcataaaaatagttttcccctgggtccttgggtcttcatttctgaaggctcccatgtcacctaaaactttgattaaataaatgtattatgcttttctcttgttaatctgtcttttattataggagtattggccataacccttatgatgggtcaggaagggatcacccctttctgcccctacagaaataatagctaagactagtaaagcataaaaggcaaaggggcaggtcctcaagtagagaagaacaggagaaatagctcatacacacccagaatgttacttacatgtccctccatgttacaccaagacccctcagggaccttgtgcctggggagagaagtggtctgccccatgcaacagtgggctttaccccgggtcaccaccagccccagctccaacccctctaacactctccaagtaaaatcacatcagtagcagtaataatatttgaggtgacaagttggtattatctcaaacttaggaaaagtgaataaagtcatctttagaaactgctttttttaaaccttgtaacttgcaagctaagtgaaaatgggctcatgtatgagaatgttcgtgttagacattttttgtgttagacaaaaactagaaacaaaccaaatccccatcaacagaatatattagaatatattgatacaatagaatattacatcataatttttttaaaaaacattactgatacatacaaccacgtatatgaatctcacaaacataatgctgactgaaagaagtcaaacagaaatgagtacattctgtgtgatttcatttatatgatgccccaaaccaggaggaaataatctatggtgataaaagtgagagagtggttggttatctttggagggtatcagcagggagggggcatgagggaacctgctggggacctgaaaatacgtggagctgggtggtggctacatacagatggaaaaattcatcagctgtacacttaagaggtgtccacctcatacctaagttacatatcaataaaaaggaaaaaaattttggaaactttttttttttttttttgagacagagtcttgctctgtcccccaggctggaatacagtggtgcgatcttgactcactgcagcctccgcctcccaggttcaaataattctccagcctcagcctcccgagtagctgggactgcagatgcgcaccagcacgcctggctaatttttgtatttattatagagatggggtttcaccatgttggccagctggtctcaaactcctgacctcaagtaatccgcccacctcagactcccaaagtgccaggattacaggtgtgagccactgcaccaggcctggaacaattttaaaataatgtattggctctgcaaatgcagcttcagaacaagtcccttagctgtccccaccccaccctaagtcaccacccttaagcctcacccatgtggaattctgaaacttcctttgtagaaaactttggaaggtgtctgccacattgatcctggaatgtgtgtttatttggggttatataaatctgttctgtggaagccacctgaagtcaggaagagatggagggcatccttcaggagtgagatgagacctcatcatacttgactgtccagcatcatctctgagtaaggggaccaaaaaatttatcttccaaactaggacactttcaagagtggaagggggatccattaatattttcacctggacaagaggcaaacaccagaatgtccccgatgaaggggatatataatggaccttcttgatgtgaaacctgccagatgggctggaaagtccgtatactgggacaagtatgatttgagttgtttgggacaaggacaggggtacaagagaaggaaatgggcaaagagagaagcctgtactcagccaagggtgcagagatgttatatatgattgctcttcagggaaccgggcctccagctcacaccccagctgctcaaccacctcctctctgaattgactgtcccttctttggaactctaggcctgaccccactccctggccctcccagcccacgattcccctgacccgactccctttcccagaactcagtcgcctgaacccccagcctgtggttctctcctaggcctcagcctttcctgcctttgactgaaacagcagtatcttctaagccctgggggcttccccgggccccagccccgacctagaacccgcccgctgcctgccacgctgccactgccgcttcctctataaagggacctgagcgtccgggcccaggggctccgcacagcaggtgaggctctcctgccccatctccttgggctgcccgtgcttcgtgctttggactaccgcccagcagtgtcctgccctctgcctgggcctcggtccctcctgcacctgctgcctggatccccggcctgcctgggcctgggccttggtgggtttggttttggtttccttctctgtctctgactctccatctgtcagtctcattgtctctgtcacacattctctgtttctgccatgattcctctctgttcccttcctgtctctctctgtctccctctgctcaccttggggtttctctgactgcatcttgtccccttctctgtcgatctctctctcgggggtcggggggtgctgtctcccagggcgggaggtctgtcttccgccgcgtgccccgccccgctcactgtctctctctctctctctctttctctgcaggttctccccatgacaccacctgaacgtctcttcctcccaagggtgtgtggcaccaccctacacctcctccttctggggctgctgctggttctgctgcctggggcccaggtgaggcagcaggagaatgggggctgctggggtggctcagccaaaccttgagccctagagcccccctcaactctgttctcccctaggggctccctggtgttggcctcacaccttcagctgcccagactgcccgtcagcaccccaagatgcatcttgcccacagcaccctcaaacctgctgctcacctcattggtaaacatccacctgacctcccagacatgtccccaccagctctcctcctacccctgcctcaggaacccaagcatccacccctctcccccaacttcccccacgctaaaaaaaacagagggagcccactcctatgcctccccctgccatcccccaggaactcagttgttcagtgcccacttcctcagggattgagacctctgatccagacccctgatctcccacccccatcccctatggctcttcctaggagaccccagcaagcagaactcactgctctggagagcaaacacggaccgtgccttcctccaggatggtttctccttgagcaacaattctctcctggtccccaccagtggcatctacttcgtctactcccaggtggtcttctctgggaaagcctactctcccaaggccacctcctccccactctacctggcccatgaggtccagctcttctcctcccagtaccccttccatgtgcctctcctcagctcccagaagatggtgtatccagggctgcaggaaccctggctgcactcgatgtaccacggggctgcgttccagctcacccagggagaccagctatccacccacacagatggcatcccccacctagtcctcagccctagtactgtcttctttggagccttcgctctgtagaacttggaaaaatccagaaagaaaaaataattgatttcaagaccttctccccattctgcctccattctgaccatttcaggggtcgtcaccacctctcctttggccattccaacagctcaagtcttccctgatcaagtcaccggagctttcaaagaaggaattctaggcatcccaggggaccacacctccctgaaccatccctgatgtctgtctggctgaggatttcaagcctgcctaggaattcccagcccaaagctgttggtctgtcccaccagctaggtggggcctagatccacacacagaggaagagcaggcacatggaggagcttgggggatgactagaggcagggaggggactatttatgaaggcaaaaaaattaaattatttatttatggaggatggagagaggggaataatagaagaacatccaaggagaaacagagacaggcccaagagatgaagagtgagagggcatgcgcacaaggctgaccaagagagaaagaagtaggcatgagggatcacagggccccagaaggcagggaaaggctctgaaagccagctgccgaccagagccccacacggaggcatctgcaccctcgatgaagcccaataaacctcttttctctgaaatgctgtctgcttgtgtgtgtgtgtctgggagtgagaacttcccagtctatctaaggaatggagggagggacagagggctcaaagggagcaagagctgtggggagaacaaaaggataagggctcagagagcttcagggatatgtgatggactcaccaggtgaggccgccagactgctgcaggggaagcaaaggagaagctgagaagatgaaggaaaagtcagggtctggaggggcgggggtcagggagctcctgggagatatggccacatgtagcggctctgaggaatgggttacaggagacctctggggagatgtgaccacagcaatgggtaggagaatgtccagggctatggaagtcgagtatggggacccccccttaacgaagacagggccatgtagagggccccagggagtgaaagagcctccaggacctccaggtatggaatacaggggacgtttaagaagatatggccacacactggggccctgagaagtgagagcttcatgaaaaaaatcagggaccccagagttccttggaagccaagactgaaaccagcattatgagtctccgggtcagaatgaaagaagaaggcctgccccagtggggtctgtgaattcccgggggtgatttcactccccggggctgtcccaggcttgtccctgctacccccacccagcctttcctgaggcctcaagcctgccaccaagcccccagctccttctccccgcagggacccaaacacaggcctcaggactcaacacagcttttccctccaaccccgttttctctccctcaaggactcagctttctgaagcccctcccagttctagttctatctttttcctgcatcctgtctggaagttagaaggaaacagaccacagacctggtccccaaaagaaatggaggcaataggttttgaggggcatggggacggggttcagcctccagggtcctacacacaaatcagtcagtggcccagaagacccccctcggaatcggagcagggaggatggggagtgtgaggggtatccttgatgcttgtgtgtccccaactttccaaatccccgcccccgcgatggagaagaaaccgagacagaaggtgcagggcccactaccgcttcctccagatgagctcatgggtttctccaccaaggaagttttccgctggttgaatgattctttccccgccctcctctcgccccagggacatataaaggcagttgttggcacacccagccagcagacgctccctcagcaaggacagcagaggaccagctaagagggagagaagcaactacagaccccccctgaaaacaaccctcagacgccacatcccctgacaagctgccaggcaggttctcttcctctcacatactgacccacggctycaccctctctcccctggaaaggacaccatgagcactgaaagcatgatccgggacgtggagctggccgaggaggcgctccccaagaagacaggggggccccagggctccaggcgktgcttgttcctcagcctcttctccttcctgatcgtggcaggcgccaccacgctcttctgcctgctgmactttggagtgatcggcccccagagggaagaggtgagtgcctggccagccttcatccactctcccacccaaggggaaatggagacrcaagagagggagagagatgggatgggtgaaagatgtgcgctgatagggagggatggagagaaaaaaacrtggagaaagacggggatgcagaaagagatgtggcaagagatggggaagagagagagagaaagatggagagacaggatgtctggcacatggaaggtgctcactaagtgtgtatggagtgaatgaatgaatgaatgaaygaacaagcagatatataaataagatatggagacagatgtggggtgtgagaagagagatgggggaagaaacaagtgatatgaataaagatggtgagacagaaagagcgggaaatatgacagctaaggagagagatgggggagataaggagagaagaagatagggtgtctggcacacagaagacactcagggaaagagctgttgaatgcctggaaggtgaatacacrgatgaatggagagagaaaaccagacacctcagggcyaagagcgcaggccagacaggcagccagctgttcctcctttaagggtgactccctcgatgttaaccattctccttctccccaacagttccycagggacctctctctaatcagccctctggcccaggcagtcagtaagtgtctccaaacctctttcctaattctgggtttgggtttgggggtagggttagtaccrgtatggaagcagtgggggaaatttaaagttttggtcttgggggaggatggatggaggtgaaagtaggggggtattttctaggaagttyaagggtctcagctttttcttttctctctcctcttcaggatcatcttctcgaaccccgagtgacaagcctgtagcccatgttgtargtaagagctctgaggatgtgtcttggaacttggagggctaggatttggggrttgaagcccggctgatggtaggcagaacttggagacaatgtgagaaggactcgctgagctcaagggaagggtggaggaacagcacaggccttagtgggatactcagaacgtcatggccaggtgggatgtgggatgacagacagagaggacaggaaccggatgtggggtgggcagagctcgagggccaggatgtggagagtgaaccgacatggccacactgactctcctctccctctctccctccctccagcaaaccctcaagctgaggggcagctycagtggctgaaccgccgggccaatgccctcctggccaatggcgtggagctgagagataaccagctggtggtgccatcagagggcctgtacctcatctactcccaggtcctcttcaagggccaaggctgcccctccacccatgtgctcctcacccacaccatcagccgcatcgccgtctcctaccagaccaaggtcaacctcctctctgccatcaagagcccctgccagagggagaccccagagggggctgaggccaagccctggtatgagcccatctatctgggaggggtcttccagctggagaagggtgaccgactcagcgctgagatcaatcggcccgactatctcgactttgccgagtctgggcaggtctactttgggatcattgccctgtgaggaggacgaacatccaaccttcccaaacgcctcccctgccccaatccctttattaccccctccttcagacaccctcmacctcttctggctcaaaaagagaattgggggcttagggtcggaacccaagcttagaactttaagcaacaagaccaccacttcgaaacctgggattcaggaatgtgtggcctgcacagtgaagtgctggcaaccactaagaattcaaactggggcctccagaactcactggggcctacagctttgatccctgacatctggaatctggagaccagggagcctttggttctggccagaatgctgcaggacttgagaagacctcacctagaaattgacacaagtggaccttaggccttcctctctccagatgtttccagacttccttgagacacggagcccagccctccccatggagccagctccctctatttatgtttgcacttgtgattatttattatttatttattatttatttatttacagatgaatgtatttatttgggagaccggggtatcctgggggacccaatgtaggagctgccttggctcagacatgttttccgtgaaaacggagctgaacaataggctgttcccatgtagccccctggcctctgtgccttcttttgattatgttttttaaaatatttatctgattaagttgtctaaacaatgctgatttggtgaccaactgtcactcattgctgagcctctgctccccaggggagttgtgtctgtaatcgccctactattcagtggcgagaaataaagtttgcttagaaaagaaacatggtctccttcttggaattaattctgcatctgcctcttcttgtgggtgggaagaagctccctaagtcctctctccacaggctttaagatccctcggacccagtcccatccttagactcctagggccctggagaccctacataaacaaagcccaacagaatattccccatcccccaggaaacaagagcctgaacctaattacctctccctcagggcatgggaatttccaactctgggaattccaatccttgctgggaaaatcctgcagctcaggtgagatttccggctgttgcagctggccagcagtccggagagagctggagaggagccgcattctcaggtacctgaatcacacagccaagggacttccagagattcgggtgtctaggcttcaaatcaccctgtcctaactctgcaacctgaaccagccacttaacctatctatccaatggggataggaatgtccaccacacatagggcatgtgagagaaggcctgacctccatcagaggacctcactcagcccttggcacagtgggcacttagtgaattctggcttccttcaaccagtttccagctgttctatccccttccattctctcagtgggtgaaatcgaagagactgaggacaataaagaacaaggaaccgaactgccggacgtggtggcatgcacctgtaatcctaccactttgcaaggccaaggtgagaggatcgcttgaacccaggagttccagagcaacctgggcaacatagtgagatcctgtctctattttttaaaaaagaatgaaacataggaataagatgtgggtgaaggactcacatgccggcttggtcccactggtctttgtggtgaaggaggggagaggtgagaggtgggtaatccggaaagagaaaagcaccccctccctggatgaaggctcttctggagagagtcaaagacaaataagggtggggcgcagtggctcatgcctgttatcccaacactttgggaggctgaggtgggaggaccacttgagcccactagttcaagaccagcctgtgcaacatagcaagaccttgtttctagaaaaaaaattaaagattagtcaggtgtagtggtgcatgcctgtaatcctagctcctcaggaggctgaggcaggaggatcactcaagcccaggagtttgaggttacagtaagctatgatcatgccactgtacccccgtctgggtgacagaacgagaccctgtctcaaaaaaataataattccaaaaacaaatatggagacggaaattgagcccccctagactgggagcccccactgagttcggaaattaggctttacctccagccctggggtgccaggcaggagaaaaccatgtggtaggctgagggggtagggtgacccattggggtgacctagatagggccttgggtcaccctctgcctcctccagcctgtggctgaaagtcagccatgaagtaatgggggacactgttactcatcccagaagcacccacacttactcacttttgggaagggggacctaaagtgtgaaaaaaaggtgaggattttccgtctcaccctaaatgggacaccctaagtggggcatcggtttttcctcctccccagaacttcctggtgttttcaggcaccacaggctccttcctgccatccccatctctctctaatattctccccttctttctccttcagcctcctcccttcagaccccatgagccttgaattaagctccttggaggagaagagttgactgtcgggtaggagacagagaggccttcaggcagctctagggggagaagtgcggggcccctccaggcttcattcctctgtcatgataggggcttactctgctgctgggcctttctgagtggtgcttgctgggctctgtaatgacccctctcactgttggggggtacccaagagaaaagagtatggtgcagagtctggttgggaccatgtggccctgaaaatcaggatgcctagagaagcttcggagtttgagaagtcccccttcctcccaccctccaactgggctaatggtggggcctggccattcagaggcagggagggggtgggacaggcagaccatcatccctaggagcaaaggccatacactgtgttgtgatgaattgtttcaagcaaccagaagagtactgagaatatttaacccgcacccgtgcacccaccctgaattaagacgtgtgtcgcaactcagcatctttatcggcagcactgaagctttccattctttattttcatcaggttcaaaatcaatttccaaacagtctcctacatttttcccactgccatggggtcctgggcgtccgggcccccaatattcacgcactcgcaccacgcactcatattccctcaccccaccatcacggccccaaagaaggtcttccctctcgcgaagtccaccatatcggggtgactgatgttgacgtacaccctctcgcccctccggagctgcaccaggccgccgaaccccacgctcgtgtaccagagaggcccgtacccttgtctcctggccgggtccagcactggagtcaccgtctcggcgccctcgagcagcagctcgggagtgcccggcccgtaggcgccccccgcccggtacagagagctgcgcagcgtgaccgagcggccctgggggtccccgccgccagggggcgcccggccccggtagccgacgagacagtagaggtaatagaggccgtcctgcgggagcgccagcccctcggcgtccgagaactgcgtcccgctcgtcagaaacgcctgttccttcgtcgtctcccagcctagcccctgccccttcagcggagcgcctgcggagacacgggccgacgcgctcttgggaatgcgatcctaaaggcttgggacttctggggaagtggcggcttttagcccctgcgggagccgagccgggccgggggaggagggatggtgctgtttctgggatgagtgcgagttgggggccgagggaacacggatgtggggtgcagaacgctgtagtggggacctccaggccggcttttgcttgcaccggagggaagaagaaactacactgcggggacgagcgtaagagtgggcacgagcgacaaaaggtcgtgaagcgggtgggaaaccgagcactggaatcatggagccgaaggactctgggcgagcagaactggaaccttcggattatttacactcttattcaggtcttggaggtccttacctatgaggtgggcagctgggagcccggggctgagatctgtttctggctcctcctctggcagcttctgaaaccctggaaggggcaaagagtccacgattgggggcagggcagccacccatgcaggctacccttgagagaacagggcgcagggatggggagcctggattcctagaggaagaggtatctggggacgcagcagggagctgggagcccctgagggtctgaagcggggaaggagagacagtctgctcttacccagtccttgctgggcctgtgccccggggtcggccgtctccgttacctggttgggtggggtcacagtgcccagagttcagattcagctcatgtcacccctacccctctgaaagtggacccaagctgcaggcctggggtttctcctaccagcaccatccccaacacacacctccttagaagggagaacaagcaaggcataggtacttgggcggagaaacagatgtacctcgggaagaggagaggagacacaaggggcttatgtcgggacacaagcacaacatcacaggaacatggaaagagagtcagcaaagagacaagacatccccaccagggacagccgagccagctgagccagagggggcaaaagaccacaggcacaaccagagggagccaagcatccgcaagatacaactctccaccagggcctgttgcagccactcaccagtcctccctgatcctggggcactaaggccagcacagccaggacagtgataggcaccgccagcaacaaggtcaccagagaagtggctcctgccacagctagcaggagggaacccctcccctggagcctcccacccctgccctccagccccagtgcccccattgagactgaaccagagccagagcagggggctttcatacctcagggacgggcccaccccctccctgtagacctgcacacctggctgggactttccgcacacccctgctcccctcacccagcttcctgtttacccagagctggggtggggcagctggatgcctgggttctctgaactggggaagaagttgaggttagggagacaggctctcagggtggaaccaaaggggtctttagacatcttctggctcagcagagagagaaactgaggcccagggagggaaggtagcttgcaggaagccagtcagcagagctgaaatgagaacacagatctccaggtttccaatgtggtttgcattcttctataccctcaaggtaggtgctggaggaagagctgatcccgtctctgaggtcaagggccggactaggacaaggactggaatcttgagggatggatgtctgggttccctgagaagaactgattcccatactgggctgacctcctcccgttcccttgctcatctccagccccctgtgctgagtgagaaagggagaggtaagccttagcctcaccactgactactgactcactaaggagggatggaaatggagctttacctcccttgctacaaaaagtaaagacagatggacgaggcatactcccaccctcagagagcttccaagtctacaatgagccctatccattagtaggtgcttactaaatgtttatacataaatgaataaaaggacaaataaatgcaggaataaccaaaacaaagcagcaaggaccacatgaatggtagatgtaggcagcatgagtggttaagagtcaagggagtagccggggtagtggcttacacctgtaatcccaacactttgggaggctgaggcaggtggatcacttgaggtcaggagttcgagaccagcctggccaacatggtgaaaccctgtctctactaaagatacaaaaagttagccgggcgtggtggcacgcgcctgtaattccagctacacaggaggctgaggcaggagaatcacttaaacctgggaggcagaggttgcagtgagccaagattgcaccattgcactccagcctgggcaacaggctgagactctctctctcaaaaaaaaaaaaaaaaaaaaaaaaagagtcaagggaagaaagaccaggtccaaggaagctggaagtggctccaatcatctccccttcttggtaacatctctatgtgtttccgtaatactaataataatatagctgacccacaaaatgcacttaacatgtttatgccactgatttacacactttaataatttttttttttgagacagggtctcgctatgtcacccagactggaatgcaatggcaggatcatggctcactgcagccttgacctcccaggatctatggattcacctacctcagcctcctgaatagctgggactataggcacatgccaccatgcccagctaatttttgcattttttgtagagatggatttttgccacattgcccaggctgggctcaaactcctggactcacgtgatctgcccgtgttggcctcctaaagtgctgggattacaagcatgagccatcatgcccagccaataattataatcctgacaaaaaccctaagaggaaactgaggtacagagaggttaagaaacttatggagctcacagagtcagtggcagaaccagaatttgaacccaggcatctggctccagagccttgataacaagacagtttaaaaactgaatactggggctgggcgcagtggctcttgcctataataccagcactttgggaggccaaggaaggtggatcatctgaggtaaggagctcgagagcagcctgatcaacatggtgaaaccccatctctactaaaaatataaaaattagcggggcgtggtggtaggcacctttaa

SEQ ID NO: 8934 - DNA, 23436 bp, Homo sapiens
  misc_feature (1)...(23436): n = A,T,C or G, or insertion/deletion polymorphism (see Tables 1-2)
aagcaattctcctgcctcagcctcctgagtagctgggattacaggcgcccgtcaccacacccagctaatttgtgtatatttagtagagacggggtttcaccacgttggccaggctggtctcgagctcctgatctcgtgatctgcccgcctctgcctcccaaagtgctgagattacaggcgtgagccaacgcacctggccaaggagctaattaaggttaaatgaagtcctaatgtgataggaccaacagttttcatgtgtctgctgcacagttaacagacccatgatgctcagacagcagggtttgcagcagagaaagagtttaacaaggcccaggtgaggaggtgaaaggagacgtctcctcaaatacatctccctcaggagttctgagctaaggtttttaaggggatcatggaaggtgaggggctggaaaatgggggtcgctgactggccagggtaaggaggatgattcactagaatgtggaaactgcattccttgctgagtcagctcctgtggggtccttcagagcagctggcatcagtactttcactggtatgcagggcctgaaagaatctcaggctgggcgtggtggctcatgcctgcaatcccagggcttcaggaggccgaggcaggatgaccgcttgggcccaccagttcaagaccagcctgggcaacagggcaagaccccgtcagtatttaaaaaaaaaaaaaagccagatgtgtgtgcctgtagttccagatacttcagatgctgaggcaggaggatcactcgagaccagaacctcaaggctgcagtgagctacgattgtgccactgcacttcagcctgaacaagagtgagaccctgtctctaaaaagaaaaaaaaattaaaataaaaaaaaaatctcaaagggaaaagttaaggtttcataatgttcaagttgttatctctggagcagttaagggtaactgtaatcttataacaagagtctacctgattctgaggcacgaggcgccagctcagaggggctcaccacatgactggtgctgcgtgtgctgcaagctcggttattccatttccccctcccctcttccttgattaattttgtgtttttagtgacggttttctttttttatatttttttaaaaattgagacaaggtctcactctgtcacctgggctggagtgcagtggcgcaaccatggctcannnnnnnnnnnnnnnnnnnnnnnnnnnnnnnnnnnnnnnnnnnnnnnnnnnnnnnnnnnnnnnnnnnnnnnnnnnnnnnnnnnnnnnnnnnnnnnnnnnnnnnnnnnnnnnnnnnnnnnnnnctatttattttgtagagataaataaatctccaaataagtctatgttgcccaggctggtctcaaactcctgagctcaagcaatctacctgcctcccaaagtgctgggattgtaggtgtgagccaccatgcctggccagggatggtttcaataagggtgcaaccctaatccgatagggctggtaccctcatgagaaaaggaagaggtaccagagcattctctttgctatgtgcaactctaaaagacagcccgtaccaggcagcaatctgtcgggcaccttaatcttggacttccagccaataaatgcctattgcttcagttccccagtctaaggtagtctgttgtgacagcccgagcccactgatggtgagaaagactttattccctgtgtggtggaagttgcagcacactaagaaacagggactagcaaaagagctttcctgctccttcagtttttttgtttttgtgttttttttttgagacagtgtctcactctgtcacccaggctgcagtgcagtggcatgatctcagctcactgcaacctccacctcccaggttcaagtgattctcctgtctcaacctcccaagtagctgggattacaggcatgtgccaccacacccagctaatttttgtatttttnnnnnnnnnnnnnnnnnnnnnnnnnnnnnnnnnnnnnnnnnnnnnnnnnnnnnnnnnnnnnnnnnnnnnnnnnnnnnnnnnnnnnnnnnnnnnnnnnnnnnnnnnnnnnnnnnnnnnnnnnnnnnnnnnnnnnnnnnnnnnnnnnnnnnnnnnnnnnnnnnnnnnnnnnnnnnnnnnnnnnnnnnnnnnnnnnnnnnnnnnnnnnnnnnnnnnnnnnnnnnnnnnnnnnnnnnnnnnnnnnnnnnnnnnnnnnnnnnnnnnnnnnnnnnnnnnnnnctgaggcaggtggactcacctgaggtcaggagttcaagaccagcctggccaacatggtgaaatcctgtctctactaaaaatacaaaaaattagccgggtgttgtggcgggcgcctgtaaatcccagctacttgggaggctgaggcaggagaatcgtctgaacctaggaggtggatgttgcagcgagctgagatcacaccactggactccagcctgggtaacagaccgaggctgtctgggaaaaaaagaaaaaaaaaaaaagcaagcagagaacctaatgaacccacgaacccatgtgttcacctgcatctttctgcaattatcagcctgtggccaactccatttcacctgtatctctgaccacacagacccagcatcccaccatttcccctataaagtggatgtactcacctatcaggcctccagagtcttgtggagtgactcttgctcccattgctcctggacagacagtgctggaaatcaggcctgaggctgtcagtggcagtacgaaggacactggatgctcagccacgcagaccctcctatgcccacgccagggctgaggtcagcaggctggggtgtggcagtcatcctttgatcacgcaggaacaccaagagaactgctaggatgtggaccaacctgatgtcactgagtcacgggagcagctcctgcctgcctaacactggacttcatgtaatgtcagatgattaaatatcttaatgctgtgagccacaggaggctggctggtattctgctacctgtgctaaaaggtatcctaagagaggtacaccatgctggaataggcaaaagcaaacctgtttcttgtatcttagtaacacacttcaaggtgcttatgtgcttgagcaattcctgcagtcaaatgggccctccaccccccagtacacaaggcccagccagccagattccctccatcttcaccctcctcccccgtcccaggggagccaggaaagccatgcatccaccaaggcggatgcgctgtgtccctctgcatcagcctgctgagtcctcctggacctgatgagagacagtaccgcagccttgcccagccccgggaaggtggtcttccttcctacaatccccttcatcctctggaaggtggtcttccttactacaatccccttcatcctctggaaggcaacaagatggaattttataaggagacatcaatcagaaaaaaggatattacttttattacttatctatgtaagggaatagtaagtactattcttagtacttgtaagcgttcgctaggttgtgctgtggtaacaaaggatcccgaagtctcagtgactcgaaatcacgatggtttacttcttgctggtgctgcccatcagctacaacggctgtacttcatgggcctttgttacaggatctggggtgaaaaaccagccctcactgtgcacatgctgtgttcatgctgggggcagaaggggagggaccaaaccacaaaacaccctttaaagcttctgcctgaacagggcacatgacagcagactactttacattaccatttggaagtctcaccactaagcttgacgtaaaggaagaaagggtaggccaggtgcagtggttcacgtctgtaatcccagcacttagggaggctgacgtgggcggatcacccgaggtcaggaatttgagaccggcctggcaaacatggtgaaaacccatctctactaatacaaaaattagctgggcgtggtggcaggtgcctgtaatctcagctacttgggaggttgatgcaggagaataggttgaacccgggaagtggaggttgcagtgagccaagatcatgccattgcactccactctgggccacaagacagaaactccgtctcaaaaaaaaaattaaattaaaaaataaattggccgggcgcagtggctcacgcctgtaatctcagcactttgggaggctgagatgggcggatcatgaggtcaggagatcgagaccatcctggctaacacggtgaaaccccgtctctactaaaaaatacaaaaaaaattagccgggcatgatggtgggcacctgtagtcccagctagtggggaggctgaggcaggagaatgggatgaactcgggaggtggagcttgcagtgagccaagattgcgccactgcactccagcctgggcaacagagcaagactccatctcaaaaaaataaaataaaaatacaaaaattagccgggcgtggtggtgggcgcctgtaatcccagctactcaggaggctgaggcaggagaatagcttgaacccgggaggtggagggtgcagtgagctgagatcgcgccactgcactccagcctgggggacagagcaggactccgtctcaaataaaataaaagcaataaaagtaaattaaaaaggaagaaagggcataactggtaataacaatataacccatatccttccagaaccccaaactgaattggggaggcttcagtctggaaaacataaagctactctaggtatgcaatgataatataatcgcgagcttacacaaatgctgggagtaaagtccgggaaattgttgccaatgacctcagcccaaagcactgaagtgggtggtggtctcaagagctcatggggaaaaaaccaatgcaaactcaacacttagaaagctaccagcaatttcttggtctacatcagaggcaggtggttctgaaaacagagaacagctttgaatttcatctatatttctggctgagggtgcctcccaagaataatcgcctcgaaaggtaagagtgcctcgtctggtagactgtaatccagggctacacagatgattctgggaaatgcagttcctaccatttcttctgctaagcagagaaagtgatgtctagctgacaactgacaatatggcacatatagatagtagtattttagatatctaaaataacaaaaagtctcacctgagaaatgtccaggcagcctgatatccctaagataacagcaaacactactgagcgctttctagataccggggacacttcgcgggactttttccacctctctatggcagagacagtttttcctattatcatcatgacccacatttcagaggagttggaggcatggaaagaggaaacaacttgcccgttccctctccgtgctataatttgtatacatcatcttttaaaacggacttttcggccaggcgcggtggctcacgcctgtaatcccagcactctgggaggccgaggcgggcagatcacgaggtcagatcaagaccatcctggctaacacggtgaaaccccgtctctactaaaaatacaaaaaattagccgggcgtcgtggcggccgcctgcagtcccagctactcgggaggctgaggcaggagaatcgcttgaacccgggaggcggaggttgcagtgagcagagatcgcgccaccgcactccagcctgggtgacagagcgagactctgtctcaaacaaacaaaaacaacaaaaacacacacacggactttccagagccctgcagttttgcgcttcagggacaacagtgaacatttatcgatcccatggttctcctacaattgccacgtggccagcgtctacacagccccctatcctgcccctgctgtcaaacacagcgtttccagaacgcagtcgtgctgggctccaggtgagctttgggaggagccccggctgagcccctgcactgggccccgcgcttcgggaagcatctcgctcgttcgtctcgcgcgccgcgtgaccggagccctcacgctggcagcgggcaccgcagggccctgagagtcgggcccgctgcgcgcagccaggggccaacgagagccgacgctgggcgggcagcgtccgggagcccctccgaccctgcgctcccctcgtccgcgccctgaccccgcgtctccgrccgtccagcccgcgccgygtcacctcccctcccggagcgaagggccctgctcgcccgaggacggaggcccgcacgggacacggggccccagttyccgccccggaagcccaggacacggctccagtggcggcgcggcccagggcgcaggcgcgggtgtcggtyccaccgcgcgtcgtcctcgccccggccccggccaatcccttcgaatttggccgaggccgggaaatactagctaatcacggcgcgcgctgttgacgccggccaatgggagctccggaaggctgcgtggagacgccagcggcgggcggtggacagtcatggcggcccggcgcggggctctcatagtgctggagggcgtggaccgcgccgggaagagcacgcagagccgcaagctggtggaagcgctgtgcgccgcgggccaccgcgccgaactgctccggttcccgggtgggtgcgcgcggcggggggtgcgccgcggccttcggtgcctctgccttcccaggggctctttgctccgcttcgttgtctgcggctggcgtgctgtgaactgtgcgatttttattttgaaagacgggctttcgctgtgtcgcccaggctggagtgcagtggcgccatctcggcccacggcagcctggacctcccgggtagccgggaacataggcgcgcgccaccgcgcccggtccacgctgcgtgtctttaagtgcggggtatggtgatgactgacgtgtaaacccgcgcgaaaccgtggtgtctcccccaaaagtctcctccagctcttttgtaatccatgtctcgtttttgtgggtttttctggtgttgtgttttgtttgatggctgttcgcgctttcaggggttttatagcatatatttaaaagttttcaagtgaagcattgaccttaatctttggccacccagtccacaaattttataaatgctttctttgaagtctctactttctacccgagttcttttttcctaaagcatttttcatcccagcttgtttgcagattgctgttattgctcagagaaattcctttggcttccgcagaagatccaagcctgtctagagawttagtaaagtaaaattcaacgtgagacttgagtccgggagaaattcagtccaaactatattgtaatatagagggaaagcctgatctcacttgcattttgtgtgtttctctttttttctagaaagatcaactgaaatcggcaaacttctgagttcctacttgcaaaagaaaagtgacgtggaggatcactcggtgcacctgcttttttctgcaaatcgctgggaacaagtgtaaaaaccattgcacactgctccctctgcccttgccactttccttcctcctgagattcagtgaacgcagcactcgattctgaatgacagtgacagtagtgctgggcctgatgttcttctgtttagcagtcctgtgggcagaggtggtgaagcgccctagttcccaaagggcgctaatgaatgctgtttcgtcctcctgctccccacaccccataactaatagacttcagtttttcgggtttttttagacggagttccgctctgtcgccaggcagaggtgtgatctcggctcactgcaacctccgcctcccaggttcaagcgattctcctgcgtcagcctcccgagtagctgggactacaggcgcgccccagcatgctcagctaatttttgcaattttaatttactttatttttaaatttaatttttgtatttttagtagagacagggtttcaccatgttggccaggatggtctctyttgaccttgtgatccactcgcctcggcctcccaaagttctgggattacgcaggtgtgagccaccgtacctggcccttttttttttatttttaagacaaggtattgctctgtggcccaggctggagtgcagtggcacccgatcatggctcactgcagcctcaacttcctaggctcaagcagtcctcccacctcagcatcctgagtagcttagggccataggggcatgctaccaagcccggctaatttttttttttttttttaatgtagagtcaaggtctcaccatatcacgcccaggctggtctcaaacccctggcctcatagacttaatgttttaaagatagctttaggtatatagaaaaactgatcaaaaagtagagtatgtagagcgctccctacatactacccctgccttccccccttccccattatttatgtgctgtgttatgttacatttgttaaaattgataaccaatattgatacattagtaactgagtttatatgaactctcctaccacctttttttgttttacatcattgtagtaggtttcctcttcattcaacacttaatgttgatgtgtgttctttcaatgtttttatttacatttatatacatatgtagaaactactatagttagaattttgttttttaacataaatgaggtcataccatacaaattatttggcagctttctttctaactctgccttacagatttctgcacttacagatcccctaactctgcccttctcattctctttaattgtcgtcgcattgtctctagaaccacggtacgtgtagccagttccctgctggtgaatcttcagtggttcctcatcatccgtgttacatgaaacactgcattactctcctccggcttagctttgtgtcttgcttggaaaggctgtccccactccaagtcttaaatgaaaatgagaccatttttaataatctttttaacacatctagaatttatggaggcaattgttcttctgattttgctttttgtggctttgtagaaaagtgatgaaacacgtatatgcccaatttaaaatgaagaataatcctgattttactttttagataataatcttatcccaggtacccagggctacgtctcttgtgtccatctattctcctacaggttacttgtttccctaatagatatttaagtttcctctatgtctaactgtggcttgatagtttttttttgttgttttgttttggttttttttgagacaagagtctcgttgtgttgctcaggttggagtgcagtggctcagtctcggctcactgcaaccgccgcctcccgggttcaagcatttctcctgcctcagcctcctgagtagctgggattacaggcgcgtacgaccatgcacagctaatttttatgttttagtagagacagggtttcaccatgttggccagggtkgtcttgaactcctgacctcaagtgatcctcccacgtcggcctcccacagtgctgggattacaggcatgagccaccatgcccgaccaatagttcatgtcttttttgccctaattaatagtcccttgtttggatgtaccatagttcattacctactaaaggacatctttgttgcttccaagttttggcagttataaatctgttataaacatcctggtgcaggattttgtgtggtcataagctttcacttcttttgggtaaatgccagggagcaccactgctttaatatgtggtaagactattaatttttgtgaagaactgctaaaccatgggtatccagtcttttggcttccctgggccacattggaagaaatgtcttgggccacgcataaaatacactaacaattgctgatgagcttaaaaaaaaaaatctcgtaacgttttgagaaagcttaacaaatttgtgttgggctgcatgcagcctgcgggccttgggttggacaagcttgtggtgaactgtcttccaaagtggctgcagcatcttgcattctcaccagcagtgaacaagggttgctattgctccagaycctcaccagcatttggtgttgtcagtgtttggatgtttgccattctgataggtgtgtgtggcatctcattgttctagtttgcatttccctgctgacatatgatgtggagtatcttttcatatgcttgtttgccatctgtgtatctggtttcgtaagggatctgttgagtgctttggcccactcttttttttgggacagggtctcaaccaggctagagtacagtggcacggtcttggctcactgcagcctctacttcccaggctcaagcgatcctcctgccttagcctcccaagtagctgggactacaggtgcatgccaccakgctaagttttgtatttcttttttgttttcctcgagacagtttcrttcttgtcgcccagactggagtgcaatggggcgatcttggctcactgcaacctacgcctcgcaggttcaagcgattctcctgcctcagcctctcaagtagctgtgatcacaggtgcccaccaccacgcccggctaatttttctattttttagttagtgatggggtttcgtcatgttggccaggctggtcttgaactcctgacctcaggtgatccacctgctttagcctcccaaagtgctgggattacaggcacgagccaccatgcccggccaattttgtattttttgaggaaatgtggtttcaccatgtttcccaggttggactcaaattcctgggctcaagtgatgagcctgcctccgcctcccaaagtgttgggaatataggcatgagccattacgcccagccttggcccactttttaagggggttggttgatttcttatttttgagttttaagaattctttgtatgctttagataacagtcctttataaaatgtgtcttttatacatattttctcctaggctgtggtttgccttttctgttttctcactctctttctctcttttctttttttagacagggtctctgtgtcatgcaggctgagtgcagtgcgcaatcacagcttactgcagcctcgacctcccgggttcaagtgatcttcccacctcagcctcccaagtagctgcaactataggcacgttaacacacctggctaatttttgtaaaattttttgtagcgatggagtctcactattgttgcccaggctggtcttgaactcctggacccaagcagtcctcytgccttggtttcccaaagtgctgtgattagaggcatgagccaccctgcctggccttatttttttttaggagaaatgtcttgctctgttgcccaggctggaatgttgtggcatgatcacagcttactgcagccttaaactcctgggttcaagtgatcctcctgcctcagcctctggagtagctaggactacaggtgcgtgccactatccctggctaatttttacattttttgtagagatggggtctcactattgttactcaggctggtctcaaacacctggcctcaagggatccatcccgccaaatggcttccaaaagtgctgggctcacaggcatgagccaccacgtccggctgtcctttccttctcttgacagtgtctctcacaaagcacaaagttattattttcgtgaagtccatcttaatcaattctctcatgggctgtgcctttggttttgtatctaaacagtctgccaaaccccaggtgatctaagttttctcctgtgttactgtctaggagttgcatagttttgcattttacatttgggtctgtgattcattttgtcttttttttcccccactttttgtggagaacggggtctcactatattgcccaggcaggtctcgagctcctgggctcaagcaatcctcctgcctctgcctccttgaaagctgggattacaggcgtgagccaccgtgccaggcctgtgattcattttgaatttatgttcgyggagggtatacggtctggtctagatttattctctttcatgaggatgtccagttgttccagcagcgtttattgaggaaaatgcctttgcaccattgcatccctctgctgctttgtcagaggccagttgactccttatgtgggtgcccctgtgatttgaaggccccagtgagactggctgagtcgaatgaatcggacttttctttctctgtcttgagcagtgcttctcactagtgtcaggccccgtgtctttgtacatctgtgatcttggcagctgtagggatgatggtggacttgtggtatttggctgagaacatccttgcagtccaggctaggggtcatgagcatggatgagtcacctgctggctgtgcccacgcttcccccgccaccatcctctgctctcttctttgcctgtgctttcttcttcctcgacaggrtagagctggcctctctgmccaagacagctgacagtgcatctcctttcccctgccgtgtttctggaacattgaactttaccagttgtgtttgttactatttagtaaggttatcttctccatgttgggttttgctggaggtgtgggtatggcatcttctagagaagatccagacctttttggattaaaagtaaggttacaaatcactgtgctgtacttgttgtcatatgagatttctgagttgtattgttgggataattttctttttctttttttgagatggagtctcgctgtgtcacccaggctggartgcagtggtgtgatctcggctcactgcaacctccacctcctrggttcaagcaattctcctgcctcagcctccygagtagctgggattacaggtgcctgccaccatgtccagctaatattttgtattagtagagacagggtttcaccrtgttagccaggatggtctcgatctcctgaccttgtgatcygcccgcctcagcctcccaaagcgctgggattataggggtgagccactgcgcacagcctgttgggataatttaagcttgacagttcaaggcctatgaaacaggaccagggctcaggagcatcctctttttcaggccgttaattaaggaaaagttgagccagggcgtgaccctcgtcgtggacagatacgcattttctggtgtggccttcaccggtgccaaggaggtgagtgccacttggcctcctgtcaggcgagcacagatgtgtggacccaggactgcccttgaatgcgagtacgagtgacatgcctcagattactctgcagagtttcgtgattcttatattccttttatctctttgctagattaatttggttttatcaataagaagagcaaacatttatgtagctagagattgtttcacagatagaaccatagttggtatttggattatattttccacacgcttttttttttttttttggggagacagtctctcattctgtcacccaggctggagtgcagtggcacgatctcagctcattgcaacctctgcctcctgagttcaagcgattatcctgcctcagtctcccgagtatctgggattataggcatgcaccaccgtgcccagctaattttcatacttttagtagagacggggttttaccatgttggccaggctggtctcaaactcctgacctcaagtgatccactcatctcagcctcccaaagtgctaggattacaggcatgagccactgcacccagcctccagatgcattttcaaagatggttcatttgtagtacttttttcccccgttttttgaaagagggcgtctccctctgttgcccaggctggagtacagtggaacaagcaaagctcgctataacaactcttgggcccaagtgatcctcccgcttcagcctcccaaagtgctgggattacaggcdcgagccaccgtgcccggccacgccctcactttttaattctgccatttcttcatgtgttagcttgagtccttcccctctgaagtattacgttgtataataaggaggacaagactcatgattcctttgcttcttcctgctgtgcggatcagctgacagagccgcaggctctgtgggaggttctcgtggacgccttccctcagctcattgtgctgttgtgtgatgtgtggcctgcagtcacagcctttctggtcctacctttcctccggaaacaggacagcatttggagggagatgggatgagtaagggagggagagagggtgctsgcacagccctggcaagaagggccagtggatgagactaggctggcacataacaggctctaggagtgcctgtcttcttcctgctcttccacgggagaggagaccctggcgtgtgtgtggcagaaaagacactgccaaggacctcgtgcctgtgtccggacccagctgctctgtgctgcaggcgtyctaggccgggggtctccaggggytctgtacatagactgtttgctcctggccagcaggcctgtagctgygctgggagggcctccatggggcctgggctgtgggtggcrgggactggcagccgttctrtctacctacttttctgtccacttgtctgtttacaaaggaaaaacaaaggtgacactggagaaacsgacacrtttgaggttctaaaaattaaacgagccacaatataaacagtctcacrtcttggtacctcaccaaatgtcccctcattttttcctgtttttacgactttcgaaacaaaaacctagactacactaagctttaactgttgggttctttcttggcagaatttttccctagaytggtgtaaacagccagacgtgggccttcccaaaccygacctggtcctgttcctccagttacagctggcggatgmtgccaagcggggagcgtttggccatgagcgctatgagaacggggctttccaggagcgggcgctccggtgtttccaccagctcatgaaagacacgactttgaactggaaggtgagaatcccagaattgcacactaggaagcgtggagaagtggctcaggatgacaccgtggtggctggcacagtcgtgtcagcaaagctgctgccgtttccgtctggtcctcccagatgtggagccccgggagtagtcgttcaggggttctcggtgccagcaaattcttttttttttgagacagaatcttgctctgggtgccaacccaggctggagtgcaatggcacgatctcagctcactgcaacctccgcttcttgggttcaagtgattctcctgcctcagcctccrgagtagctgggattacaggcacgtgccatcatgcctggctaattttttttgtagagatggggtttctccacgttggtcaggctggtctccaactcctgacctcaggtgatctgcccacctcggcctcccaaagtgctgggattataggcatgagccatcgcgcccggccagtgccagcaaattctaacccgatgagttttgctaaatgttgacatttggcgctttgtctggtgggtcaggtgagagtctgcgcaatcctccacatcctcagcccctcttcagacacgagcgccagcctgttcctgccactgtgtcctctggtgcggcctctcgctgggcatgggccctgcagcagcacctggccatctaagttcaggagggtgctgtgtgctgcctctcccttcagtcctgcctccttcaytctcagcagtcccaggtctggctctgctcccaggacgctggactctcccctcccagtggactcgcaggctggccgcctctgctcctcccgaccgcagcccctacctctctcccagactccagtcgcccgtgcccaccgctgcccacgtggcctctttccaggcrgcagccagggcttctggcacgtcgggcgccagcactgtcgcttgtggccacggcccgcrgagcttcagtcccttgagctcctcctccagagcagggccgagggtctcgccccagcccgactggctgtgcctgcagatgatgctggtcacgcagcttttcgtttcccggaacgcaggtgggatagcagtgcccttttctggcagtgcggcattctctctggcagtcattccgcccggagaggctcatcttgggcggttctgggcgacagctgtgtggctgcacagtggccagtgagaggcatctgggaaggtggcccttgtgtagggagtcactctccttccgtcacggtcacacctcatgaaatggttagattcttccaagtgccttctacgcccctggcagattttctagaatttgcygtcccagaagcttgagaagkgtccggtgccacccgacagcagaagccgggatgccgctgagaygccagcgcttctgagtccctctcactgcctgccttctggtggagagaaggctgtcctgcgggcttatgccctccccacgytcctcgcaccgttcacgccattgtgcagcacagctgttaggaccaaattcatcttccccgcaaggacgagtcaggcccagtgttgcactggtcctgctgtctggcttctgctgcggaacttcctcaccttccaggcagggcccaggagccacaggagcgtgggcrgggcagggtctgccctctgtgcttccgactcgccgcttgygagctggagggacagtcacctcgacctggtgggctgggtgggyctggctgtgctgtgggctgtgcctcactcctgcaagtgggcactcagcggggttggggtcacgaggctgaggtcggcttaaagcaggagtgggcagttggcacrtcatgtttctcctgcatcagggctgtggcaggaatgccgggtgactaccgtagacacttgtcaaggytgaggttcagagaaaggtgtggggtatcccggaggtcaccacagtgtgccaggaggttcaggttggccttccagagcccggcctgtgtgaaatccccacgagcacagaggacagaacraaacatggtgttgttttgaracagggtgttactgtgtcacccaggctggagtagagtggtgccacattttttgtagagacggggtgtccctgtgtagcccaggctggtcttgaactcctgggtacaagcagtcctccctcgtgggcctcccaaagtgctgggattacaggcgtgggctcccgtgacyagcctggaacrtgctgatgagcctctttttctcctgaaaccccggtgggaacagatggtggatgcttccaaaagcatcgaagctgtccatgaggacatccgcgtgctctctgaggacgccatccgcactgccacagagaagccgctgggggagctatggaagtgacccaaggctgcccactggagacgcctctccctgcagtcccccgagaggtgggagactcgcrgaaggcccygtccccagcrgagtccagaccccacaacttcaggagctctttcccggcagcagagatctgcaggctgcctcttytgccccggagctggggtgcactggggacccccgtggtggggaccttggcagtgtggacatgagcagagcgatggagcagtctcctgccctctcccctgtcctgatggcactctgttgtattttcttactgaagttcagtgataactctgagcagtttcattgtgatcactgtaaatggtaatcagttggaattctcctaaatgtcttccagacactagtaaaaaamgacctgaaaattgtttgtggaacgcttcacttttcttagactgaggacggagctggctttgaatgggaacctccatcccaggagagaagagccttcattgggcccagtagggccttcctggaccctggttcctgcctagttgagggagtcccactgtgggtctgaacagttgcagccatgccctgggctcgctgggtccagccaggctatatccgagtgtcatcacagcttacgtcctgaactcacctaagttaactctgctattttcattgcaaccctggagcttaacttctcatcctatcctttattttttatttttttggaaacagggtctcactgtcgcccaggctggagtgcagtggcacgatcgtggctcactgcagccttgacctcctgggctcaggtgatcctcctacttcagcctcctgagtagctaggcctacaggccttcactgtgcctgggtaatttttttgtggagacaggatttcgctatgttgccagccaggcttgtcttaaactcctgggctcaagtgatctacctgccttggcctccccaaagtgctgggagtacaggcatgagccaccatgccgagcccattgcatccccttttaagtgacacttagaaggaatgatttgacactcctggcagaatctgtcccacagagcacactccgcatagacagcagcatacagtgtgctggagtagaaggcaggcagggtcccccatctgtgggggcagcagctgtgggtctcagcacccttctgtggccaagagacaaacccaggcaaaacaaaaggatttcactcttgggtaagcattgccaggggctgtgggatgggcctgggtgaggaaccttcagatgagactttcctggactatccaggtgggcccagtgtcatcacaggggcctttttttgttgtcttaagactgggtctcactctgtcatccaggctggagtgcagtggtgcaatcttgactcactgcagcctctctttcctgggctcaagtgatccaccttagcctcccaaagtgctgggattacaggctggcgccaccatgcctggcccatcacgggtccgcataacagggaggcaggcggtccgagtcaggaaatgagatgccaacagcaaaagctggagagatgccatgttgctggctgtgtggttggaggaaagagccatgagccaagcagtttctggcatccagaagctagaaaggcacagcaacgttctcccctagagcccacagcacgacatggctgtctgccctccgggtctggaagaggctgtgctgttccaggcactgaatgtgatcatcttttagagcagccacaagaagcgaatacgagcatcggagaggccacaagtcctcagccacctcaccggggacccagcagggccccctccggtctggctttgggcccttcacacctataccagggctgcccacagggatgcactggccagagtgagcaatgtcctcaccaagccccctgctgtgccccaggcatggcctcccacaggccaggacagtcactgcgcacttggggaaggctttgctatgattcaaatcgaggcaaaccctgcaactccaggcacttcctgtgacttcctcctgctgaagatgggaaccgccattttactttcctaaaatcctattttccttgcactttttccttctagggttgtatgaggtggctgatgccacggctggtagagagccaggctgcaggcaggacaggccccctgccagggctggggacacacctgctcagggccccacagcccgccacgcaggcagccacatcctttacgtgtgaacgggctgaaacattcacttattttttttctggaactcacattcaattagaacttaaggaaaaaatagacacaaggtttgttttctactgaaacttattatttgccattaagaattgcaaactatactactaagaatgaacaacattctcttcattaagcctttttcaaaacacacgagacaaagctcccctttggtcaaggtgtcccacacattcccactgcagctcccagcacagcggcgcaccatgaactcggacgcggagcccaaggaatggagatcgcaccagccttccctgcttccccaccccaactacacccaagggagaaaggatacgaggaaatacactatgtcttcaatgcttggggggctgggggtgtcctctgctaccaggtgggccggtcagtgccgactgtccggcgcgcgtcctcggggatctccggctccccgacctacacaagcagcagcagcagcagcgagtcctgccaacgccgcagtagctgctcatgagaaaagtgcccacgctccccaagccctcctgtttacatttcctagtggggcaaagctactttcccaggacaggcagcagagcagtggggcagagtgcactctgggacccgggacagcaggttacacagggtcaggcggtggtgggtgctggaatcggggctgaggttctggaaatgccaccaggtgatgccaccctgtggtgtctgcccaccacacaccacaagactcaagtggttttccccttttggccctaaaccacctaacacctcagcggcatgggagggcaattctcagcaaggcaaggacatggggaaggctcctgggagaggcacgccgtccaccctcaagcctgactgtcacaggtggaggccccgccccccccgtcaccacacctggggaagctgccacagaatgccacagcactggaaagggacactctgagggcaggctccagcagcagctccaggacagccagccgcccttctgcccaggccgcccacgctgtgtcctgtgcacgccatcttcaggtttcccacacacccacttcctgaatacttttctccccaaagcaaggaggaacctcgccttcgttcctccaacctcatctcccactgaggtagcccttggtaagccaggctgggcagagaggacacagcggtgggcgcgcccccctcgagagcagcccagtccttgggcgtggggccgcagtgtggctgccgctcctctcacgccagcctgcacaggtcttctgagactctgactcagggagcgccccagaaattcatgtctgtgtctgacaacttcaaacaggactttaattccaaaccaaccacagaaccggcgcctgggagcaagtgggactgaggcccaggtgctaacacggggctggcagtgtcgagagaacgctctggaagctcctaacagacggctccgcgtgcggatgcacaggccctgacgggcactctgagctgggcagtctgacaccaagcagtaaggcctcccgggcagcgcagcctcagtccacgagcacagcgggtggccctctggggggaggcagcacggggcgcagccctcggcaggcgagcgggcgggatggatgaaacgcagcggcaccaggagccccaggctctcacaggtgccacccccgaccccaggattttcaaagggacaggatttcaaagtcttcatcttctgagtcgaagaatctttccagtcgctctacatcagaagaatctagaaggaacaggacatagcgcatcaggcatcttgggtgggccacctgggtgtgagtcaagggcccttggcgtggggcagactgagcagtgcctgctctgcagcccacagacagctgtccccatgcgggtgtgaacaggtccgggggttgtgcagacctgcgaatatggggggagggagcagagaagaggagcagggcagggtgaggagggcagggggcggccggcacaatctcaggcctgaggggcctctgtcccgcgtctgaccctcgtggtcatcaggagtggttccattgccattgccttgtttgtagagtttcccacagggagacagagatgaggaggacgcgctcacggccactcacttcactgcacgagcccaggccggctcctgcggcacgctggccatggtccgaggggtctacgccacccatggccagtggtgcccaagtgaaccagtcccccacccaggactgcgtcaccacagagcctgcatgttctgtctgctccagacccctgaggactccatggtagcacgcccagctccacagcgcccgggcaggcagcgctggtggggaagacgaggtgggtcctgggctgctgggcgcaagcttggaggaggggacgctccactccatacctggtctcacaggcgaaccactgccaagtgctcacggctcaggctcacacacaccttaatggtcaaaaccaagggggccaggactggggaagcaagggcacagatcgtacctccgagggaccccacctggacttggcagctctcacctagggacaggttcaggacgtcggggcaggccagatgtgaaggctgctgctccaccagctcaaacatgggcagggcacctccaagcagagacagctgttagtgagacatggccgttaggtgcagcctcaccccagtgcttgctgcggccaagagaaaggggccagccggccacagccagcggacaaacctgtcatcccatctcactgatgagaaaacagaggcagctccacactaaaggctacacgagaacccagtgtggtgatcaacacacagcacagtctgaccaccacggcagaggggggtgggccacacgcactcggccggcgtagctcagcaccccatcaccacccccatctcaacaggagacggatgaggacactggaaatcccattctaaagtcaacacgcaacatccgtccccagggttgttaactgtgttgccagatgggcaatccaggacgccccaccctgctcagctacatagctgtgccaggcgggacaaagctccccacggcccagtgaggctgcctgagacctggacgcaggccttcgacccctgcacgccccactgcctgtctccctgggtggctcagctcggctgtgggtgtggggcggctacaaacctttttgacttgctggcaccaatcattgaagtcatcttcagtcttacagaaaaacccctaaaacgaaatgacgatgagcagaacacgacacccccatctgcagtcggctaagaggtgggggcttccattcccactgccagtggcgcagcagaggcccccagcatgcaggtgctggacattccagcctgccttggctcctgtggccaggaacggagctccgagggtgccctgtgcatggtcccctgcaccagtgcccggctcccctcaggctccactgcgttgctgtgccttgattcgcccacgagatgttacgtggtgtgcatctctcaaacctcaccgagtgttccgggattggggcaggttatgagttagggccaagtggggagctcttctctctgtgactgtgaggcagggccgctgggtctcagccttcgcccagcagctccctggaagcttggcggcaaaggccaccgagaactgcccaaggacaccgtgacacagggagcctcctgctgaggagccaggagacaggggaccggccaagggtcaccggcaatcacatccttaaagctgccgcctgtaatgacagtcactaggaattctcaacgctgccagatgcgcagatgttaacacaaaaagaaacgaaatggggggagaagctcaaactgggcactctcttcccctgaagacaccattctgccgcctcggcgctggtgtaggagcactctcccccggggacaggggacattcctcctcctcacgggtgaggacagttatcccaccaggtggcccctttggtctcaactcaacgttcacgcgtccactcctctgtctgcggtggctggctctctagcctgacctgactgttagagtgccaatcactgtaagccaccaagctgcgtttacagtaacaaacatacctaattctagttcgacgaggaattcgtgactaggttctggtaagaagtgtgcgccaggctgcgcgcagtggctcacgcctgtaatcccagcactttgggaggccgaggtgggtggatcatg

SEQ ID NO: 8935 - DNA, 40000 bp, Homo sapiens
gatgactcattcacaggaaaggtgggcaccttccttctggccctgagaaacaaaagggctggctgggtctctccagggtccctctggctccaaactccactcagatgtttccaaaggccctcaccatcccttgaacatccttaaatagcacaatcactggagaaggccttagayctttgccccagcgctaacaccaaactcaaagtyaggtgctccactccacccaagataagtggttcccaggatctcatcaackgtatttagaaagccttagcccaaactgtttacactcttccatggcctyttaccataaggctgagattaaaaagaatctcaaagtcgcagcatttarcatctcatcagctcattggaccatagacctattcctcccctaacacaggcacctgcacacttaaggatacttggaggaagcaccagggggtcaaaggaaaggagaacaacagaaaaatacctctggtttttgttatgtggtgcaggattttcaagacttatggctaaaaaaaaaattagagaaacaaactcctccaaaacttggggaattaagccgtctatggaatccmacagattagcagtttccctccatctggtacaaccaaaatgcatcaaacgagttaggctagagtttctctccccagcccccagtgacccttctgaattccaggccgaatgtaggcatgagaaatccatggctgcctggcccagcctcattataactttatgcaasgctgcagacagacagggctcaaaatagttcccagcagtggaaagagaagagggaaaacayggagcaagtattttcataaggatggggttatgtgcaaagggattaaaaaaaatgcrgacaccatgatacatgctttgaataatctaaagaaagcaagagaagacactcttgctaattttcaggagataccaggttaaggatggaaaagatcttcatgagcaagacttatgcttaccatcacaatgaccgtaaagatacgctcatcttccacctaacctaattgtctgtgtccttgtgtaatgcccttwtggtagctctgtcagaggtgttcgaaccagagcaactctatcttgaataggggctgggtagaatgaggctgcattgccagaaggtgaggcattcttactcattggatgagacgggaggtccaracaygacattgctcacaaagactcccactaataaaacaggacgtggaaaaaaaaaaaaaacatggccaaaatccaccaaaaccaagatggcaacccaagtgaccttctgttgtcctcactgctcattatatgctaattataatgcattagccactaaaagacactcccaccagcgccatgacagtttacaaatgccatggcaacatcaggaagtcaccctatatggtctaggaagggggaacctcagttccaggaattcatgaataacccaccccttgtttagcataggatcgaaaaataactgtaagtatactcaatcaagcagcccataccactgctctatggagcagccattcttttgtttctttacttctctaatacatttgctttcgctttactctatggacttgccttgaattctttcttgctcgaggtgcaagaaccctctcttggggtctggatcgggacccctttccagtaatagctccaatagatttatcacttacctcaaactactgagtctctattagagacacaggctttatcctcaagcaagatgccagggctgggattagggtgaggcaggtgaggtaagtggagcaagctcagggctggatcctgcctttactaaaaacaatatttggtcgattatgaatttttttttgcactcattttggctttctgaaaatagtgcattacattttacttgttttttcctactttctggtgcctcctgaaagtttgtacatgagggagtgcctcactcaccccagtctattctcagccctgcaagagacccatggaaatcagattcctaaaaatccagaaaagttacatggacctctgctgtctcatgtagttgcttctgactctcggcaaagcaattttgcgctccccaagttgtggggcgaaactgtccaccagcgggccagtcatgtttttggttgcgtctgtcggtacttttgtcatcaatgcatatgaaatgaagctgtttctggtttttcaattactgggccagggaccaggcctccctgactgttctgttcctgagttactgtttattaagagctcccaccaagtctgccctgaggaggccacaaaagaagaagaggccagtgcttccaagcctgtgaatgtccccaaggtctcccaaagctcttggccctcctaagactctgaggtgmggcagatgagaaagagagctgatgcctcatcctgtctgtctattcttgggaggtttggtgggtgagccaggattccgaagcccccaaaactatgcggacaaacaattcattcacatgtggctgtctgtactcagccatgctctgcaatttattttccgagtgcaattaatttctattccaaagtgggcaaaagtctgtgtgtatgtgtgtgtgcatttccaattttgaggaactctgtttcaactgaaacatgacaaggaaggagaccaggtcactttctcatgcaaaacagagaccatccacttccaatacactgyaacgrggggtggtgccgtagacagggtcaccctttacagctccccctctgaggtttggaactggaattataaagcagaagcattgtttgcctcccagcttcctttgttttaaattcttgcaggaacaaacatgaccagacacatcagagcctttcatgtgccttcagattgaaggccaagttcctcactgtaatggccctttcatctagcacaaatccaaattctccctcggggtcacacagggtcacaacctctttgtaccaayttttcttgctacaaatcaaactgccttccagcctcaagtccctctgtctcccaagtggagattagttgcattccaccaagtctgtttttgttcctggrccactcacacttcctgctgactctggggcagaaaacgggctttctacctgtgcatccccaacagaaaagtcctcgtaggactgacctttccaacaaactgcgaaacttagccctaagtctccccaattttaaagaagtatcttgccgtccagtgttctaagaaatatgccactccaactcaaaactggtacccaaaagtgtgctaatttctaaggaagagatagaaatggttatgtgaggggaaaaacctcctgaaaccatgatcagtcagaacctcaagctcagggtcccttttaasctggccaacaccctcttctttcacatgcccgtctcaaaagcacatcatgaaatgatgttttctaaatagatgtctgtgggatttcctcgattgcttcctggtgactcccagttggtgacycccacttcaggtcctgggcaatgctgggtgaagtcagaagtgaggctactggtgccccatggggtcctcagctgcaaattacaaggcattatatctactctgctggacgtaccaaggacatgagagccacagatgcctcacagagctctcagcataggtgtttaacaaagaggtaaacagatcattcctgttctcctgaactgagaccctaatcaccccaatcaccacccctacctcctatttcacagacacagccccagacgggtgcccgcaaagagcgccatgccccattactgaaaactttcagtgatttaccaaggggagagggaagcaatagaaagcagaaaggaggggctggaagggcgggactgaatctcagcccagcccagcaacctttgaccacagagtctttatcaggctgcttatcagcaacagcagacagccaggcacaccttttcccagagtctgtaagctttctgctaattgaggctaacagaccgtcctgcaggggacagggtggacaggtttgctccggggcactccaggagctaagatcagagtcagaaggtccaaagaggtggaccccagcagaacttgagcaaggactttctactcaccagccagcatcctccaatcacaggattggatatggcaggaggactggttttggcccaggaagggcttctgcagggctggaggttgtgttgttatcattgtggccaccatcttcaagacgttgagtgtttactagattgtaggcgctgtgctaaccacgccctgtgtacttwcttgtgtcatcctgaaaacatctttcctcatagagtgctatctattcccccactctctagatggggacactgaaggtctcagaggtgacatctcctaagtggcagatccagatttcagcccaggcattcgagcccacagtttgagctcttaacccctacaaagggatctgttcctcctccacgtgacaatttggatgagtgggccccaggccccattcctctctaaaccccaggagtctctaaaccaaagtgtgaagctggatctgcaagaagagatggatttgagcagtcccacctcctatgtctgccctgctcccgtaaccacaccaagaagcaagaagacagaacaaggcacagagcagcagccaagaaaagaaaaatcctgcaccaggaatgagactcatggcctgggggtccctcgccctctcgcctagactcagccccctctgtcccagcatctctgacatcaggacaaaccttctggtttgcttggagtgcacactcaaccagcccctcttacccacagagaaaccaccaagggctctggtaggctaaaggaaaatcacatgcttctatgcaagccaaggctacatttccagaataaaatttaggacttgtgatggaccaaggatttgggttttgcccatgtgttaacatatgttamtaaaaataatcttgcaaaagggtaaatatatgattacatagaattatatataygaatcatcactatcaaaaagaacaaaaccccagccctaacaatgtaacaagacccgatctctacaaaaaaaaaaaaaaattactaaattagctaggcatggtgacacgcacctgtggttccagctactcgggaggctgaggtgggagattcgattgagcccaggagttcaaagttgcagtgacctatgattgcatcactgcacttcagcctgggcgacagaatgagacactgtctcaaaaagaacaaaaccacccttaatcagtcacggatggggaaccatgtcttttattcattcttgggtcccagagccccattcaatactgacccaggtgagmcactctgggaaaacatattaaatgaacgaaagcaggagtcatctaagatggcatattagtcacctaagaagcccatgttgggaacatgcacacaggaggaggcttacagggcaggcttcagggccaaacttctgggctggcagcccagtccctactcacaagctctgcaaccttggccaactgactccgcctcctgggctcagcttcttcctgtaaactacagggacaatagcatccaactaatggggctgtcaagctgatcccatgagatgacatgaggtcacagtcatggtcagccatcctcaccatccatgattagtagcagactattcatgacccctttccaaaaccatgatggcagaaagactggccctctgcctcatatggccacatgtccaacaatgatactgccaggtgtggctcacaggtcagggtgacttttgtttttttgagatggaatcttggtctgtcacccaggctgtagtgcagtggcgtgatctctgctwactgcaacctccacctyctgggttcaagtgattctcctgcttcagcctctccagtagctgggactacaggcacatgccaccatgcctggctattttttgtatttttagtacagacgyggtttcaccatgttggccaggctcatctcaaactcctgacttcaagtgatctgcccacctcagcctcccaaagtgttgggtttataggtgtgagccaccgcgcctggcccagggtgacttttatcgggatcccaaaatcacattctggtgctcagctggctcctcatgtgcaggaagttggggttccagatccaaccgttctattgggatgttctaaaatttggaatatctcttcttgagaccatgccaagatgcctttcttgaagaacacagaaggcaaagccagaatctgtgatgctgcccttttgtggtagaatacattaaaatacaagtttasatgttttgttaatgcttttttttttttttttttttttttactctttatgcatttaggggagaaaaaaactcaaaagaaatggcattcctgctggattaagtttagtgtggcttgatccagggcagcctgggaagccggcctgggcatcttgataggagctgatcagactgttgggattaggagagacttggcagctcactgtcctggagcggctgatgtctgcaccttccagagggtcacagagaggcaacagcacctcctggctcaaggccacacagatagtcatggccaggactcaagggcagcacttctgggttctggagtcttctccacaagtcgggactgcaaatcccaaattttccaccatgatcatgattcccaacatcctgccctgttcttttcataactacattcctatctgccagcccatgtgtgtcagattttggtttggaaaacacagtcaccatccagcatcacaatgcctccctcagatgtccttagagggatgaacagatggcaggatccctcagctcatggggcggggaggagcacagtggggctctttgctgggtgcttcacagctcagtcagccattggataaacaggttttcagtcttcagccaggctctgaggggctggtccgccatgaaatgtggttcgagctgacatccccgttatgggtcactttaggtgtcaacttggctaggatactgtgcccagttgttragtcaaactgcagcctagatgttgccctgaaggtatttytgatatgtgattaacatttaaatcagtagactttgagcaargcagctgaccctccaaaatgtagtgggcctcatccaatctgttgagggccttcacagaaaagacaggttcccgaacagaaaagaattctgcttccagacctccttgacatcaactccctcgggaattttcagcctggtggcatgcagatttctggcctgccagcccccacaatcatgtaagccaaattctgaaaattgctctttgtctctctccatatatatatctctggagggacattgcccataacttctgtttatcctccataaaagtccatggcccccaagagcaaccaaatatttcctttggcaaccgcacttctgatatatgcataatctgcagacatgcacacaccctgttggttctgtctctctagagaaccctgactcctacaggccccagctacctggtatctgtttcttcagtctgctcatagaggacagccgcagtgtacaaggacatcagcacacggaccccttgttcaccacctgtccccttactatcttattcttggcaacttatccatgacaataggatgggatatgtttttctctgatttgggactttgattttgttggcagtggtgggatggcttggggactgtgggggacagccaaggaaaggctaatggaaatcatgctatcccattgatgaactgtgatcccagcagccttgacagggtaagtataaatttggttcctctttggggcgatggacttttgggaagatatcacagaagttatgggcaacatccccaagaaaaactctcttgcccacccctgtctacagggatgtgcaggcccctgaagagcagccaggcacctggagaaagaggcctcctgtgtgggagaaygcactggagatttaggggctcagcaacagcaaagatgagccagagtacccaggtggcaggacttagccaaaagtcaaccagcatttcctgagcatccatgccatgctgggtgctaacagaaagggccgaccaagctcgggtctggaaggactaaggaggggaaaaaagcaggagggctaaagggacagccgaggaatctcagarcttctttccaaaagagacttaagagaccaactagtctcttgagcctgaactagacagttaacttcccttgaggagatgcaaagcgggtctcggtagtaactcccaatatgactcctgcagcatctcagatcctcgaagggagcaaaaatgaccgtactcagagcaatttccatcaaagatcaactaggagtgttgattctgtcttcacgcagctggatgcgccatgggaggaaaggctctgaaaggtgaaaagcacccaargttcaagacccctgactgaggcacaagaatcaaggctccttctcgtgcccagaacagctgccgctgggacagggagaaatcacacctggtggagaagtttggagagggagaccagtccatgaatgaagagggcgtgacagcaggagaggggaacatgtgacaggtggggttgtgatctaatggggagacagaaccactagaaaagactgtgtccctcacttccagtgcctcttttgctcaattcagtgattttttagattcctccccatcactcctgttccctgtcaccacagcccattttctcaaattgcagtcttgcctgagatattttaaagatgacaacagacctatctacacatctacagagtttcaggaaggaagggaaggagggagggaaaagaagggaaaggaaagagggaaagaagggagggggagagggagggagggcaggaggaagtttggagggtaagaaagaaaggagggaggcaggaagggagggaaggaggccatttgggaagttctgactcataaaaattattttacctgtctaatttcaaaatgctcaagtctggctattgtcgtttttgtttcccaagtagctcaggggatgcccaaacaccagatttaatccttctttcatcatgtttaaattgaaccagtgtcgggaaggaagggaagaggtaaarcacacttcagggggaaagttatcaagttggctgtcctggaaaaagtcagagagccacagcttcatttcaggacaaactcgaaatcatgagacaggacttcaaacagatcgcaggatgcatgagacagaattttaaacagatcacagggtgttggttgagactctcagacatgtctcaagtcatcacttcctccccagccagtgctccggggtttggtaaacaggcaacgaatgaaagagatrgtttccaaatcctctcccacctgcccaccaccrcaggttcctgtctgtcattccattagctttcttctttctccttctagattcacagctggggattctggccaagacaagaactcggttcctggtgactgcccagtgccctccattctatgaagtgaatttgatcagagcacaatgatgcaggataagaatcagaaagggcagtgccaaggtgcaggggctacaaggaaaggtgactrccctcgctatctgaggataagaggcaattgatgatggcccaacactcacagcttctatcttccccacaaagggaaagaaacagggaggcacctcccatcctctaggtggacacagcccagccagcaaatcagggtatcacgaccagctacagaatttatgggacccaggagaaaatgcaaatgtgcagctctttgttcagaaagtattaaggatttcaagacagtgacagcaggactttaagccgagccagagtctttctgagtgcaggactttgtgcacgtgtcctgctggctcaatgtgaagcccctgcctgcccttcgagcatggtggggtgatgttccagatctatcatggatgtgattagaggtcttgtcccctggtctgaaagacattccacccctcaggtttactaccctcgtctgcacttcatttttgaggtgccgatgacacaaggtaggtaagtgagccccatgaaagctgctaccaagggctcagaggttatggggcttggggataaaggtgaccgtgaggaacctgaatcaagacggctccgggacacggtggcaaaggtgcctttccaggcttccaggggcttgcattcacaaccatctctgagttctcagctaagaatccctaatagggtacaagcaagagtcccaagagatcccatgaacacccagggaacagaacttagaggtgtctgatccaagtcccagatcttagagatggggaagccaatgccagagagttggtgacccaggcaaggtcaagccctctgtatggcctgcaagatgatgtgcctgcaggaggggttccctgaacactgggagtcatcaaagcctccccctgtcagagccacactctctccacatggccccaggagaaggctgacttccccactggacgaaccccaagacaaattcaggatggtgctgtctaggccctagggtaagagagtttctaaggactgcaggagagaagggaaggccctctgtgaccatggcagtgggtgactggagccagcctgtggaaggcccaaggacgagctgatgtgaattcaccctgccttggcatccaggggggcccacaggaaggaagggagcccatcccaggggaattctaccccgagtggactgtgcaggttctgscaggctcagctaaacccacccttagactccctggagaccaggatgctttcaaggaattttaaaccccttggatcctggtggggtcaacagtgagtatgagcccccttggcccctggggaatgagataaactttcggggctttctctatctcagaaaagaggctcagagagacatctcaggtatctaatccccctggtcagttcacttcattcagagggagggctcctccttccacaggatcaaactcaggattgagtttctcttgggccaggccctcaggggggatgtgggtcacacccctgacctgcagaagagacctgggctggcaagaggccccagcaagagctaaaggctgtgccagggcaggctctgggctaactgagcggggctggggtggagtgaggtcctcctgggaatgagcagatgtgggcctggtccgggagccacgttcctcaccacaaaaggctgacttactcgggagtgttgatccaaatgatgtccaggtggcaatagtagacacactccttgtccttgtaggtgaagcacgtgcagcgcctggatcggtggtgcrcaggggccccctcggccgcctgctcctgcccagggcttccagggcttggaccctgcagtgctgtcggggccacagtcccctcgccakggccagccacagtctcctcgccagggccagccacagtctcttcacagtccccctcagatctggctgcagtgggggcctgggacacgccgcgcctgccagcatccccagactgggagcaaggcacgaatcctgcagaaggcagattgaggggctcctaagctgagtgtgcagacccctcaacacccgccacccccaaacacctgaggaggggggtggagcaagcaaaatgtctgcaaagtttccaaagctctgcgcagtttctgaaaagtttccaagctatctgcacactctgtgaaaagcttgcaagctatctgcacccgttgaaaacttgcatgcattttgcatactttctgcaaactttgccagggtttggcacagcctctgaatagttcgcaaactttctgaaaagtccccagtttcatgaaaaattgaccaagtcggcccaggcagcaggtctccagccagtgcgcgggctgcayctcccggagcccgtgcgggtagtcgttgcgcgccgcttctgctccccagccctcccccaggcgtcmtcacgagtgcagagcccaggcaagagtttgctccccgcgacgcacatcttctccgcgcctcgggtcccccgccctgggtccttttgtgtgcgctcgcgccaggagaggcgcgccgccccgtgcgcttacctgcggcggaggtcactgtgagcccgaaaaggagccacagccccggctccatgaacctagatcaggcgccggagcaccggaccaggaggacggccgcttgtggccrcgaaagggcactggggccgggtacagctggcctcgccctccagctgtgggggttcgaggccggccgatcgctcgctgcgtctccagctccggccaggagttggctgcggcggtcataaactttcagagcgcgctgcccatccctgcgcggagctggccggctgtggctcgggcttttctggcttctgcaccacccccgtcgcctccccgccccccagaggggctggaactgcctcgccgggcctttgaacccgggcgcactgggggtcgcctcccaggcgctggggggagctggccaggagcgcagcggcccgaggcgcacccaggacagcgaggggcgggggcggcgtggcgtggcgcggctgggtgyggtggggtagggtggggtgggggccgggacagctgccagctgccggaaggccacgagagcgcgcgcacacacgcacacgcgcgctcacactcacaggcgcacccccgcccgccagttcgccgctccggagtagcagccccccatccaagagcaagaacagatgagaaaaggctgtgctcaaggggtgttatcttttctatcaggggctgagggaaagacacatttctcattgttccccgagtgacaccttccccttgaagagcctgcttgccaaggaactrggtgtactttacactcttgactcacgcctcgggctggctccctacctctcccaggagttcagagcctgcgtgtggggcagtggcctgggagcaaagtcaacaaagatcctgggttagcggtcctgtggtgtccagggcttcctcagccatctgcacaggttgggtggcttcaggtgagagtcgggctcctctccctaaaggccaagttcattcacacaaccgtccctaccaagggaaatgacctcccaagagagccccctacttccttcatagccttccaagtcctgtgtgtgggaggctgtccccatctccagctcagataaaaatgtctgagactgggaagtcctcctgacttctcagggcacttgtggtcaaaggaccctcctttcataacagatggggttgggggaggggcagtgcttcacatctgtaattccagctctttgagaggccaaggtggatggattgcttgagcctgggagttcaagaccagcctgggcaacatagcgagacctcatctctaaaaaatggggttgaattgggtcctgccctctactagccttaacgaccagcttctgaaaactagaaagcagctgaagtgaccagagcagtttctgaggacagtccaaaagagtgctacaacatccccctggcttgatagctcaggacacctgtcctctgaacacagctgctgtaccaggaggaagccctaacaagcccacctggagagatcacctggagaaacctacgtggagagaaaccgaggcctcccagccgaccaccagtgtcagccactgacctgagtgaatgtgccttccgatgatttgagctcccagccctcaagacttccaactgaggaatagctgtcccgctgtaccctgtccgaacttcccacccacacaatccatgagcataataaatggttgttttacagcactaaactctgggtaaattggtacagagctgcagtaactagagtagcactcaagcttccagcactgaagctgatgctgaagttctccatccccccactcccatcccatcctgcctagcccttgaatccaagtgtttatttgtttgtttttgcacttgatgctttgaaaataagaaaaacccaagactcacaatatcttctgttcctgctgggctagaatttggaycattttagtattatctttgtttgttggggctactataacaaaacgccataagctgggtggctgataaaccgcagagttttatttttcacatttttggggtctggaaaaccaagatcaaggtgctggtagattcggtgtttaataagggctcgatttctgatcatggatggtgacttctcactgcatcctcagttgtggaagggtcaaggcagctctctgggggtctcttttctaaggacaccaaccccattcatgagggctgcaarwctcatgacttaatcacccctcaagggccccacctcctgacatcatcaccttcatggataggatttcaacagataaatcmggagaggacaaatattcagaccataataattactatctctttggaattaaaatttccatcttcaacaaaataaaaagtccttggattgggggatggctggaggaatagaaaatatactaatcagctaaaaggagaaaaggagtaggaggaggtttccgggtaccrtgttcagacacaggaggtatcatggctgcttagaccactctctgggtctatggccttcagtagcttgaagccgacaccaccacttgtcttcactgggactaaaaatcaacaaaccctggatgagcctctcaggcaccaggaggtgctagccaaataccaggatggagctggccctgccctctgggtcttctactctagttgaggtaaggaagttcagaaatagatcgccaaggatccaggatgctgagaacataaaacgccgcacagagctaagagaagaagacagtgtgttcagctggatgatcagaggaggcagcattgtccttggtccctaaagcaagccggrcgccatgatttgaggcagcagcctgcagtgacactcgccaacaccagctctcaagcgaaagagctccctttcctactgttcttctggcttctgacgatggccagggcaatgactcgatgtgtctttaacagctctcgaacagagagagagctgtacaaagggatttttgaacaaagggatacaaaaggaatgtagraggccataggcttgtacaaagggatagcaggccataggcttggagcctttgtcaggctgtggaatcgggcttactgtgcatggtagtgattgacataaaattcctttctaaattaatacacttaagtcaagtaaaggtaacctcaattacaatatgaagtaattcattgtaaagccggcttggagacttggcaagatcacaaagccttctgggttccaggctaagaaatgtgcaaaggaaatatacaattcatgtaactcaatggcaagctggtggtttccatcattgttttgcccttgtgacaactcaacaaaatttatgctaacattatccccatctcacagattaaaaaactaaggctcgaaaaggtcaaagtaaccagcctacaaccatgcatctattaagtggcagtctatcaggattcaaatttgactccacatgattccagggacagagttcataatgcttaagcagcgctgcctctggaactcatacccaaggttttaatggttcccattttcttctgtgtatcattgacaactcactgcctctccatctgtctagtttccattccataatctctgatggaaggtcatgtaaaggaatgatgacctctacagaggacacgaatgaataggcattcttctccgcagacgtctgccaatattccttgatcctccttcactgcctcagcatccaatgtgcccctaggagaagtcatgtatcaggacactgctggggctcggccaagtgcacggcttggtcattgtgtttatttttcctcaactttttccaagtcagcagatgtgcgactgatactttgagtccttaccacttacattttgattcaaaacccagccattaagaatgttgcaatttatctcagataagcatcccctcaagttgtctctttatgtgctttatgattctttgaagattgtttttcctttaatttaagggatttaagggagagtaacataatacattatgtagttttccatcatgctggaatttcttctccccacccacccacagcagcaggaactctggacttactcaaaaaccaagtaattaagtgcttttccatgttgtccaactcttagctgtgtcttccctcactggcacgyggttcattctaagatgcactggaggaagtgccaggctccaaatcccttgctttacaaatgaggtacactgtgtataatattctccgtgaaataaaatgatcacaatgcattctgaactttagtgctatcaataaaatgtgttcaaagcctaagygaaatcgggtgatcccaaaagcaacaamacttgttcaaaagagtcctgaagttttttcctgtgttttctgctgtggacatttgctgttgttgccctgccagcatccccatccctccaggtctggtaatggaccacatcttcccctggggaaccacccctccccttctctgtccaagtggtttcaggggacgctccagggccaggcttgtgactatggattaactaatcagaccatacatcatmtttgagataggaagaataatggtatccccaaagatgtscatgtcctaatcctcagaacctgtgaayatgtcaactaacatggcaaaagggattttaagggtgtgattaaagacattgagmtgggagatgaccctggattatcgggggtggggggcggtgggcaatgtaatttttaaaaatgttcttttaagagggagggggaggytcagcgtcagagaagctgtgacaatggaaacagaagttgggctggtacaaggctatgagcagaggaacacaggcaatgtctagaaaatggaaaaggcaagggaatgaattrtttccttcagcctccagaaggcacatagcccttccaacctatttttagactgctgacctccagaactataagataatcaattggtattgttttaaaccattaagttcatgatgatttgttgcagyagyaataagaaattaatacaactttaaatatagtgatttgtccagagataggcccytgagccaagcctggctgctcaggacccaggagattcagttctgggactttgaaaagaggctcttctgtttttctggggagccgctgagaaaatcagatgaaagcttgctggtgccagcagtacttgtcatcatgaggtgaaaagtctctccgggaatggtgccaacacagagtaatcggtagaaagtagaaagtagaagtagggaatcaaggctaagtcataagccctggacccaacatggctccttggacctttcacctacatcagccaagacatctccatctttgctgacaccagttcaagttaggmttcttccactcgcagtcaaaagcatcccgatgtgttttgtctcaacttactgtgagagtggagtaggctgtaaagaacatggatgctgctcatggtaattgtctccagaaccagcagcagaatggctatgttggttcattggtcagggaatgagaagagctactgaaataaatgcttagtttttttctagaaagtctgaaatttcacagttctagcaggcaagacataagtgctcgttcaaaaccatctctggtgggagtagaaaccatgcagggaagagagaaagagtggccatttggaccccgaagcagcacattatacaaccatccaatgcaatgctaacctggagcctcatacccatagacagaccacttcctgatggaagggcacrgattccatctctcaacagcacccagcccttgggggaaaaaggtaaaggaagtcgatttgtttttggaatctcttgcattttggtatttgttttatttcagcaatgcctctaactcatacctttcccatccctcccaggagccctgacccagaccgcatgcacgcacacacacacacacacacacacacacacacacagtctcaacttatctcaaacaacatgtgtgtactttaactggagccttcaatgcctcagccaaagttgggaatttcaagcatctcagcagatacatgggagagatgcttttgaataagttaagtcaacatgccacaaacacacctgtgtgttttaattaccttgaagtagccttgacttttatcagaggaatttttcacaagctgtatccctttaaagttcatatagtgatgagtccctgtgtccaccaaatgcagccaatcactggatgtggaaaactttccagcagctgccaaataccttgatctgtttgcagaataaaaatattcacataagcactccttcattctcacctcattgcatgaaatcctgaccaaagccactttaagtcccagatcaaatgctgccccttctagcaacctgatttgcctgtttaaaaaaataatatgttgagatcctcctgtagctgctcaaacatttagacttgcaggaaagcataatggcctcactcatgggctttgaagtcaaacagacctggatcaaaatactgacatcccccttgcctagctgtgtgaccttgggcaagtcactgcacctctttgagactcaatttcctcatctgtgaactgaggataagcgttgtcgcacagattaaatgacagtgaagcattgaatataggacctggagcaaaataaataagcattggataaatgttacccagcagtgatagtagttttagtaattatggttatgtgcaaacttttgcctctcaccagattggaagtcctttgaggatggtgtatgagttatccattgccacgtaatgtgcattacaagtgttcctcaaactgcaatgatggtcagcaaagcatccagtggctaggcagctctgtggactgcctagaccccctgctggactcagtcgtttgtctggggatagctgctggaggatccgggttgaccttgactgagacaatgagaattactcacctctactccccaagtctcttttcctccagcaggccagccaggtatgtccttctcatagcaggagaaggggctccagagatgaaagcttaacacacgggccccatgcaagcctctgttggctccatgaacatcccaatggccaaaccaagtcccatggccaagctgttgtgactcaggagggcacaccatggcaaagggtgtagtaagagaggtgtgaagaattggggctatttgcaatctaccacaagcaggaaatgaagtcctacaacagcctaaagtgctgtcgtggtcctgagaaatccatttgtagatgctggctgagctgaacatgaagttgggctccaaacctaagttgccactcttaaacatcaaaagcagtggttaaaaatagaggaatytatagagtgcaggtgattcattgttgttgaggcttgtgggtccacccccccacaaaaaaaaacagctagctttttttccttacatgaaactatttaaacttctgtccccagcgctagagaaaaaaaagatattgaaggttctgcattcctagtatgtcaactacttttcctcctccctcacacctgggaacagttcaaacttgaaagagaagtaaggaaatgaacggtgagagggcagcaaaaaccaatgggacggaggagaagccactgcgggtgggggaaggaagaacagaaatctaagctggctgccggattctggaactttcaaaacctaaaataaggaatggacttcacagaacttctcaagctagggcacagacgcattttcttctgaaagaaatttcacaattgtgtttttaatgagctcayaccartttagcaggacacagttaaacaaaagagtaacacaatcaagcccggaagtcataattcagattcagaaatgcagggggggcaggatttgacctggtaccttctcagagacgtaggactccgagagagcaaaatctcctgccggaacgtgctgatggattggggaggaaatgggaatcatttggctttaaaaaaaaaaaaaaagaaaaaaaaaaccttagaattaaactcttagttactgagatgtcgcaactcacatcactrtgaaagtcatgtaaaagggttctgtgtttgtccctttattcattcaactacttattaagcacctactgggagtcagacactttttctaagtactaagattacccctgggaacaagatggtgcctccatgagatgcctccaagaactaagacaaaacaaagaattaactaatatgacattgggcttgatgaaagagacagtaatgggaagggcagagaaagatgtgtagcgtgaagaaactggcaccattttgactggagtgaagaggaaatttgagcagagactcaaagaggcgaacccacgcagtcatgggaagtgttccacacaggtggaagtacacggtaggaatggacttcctgggttctgggaggagcaatacggcgaccctatgagggatgctccgctgcaccatcaactctcttttcagattacaggtcaaggacagcttcttggggaaaactctgacctctcaggctaggttgagtcacccattgctgatgctccggagaagacccaggacttctccttagagcatacttcagcatttctgaagataccactttctctgatcctgtttctgggctgatgtggagagtgtctgtcacccctgcgacattgctagaagctgcaggtcaccatctccrtgtccaccgctgtggtcccagtacctaggctggggcctgacaggtggtagatgctccacagaggtgctcgctgccctccccgcattctcttgtttcatcttcacagctccactgtgtgagtgctgccgttatccccactytccgaatgcagaaaccgagactcagaaggggaggtggcttgccagagccaggcaggtaggcaaggggtggggagaatggtgggaatcacgattttaacccaggtctttttgactccaaagtccgaacagcatgcctcaccctctggacaggtgtttaaacaggcatgtgcatgtcacccagtcagagccagtgactcatcagcaacgttggttggagcttccaggaaagagatgccatctgccccactggagagcctcgggttgaaggcgaagccgtggaagacggaccagagcctggaggggatcaggcctgcagtggcatcgtcggaggcactgcatcacgcctcacctgaacgagacatgcatccgggcaccccaatccctatgttctaagcccatttccatctatctttcacttggaacaacaatactttctaattgataaaacatgttagtgttggttattgtcatcaccactggggtggttgtttttatggaaattaaacacataaagtaggttaaaatatggccgtactgcatatatgttaccagagctggttatatatcaagtgttctagagaggttacccttggtttcctcttctgccctagttctccagtcttctccatatgtagcttagctaccctgctagaccagctgtccccactccctgctgtggccatcaggaccaaatcagcccagaaggaatgagatgcctggtgaggctcataataggaaaattctaagcccatatctgccttttcctcaatagcatgaataagggattaattcatgccagacgctaaagtcaggcatatgatggcagttaagcccacaaaagatgagtgactgccgctccagcctgagcaatagagtgagaacctgtctcacaaaaataaaaatacatataatgaaagcacagaactccatcattaacattctaacaagatatgactgtgggctgtggagttcctggctggccttctctttctgtgttggggaggtgttaaaaatatgctttcatcaaagggaggctgtcctggggcagtcgggattggaacagaaggaggcagcagccttgtcattatgcgatttagtatcagtgtcatgtccatgcaccttataacattatctcaggctccactcttgagcttgcctgcagggtagctggtggcaagggcctgtgcatcacagcttgggttcagatgccactcaaagtattcgctgtgagcatattgcttagtttcctccytggaaaaataatcaccataatgatactagctagctcgctaagatcctgattgggaggaccttaagtgagatacatgtgtatgataatatgcacatcctaataactgtacaaaaataagctgttattatttttgttacaatgaccacagtgataaaaatatttggggacccaccctccccaaccccgctccacctgactggttgagtggctggccctagttctgttccatgtttatgcatccagcaaacacttgaatacctcctcggtatcaggcacaatgctgacaggccttgcccctaccctctaggagtttatattttagcagggaggcaacatttgtctggccaaagtaaaatgacaaatgtgacagtggctggaaggacaagtccaaggtgttagaacagggcaatgctaccttggtccctgaggaagtgctccagtgctgagaggtgaagaagagaacaggtaagagggaacatcccgttacataggayggcaggtctgggcagccagtgggagagcagctgccagcatctggctggctggtggggctgcttctgaggcaggactcagcttcaggcctgaggattwccagcsagtgtycctccactctggcaaaggccaggcaggtctcaccaggacctgggtgatcacagttgagggtgtggcccacgttccaaagggctacctgagtgctgcctggctgctgccccagtgaagtggtgaagcgctgccaccacccctctgttcccatcgcccaacgaagcctccttcccccaacmagagctccttgttcactacagagcaacagaagctgtcaggcactactagaggttgactctaaagcaaccctagtttscaaaaaatcactccttttgcaaagtagaggaattatttgtaaagtgaaaaactttgtatcatgtctgctgcaaggagaccgagagacagtctggaggcagctctagcaacagtccgtctctcagctgagaattctactttggctcttgaaggacatcttaggaggagctttccacgcagtgattcctgagtgtgacgcaagcacaggcaggatgcagtttaccttccacatggccagatagaaaacaccggaggtgggtttctgcaaatctgtagatgaaccataacccattattgtgtttaaaagccacaatttcttgagtctccactatgtgccaggcaccacactaagctcttccatatctgatctcattttatcttcatgtcaaccattggataggtactcttacaatcccttgtcgccatctggggaactgaggtctggamaaattaagtacctggactcgggtcataaagctacgtaaatgggggtgtgagggccataattgaggtctatctgatgccaatgccaggcatttcatcgctgtcttgcactcccttctctgtggtagcatgtccttgccctggcacatcccgctgacgacaggggagcccctcgatttcaggtacatgccatcaacaccttcatgtcctcagcttcttgcagtatctggcaggtgttggcacccaactgaagctcatcaaatgagtttgctgaactgagcaaacatctgcaagcatgtgaacaaggagtggttggtgtcaagatgtcctctaacagatggggtttctttcaaatagaaatgaacccagccccttctctagaggagaaagcaggaatcccctgccttggggatctgtgtgcctgtcaccacctgaagccaacttaacaagggcaccaccttgggagcagaggctgggagcatgcaggtgggatcaaaggaccctatggcaatgctgcctcatgttatgaggctttctccggccacccctcccctccattgcctctgggtctttgttcagaagcaaggcacaccacctgtaaggcagctacaagcccgtggagctactggggccagccgaaatgtctctggtttctgtagaggcctgagggctccccaacctcctggctagacttggggattccccaggaggtggaaggtcaatgggtcataactttacatgacttccaagcatcacacatgctttgtgaatagctgagctatttgcaggtttggtcctgttgactcattcattcatttacctgtgggttccacacaggggcctggcaatggcccacccaacacagagctacacagacctggagagaacacaggcccttgataccatgactttgtgaagctgycaaaggtgatctggaccctgagggagcctgcccctggagaggaggaaagaaggaagaacaagactgaggccagaattgggggaggggcaaataacacctgcaggacctcattggaccctacagtcaagagtccagggcagtggtgggtgacaggggcacaggagagccagggacaaagcaagatgggaccctgggtccctagaaaaaagtccacagccggaaaaggaaagaatagagcccagtgacggagcagaggccctgcaagaacccaggggcccccagggtgytggaggggagagtgtgagctttgtcccagtcttgctgatggttttcagcccatttcttcctctgtacacaaaggtaaggcaagatgcgctctgcaaagaaggaggtcttccctgctttcattccatcagcaaatttactaaagaccatctgtgagccaggtactgtttttggcaccagggaacaaratcccagcccttgtgatgcttatggttctggttggggaatagaggcaayaaacaggtaaataacatggtagaacaaaactacagactctgaaagtttccataaagggattggacagggtgaggccacatcgagtaactagcgggggccgtttacaatgggtggtctgtgaaggcctcaaaggtggttgaggtttgagcagrtcccaaggatgggagggsgccaggcatttacatccctgaggaaaaggtattccaggcaaaggagactgcaagtgcgaagccccaggcagggctggaatcaagcttgacatttgacaacccttcctaggctgacagggagtgtgttagcatggctgctataacatactgtcacaaaattgctgcatttaaacagaaatgtattctctcacagtcaatatgaaatcagggtgtcggcagggctgcacttgctctagagactccaggggagaagccttcctggcctctttcaggttctagtggttccaggttgagggcagcataactctaatttctgccaccatcctcacgtggcctgctcctccccatcctttctrtttctcttttcttctaagaacatttttcattggatttaggtcccactcctatccagaatgatctcattgcttagtgtaattacatccacaaagatccttyctttcaaataagctcacattcacagattccaggtggaacctgtggatatcttgtgggagaccacacttcagtccactagagtctgctctctggctcccaaaaatgcatatttgtcccatgtgcaaaacatcccatccccaccagctcaactcattacagcatcaactctatgtccaaaatctcatctaaatatcatcaggtcaaaagtgccaaatctcttcatctaaatcagtatgggtgagacattttgtacggtccatcctcagacaaaattcctcttcatctgtgcctctgtgaacctagaaagcaagctacctgcttccaaaatactgtggcaggacaggcaaaatacaatgataggatagggtagacatttccaatccacaagggagaaattgtactaagtaaaggggtcacttaccccaaccaaattagagatgcagcaggacaaatttcaagaagttgcaaggacttgggaacagcactctgtggttttccactcccttgtctaggctaggttctgcctctttggttcttagctccatcctccaggcccaggccccacctgctgtgactctcagctctgccctrtgggccctctagctgcatatagagaatgggttgtactgatctagrataaaagccaggaaactgggtgggatgcttgtgtaggccaataggagatggcttaacctggggttatagtgatagggaaaaaagcattgtggtcagctgagattcagaaaatattttgggggcagaaccaactggattttgcacaaattgaagtttagaggcaggagaatactgatgaaaaggaatcaaaatgccttctaggattttggtgggcaacttggtaagagggaaagatgtggaagttctttaaaatgtaggaagttctgtgtgagtgaagggaattcttcataccccatagtccttgcagctagagagtaggcagcccctacatgcaagataaggtcatatctcaaaagcctttcctttagtgctcaactagtttctattccaaccttcatctctacttcaaactcaaagcgccatttcccatagaagagttctggggataaaaagaggaaaagagttattcttggaggccttccccataacccagcatgctgagagggccttcccccagctgctgggccctctgccccatcccaccttcattctttamacacacttttcttggctggaccaccccaacccactaccaccagcccagcaaatggactccgggcgttggttacataacccactcatttttcactgaggtaggagatgggactccactgtggaggtggggcttggacaccagaccaaattgagaactaactaaaacamggacagggtagaagctgctttccgtaagacatgcccagcaatgtgccatgtcagtttaccattgccttggcagcacctgaaagttatcgccctttccgtgacagcaacccagtgatctagaagttgccaccctttcctagaaatttctacataatctaccccttaatttgcatataattaaaagtgagtataactatgaccacagaactctgagctgttgctctaagctcactgcctatgggggagccctgctctacaaggtgcagtccctctgccactgctgtgcacggccccttcaatcaaagctgttgttgaacaccactggctcacccttaaagtctttcctgggctaagccaagaacyctccagggctaagccccaattttggggctctcctgctctgcagcatcaccaggcctatagctcaacaccacagtcattttcagtttgaaatcactctggcctctgttgatatggctgctctcaactggttgaagacaaaaggaatcgacaaactaaaaccctttgggaggaccgggcacagtggctgacacctgtagtcccggcagtttgggaggctgaggcaggcggatcacctgaggtcaggagttcaagaccagcctgacccacatggagaaaccccatatctactaaaaatacaaaaattagccatgcatggtggtgcatgcctgtaatcccaggtactcgggaggctgaggcaggagaatcacttgaacccgggaggtggaggttgtggtgagccaagatcgtgccattgcactccagcctgggcaacaagagtgaaactctgcctcaaaacaaaacaaaacaaaccctttgggaaaacagattaacatggaaaagtacaaacagtatacaccctccacactttgaggagtctagggtggctttcagctgcctgccatgcatgcagatttccacattttaactcttgttttaattytttccaaatgttctttattgtggaatatctgataatataagtagtctttaggggcttcctacagctgactcttaataagataaactgaaataatgctgaccacttctaggtgcccggcattggcacacagtatctataatacacagcagcaaggaagatcatagtatcccttgtttgcagatgaggacactggctcagaagggctcagtggcrtcactagtcttacgagagagggtgggtctggagatttggactcagcagttgtcagcaaatggattgcatttaaagcttcaggataagcttagcctggaaataaatgtggatggagaagagatctgaggctgagacctgaggtgatccaaagtttagatccagaaagagaaagaagatccagaaaaggggactgaaaaggagaatccacctgtgattcaacccctctgggccacgctcccccgatgagtgtagcagactccagtggctactccacattctcaacagctatttatccacgggcttatctgtttgctcaaaacacttattaagaagtgagcaatgggccaggcactgccaagatgctcactggctagagaaggaggctggtagagcaaaatcattagaatactcataatcgtcctacaacgtgctcaggatgggcaagcttcaaatggggatcaatgcaaacccacttgccaggtcatttatgctaatatagccagcctgactacattgatcagattagccccagtaaataaataaagccactaggcaatggcaacacacaaactagtgaaaacaatctagaaaccattctcaagaagtttgtaatctggtggaacagtgagacaggcacagagaacatggataacacaaaaatatggcaaattcaaagaaagaatgcatgaatacagtaaaagttcctgagggcatgcccaagaataaaccatcaaatatatgtgaaattgattttcaacaaggatgccaacccattcaatagaggaaaagacaatctttrcaacaaatggtcctggaaaaacaggatatccacattcaaaagaataaaagtggacccttagctaacaccacatacaaaaattagctcaaaattgaccaaagacctaaatgtaggagctacaattctgaaactcttagaagacaycatatggagaaagctttttccatgctaaatccatgacaaaggatttagcaatgatttattgacaccaaaggcacagacaacaaaagaaaaaataggcaaattggacttcatcaaaattaaaaacttgtgcatcagaggacccatcaacagagtaataaggcagcccacagactggaagaaagtatttgcaaattgcttatctcttaagggattaacatccagaatatgtaaaaaaccaaaatgcaacaacaaaaaagcaaactcaattaaaatatggcaaaggatttgaagacttttctccaaagagtatgtactaatggccaataagcacaggaccagacgctcaacatcactccttattagggaaaaacagatcaaaaccacaatgagataccacttcacacccattaggatggctattatcaaaataacagaaagtaaccagtgttggtgaggatatggagaaatcggtacacttgagcaccactggtgaaaatgcaaatggtacagctgctgtgaaaaacagtatggcagctcctcagaagactaaaaatagaataatgacagccgggcagggtggctcatgcctgtaatcccagcactttgggaggccaagacgggcagatcacgaggtcaggagttcagatcagtctggccaacatagtgakaccctgtctttyctaaaaatataaaaaaatagctgagtgtggtggtgcgtccctgtaatcccagctactcaggaggctggcttcccgcctggcttccacaatttaaaaaatacttttctttaaaaaaagggtagtggggaagcttcctgtcttccccaagaaaagttaccaagggcaatatagccaagcaagttgatctttcagagcactttagttcaaagccagaaaggcatccagggaaatcctgagtcsttgaaaaagtcattaaggcaaagcatttcttccttctctttgctctcctacagagcatacctgtcttcggtgaccctgctcaaaatctttctcccaccagctcttgaaaggggaagtgcggccaagcatgtgaccctggatagggcctcctgacattcgatctttgttcattttgccacttgatgcccacgacacagcgaggcacttggaatgtgacaggtagatgctgtgtgagtcatgtgctgggatcagctgcagcttttctgaaggcagtcttagggagaatggaggcaggagttttaaaggtcataaaaatttcaagcgaaagagatgctccaaatctcttagaaaaaattgtcaacagaaaagaaaggaaataaaggtcacatgattatgaaatggaagggcacaaaccccaaggtggcattcattttgcatttaagtcctgtatcagattgccagcatcctctctgcgcaaatgcgaagccgaggtgccgcagtggggctatgaccccaaggatcaaactacgccactttgttacagactgaactctttctttctctgggaggaacatcgcaaacttgggtcgtgttggttcaatagatgcatagaggctgatgtcctgggaggaatggtctctgcacaaaggtaagcagatactaccattccgtttcacacctgcagcagaagaaaaaacatctgtgccaacttctgactgagagtcctctagcaggtcctctcctttcctstggggtcacctgaattataatgtttaaacttgtctttggacagaaccaacctcttttgaccagctcttttctcttgagggaatcctaaccttaattaaccaataggtatatgtgtgagggtttccattccagcttgggttttgtttggaagaaatatgttatttaatgactttttggaaaatatttcaagttaagggattcttttgatgttcagatacattaaatagtaaactgttccagagagctgtgagtgacaggaaacaaaattatttactatttacacagtttggggtttaacttaaatatttattgtgtatcagccccttagatttccttgaaaaatctgttttgtaatgtatgtttacatgggttcgtctaagcaggacctcagatcaaccactgatttgatcaaatcagtttaaaaacagggcatattgagcaattgatcttgctggggattttgttgttgttgctgttttcctgcattggctaattaatttaaaatcagtctttgtatgtggcactgagggatagatgatcacctcctcttgttgcctgacattttctcttgatacagccctccttcccttatccccaaagtttgtgtgttcggggtaggaaggagggaggagagatgattggaaacttacctcaagagattaaaaaaattctgggcaaagcagggttaataaaatttaagacaaaatagaacgagtgcagtcagttatgcgatttttagatttgttttttgctataggtacatttccccaatggagtcaagaatgccgacacttctggcaaacagaaaagcsttgtgggaaaggctgggtaaggatagagttgctttttacctctggtgaggttatgtagactgggtgcctttgttctgtctcacaatagagttatgaataagatctcatggttagcagtagccttagacatgtggggaagcaagctatgggctgcatgaggaaataattacataacccaaaaaggaggccagaggttgtctaagtaagcttggagaaacaataattccaaaataagctgagaccaactttgtagcgtaatgaacattcaaagctgtgcagattcaacagaggagatggctgtgtcattaagaaattatgtccaacatcaaaagccaattaaaaaatgaaggtgatgaaggtctggtcccctctggctaacgtggctggaagctacaaccttgcaaggccatttctgagattttcacacctgcaaagcaaagggaaaaaagcatgcattctagtgacaaaatccaattaattacaggatctgttataaacagtcagctgcataactttggcagaaagcaaattcgtcatctcgagaggattttgctgttctaaataaataagtgcgattagggtgatgagcaaacttctacctacttcaacctccttcattttgaagagagagaaggacagagacagggtgcaaatttgagcaagatgggaagcattcaagaagaaattaaataactccaaacagaaaagtgggtgaatggtgactgatggctttggatgagtgaaaccaatttatctcccagaagcccctggaatgcacatggcttggctccacttcagcatttgaggatggcaaatctcttctaaatcataagtagttcgggcagcaaaatcttgactttcatttcatcttatttcatgttttggtgttctcatccaatccaatcttttttatagaagatggtcaataaatcattcaaaattagaattgtagatttatgtacatcagtggtactcagctggggatgatttgacccccagggaacgcttaccaatgtctgcaaacatttttgatggtcacaactaatatggagggagtgttgctggctgctgcgatctaaagggtagagcccagggacccggctcaccatcctgcaacacacaggacagcccctataaagaaagatctggccctgatgtcaatatgccaaggttggaaaacccttgtccagtggactgtgcattttagagcattcagcgggccagacaacaaaccttcctgagcaaccctttctacgccaagcactgtgtataatactcagaggagaccgtggcttacaaaggacaaaacccaactcataagctcagacagaacggggaatccattggccctagtaactaatacgcatggcaggaacctttaatgagttaagtatacctggttccacacatggattctgttcagatgcaccaacatgtctacaaatgaaagctcaggtttgcaccttttcatgtgtgttatccttttgaggccatctgccttctccaagcagaacttgtgtttctcatcaatggaggaggaggaaaaaagagcgtagagccctctgattttctattatcttgtagatttgctgtaagactgtttaatgttcctctggggtttgaacttttccatggaaaacagtggctaacataaatgcaatttgtaaacagcataaatttaaaacttctggagcttgagcacatgcactgtgcaatatggtgccacttggagatgttgcatacagccctgctgggcagcacagtgctgagaggctctttggtaagatttggagcatctataagtcctaagagatcaggccaagcgtagtgctaagctagcatcttccacttttcctcaaaagtaaaaaaaacaaaactggttttccctgtctccgtggttcacctacagccctaaatgtgctgtgggctctttactgattagaagggtgtgactaaatatgttccaatcattgaaaagagcaaaaggcaatgtgcacacatacacatcactgcttcttcctcagccacagaaaccattggacttcaaccagaagttcattggagcaaaagaacccaacaaaacaagcatcaggaattctttagatgccttctttgaaagtatgaaatttgcagaattgaagcaaattgctgagctgtttcctaagagatttcaatggaaaagcatgaggacatgattcataggagttctgaggagacacgctgaccatgttgttggcttggttggaggcttgtcctttaaaaagcacctatttcttgtaaaaaatgaaggaggtttttcctcgttctgcacagccagccactcagtggccgcgggacttccatggccatacgttgggcctttggagccttgcaacattctgagactgtgagcttcttgagggctggggctttggctttgcacctgtgtgtacccaaaggtcttggacatcaacttaggttgagtagaactttctgagaaaagccagtcaaatgtcactgtcctcattgtccatacaagaaaaccaagaattggcgtttggtgggatcctgccacattacataggaaggtcttaaaagatccacagcagatgtctgtttgggccacattgctcccctgagaatctcctcccttcttgtggttcactttccccgctgcgtgctgagccatcactctctgaaagactctgtccctttgtttactgggcttttcatccccagccagaaattgccacagttcttcgctttctggttttctacacaccccagttgccaacagctatagccctaactccaagcaggaagtgaccgctggaaagcagctgaacaaagcaaaggtgatcaaggtcactggatgggagatgaaggatgcatcgacacctcaggccgaagggtccttgaagacaggaatcaggtctgattcttctttgtctgaaatcgacacattacctgacaaagtcaaaatcctcaataaccactcactcaacccatttgtctaaccatgggtttgctgtgtgccctaagcaccttacttgggtgatgtcactgaattctcaatataatcctatatgytcaaggccaacattaccattgacagcctggacctctgataggctaatgagaagcacacttcccttctgacatcttcctccccaaaatcaataagctcagtctaatacgaggaaaacatcttgcaaaaacccaaattgagggacattccacaaaacacctgactataccttttaaaactgtcaatgtaggccgggcacagtggctcacatctgaatcccagcactttgggaggccaaggcaggtagatgacttgaggtcaggagtttgagaccagcctggccaccatggagaaaccctgtctctactaaaaatacaaaaattagccaggcgtggtggcaggtgtccgtaatgccagttactcgggaggctgagccaggagaatagcttgagcccgggaggcagaagttgcagtgagccaagatcacaccactgcactccagcccaggcaacagagcaacactccacctcaaaaacaaacaaacaaacaaacaaacaaacaaacaactgtcaacgtcatcaagaccaagacaagtctgagaaaattgtcacagatcaaaaaggcctaagaagaaaactaaatgtaaggtggtgtcctggatgggaccctggaccagagagggacattaggaaaaaatgagtgcagtttgaatragccatggagttcagttaatagtaatgtgccgatgttagctttgcagctgtggcagacgcactacagaaatgtaagatgacatatatacaacaagagaagaacctgtgtgagaggcttacaggaactccctgtactttctttgcaacttttctgtaactctaaagtgactttaaaattaaaaatgtatttaagtaaaaacatttgttaaaaaaaagaaaaaataaccttctaaggcagctactattgtttttcccaattgacaggtaaggaaacggtccaggtgagttcagaatcattgtctcctaagctgatgatcattctagtatcttctgggacccygctttaaggctcctgtttacaccagggcccctgagaattagatcatgaaagatttccaagggatagtttctctgctcagaatcatgagtgacccaaatcgctgggaggggagagagggaaggagcttgtgaggtctggctatgaaagtttcacaccataattgaatcgtttgaacactcccagggagaaaacgtctggagattgatttagaggggcattcggggacttctttagaaccctgtaagtcttggatgtctgagtgggatgaaaaatggttccaattcagtggggcccagaaggcaggaaatcttcgggcataacctctaacaccataaagacaccaaactttctgtccctctcaaaagtcaaaggcccacagctgcttccaatcaaggaaagcaaactatccagggcaccacatgctcacacattcycactgctggcccttcaagcacagttccttcgcacacccagtgcagggaaaaaaccacatcctttcaagatccctggcccatcttcctccctttcttctcctctctttgataatgctgttgcatttctcatagtgggcggsggggagggttccccaagtcctcagatgcctccggcatcacacacagggacttcacgaaaggtcccctttgtcccagtgctcacctctaccagctagatttccccataacattcagccttatacattcgcatgctatccagatacacagtggactgcaaggcagacgtctctgtgtttgaccttcccaacatctgttctccctgcctcccacagcaacttggtcaacactgcatcccccatgagctggctctcatctctgaggttctcataaaaaaggtcccacctcccctgtccagtcccagcttattcacagtcccagtgaatgctggactcagggaaagggaatatgaaccaagcatatttgacttggatttgccactaacaaacaagagtcctgagtgctctgcgaacaaagggtaagtcctccatgatgtctcccagattgcctgcgtggctgcaggtcagtacccatcycacagctttagcgaagtgcctgcctctttcatttcccaaagtaccccatgtggaccaattacatgaccatgtyacttaggataccaccttcttcccagaaaatcmccaccagctgcttgataaacattcttctcactatgttcttctatactcaacttaaacacagtattgtttcttccttatttctacaaaaatgcaaatatctgggccgggcacagtggctcacacctgtaatcccaacaatttgggaggatgaggtggaaggatcacttgagcctaggagtttgagaccagcctgggcaacatagcaagactccatccctacaaaaaaaaaatttttttaattagctgggcatggtggtgcacacctgtggtcccagccactcaggaggctgaggtgggaggatcacttgagcctaggaggtcgaggctgcagtgagctgtgatggcgccactgcactccagcctctgggcaatagagcaagactttgtctcaaaaaaaaaaatgcmyacatctyattaatacttgtatacacttttatttttggacccagtcacccttccgtgccatacttatgggtttacttgttcttttggacactgcagagtatccattgaatgascacacaatggcttayctaacaytgacttttggatggacgtttyggttattcccactcagtcactgttacaaacagtgytgcatcctcctacaaaagtctccgcgtgcttgtttctgtaggacaagtgtctagaagtggatggccatattacctgaaagggaaaatgtgcagtacctccctggggacagacctcaagtggctccagcatcactcaccttgacccagggtttccgtggtcactccgcactgggactttgtagcttgtcctgtgaacacagagctcacattcagtgggcacctcagcgtgtcaggctctctgatgcctctttgcttctagaatttcatgagtgtttaactctgtgaaggacctgcaattataaccccattttacagatgtagaattgaaggtctgggaaggtaggtaattttcccaaaatcacgtagatgatacatggaaaaatacagactcggctcccttcctgcctaactctggagcccgggcccatcacccccactgtccctcctggcagctgtgtgccttggagctggttgcactgtcacagtcccctccatccccatgaactctgtaaatgccacctccacagaaattgattagaaatcagaggaattggccaggcgcggtggctcgcacctgtaatcccagcactttgggaggctgacatgggtggatcacttgaggtcaggagctagagaccagcctggccaacatggcgaaaccctgtctctactaaayatacaaaaattagctgggcatggtggcaggtgcctgtaatcccagctacttgggaggctgaagcaggagaattcttgaactcgggaagcggaggttgcagtgagccgagacacaccactgcactccagcctgggagacagagtgagactctgtctcaagaaaccaaaaaaaaagaaagaaatcagaggaattggtatggggttgggtgtgaagtttttttttcatctggtttgagttatgaaatcagggtcatgttgatatttttcatgctgtactcagatgacagtgattattttctttcattcatttattttctttttgtatcagcttcagctctgaaatcctcctcagtacagccttcctgatcttcctaaaattgcacaggatgagaaggattttctgtttcctaagcaagtcggctccattggggtgggtcagacacttccacggtctttgtcttttggtctattttgtccacaaacttttggctccacagagaaaacacatttctgcaatgctcccataaactttcacaaactggatgcctctgaagccaaataaaagcaagttgtgccctcctgggctgtgagaaccatgttcccagccagaagacacataatgagaaaacatgaaagattttacacgcaaacttggctttactctccctcacttttgtttcctctctgcggctttctttacttttcttwggatttctaagctgctttgtgtcaggaaggatgagcagcccctcacaggaaggaccagtgaacacacttgaccttcttgtggctcactagtgtcatcctgcagcacgcctaagaggaagtggcaggcgccatgcatcagatagaaggctgggaggagcattctatatccagaatgtggccacaccacccttgtctgggaggtactgaagattcagcaaacacatcaaggacgtaatacaaaaaaaaggctcacccattaatctccctcccccacatctcccaggtttaaaacttgaccttctggagtgtcggcaractgagaaatccagcagactcccacgcatgaggactccggagatgaccacaycgccatgaccagccgtggaggcagcttgggrgatggacgaggctaagcaggtgaagcttgcctgctgagtagtacacatgagttagaagtcaggagttgccaaggtgaaaacctagcaacacatcgggttttaacaacayaaggcttgaaaaatatgaagaaacaggcaagatatataacaagaccatgtatgtacataaaaaatacatgcccataatttatttatggtgatagacgtcagaaagtggttacttctggatgggggagatagtratgtactgatggggcatgagagacctttctgggtactggatgtcttctgtatcctgatcttgttggtggctgtgagtatagacatatgtgaggtccatcaagagatacacttaatatttgtatatckatgtgtatatgcatacaaagcaataatacacattttgcaaaaatgaaaacaaatgattaacgcatctgsatggtggtcagtggggcagagggaaaagggactggagtaggatattaatagggatagaaggatggatgactggttggatggatagatgggtggatagataaattgatagataaaactagttggtggagacggataatattaccattcttgacccagcatagctggcagggttctaagttgcagccatcagaactgactccgacttgcttaagcattgaaggaatggatcagcaggacatcaatgagctcycagaactgacaaaaatgttcgtgcatyggactcagaaagcaagccagttccagggaagctgagtcgccacagagaccacgaatctgggccccgcagccggctcttctgctgtacactcagaactccaccttcatgtcacgagcaggctccagtggtcccaaagtctttacctgtcactcccaagattccaagtcctcactgacagtataagattggccaagcaaagacaggcggttgagccattgccacagggaggcagaggaggaacaagagcctctactgccccttggctctggtagggactgacacactaaggggatatcccccaaagaggatgagtgtgccccactgctct

SEQ ID NO: 8936 - DNA, 201 bp, Homo sapiens
ggtctcaaactcctgacctcaggtaatctgcccacctcggcctcccaaagtgctgggattacaagcatgagccaccacacctggcctgttttatattcttmctggacagtgctgatctagagcaggagtcaagcagttttttctatgaaaggccacatagaaaatgttttcagctttgcaggccatgcagtctccatcata

SEQ ID NO: 8937 - DNA, 201 bp, Homo sapiens
ggtttacctttggatggaggattctgaagttttgatttaaaaatacaggattcctccaggctagaattctttctttgattacaacacatacatgcgcttgmacacacacacacacacacacacacacacacacacacacaccatgcatacatgcagacatacaaatgatatttattgtgagtatagaaccatttgggacat

SEQ ID NO: 8938 - DNA, 201 bp, Homo sapiens
gtctcaaactcctgacctcaggtaatctgcccacctcggcctcccaaagtgctgggattacaagcatgagccaccacacctggcctgttttatattcttaytggacagtgctgatctagagcaggagtcaagcagttttttctatgaaaggccacatagaaaatgttttcagctttgcaggccatgcagtctccatcatag

SEQ ID NO: 8939 - DNA, 201 bp, Homo sapiens
ggatggaggattctgaagttttgatttaaaaatacaggattcctccaggctagaattctttctttgattacaacacatacatgcgcttgcacacacacacrcacacacacacacacacacacacacacaccatgcatacatgcagacatacaaatgatatttattgtgagtatagaaccatttgggacattattggtcaca

SEQ ID NO: 8940 - DNA, 201 bp, Homo sapiens
gttagatgaattattgcccattgacttataacaaacaatattaactttaactaatttctaagtaatacatatccattatcatatataccaaaaataaaatmatctataactccactaataagaaaaaatgattacacaaacatttttggtgcctatctttaagatttttctgtgtatcaatctatgttgttttccataatt

SEQ ID NO: 8941 - DNA, 201 bp, Homo sapiens
tttacagaagtgattgcatggctctctagggtgagttgcatattgagagggaggacagtgcagtggctaagtggccgcacattgaagccaggctgctgggktttgaataccagttccccaacttcctagctatgtgattttggacaagttgcttaaccattgtaattcccagtttcttgtctgtaaaatgggagtatggta

SEQ ID NO: 8942 - DNA, 201 bp, Homo sapiens
ctcttcaaatgaagctcctctcatctctctcatcaacccatctcctccctttcctcctcaatgtcaacatgccttcacataaatcctgaatgatgaaattktatttagaacttacactaacttcctctccaaggtggcatctaacttcatattaagtaagaaacagccttcccactctccacccccgcacttctcacccac

SEQ ID NO: 8943 - DNA, 201 bp, Homo sapiens
tgagtttgaggtgcctgtggagcagctggatagagatgtccaagcagacaagtagatatttaggtgcaagttcaaaaaagagggatggcctggaatgcacrtgaagagtcttctgcataagtatggttgacagttgaaattctcattgtgggtcaattcagtagcagagaggttggaggattgagaggaagccaaggacag

SEQ ID NO: 8944 - DNA, 201 bp, Homo sapiens
gcaaattacagtttttgagtggcattccaacagtagagtgtattgctcaggaagtccttaattatcctttgaaacaaattccttcagctgattacgaaggmatctagctggattcttgagcgacttgttcctgacatcatagcaacccattgtaactagacttcgaccattcctcttacccaagtgctggggaagggagag

SEQ ID NO: 8945 - DNA, 201 bp, Homo sapiens
cctcaaattttattttttgccaatatcacaatccattgtagatcagttgtgggagaggtgtaaagagagctgctttattagtttattaagcaaaccagatmtcttccattgtgagactttgcgattttctaggcccttggacatttcctctggatcccctgctgctaagaaggcaggagagggaggaaagagaagagactt

SEQ ID NO: 8946 - DNA, 201 bp, Homo sapiens
tcaggatttgatcatatttggagatagggtctttacagagataataaaatttaaatgaggtcattagggtgggtcctaatccaagacaattgttgtgcttwttgtaaggaagggaaacacacagcggaaaagcggtgtgaagacacagggcgaagacggccatccacatacaagccagagagaaaggctcgcaacagattc

SEQ ID NO: 8947 - DNA, 201 bp, Homo sapiens
aaataagaacaaaggttaaaaatacaaaattagccaggcatggtggcgcatgcctgtaatcccagctactctggaggctgaggcaggagaattgcttgaayccgggaggcagaggttgctgtgagctgagatcgtgccattgcactccagcctgggcaacaagagtgaaactccctctcaaaaaaaaaaaaaaaaaaaaaa

SEQ ID NO: 8948 - DNA, 201 bp, Homo sapiens
acttgttcctgacatcatagcaacccattgtaactagacttcgaccattcctcttacccaagtgctggggaagggagagattctcaatgcttacccacctrtggaatcccagtaagtccagttgctaggtggcttgaggtctggggtcataaaatggaaggcctgaagtcatttggtgatcacagaccttgagccaaactt

SEQ ID NO: 8949 - DNA, 201 bp, Homo sapiens
aatttagactaaaaccagtatttcctcagagacaatgctagaagcttttacagtagggggcactcttgcattacattaagagctcagcaaagaagatgcaraagcctcaggtttgccttgtaaggtgattcataaacacactaaatcttccttaggtctccctttcactgtcagggtacgcatatagattttccttcctcc

SEQ ID NO: 8950 - DNA, 201 bp, Homo sapiens
ttttgtttaagccaccccagtttgtggtactttgttaccacagccccagcaaactaatacacttggtgagagtgcatacagccagagaaagaagctgtgartaagtgcatcagggaggagggaaagaaaccaaaacaggattacatcacttaaattaagagtagaaacatttcacaaagcagagtgtagtcacaggtcaaa

SEQ ID NO: 8951 - DNA, 201 bp, Homo sapiens; identical to SEQ ID NO: 901

SEQ ID NO: 8952 - DNA, 201 bp, Homo sapiens
gagcaacatagcgagactcccattcctaaaaaaattttaatttaaattaaaaaaaaaggctaaccaaaaataaaatccaatactttatttttcccacccawaactagtttgggaaggatttctggaagaaaataatttttgcagtcattttacatgttggattttgagtgcacataacatacagattctattctgtattat

SEQ ID NO: 8953 - DNA, 201 bp, Homo sapiens
ttctgttctcaagaatttcagttttgtggtaaatatatcaaaggtgattttttataagagttttttataacagggtgtgacgtttcataggagcatgaagrtagctgtttcctatttgtctgtaggcagtatgatgtcttagataaatgccagggttttgagctagtttggttggtatcaaataataagtagttaataaat

SEQ ID NO: 8954 - DNA, 201 bp, Homo sapiens
tcacaatttggataatatatgtactgtgttctaattttgttatactaaatgtagcaagacaattttcaatgtcataaatatcattctacagcatcattttwaatggctgcaagatattcccttttgtggatacaccataatttatttatttaaccaacctcattttttggacacttgagttagtccaatagttttgttatt

SEQ ID NO: 8955 - DNA, 201 bp, Homo sapiens
cgttctaagttttccccacaaagcctgttttccaactccccagaaacttaggagttctcatgtaaggaagtagttcctgaaggcgtgaaggttcctcaagrcatgaagaaacatcaaaggtttttcagtagatgagatatgctgaaagccatgcagaggaaacctgctgtgacctcagtaggaaaaaactaaacaaacaag

SEQ ID NO: 8956 - DNA, 201 bp, Homo sapiens
ctagaggtaggggcctgtggaagctgttccatttgtccaagtgagaggtgtctggagattatagtggacagaagaatcatcacgagaggaacttcagggcytgggaactgactgcagaggggggcaggatagcaggcacggcacaaatgactgcacgtgcagagcctcagcacagacacctcacccagattccagaatcac

SEQ ID NO: 8957 - DNA, 201 bp, Homo sapiens
atattgtctactgtgttaaaaatgagaggaactgactcagggtgagagcgatggagtgtccagatgttctcctttatttctccttattcctggaaatgtawtgagaatcttagaggtgaactgaaaagttatgagttcaaccacttactcaattcgagattcgctcctaaaatgtctcttctgtgttatcacccccacttt

SEQ ID NO: 8958 - DNA, 201 bp, Homo sapiens
agtttccaaactgagaaatcaaaaatggtactgattccttgtcagggtcagtgcttctccccactgtgtgaattacaggggccatttgtccaagattcctyagagcaatactgatttcatgtaattatttgaatgaaaggtgatttgttaaatttatagtaaaatataatttgatttgtgtccctgtttgtcatgccaccc

SEQ ID NO: 8959 - DNA, 201 bp, Homo sapiens
acctaatcttttcttctatttctccagagaaaaaatccatatacctgaaagatctgatgaagcccagcgtgtttttaaaagttcgaagacatcttcatgcracaaaagtgatacatgtttttaattaaagagtaaagcccatacaagtattcattttttctaccctttcctttgtaagttcctgggcaacctttttgattt

SEQ ID NO: 8960 - DNA, 201 bp, Homo sapiens
acatatgttgagacctcagcaaacctgaactaatggagagggagaggaaaataaaactagttaagaactggaagaaaataacctgataatggatgacaggktatccaatgcacaatgcccagaaagcatgacaagctctgtcatggtcaagtaaaagtcaataccaaagacttcagaggtggtgaacatgggcttcatctt

SEQ ID NO: 8961 - DNA, 201 bp, Homo sapiens
ctgttccatttgtccaagtgagaggtgtctggagattatagtggacagaagaatcatcacgagaggaacttcagggcttgggaactgactgcagagggggrcaggatagcaggcacggcacaaatgactgcacgtgcagagcctcagcacagacacctcacccagattccagaatcacgggccaggctgaccctcttcttc

SEQ ID NO: 8962 - DNA, 201 bp, Homo sapiens
cacatagagtccaagaagagtgctcaaatagtacactgatatagcaaaacttataaagatgacatgcaaatgacagaccttttagtaagaatacactaaaytataaattagtttgtagaacctgcaaactacctagtaactataaaagaacaagggattttttctgacagaaggcacatgacacaggtctagggactccat

SEQ ID NO: 8963 - DNA, 201 bp, Homo sapiens; identical to SEQ ID NO: 903

SEQ ID NO: 8964 - DNA, 201 bp, Homo sapiens
cacacacacacacacacacacacacacacacacacaccatgcatacatgcagacatacaaatgatatttattgtgagtatagaaccatttgggacattatkggtcacaggagtgaaaacaaaaagatatgacaccccctctgcccttgaggaccttccaatagaatcagaaccctgtaatgtgcacacatgaaaaactgga

SEQ ID NO: 8965 - DNA, 201 bp, Homo sapiens
caacataaggctacatacagaattgtaaagaaaataatccacagaatgtgtgttttattttggtaaatggttcctaaaactaagtaagtacatagaaagawttttttttttttttttttaaagacagagtctcactcacgttgtcacctaggctggagtgcagtagtgcaatctcagttcactgcagccttcacctcccgg

SEQ ID NO: 8966 - DNA, 201 bp, Homo sapiens
cttgcaatttaaattcacagaaccacagtactagaaagacccttggaacatttagtcaaccacttcattaatcagatgaggaaactgaggctcataaagaytgcagtttgtacaaggccacacatttagtcagcggtgaagcaaggacaaaggtcctaatctccagatgccaagcagatgtgcacagttccagagcttaat

SEQ ID NO: 8967 - DNA, 201 bp, Homo sapiens
tacctataacctagaagttgctatagtagacctcctaactatagataagagaagggcatgccaaatgcagttgaatcaggtgaaagtcaagcaacaaagcygcctaaaataaattttatgtaaggtagggtgccaaaatcattaaaataaaattctattctataactgtaatcacgtaagtgctttcatgaagttgtctat

SEQ ID NO: 8968 - DNA, 201 bp, Homo sapiens
acaaggacggagcaggcagatgagttaggagacaattacattagtctcctctacccttttcttaacatattggagttcagctctggctgtagtagttctaratctcctcagacacacttgtgtagagcctctgttgggtattttgggtacacaaatgattcatcttggttatacagatgatttagatgattgtagacagaa

SEQ ID NO: 8969 - DNA, 201 bp, Homo sapiens
gaaatctagaaaaagaaagtagctcaaatgtgaaatatcacctaatcttttcttctatttctccagagaaaaaatccatatacctgaaagatctgatgaarcccagcgtgtttttaaaagttcgaagacatcttcatgcgacaaaagtgatacatgtttttaattaaagagtaaagcccatacaagtattcattttttcta

SEQ ID NO: 8970 - DNA, 201 bp, Homo sapiens
tttatggacctgggggtggaggaatccaagggtggggagaattcatgaggaaaatgaggtgagagggctaggagtggaaaagtacaaagtactgagttagygtggggaatagtgtctttagggctaggagtggaaaaaatactaggtactgagtcagagtggaaaacagtgtcttcaaggcagggagtggaaaagtgctag

SEQ ID NO: 8971 - DNA, 201 bp, Homo sapiens
ctcactgtgggacttacataaaacagcttatagatataactatctttttaaagccgataaaacttaaattcagcttcatataaaaactttgcttttacttccccccccccacagttatggatgtcacaaattatatttttaataatgtacagccattaatatatttttataattataattacttctatgcttttgtttttt

SEQ ID NO: 8972 - DNA, 201 bp, Homo sapiens
aggaaactgagacacagggaagttaagtaatttgcctatggtaacacaggcagtgagtagttgagctgagattgaactcacgctgtccagaatccatactrttagttataatagtgtactgccctatagctttctgtttcacagctacatggcattactttgtatggatgtatcattatttgttaaaccatttaacttatt

SEQ ID NO: 8973 - DNA, 201 bp, Homo sapiens
tgcaacttttagcatgaggatactcgttacatgctgatacagaataatctccaaggtagtcatatgtgtgcaaaaccgtacatagtatgctaccatttgtrcttaaaaataaaaagaaaacagaatatgggtcaatgtttttgtttagttttgtctaaagtaactttaagtagaggcaagaaactggtaacatgtaacagt

SEQ ID NO: 8974 - DNA, 201 bp, Homo sapiens
ggtggtggcagctggcgccagtcactatgtatttatttatttttaattatttatttttgaaacagagtctcgctctgtcgccaagctggagtgcagtggcrcaatctcagctcactgcaacctccgcctctcggattcaaacgattctccttcctcagtctcctgagtagctgggactacaggcgcccaccaccacgcccg

SEQ ID NO: 8975 - DNA, 201 bp, Homo sapiens
ttaatactttgtgactagttgcaaatattttcagttgctgaaatacacagtaggtgttccatgtaagagctgaacagctggttcctgattgctgtctcccycccttccagccaatagatttcagagtttgggcattacctattgagccaaagctgacaccacacaagcgcagagtatgggaacagagttctctgtctgatt

SEQ ID NO: 8976 - DNA, 201 bp, Homo sapiens
tgaggcacgagaatagcttgaacccaggaggcagaggttgcagtgagctgagatagcaccacggcactccagcctgggtgacagagtgagactccgtctcaaaaaaaaaaaaaaaagaaagaaatcaagtggggagatggatgcaagaaagaggagaatgcattcatggaaagagcatatttaccaagctttccatgttga

SEQ ID NO: 8977 - DNA, 201 bp, Homo sapiens
ctctgtaagatgaggctactaagcacttgccaatgccatgaggaatataacaatttataatggacaggaagtcctatggatataagatattttaggactcrcattctttgctttaaaatctattatttcctatatttttaattgtcagagttctttagctctgccttttctgattgatttccagcagatggactcttacct

SEQ ID NO: 8978 - DNA, 201 bp, Homo sapiens
gccatgaggaatataacaatttataatggacaggaagtcctatggatataagatattttaggactcacattctttgctttaaaatctattatttcctatayttttaattgtcagagttctttagctctgccttttctgattgatttccagcagatggactcttacctataacctagaagttgctatagtagacctcctaac

SEQ ID NO: 8979 - DNA, 201 bp, Homo sapiens
gaattgtaaagaaaataatccacagaatgtgtgttttattttggtaaatggttcctaaaactaagtaagtacatagaaagaattttttttttttttttttaaagacagagtctcactcacgttgtcacctaggctggagtgcagtagtgcaatctcagttcactgcagccttcacctcccgggttcaggacacgccaccac

SEQ ID NO: 8980 - DNA, 201 bp, Homo sapiens
atggccaacatagatcctcagatgacagaagtgagtgatgcaggcctgtggtttacgtacagctccatgacgtatgaatggcagaagctgtgtatgtccayaggcgagccccatttcaagaagtgcttctggtcaccactctgttgtcctgtgtataaggatgtggttcagaacagccaagtcttatatttcaagaggagc

SEQ ID NO: 8981 - DNA, 201 bp, Homo sapiens
aattaattgccaatatttcaaaagtctggagaattcacataagtttagatttccagctcttctggagaattagaatatctagtaacagtgtgctaataatmccacatggtaacaactggtgaatctggcagaggctgcccagcttccaatggtgtataagctctcctcttcctatgcaacctgcctgcctcatttatatga

SEQ ID NO: 8982 - DNA, 201 bp, Homo sapiens
gttaatagatattgactttaataaatagatacttaactgagcctccaccctgggcctgttactatgctaagtaccaggagtgcaaagggaaatgaaacacrttccccaaacttgtggaactcagagcaggccaactatatgagtagtagatttttaacacgatgaggaaactgttataatggaaaaataaatagtgtgaag

SEQ ID NO: 8983 - DNA, 201 bp, Homo sapiens
tgtatgggttgtgagggcagttttatgggttgggtgataaaatcagaagagaaaaattgaattcacgctttgaaaggccttgtgtgtcttgctgagaagcrtgaacactaactcatgaggagtaaggcgcgggtctttaaaggaaggaagtttcataatcaaattgttttccatgaaagataatgaagggagccagccaca

SEQ ID NO: 8984 - DNA, 201 bp, Homo sapiens
tgaacatcttttggtggcaagtaccttgactttattaaatcagtgtaggtctcctgcattcaactatggtctctaggagggcagggaccacacttcttagytcaccttggatctcaagaccagtccaaggccttcattcagtcagagctagttaagcatttgttaattgaatgaaggaaattaaaaaaaaaaaaactagaa

SEQ ID NO: 8985 - DNA, 201 bp, Homo sapiens
cagccctttactggcccttatctctcctctcttctcctatacagtgctgtttccgaactgtacattggcttacactcgggctgaggtttgggaaataggcrccattttgaatatgtgtggaggaagaaaagtgtgtcttcagcactttccacctccccatcacggccctgagacctcaacaccgggaagcatctcgttccc

SEQ ID NO: 8986 - DNA, 201 bp, Homo sapiens
ttatttctctctctacaaggagccttaggaggtacggggagctcgcaaatactccttttggtttattcttaccaccttgcttctgtgttccttgggaatgmtgctgtgcttatgcatctggtctctttttggagctacagtggacaggcatttgtgacaggtatgtttgtggaggctcagacgcctagggagtggcatgag

SEQ ID NO: 8987 - DNA, 201 bp, Homo sapiens
ttgaccactggccgcaggaggccacttccatataacaacaaacagatggctgaaattggaaaactcagctaaatgttcagatgtttctagactcccacggrtttctggctctggcacatggagtagatcctgactgtgtggtcctcaggggactctctctggtgaagtttggtgaggtcaacttccacacccacacacacc

SEQ ID NO: 8988 - DNA, 201 bp, Homo sapiens
ttcatctcttgaatcctcttcaaaatacacccactctacccataactcattagatcttgaaaggcatgttctgatagaattttatatttagaacaggctgsagcactcttcccttattttacagaagtgattgcatggctctctagggtgagttgcatattgagagggaggacagtgcagtggctaagtggccgcacattg

SEQ ID NO: 8989 - DNA, 201 bp, Homo sapiens
gaagagagagtttccaaactgagaaatcaaaaatggtactgattccttgtcagggtcagtgcttctccccactgtgtgaattacaggggccatttgtccargattccttagagcaatactgatttcatgtaattatttgaatgaaaggtgatttgttaaatttatagtaaaatataatttgatttgtgtccctgtttgtca

SEQ ID NO: 8990 - DNA, 201 bp, Homo sapiens
ttctatatcctgctaaaagcttgagggtcacactagctgtgtgatctttggcagctggccaaaaccctctgaaaggcagtttcctcacctataaatttttwaaaaaatatttattgtgaagattaaatgaagtaatgcatttaaaatacttagggtgccttagagttccagcacagttcgtagctcatagtaatcagttaa

SEQ ID NO: 8991 - DNA, 201 bp, Homo sapiens
tggaactacttgcccttcagcaacagtgtatgtatcctcccatggaagggcccttacatatttgcagacacccagcatatacttgcaatcttttcttcttyaggttcattaccctagtccttttagttgttcttcatttgacataatttcattattcactagtgaaccttgctgcccttccccttgataaaccgaatttgt

SEQ ID NO: 8992 - DNA, 201 bp, Homo sapiens
tcccaccagcagtgtaaacatgttcccttttcaccacatccatgccaacatctattattttttgattttttaataatggccattcttgcaggagtaaggtsgtatctcatggtggttttaatttgcatttccctgatagttagtgatattgaactttttttcatgtttgttggccatttgtatattttcttttcagaattg

SEQ ID NO: 8993 - DNA, 201 bp, Homo sapiens
agggaccacacttcttagctcaccttggatctcaagaccagtccaaggccttcattcagtcagagctagttaagcatttgttaattgaatgaaggaaattaaaaaaaaaaaaactagaaattccaaattgtgcaattacatctgtgaattttaaggtgttattggaaaatgggaaaaattactgagattcgaagatggata

SEQ ID NO: 8994 - DNA, 201 bp, Homo sapiens
ctggaataaaggtggtctgcatctaccctgtcccatcactgcctgtgctgaccttgacacccacatctgccttcttcttaccttgaccccttctccagcgrtgatttcttggcttgccccctccagtgacatccatccaactccttgctccataccctggctttgtcacctcctttctcccagtgtcttgttgttcagata

SEQ ID NO: 8995 - DNA, 201 bp, Homo sapiens
atcattttttatggctgcatagtattccatggtgtatatgtgccatattttcttaatccagtctatcattgttggacatttgggttggttccaagtctttkctattgtgaatagtgccacaataaacatacgtgtgcatgtgtctttatagcagcatgatttatagtcctttgggtatatacccagtaatgggatggctgg

SEQ ID NO: 8996 - DNA, 201 bp, Homo sapiens
accttggaaggcctaaatgccactacagatttttttaaaactatcacacagtaaaattatttttttttgttttgatatactgttctactgattgtatagawcttgtatagatttaggtaaccgccacaggacatagagcatttctatcaccctaaaaatttccctcaggctgtcccttcatagagtcataccctgtctgca

SEQ ID NO: 8997 - DNA, 201 bp, Homo sapiens
atatacccagtaatgggatggctgggtcaaatggtatttctagttctagatccctgaggaatcgccacactgacttccacaatggttgaactagtttacartcccaccaacagtgtaaaagtgttcctatttctccacattctctccagcacctgttgtttcctgactttttaatgattgccattctaactggtgtgagat

SEQ ID NO: 8998 - DNA, 201 bp, Homo sapiens
acaggatgggtggagagatgtacttaatgaatgattttggggaagggctagaagtgaagcacatggcctctctgccctcactcattgaaggctgtcttctgaagccccgtggagctcagtgcctgtcacatggttgcccacatttgttgaactgaactgcattttcatctatgggcttcaaaggctgtgtgtactctggga

SEQ ID NO: 8999 - DNA, 201 bp, Homo sapiens
caggatgggtggagagatgtacttaatgaatgattttggggaagggctagaagtgaagcacatggcctctctgccctcactcattgaaggctgtcttctgaagccccgtggagctcagtgcctgtcacatggttgcccacatttgttgaactgaactgcattttcatctatgggcttcaaaggctgtgtgtactctgggat

SEQ ID NO: 9000 - DNA, 201 bp, Homo sapiens
aggatgggtggagagatgtacttaatgaatgattttggggaagggctagaagtgaagcacatggcctctctgccctcactcattgaaggctgtcttctgaagccccgtggagctcagtgcctgtcacatggttgcccacatttgttgaactgaactgcattttcatctatgggcttcaaaggctgtgtgtactctgggatc

SEQ ID NO: 9001 - DNA, 201 bp, Homo sapiens
tttagcattcgttcacttgactcttctcctaactcttgtggtaaaccatgaataagtggtaagacttcttccatggggcctgaacagctttggtggataawatagcttctgcctcatccgtgttcatccagtgcctcctccccatcacctgcagctgacacctcagttgacccaagagcttgggcccaagcccttctcatc

SEQ ID NO: 9002 - DNA, 201 bp, Homo sapiens
tcatgtctgtatggaaacactgtgctctcaaatgagtttcagaaagaacaactcacgaaagaaaacaagcattcggtcagaaaaatctccacaaatggggrataagggggatttgctccaaggagagactggaaaccaagtcagacataaaatccagcctaagctagaaggagacatggctggtgggagcttgaggaaaac

SEQ ID NO: 9003 - DNA, 201 bp, Homo sapiens
atgtgtggaatgaataaatgaagaagtggggaatgataacatgtttgcttcagcctgagcatcttagtatttgctatggccctgtttagatgttcttctgycacttctttacctcattcttcagatcttgcctcaagcagcactttcttaaaaaccctttcccaaactagaaaatgtcaacttgttacagtgtcatgtgga

SEQ ID NO: 9004 - DNA, 201 bp, Homo sapiens
agctgggcagcctagggcaagtactgtgacctctctgagactccattccttcatctgtaacatggggacaaataatctcaccctgttgtgagcagtaatartatgattaatcatttagccaactcttattcatgttctctgatgggccagacatacaaagtaagtgaaagtggattacggcaggtgctcttcttggtttct

SEQ ID NO: 9005 - DNA, 201 bp, Homo sapiens
ggaggctcctctttttagatttctgactagttcacccaccttattcatagaccttattctgtgcttagctgacagaaatctcctctcagagaatccccccggtaaattcttaggttctttcctcttccattcccctttttgctctctccctccgaaggcaagagtttccactttacaggcccactggagaaagttatggct

SEQ ID NO: 9006 - DNA, 201 bp, Homo sapiens
acctcataaatattaactcatttgagcctcacaataactttctgctttaggtcttgttgttatttcccattttaagatgtggacactaaagcccagagagrtgaagtaatttacccaagatcgacagagctactaagtggcagagcttggattcacacccagcaatgtagatttagcattcgttcacttgactcttctcct

SEQ ID NO: 9007 - DNA, 201 bp, Homo sapiens
ggtccaggttacccctggcccctgtggccttcctccagagatggaccttcctccacacacttctcaggagctcctgattctaggcatgccccagaacacckcaactccactctgccctgtctccatcagaccagagacctcacttagaccctgggtatggggttgttggttctccacttgctgcggttgtcactagcctga

SEQ ID NO: 9008 - DNA, 201 bp, Homo sapiens
acatgacagtatatgcatatatatatatatcccttactttgtgcctggtactgttctaagtacctcataaatattaactcatttgagcctcacaataactytctgctttaggtcttgttgttatttcccattttaagatgtggacactaaagcccagagaggtgaagtaatttacccaagatcgacagagctactaagtgg

SEQ ID NO: 9009 - DNA, 201 bp, Homo sapiens
agcaccgcctcctagagtgcttttagacttgaccactggccgcaggaggccacttccatataacaacaaacagatggctgaaattggaaaactcagctaartgttcagatgtttctagactcccacgggtttctggctctggcacatggagtagatcctgactgtgtggtcctcaggggactctctctggtgaagtttggt

SEQ ID NO: 9010 - DNA, 201 bp, Homo sapiens
tcctttgaggaaataagattctaaggaaaaggccgtttgcattctgctctccaagatctctgggtgttggaagaaactgaattgggggagagggggaaacytgactgggggctcaatacagacatgtaaatttgaaggaaacagagagtttagatgacaggcagtagaaaagttaatgtgtccattctatggctgacccaa

SEQ ID NO: 9011 - DNA, 201 bp, Homo sapiens
ctttcaaggacagaggacgatagctaccacgttgagttctaggaaattaaccattgttattgttaaaggaagacagcgtttctcagaggaagactgttaamcagtgcagtggcccaggctaacagccctcataagtgggagtatcagaatgagtggacttaattacttaaaaccaatacagggtggaacttcatctgctat

SEQ ID NO: 9012 - DNA, 201 bp, Homo sapiens
gcagttgaatcaggtgaaagtcaagcaacaaagctgcctaaaataaattttatgtaaggtagggtgccaaaatcattaaaataaaattctattctataacwgtaatcacgtaagtgctttcatgaagttgtctatgaaaactttctttttcgctttctggacttcaaatattttaagtttgcttttcatttacaaagattt

SEQ ID NO: 9013 - DNA, 201 bp, Homo sapiens
tgctgatgtgctaatggccggccagagaatgagtaaaagggattgcagagagcatgcttaaaacctctgaccatcaggtttgcttctcagattgactacaytggaggtgggatattacaaaaatctgtctcttcctgccagatcccttcatctgtttttcgtgagctaagagacaaaataggcaggaaatagaaggtgcca

SEQ ID NO: 9014 - DNA, 201 bp, Homo sapiens
tgtcccccacactgagcagaggactttgcagtgcctgatcagggcagaaaaaggaggcatgcacctgggggaggatcacatacgagtgaaacctgtccccrctgaagcactaggtttggagaaatctactgggcatttacacacctttcccacttctgcttatgacttgtagccaaactcaagagtaccacccacttccag

SEQ ID NO: 9015 - DNA, 201 bp, Homo sapiens
gcccacatttgttgaactgaactgcattttcatctatgggcttcaaaggctgtgtgtactctgggatctctgggaatctgtcagggaaggtgtctttgtcrtgtttgtggatggggctccctttgggggtttcccagggctttacactcatgctccgagggtacgtttgtagtcattctcatcagtggaaatgcccacctg

SEQ ID NO: 9016 - DNA, 201 bp, Homo sapiens
ggttctctgggtcctagggctttctcatttctcttgaacaacacctctagttaatttcatgtacctggagtggtagttggaatatttcttcactttaagatttttttttttttttttgagatggagtctcactctgttgcccaggctaaagtgcaatggcatgatcttggctcacggcaacccccgcctcccaggttcaag

SEQ ID NO: 9017 - DNA, 201 bp, Homo sapiens
gggtttctactgctcacaggacccagacaaccatcccctgccctcccttcttcttgcacttcaaaagcactctcttcctctcttttcacctctaagccacmggtatcatctcttccatgggctttcacaaaagtctggatgaacctttgaacttgtatctcttctgctttcccccttgcatcaagaaagcttagaaaacaa

SEQ ID NO: 9018 - DNA, 201 bp, Homo sapiens
ttgttttaatgtatattagaaaaactctaacttacgcaacatgtgatttcacagatcttgttaatgaagctaaacacggtctggcaattcaccttctacakgccacatagagtccaagaagagtgctcaaatagtacactgatatagcaaaacttataaagatgacatgcaaatgacagaccttttagtaagaatacacta

SEQ ID NO: 9019 - DNA, 201 bp, Homo sapiens
ttaactttaactaatttctaagtaatacatatccattatcatatataccaaaaataaaatcatctataactccactaataagaaaaaatgattacacaaayatttttggtgcctatctttaagatttttctgtgtatcaatctatgttgttttccataattaggattatcataagggttatttttcacaatttggataata

SEQ ID NO: 9020 - DNA, 201 bp, Homo sapiens
agatatctgcgtgggtggttacttttgactcccatttcctgctgttgttgatagccctcattaaaaccatcacctggaggtgaatagacagtcgagacctrtcattcccaaagaattgtcatggagcctaatagttctattggattcacccctttatgttaagccaccatttcagtgtttttcaaaatagatatatgttat

SEQ ID NO: 9021 - DNA, 201 bp, Homo sapiens
gtcacatggttgcccacatttgttgaactgaactgcattttcatctatgggcttcaaaggctgtgtgtactctgggatctctgggaatctgtcagggaagrtgtctttgtcatgtttgtggatggggctccctttgggggtttcccagggctttacactcatgctccgagggtacgtttgtagtcattctcatcagtggaa

SEQ ID NO: 9022 - DNA, 201 bp, Homo sapiens; identical to SEQ ID NO: 902

SEQ ID NO: 9023 - DNA, 201 bp, Homo sapiens
aagaggaaactgagacacagggaagttaagtaatttgcctatggtaacacaggcagtgagtagttgagctgagattgaactcacgctgtccagaatccatrctattagttataatagtgtactgccctatagctttctgtttcacagctacatggcattactttgtatggatgtatcattatttgttaaaccatttaactt

SEQ ID NO: 9024 - DNA, 201 bp, Homo sapiens
tgtacttaatgaatgattttggggaagggctagaagtgaagcacatggcctctctgccctcactcattgaaggctgtcttctgaagccccgtggagctcartgcctgtcacatggttgcccacatttgttgaactgaactgcattttcatctatgggcttcaaaggctgtgtgtactctgggatctctgggaatctgtcag

SEQ ID NO: 9025 - DNA, 201 bp, Homo sapiens
ataatgttaaaaataaataaaaaaacaaaaacaagtaaatcaattaatgcttaccacaggccagtatttgatccaacactaactcaaatattcatttcttyaatcctcacaacaaacctatgaggtaggtaccattattgttcctgctttttgcaagaggaaactgagacacagggaagttaagtaatttgcctatggtaa

SEQ ID NO: 9026 - DNA, 201 bp, Homo sapiens
aggggttaaagatgtgggagagtttccttgtagtaagtaatggaatgaggctttcaaagggccaagtaaaactttggaggaagtttagtaaaagaaggaattttttttagtacagataagcataggaacataaagaagagataattcttaaacatataagatatgcatttggggatagcagccagggaacactgaagtccc

SEQ ID NO: 9027 - DNA, 201 bp, Homo sapiens
ggggcctgggtcagcggagttagactggtctgtgagtggacagaatggatgggaaggaaagaagatactgtgaggctctacagaaaaaaaaaaaaaaaaawatatatatatatatatatatatatatgtaaatcaagaagacagaagcagctaaagacgaagtcatttccaggtccagaaggcacaactgacagctgagta

SEQ ID NO: 9028 - DNA, 201 bp, Homo sapiens
aattttccagtaaagattccttttgctccagtggaattttgaagcgttatacttgtatgaagaaaaaaagaatttcaaaatttataatttttgtggtaccrtagaggggatactacttaattatgctagcactgtctgcagaggtctaaaaaaccataggctgctgtctatattgaacttgttaagattccttttgtttca

SEQ ID NO: 9029 - DNA, 201 bp, Homo sapiens; identical to SEQ ID NO: 907

SEQ ID NO: 9030 - DNA, 201 bp, Homo sapiens
ggcctgggtcagcggagttagactggtctgtgagtggacagaatggatgggaaggaaagaagatactgtgaggctctacagaaaaaaaaaaaaaaaaatawatatatatatatatatatatatatgtaaatcaagaagacagaagcagctaaagacgaagtcatttccaggtccagaaggcacaactgacagctgagtaat

SEQ ID NO: 9031 - DNA, 201 bp, Homo sapiens
ctggtttggtataaatcaccagttttacctctgacctctgttaatgcatcagaggttcaggagagagtgagaaaattgtaaatggaatattttaggactaytatattggggcccaggctttagtgagtcagagcgagaaagtagggggctgaaactatttgactattaatttattcaataaagttttatttaatgttggaa

SEQ ID NO: 9032 - DNA, 201 bp, Homo sapiens; identical to SEQ ID NO: 908

SEQ ID NO: 9033 - DNA, 201 bp, Homo sapiens
cctgggtcagcggagttagactggtctgtgagtggacagaatggatgggaaggaaagaagatactgtgaggctctacagaaaaaaaaaaaaaaaaatatatatatatatatatatatatatatgtaaatcaagaagacagaagcagctaaagacgaagtcatttccaggtccagaaggcacaactgacagctgagtaataa

SEQ ID NO: 9034 - DNA, 201 bp, Homo sapiens
ggtttctactgctcacaggacccagacaaccatcccctgccctcccttcttcttgcacttcaaaagcactctcttcctctcttttcacctctaagccaccrgtatcatctcttccatgggctttcacaaaagtctggatgaacctttgaacttgtatctcttctgctttcccccttgcatcaagaaagcttagaaaacaaa

SEQ ID NO: 9035 - DNA, 201 bp, Homo sapiens
tgggtcagcggagttagactggtctgtgagtggacagaatggatgggaaggaaagaagatactgtgaggctctacagaaaaaaaaaaaaaaaaatatatatatatatatatatatatatatgtaaatcaagaagacagaagcagctaaagacgaagtcatttccaggtccagaaggcacaactgacagctgagtaataaca

SEQ ID NO: 9036 - DNA, 201 bp, Homo sapiens
tccacccttggctctgatgacatatgtgggagtcagaggaattttgattggctgactgctggcctgtcacacaaacaagatggggcaagggggttgcgatmtgacttgacatgtgaaaaaaaaaaaagccgtggtcagcaaccccctgcaactgttgaaaggctaattcaatctctgactctttaacaaaagtgatcttgt

SEQ ID NO: 9037 - DNA, 201 bp, Homo sapiens
ttcggttacatggatgagttctttagtggtgatttctgagattttgatgcacctgtcacccgagcaatgtccactgtacccaatgtgtagtcttttatccytcatccacctctctctcactcttccccccaagtacccaagtccattatatcattcttatgactttgtggcctcataaaagctgattgtttttaaatacac

SEQ ID NO: 9038 - DNA, 201 bp, Homo sapiens
tatattagaaaaactctaacttacgcaacatgtgatttcacagatcttgttaatgaagctaaacacggtctggcaattcaccttctacaggccacatagastccaagaagagtgctcaaatagtacactgatatagcaaaacttataaagatgacatgcaaatgacagaccttttagtaagaatacactaaattataaatt

SEQ ID NO: 9039 - DNA, 201 bp, Homo sapiens
cactgtagtatttagctgagaggagagactattaataaaatttacaaaatcagctttcagctatttggaagggtttatataaaaggataaaataatatgtyctggtagttctagaaaacaggacagagacaagtagctggtacttatggattggaggagtgagtggcagtagtttggggattatttataaaaaagacattt

SEQ ID NO: 9040 - DNA, 201 bp, Homo sapiens
ctatatatattcgttaaaatcaccaaactctaaactgaaaatgattgggttttattatttattaattatacctccataaagctgattgtttttatcttttrtttttattttatttcaatagtttttggggaacagatggttttcggttacatggatgagttctttagtggtgatttctgagattttgatgcacctgtcacc

SEQ ID NO: 9041 - DNA, 201 bp, Homo sapiens
aactctaacttacgcaacatgtgatttcacagatcttgttaatgaagctaaacacggtctggcaattcaccttctacaggccacatagagtccaagaagastgctcaaatagtacactgatatagcaaaacttataaagatgacatgcaaatgacagaccttttagtaagaatacactaaattataaattagtttgtagaa

SEQ ID NO: 9042 - DNA, 201 bp, Homo sapiens
aaggataacaagttttggaatcaggtgtttactttgagttctgaaaggtgacatcacaggtgttggtagtttattgatatttaatttttaaatgtgctgckgtatatatttcatttgattagaaatatgttacatagttatgttatttgttaaataatagaccatcttttgtataacctatcagaagaagttctgagattg

SEQ ID NO: 9043 - DNA, 201 bp, Homo sapiens
tcctcttcctatgcaacctgcctgcctcatttatatgagctgcttggatgctgcagatgcttgaatctaagagctttggtctggaaagtgaggccctaacraggaagaaggaataacctatggatcaaggagaactgggagtccagaaatgaaggttatttgtaagtctggacccagccattccaactcctttgaggaaat

SEQ ID NO: 9044 - DNA, 201 bp, Homo sapiens
tcatttaatcatcataactgcaggaggtaagtagtattatccctgattttccataagtgaaaactgagtctctcttagttacatagctgacaacacaaccrggattccaaatgccagtctgatcccagagccaagctatgaacaaccatgctatatattatggcagatcagggaaggaagacattacttctagcagcaaga

SEQ ID NO: 9045 - DNA, 201 bp, Homo sapiens
gtgtctcgtagttactcctggcccaccccttcctgctgctccttgtctccacctgcaggcctgagagggaagccaccccactaagacagggaggtgaactragcctgaagtttggctacagcacccacaggccaccagccatgagttcacctcctccagatggccacacaccaggcccttggccactgtccccatgtctgc

SEQ ID NO: 9046 - DNA, 201 bp, Homo sapiens
cattaaaaatacaccaaagatgagtatgagtaaacatgatttctgttctcaagaatttcagttttgtggtaaatatatcaaaggtgattttttataagagktttttataacagggtgtgacgtttcataggagcatgaaggtagctgtttcctatttgtctgtaggcagtatgatgtcttagataaatgccagggttttga

SEQ ID NO: 9047 - DNA, 201 bp, Homo sapiens
agggttgggagtaatcatgctaataagtatgcaataagaggatactttcgtatactactgattgtgggaatatgaatggggagaacatttctggaaagcartatgtcaacaatatcaagagtcttaaaaatggttgtacaagcagacacccattctgggcactgccaatttctccatgtccttagtacattttttttcagt

SEQ ID NO: 9048 - DNA, 201 bp, Homo sapiens
ctccttttacaaattaacaatttatatggattttgggagggttgggagtaatcatgctaataagtatgcaataagaggatactttcgtatactactgattrtgggaatatgaatggggagaacatttctggaaagcaatatgtcaacaatatcaagagtcttaaaaatggttgtacaagcagacacccattctgggcactg

SEQ ID NO: 9049 - DNA, 201 bp, Homo sapiens
tggtctggaaagtgaggccctaacgaggaagaaggaataacctatggatcaaggagaactgggagtccagaaatgaaggttatttgtaagtctggacccarccattccaactcctttgaggaaataagattctaaggaaaaggccgtttgcattctgctctccaagatctctgggtgttggaagaaactgaattgggggag

SEQ ID NO: 9050 - DNA, 201 bp, Homo sapiens
atcagggaaggaagacattacttctagcagcaagaaacatttgtggatgaaaagatttgagcttggagagagctgtgttgagccatgtccaaaacaatttytggcaaccatacgataaaggtaaaagccagagattgaaaagtaaaagctggtggactaaaaatggtccatagacagagagtcatcaaaacaacaaaacaa

SEQ ID NO: 9051 - DNA, 201 bp, Homo sapiens
gttcaggtcatggcttcagagggtgcaagccccaaggcttggcagcttcagcacagtgaacctgcaggtgcacacaagtcaagaattgaggtttgggaacmtccccgtagatttcagaggatgtatgggaacacctggatgtccaggcagaagtttgctgcaggggtagagctctcatggagaacctctgcaagggcagtg

SEQ ID NO: 9052 - DNA, 201 bp, Homo sapiens
gcagaggttgctgtgagctgagatcgtgccattgcactccagcctgggcaacaagagtgaaactccctctcaaaaaaaaaaaaaaaaaaaaaaaaaaagamcaaaggtggacttaacctacctaatttcaatatttactatatatagtaattaatacagtgtgatattggtaaaaggacagacatatcagtcaatggaaca

SEQ ID NO: 9053 - DNA, 201 bp, Homo sapiens
gaaaatcctgaggaatctatcaaaaacctattaaaactgataagtgagtgtagcaaagacacaggatacaaagtcaatacacaaaatcaattatttctatrtactaacaaaagcaattgtacattgaaaaaaattaatagcatttataatagcatcaaataatattaaaaacttggaaataaatttaacaaaacaagtaca

SEQ ID NO: 9054 - DNA, 201 bp, Homo sapiens
acaggcttaaagactgaaagttagtgatatcatcacatttccccttcaaaatgctgaatttataagcaaatttaaaagtttagaatctaccttttaattgwctgctttcatttttttgacagtggctttttttgatatggtgactattttgtcatgggtataaaaggataattcattttgtgttaatctgaagacatctga

SEQ ID NO: 9055 - DNA, 201 bp, Homo sapiens; identical to SEQ ID NO: 916

SEQ ID NO: 9056 - DNA, 201 bp, Homo sapiens; identical to SEQ ID NO: 917

SEQ ID NO: 9057 - DNA, 201 bp, Homo sapiens
gcattcaatgaagtttgcaccataaagccctaagaactccaggcttgaagattctctgcaaaaagtgttaccatagccagtcattttggtttgccataacygataagggcttatctttctgacagcacttaccaacctagttcctctgatttttgagtcatgtcctagaaaaagagctgagcccaaggaactacagcttgg

SEQ ID NO: 9058 - DNA, 201 bp, Homo sapiens; identical to SEQ ID NO: 920

SEQ ID NO: 9059 - DNA, 201 bp, Homo sapiens
tgctcacttgcttttctctctccacattaaacaccaaacaggtatcctgatgtgcagactcgagtgcaggcagaattggatcaggtcgtggggagggaccrtctgccttgtatgggtgaccagcccaacctgccctatgtcctggccttcctttatgaagccatgcgcttctccagctttgtgcctgtcactattcctcat

SEQ ID NO: 9060 - DNA, 201 bp, Homo sapiens; identical to SEQ ID NO: 925

SEQ ID NO: 9061 - DNA, 201 bp, Homo sapiens; identical to SEQ ID NO: 926

SEQ ID NO: 9062 - DNA, 201 bp, Homo sapiens
ctctccacattaaacaccaaacaggtatcctgatgtgcagactcgagtgcaggcagaattggatcaggtcgtggggagggaccgtctgccttgtatgggtraccagcccaacctgccctatgtcctggccttcctttatgaagccatgcgcttctccagctttgtgcctgtcactattcctcatgccaccactgccaacac

SEQ ID NO: 9063 - DNA, 201 bp, Homo sapiens; identical to SEQ ID NO: 930

SEQ ID NO: 9064 - DNA, 201 bp, Homo sapiens; identical to SEQ ID NO: 931

SEQ ID NO: 9065 - DNA, 201 bp, Homo sapiens
gcgacctcttcagatggattattacaggtagcgggtggcgtggtaggtactttaaaggaaatcaagcgccaccgcctcgatgcccgcagcgttgtccccarattgcaggaaccgttacgcgccttgcggggaggggaagggtttggcgctgggttacagcgaggtggaaacacgccccttctcttctccaagggagagtgg

SEQ ID NO: 9066 - DNA, 201 bp, Homo sapiens; identical to SEQ ID NO: 979

SEQ ID NO: 9067 - DNA, 201 bp, Homo sapiens; identical to SEQ ID NO: 932

SEQ ID NO: 9068 - DNA, 201 bp, Homo sapiens
agccacccccgcccaagcgcctccggcttcccttataaagggagggcccccttcgcgaccgcaagcgcgcccaggaagaccacagagccgccggtgcgcascgaggtggcgatacgcgcccgggctcggcctgcgggtggtggcccaagcgtccgcctcgctggcctggcaggcgcgactgtgcgtgcgcagccgagggtg

SEQ ID NO: 9069 - DNA, 201 bp, Homo sapiens; identical to SEQ ID NO: 933

SEQ ID NO: 9070 - DNA, 201 bp, Homo sapiens; identical to SEQ ID NO: 934

SEQ ID NO: 9071 - DNA, 201 bp, Homo sapiens; identical to SEQ ID NO: 935

SEQ ID NO: 9072 - DNA, 201 bp, Homo sapiens
ccaaacaggtatcctgatgtgcagactcgagtgcaggcagaattggatcaggtcgtggggagggaccgtctgccttgtatgggtgaccagcccaacctgcyctatgtcctggccttcctttatgaagccatgcgcttctccagctttgtgcctgtcactattcctcatgccaccactgccaacacctctgtcttgggctac

SEQ ID NO: 9073 - DNA, 201 bp, Homo sapiens; identical to SEQ ID NO: 985

SEQ ID NO: 9074 - DNA, 201 bp, Homo sapiens
ccgacctctccacccaacggcactcagtccccagaggctggggtaggggcgtggggcgcccgctcctgtctctgcacccctgagtgtcacgccttctcctytctgtccccagcatgggcaccagcctcagcccgaacgacccttggccgctaaacccgctgtccatccagcagaccacgctcctgctactcctgtcggtgc

SEQ ID NO: 9075 - DNA, 201 bp, Homo sapiens
gtctctgcacccctgagtgtcacgccttctcctctctgtccccagcatgggcaccagcctcagcccgaacgacccttggccgctaaacccgctgtccatcyagcagaccacgctcctgctactcctgtcggtgctggccactgtgcatgtgggccagcggctgctgaggcaacggaggcggcagctccggtccgcgccccc

SEQ ID NO: 9076 - DNA, 201 bp, Homo sapiens; identical to SEQ ID NO: 938

SEQ ID NO: 9077 - DNA, 201 bp, Homo sapiens
caaccaggggcgctgtgaggcaaaccgctgccactacactggctttccgggaagcaagctcaagtcgcggagagggaagggaggtcgtgcgctcggggcgrggcgcgctcccaagtcgagcgcagcggccggggcaggttgtaccgagcgtggttctggggacaccgtgcggcctcgattggaggtggctgtgatgaagcg

SEQ ID NO: 9078 - DNA, 201 bp, Homo sapiens; identical to SEQ ID NO: 939

SEQ ID NO: 9079 - DNA, 201 bp, Homo sapiens; identical to SEQ ID NO: 940

SEQ ID NO: 9080 - DNA, 201 bp, Homo sapiens
gaagggaggtcgtgcgctcggggcggggcgcgctcccaagtcgagcgcagcggccggggcaggttgtaccgagcgtggttctggggacaccgtgcggcctygattggaggtggctgtgatgaagcgcggttaccgcacaatggaaacgtgggcacctccgctcccatgaaagcctgctggtagagctccgaggccggccgg

SEQ ID NO: 9081 - DNA, 201 bp, Homo sapiens
ggcgtggggcgcccgctcctgtctctgcacccctgagtgtcacgccttctcctctctgtccccagcatgggcaccagcctcagcccgaacgacccttggcygctaaacccgctgtccatccagcagaccacgctcctgctactcctgtcggtgctggccactgtgcatgtgggccagcggctgctgaggcaacggaggcgg

SEQ ID NO: 9082 - DNA, 201 bp, Homo sapiens; identical to SEQ ID NO: 952

SEQ ID NO: 9083 - DNA, 201 bp, Homo sapiens; identical to SEQ ID NO: 1010

SEQ ID NO: 9084 - DNA, 201 bp, Homo sapiens
tagattccttatactataaaaaaattaaaaattaaatttcatgactaccctgatataaagatgaatgcattaaaatgatgtatgaaaatattttcttctamctaaaagtgagtttttttaggtctgaagattgtaaaagacgtaaaaatattttcatgggcccctaaaaagtgttgtgagccctaggcactgtccctgcgg

SEQ ID NO: 9085 - DNA, 201 bp, Homo sapiens
ttttgctatgataatgtatagttatatataatcatttattgaactttaatgttggtcattggccttgattgcatttttaaaatttttattttaattttatrtatttacttaccttagagacagggtctcactaccttacccaggctggtcccaaactcctgggctcaagcagttctcccgccgctgtctggcaggtagctg

SEQ ID NO: 9086 - DNA, 201 bp, Homo sapiens; identical to SEQ ID NO: 961

SEQ ID NO: 9087 - DNA, 201 bp, Homo sapiens
ttttctctctccacattaaacaccaaacaggtatcctgatgtgcagactcgagtgcaggcagaattggatcaggtcgtggggagggaccgtctgccttgtrtgggtgaccagcccaacctgccctatgtcctggccttcctttatgaagccatgcgcttctccagctttgtgcctgtcactattcctcatgccaccactgc

SEQ ID NO: 9088 - DNA, 201 bp, Homo sapiens; identical to SEQ ID NO: 963

SEQ ID NO: 9089 - DNA, 201 bp, Homo sapiens
ggaggagcggccgcaggcagcgcccagggatatgactggagccgactttccagaagcggcgcacgcaaagcccagctccgcacgcaaaggggaggcgacascagaaacttcaacccgataaagttcgccggagcgcggagattcgcctcctcctgccactctccgccccgctcgggtcccgccccgctagctcccccaggc

SEQ ID NO: 9090 - DNA, 201 bp, Homo sapiens; identical to SEQ ID NO: 965

SEQ ID NO: 9091 - DNA, 201 bp, Homo sapiens; identical to SEQ ID NO: 964
  misc_feature (1)...(201): n = A,T,C or G, or insertion/deletion polymorphism (see Tables 1-2)

SEQ ID NO: 9092 - DNA, 201 bp, Homo sapiens
caacggcactcagtccccagaggctggggtaggggcgtggggcgcccgctcctgtctctgcacccctgagtgtcacgccttctcctctctgtccccagcaygggcaccagcctcagcccgaacgacccttggccgctaaacccgctgtccatccagcagaccacgctcctgctactcctgtcggtgctggccactgtgcat

SEQ ID NO: 9093 - DNA, 201 bp, Homo sapiens
tggcgcgcggctggatttggagaacgtaccggccactatcactgacatcttcggcgccagccaggacaccctgtccaccgcgctgcagtggctgctcctcytcttcaccaggtaaagcctctgggaggcgtgggccaggtcttttctcctctgaaaaaggcggagtagagacagaatatgctgagtttgcaagcagggccc

SEQ ID NO: 9094 - DNA, 201 bp, Homo sapiens; identical to SEQ ID NO: 923

SEQ ID NO: 9095 - DNA, 201 bp, Homo sapiens; identical to SEQ ID NO: 924

SEQ ID NO: 9096 - DNA, 201 bp, Homo sapiens; identical to SEQ ID NO: 927

SEQ ID NO: 9097 - DNA, 201 bp, Homo sapiens; identical to SEQ ID NO: 928

SEQ ID NO: 9098 - DNA, 201 bp, Homo sapiens
atgggtgcagcacaccaacatggtacatgtatacatatgtaacaaacctgcacattgtgcacatgtaccctaaaacttaaagtataataataataaaattwaaaaaaaatgctacagtatgaccccactcctgggtatttatcctagagaaatgaaaacacattcacacaaaagctatacatgaatgtttacagcagctgc

SEQ ID NO: 9099 - DNA, 201 bp, Homo sapiens
tagacaaagtacattctggggaaacaacatttatatgtagcctttactgtttgatataccaaattaaaaaaaaattgtatctcattacttatactgggacmccattaccaaaataataaaaatcactttcataatcttgttatgaagttttatgttgtagcaaatatagtctaatgtatcactttatttcaactattacta

SEQ ID NO: 9100 - DNA, 201 bp, Homo sapiens
gaggagcggccgcaggcagcgcccagggatatgactggagccgactttccagaagcggcgcacgcaaagcccagctccgcacgcaaaggggaggcgacagsagaaacttcaacccgataaagttcgccggagcgcggagattcgcctcctcctgccactctccgccccgctcgggtcccgccccgctagctcccccaggcc

SEQ ID NO: 9101 - DNA, 201 bp, Homo sapiens
gccacccccgcccaagcgcctccggcttcccttataaagggagggcccccttcgcgaccgcaagcgcgcccaggaagaccacagagccgccggtgcgcagsgaggtggcgatacgcgcccgggctcggcctgcgggtggtggcccaagcgtccgcctcgctggcctggcaggcgcgactgtgcgtgcgcagccgagggtgg

SEQ ID NO: 9102 - DNA, 201 bp, Homo sapiens; identical to SEQ ID NO: 941

SEQ ID NO: 9103 - DNA, 201 bp, Homo sapiens
tgtatcctgtgaagcatcacggttatccttctctgcacatgggccagtgcattcctgttctgcttaaacaagcttaagttgttccttcgagtcaatacaakataagatattttaaacctctctctactttaaactatccctctagcttagctgttctttttgaaagttatttgcaacaaacaattcaagtttgagatttgg

SEQ ID NO: 9104 - DNA, 201 bp, Homo sapiens
caggcttgaagattctctgcaaaaagtgttaccatagccagtcattttggtttgccataactgataagggcttatctttctgacagcacttaccaacctasttcctctgatttttgagtcatgtcctagaaaaagagctgagcccaaggaactacagcttggaggatatatctgatctatctgcgatggcaggaaagcatg

SEQ ID NO: 9105 - DNA, 201 bp, Homo sapiens; identical to SEQ ID NO: 942

SEQ ID NO: 9106 - DNA, 201 bp, Homo sapiens
ataagaattttgctcacttgcttttctctctccacattaaacaccaaacaggtatcctgatgtgcagactcgagtgcaggcagaattggatcaggtcgtgkggagggaccgtctgccttgtatgggtgaccagcccaacctgccctatgtcctggccttcctttatgaagccatgcgcttctccagctttgtgcctgtcac

SEQ ID NO: 9107 - DNA, 201 bp, Homo sapiens
gcgcacgcgccccacccagcggtgccccgacccctccggtctcctatcttgtctctatcgtcccctcccctgcttgcgagtgagaacacatttgcaaagayccctccaccccccggaaaaacaagagtttttaaatgcttggagatgagccctgatatctctctccctggcgcattacaatcagaactggaatagttccga

SEQ ID NO: 9108 - DNA, 201 bp, Homo sapiens; identical to SEQ ID NO: 944

SEQ ID NO: 9109 - DNA, 201 bp, Homo sapiens
aaaaaaaattgtatctcattacttatactgggacaccattaccaaaataataaaaatcactttcataatcttgttatgaagttttatgttgtagcaaatayagtctaatgtatcactttatttcaactattactatggattattcaattaaaatattgcactgtaaacattttatttgtccattctacatttcaggccgag

SEQ ID NO: 9110 - DNA, 201 bp, Homo sapiens; identical to SEQ ID NO: 945

SEQ ID NO: 9111 - DNA, 201 bp, Homo sapiens; identical to SEQ ID NO: 946

SEQ ID NO: 9112 - DNA, 201 bp, Homo sapiens; identical to SEQ ID NO: 947

SEQ ID NO: 9113 - DNA, 201 bp, Homo sapiens; identical to SEQ ID NO: 948

SEQ ID NO: 9114 - DNA, 201 bp, Homo sapiens; identical to SEQ ID NO: 999

SEQ ID NO: 9115 - DNA, 201 bp, Homo sapiens
ggccgccccccgcgacatgatggacgcctttatcctctctgcggaaaagaaggcggccggggactcgcacggtggtggcgcgcggctggatttggagaacktaccggccactatcactgacatcttcggcgccagccaggacaccctgtccaccgcgctgcagtggctgctcctcctcttcaccaggtaaagcctctggga

SEQ ID NO: 9116 - DNA, 201 bp, Homo sapiens; identical to SEQ ID NO: 951

SEQ ID NO: 9117 - DNA, 201 bp, Homo sapiens; identical to SEQ ID NO: 953

SEQ ID NO: 9118 - DNA, 201 bp, Homo sapiens
aaataaattataatgtgctttctagatgaaataagaattttgctcacttgcttttctctctccacattaaacaccaaacaggtatcctgatgtgcagactygagtgcaggcagaattggatcaggtcgtggggagggaccgtctgccttgtatgggtgaccagcccaacctgccctatgtcctggccttcctttatgaagc

SEQ ID NO: 9119 - DNA, 201 bp, Homo sapiens; identical to SEQ ID NO: 957

SEQ ID NO: 9120 - DNA, 201 bp, Homo sapiens; identical to SEQ ID NO: 956

SEQ ID NO: 9121 - DNA, 201 bp, Homo sapiens
gaaataagaattttgctcacttgcttttctctctccacattaaacaccaaacaggtatcctgatgtgcagactcgagtgcaggcagaattggatcaggtcrtggggagggaccgtctgccttgtatgggtgaccagcccaacctgccctatgtcctggccttcctttatgaagccatgcgcttctccagctttgtgcctgt

SEQ ID NO: 9122 - DNA, 201 bp, Homo sapiens
cccgcagcgttgtccccagattgcaggaaccgttacgcgccttgcggggaggggaagggtttggcgctgggttacagcgaggtggaaacacgccccttctyttctccaagggagagtgggttggggatgggaaggggcgtcttcggccatttctccagagagtcagctccgacctctccacccaacggcactcagtcccca

SEQ ID NO: 9123 - DNA, 201 bp, Homo sapiens; identical to SEQ ID NO: 958

SEQ ID NO: 9124 - DNA, 201 bp, Homo sapiens
agactctgcctgcccagcacgccccaagctctgctcctcatctcttctctgtatccacccccgacctggtgtttccctcagattcacacgggaggcagctsaggactgcgaggtgctggggcagcgcatccccgcaggcgctgtgctagagatggccgtgggtgccctgcaccatgaccctgagcactggccaagcccgga

SEQ ID NO: 9125 - DNA, 201 bp, Homo sapiens
caagctctgctcctcatctcttctctgtatccacccccgacctggtgtttccctcagattcacacgggaggcagctcaggactgcgaggtgctggggcagygcatccccgcaggcgctgtgctagagatggccgtgggtgccctgcaccatgaccctgagcactggccaagcccggagaccttcaaccctgaaaggtgagt

SEQ ID NO: 9126 - DNA, 201 bp, Homo sapiens
ctagtgaacccaaaagtgacttaaaagtaaaaatcattattagcaagagattaagaacataacttcattgagaggtcaatgttaagagaacagttcattaraagtttctgtttaaaaagaaaaggaaaggcccaaatagccatttcaaggcagagcaggtgaaaggcctggaacactcctgtgcgctcactgtcggctgct

SEQ ID NO: 9127 - DNA, 201 bp, Homo sapiens
ctaagggtaactgagaattcgcatgtcacgagttccctggaaagattctgctgagagccagcgtggaaagccccggcacagtgagtgttcctgttggtccyctctctgaccacctcagactgactacatctccaggctcgaaggacctggcccctgaacccccaccctccactgctttatttttctctgtggaactatcac

SEQ ID NO: 9128 - DNA, 201 bp, Homo sapiens
tctggtcattttggggggcattaaaaagtccaggccagtctggcccagatgaaaacttcaggctcaaatccaatcagtgcccttctgttctcttagctcargctgacctgtggcctgaggatgccgccctgcgggaggagaggtctgttttttcccctccttctacccctcccccacccctgctgggcccctttctcctcc

SEQ ID NO: 9129 - DNA, 201 bp, Homo sapiens
gcatgtcacgagttccctggaaagattctgctgagagccagcgtggaaagccccggcacagtgagtgttcctgttggtcctctctctgaccacctcagacygactacatctccaggctcgaaggacctggcccctgaacccccaccctccactgctttatttttctctgtggaactatcaccagctaacattccattttgt

SEQ ID NO: 9130 - DNA, 201 bp, Homo sapiens
gtgtggtggcttatgcccaaaatcccagggctttgggagggcaaagtgggaggatcacttgagcccaggagtttgagaccagcctgggcaacaaagagagwccctgcttctaccaaaaaaaaaaaaaaaaaaacaaatcaaaaattagccaggtgtggtggtgcgagtctgtaatctcagctacttgggaggctgaggtcg

SEQ ID NO: 9131 - DNA, 201 bp, Homo sapiens
gtagtggaagaaggaagtgataagtttcattagtggaaattaatttttcatttgttggtcaccagtttagagcactttaaggcattaattttttcattttwaaaaaaaacccagaaatacgtttaaataccttcccccacccccagcagctgacccttacttattcagaaaaccctcctctgacatcagccccaaaatatt

SEQ ID NO: 9132 - DNA, 201 bp, Homo sapiens
caaataaaaatgtcattatccattcagttcgacagacagcaagcagagtatcgcagaaaattacaatcacgtcaggcagcaacaaaggattctagtcaaargcacgtagaagacccgatggtgggcagctggcctgggctctctttcacactgtccaggaatatgtttggattcagaatgggtggccccctctttatacac

SEQ ID NO: 9133 - DNA, 201 bp, Homo sapiens
ctgtttagatggatagggttatgcaaaaaagaccctctccttccctctctctgtgtaggaaatatgttttccctagcactcagcattgtccaaactttcargaactccaaaggcttaaagatggtgggttttttctttctcaagtttatgacataagatctgcacagaatgacctagaagtgaataaactaaggagcaaag

SEQ ID NO: 9134 - DNA, 201 bp, Homo sapiens
tttcaacatctaaatctgccaaattattgaagctagcacagagaactttctgggcattggccagggaagccagcaatgtggatggaaagatttatcacccsctctcataaccaaacctccatcgtatctccctgcaagccttgaaactgctcactggacccactcagacaacagagctatgggatctagaaggtgaaatgt

SEQ ID NO: 9135 - DNA, 201 bp, Homo sapiens
aaaagccataaacaagaatgttcataaggctttattcataatggcccccaacctgggaacaactcaaatgtccattgacaaggaaaaggatggataaatcsgggcagctcacccaatggagcaccaaatcatgaggatgaacacaccacaacacacaacatgggtgactgtcacagacatgaaactgagcaaaagaaggca

SEQ ID NO: 9136 - DNA, 201 bp, Homo sapiens
ggctggagtgcagtggcgcgatctcggctcactgcaagctctgcctcccgggttcatgccattctcctgcctcagcctccggagtagctggcactacaggygcccgccaccacgctggctaattttttgtattttttttagtagagatggggtttcaccatgttagccaggattatcttgatctcctgacctcgtggtcca

SEQ ID NO: 9137 - DNA, 201 bp, Homo sapiens
ccaagtgaggtcaaggggcagacggaggagcagccccactgcatcggggcttccacgtgtgcggggcttgtctcacttccccacgatctcaacatacagtrcagcagccagaccagtctcccaaaacgctgcttatgcctggcactccccggcttaagaaccagccaggagtcaagggctccccgttcttccttgtctgct

SEQ ID NO: 9138 - DNA, 201 bp, Homo sapiens
ggaagcattaaggttcaatgcttggctctgtgcttgtttttcttacccctatcccagaggactcatccccgtctgtgcgacaccatctccccacttctacrccaagctgctcacggtctcacccaggtggggtggtggagggggcctccagcaaaatcctgcaaaagctgatctccttcccctggaagatgctgccccacc

SEQ ID NO: 9139 - DNA, 201 bp, Homo sapiens
ttgggagggcaaagtgggaggatcacttgagcccaggagtttgagaccagcctgggcaacaaagagagaccctgcttctaccaaaaaaaaaaaaaaaaaamcaaatcaaaaattagccaggtgtggtggtgcgagtctgtaatctcagctacttgggaggctgaggtcggaggatctcttgagcccaggaggttgaggata

SEQ ID NO: 9140 - DNA, 201 bp, Homo sapiens
gtggcatagtctcagctcactgcaacctccgcctcccgggttcaagtgattctcctgcctcagcctcctgagtagctggggctacaggtgcgtgccaccayacccagctaatttttgtatctttagtagaggtggggtttcatcatgttggccagtctggtctcgaactcctgacctcaggtgatccgcccacctcggcct

SEQ ID NO: 9141 - DNA, 201 bp, Homo sapiens
tgcagatgggtgatgatgcgctcctgcctcccttcagtttgttctgttctcccaaattctttcagtgtgcctggtagaagcagtctgccagtctcccctcrctccctctcattcatcccctctctaactactcatcctgcgaccccactgacttggttttggccttgtccctgccacagttgacaaatataatggcgcgtc

SEQ ID NO: 9142 - DNA, 201 bp, Homo sapiens
tgcccaggctggagtacagtggcacaatcacagctcactgcagcctcaacctccccaggctcggggaattctcccaccccagccccatgagtagctgggastacaagcgagcactaccaccccaggctattttttgtatttttttgtagagacggggtttctccatgttgcccaggctgggaactctggatcttaataaaa

SEQ ID NO: 9143 - DNA, 201 bp, Homo sapiens
gtggagtcagaatctttctttctgggactgatgccatggggcctggctccacccccacaactgcatggcacagcactgccttttccttggccatgggctcrccctgcagatgggtgatgatgcgctcctgcctcccttcagtttgttctgttctcccaaattctttcagtgtgcctggtagaagcagtctgccagtctccc

SEQ ID NO: 9144 - DNA, 201 bp, Homo sapiens
atctcttctctgtatccacccccgacctggtgtttccctcagattcacacgggaggcagctcaggactgcgaggtgctggggcagcgcatccccgcaggcrctgtgctagagatggccgtgggtgccctgcaccatgaccctgagcactggccaagcccggagaccttcaaccctgaaaggtgagtactgccccttttaaa

SEQ ID NO: 9145 - DNA, 201 bp, Homo sapiens
gtctcaagctcttggcctcaagtgaccctcctacctcagcctcccaagtagctgggactataggtgcatgcaaccatccctggctaattttatgttttacttatttatttatttatttatttatttatttgtaaagacaggattttgctatgttgcccaggctggtcttaaacgcctgaggtcaaatgatcctcccacctc

SEQ ID NO: 9146 - DNA, 201 bp, Homo sapiens
ttcccgtcacgtttatttggcctggcagagtgaccaggatctgctaaggtcatgaggctgtccctgggtgggtgggggcgtggccatgctgcatcagaccrgtccagaggtggagggcaccttggggtctctcgtgtggctctcctgttgatgagggacctatgaatatcccacagcgaccttttcagatgctccataacc

SEQ ID NO: 9147 - DNA, 201 bp, Homo sapiens
acccccgacctggtgtttccctcagattcacacgggaggcagctcaggactgcgaggtgctggggcagcgcatccccgcaggcgctgtgctagagatggcygtgggtgccctgcaccatgaccctgagcactggccaagcccggagaccttcaaccctgaaaggtgagtactgccccttttaaaaagctctgaagggatgt

SEQ ID NO: 9148 - DNA, 201 bp, Homo sapiens
tctcaagctcttggcctcaagtgaccctcctacctcagcctcccaagtagctgggactataggtgcatgcaaccatccctggctaattttatgttttacttatttatttatttatttatttatttatttgtaaagacaggattttgctatgttgcccaggctggtcttaaacgcctgaggtcaaatgatcctcccacctcg

SEQ ID NO: 9149 - DNA, 201 bp, Homo sapiens
gataaaaaataaattccagtgcttaaagctcttatctttgtttaccatttccccaaacagctagtgacctgctctctgactcctacagcaaatcatcaacragatgcacacgaagatgagggatgggaaatgcaggaggggtgtgcggagggcaagttgatggctctccgccttcccgtcacgtttatttggcctggcaga

SEQ ID NO: 9150 - DNA, 201 bp, Homo sapiens
gactgcgaggtgctggggcagcgcatccccgcaggcgctgtgctagagatggccgtgggtgccctgcaccatgaccctgagcactggccaagcccggagamcttcaaccctgaaaggtgagtactgccccttttaaaaagctctgaagggatgtgagtgtgtgggatagaaatttaccagtggaggcagcagccgggaggc

SEQ ID NO: 9151 - DNA, 201 bp, Homo sapiens
ctcaagctcttggcctcaagtgaccctcctacctcagcctcccaagtagctgggactataggtgcatgcaaccatccctggctaattttatgttttacttatttatttatttatttatttatttatttgtaaagacaggattttgctatgttgcccaggctggtcttaaacgcctgaggtcaaatgatcctcccacctcgg

SEQ ID NO: 9152 - DNA, 201 bp, Homo sapiens
ccaggctggtctcaaactcctgacctcaagtgatctgcctgccttggcctcccaaagtgctgggattacaggcgtgagccattgtgcccagctgctcttcyctttttactgtcctatgactggtctcccaatgccagctgagagtgttggtctgatctcttttcttctaagctggccacacaaatggacctcagttactca

SEQ ID NO: 9153 - DNA, 201 bp, Homo sapiens
atggcttcctcctccttcccaaggggctgccccaccgctttgccctcactagccagagcaatctaccttgttcactttgcccaagacacagggaggacccytgtggtctttgcaggggcttcacccagttgagctgggaagagacctcacagcatcctccccatctccctggcccgggtttagaatactgaagacacatag

SEQ ID NO: 9154 - DNA, 201 bp, Homo sapiens
tcaagctcttggcctcaagtgaccctcctacctcagcctcccaagtagctgggactataggtgcatgcaaccatccctggctaattttatgttttacttatttatttatttatttatttatttatttgtaaagacaggattttgctatgttgcccaggctggtcttaaacgcctgaggtcaaatgatcctcccacctcggc

SEQ ID NO: 9155 - DNA, 201 bp, Homo sapiens
gctggagtgcagtggcatgatctctgttcactgcaagctccgcctcccgggttcacaccattcttctgccttagcctcccaagtagctgggactacaggcrcccaccaacacacctggctaattttttgtatttttagtagagacagggtttcactgtgttagccaggatggtctcaatcttcttacctcgtgatccgccc

SEQ ID NO: 9156 - DNA, 201 bp, Homo sapiens
gttaactctctgaattacaataaccatcaactagatacctttttaaaagaattgtaatactttctttataaaacgttatctttggccaggcatggtggctsacacctgtaatcccagcactttgggaggccgaggtgggtggatcacttgaggttaggagttcgagaccagcctggccaacatggtaaaaccctacctcta

SEQ ID NO: 9157 - DNA, 201 bp, Homo sapiens
gcaggggtggctcagctggagcacagggctgcagaggggagggagcgggtgttctgggccagccctgaccacacggacctgcaggttcacggctgaggccmggcagcagcaccggcccttcacgtacctgcccttcggggccggcccacggagctgcctcggggtgcgtctagggctgcttgaggtcaagttgacactgct

SEQ ID NO: 9158 - DNA, 201 bp, Homo sapiens
gggctgcttgaggtcaagttgacactgctccacgtgctgcacaagttccggttccaagcctgccctgagacccaggtgaggcccccctgctcagaggcagrggcaggggcaggggtgggagggccaccccagttctctgcgtgagagcaggccagcctgggggcaacatcaggctctgcctccgtgagcttgggcaagctc

SEQ ID NO: 9159 - DNA, 201 bp, Homo sapiens; identical to SEQ ID NO: 1018

SEQ ID NO: 9160 - DNA, 201 bp, Homo sapiens
ccacttcggataaattttcttttatttccatactcttttgtgacatgtgtggcacaagtattcaatctcacagggatgttaaaacccacactcgaagggtktccagtgtgcttaggaaatgtgggtttgcgcaatcacaggccaagcctgggggtcctcggggaagctactcctccaggtcacctgccaggtggatgcact

SEQ ID NO: 9161 - DNA, 201 bp, Homo sapiens
cagaacatttcatccaataaccgcagaatacacattctattcaacatcatatggaactttctccaagatcgaccatatgataggccataaaacaagcctcwataaatttaagaaaattgaaattgtatcaagcactctctcagaccacaacagaataaaactggaaatcatctccaaaaggaactttcaaaaccatgcaaa

SEQ ID NO: 9162 - DNA, 201 bp, Homo sapiens
ttaagtgttacatgtgccatccagccaggtgagatggcagcagagaacctaaaccctgagaaggtgaaatcaaatgggctgggcgcggtggctcatgcctrtaatcccagcactttgggaggccaaggcagacagatcacttgaggtcagaagttcgagaccagcctggccaacatggtgaaactccatctctactaaaaa

SEQ ID NO: 9163 - DNA, 201 bp, Homo sapiens
ccaagggccaaatcagatgaaatgttcaatttataaaggtcaacaaatatttattaattagttcctgttgttaaggagtttataatgtagaagagaaacamggtacataaatcactgcattattaccaatcgtggaaggtggtgacagagctggggtcctgctttgagcatcagaagccactttggcagggaggaagcagt

SEQ ID NO: 9164 - DNA, 201 bp, Homo sapiens
acggtcaagcggagatagtcattctctccctgtctccttgaaagggagtatgagggtttgtgagcaataacccttacaccaacatatattgctattagtcyattgatggcatctgtttacctctcagttgtaggtgcttcaaaattaaagaaaatctatttcttgaaaagtgcacaataaatcaagctttaaactcaattt

SEQ ID NO: 9165 - DNA, 201 bp, Homo sapiens
caagtcacccaagctacacaccatcaacgtttggggcttatctctgtttagatggatagggttatgcaaaaaagaccctctccttccctctctctgtgtargaaatatgttttccctagcactcagcattgtccaaactttcaggaactccaaaggcttaaagatggtgggttttttctttctcaagtttatgacataaga

SEQ ID NO: 9166 - DNA, 201 bp, Homo sapiens
ccccgagcatctctcatttcttcccttccactccatcctggctaatttactgtccacaattcacagagtattgtctccactctgcgcagccacagaatggrtgtggtaacgtctccatggcatttatggtttctacaaatcacaaatcacatatgaagggctccaagaatattagaggaatgagccagttaactcagcgcc

SEQ ID NO: 9167 - DNA, 201 bp, Homo sapiens
aacactcttgctcagggtgctgtgcgatgggccattggtaggtagtcccagctggtctggtgtgtgaggggagaggcaggttcacccagctgtctgtgccygggcagggcaactcccgaagtgggctgagggagagctctccgtgatctctaaggagggaggcagcgcattgcagggttagcaaacctttagaagatcctc

SEQ ID NO: 9168 - DNA, 201 bp, Homo sapiens
attcacgtttgatgttctatgatgatgaaattacttcttggaaattggctctgaaacccagcctcagtcccagtgctgtttttctttttaactggtttaattttttttttgaacttttttatctcattgtagcttaccttggattgaaactggccacatgtaaaaccaagagcaaatggtagctccttccctacccccagc

SEQ ID NO: 9169 - DNA, 201 bp, Homo sapiens
tcgaggacaaggagcaggcatcccgtgtggcgggagcaggaacactcttgctcagggtgctgtgcgatgggccattggtaggtagtcccagctggtctggygtgtgaggggagaggcaggttcacccagctgtctgtgcctgggcagggcaactcccgaagtgggctgagggagagctctccgtgatctctaaggagggag

SEQ ID NO: 9170 - DNA, 201 bp, Homo sapiens
acttttagaaatgtgaaatgctctggaaagtctcagcaatagaacaagtagaagaaggaaattcagagctcaaagacaaggtctttgaattaactgaatcyaacaaagacaaagaaaaaaaataaaaaaatatgaacaaagcctccaagaagtctgggattatgttaaatgaccaaacctaagaataattggtgttcctga

SEQ ID NO: 9171 - DNA, 201 bp, Homo sapiens
tcagaaagaggcagcccacaagctgagcacagctgcagaggttttagcttgcttactacatttgaattaattgccaaacttttaaactcaggggaattccrcaaaaatctaggtaccagcttttcttgaagacaacggaagctcaggccaccctgaggccatcacctctggcagtcacctgccaagcacgtggctccagct

SEQ ID NO: 9172 - DNA, 201 bp, Homo sapiens
tatgaagccagtatcaccccaataccaaaactaggaaaggacacaaccaaaaaagaaaactacagaccaatatccttgatgaacatagatactaaaattctttttttttttttttttctgagacagagtcttgctctgtcgcccaggctggagtgcagtggcgcgatctcggctcactgcaagctctgcctcccgggttca

SEQ ID NO: 9173 - DNA, 201 bp, Homo sapiens
aggccctagggggcagtagcaccaccatgcagatcaccagttccacaaaagaacggaactccaccagtacctagtgttattagtataagttttgggaaagrtccttcttttcttagctcattagaaaaacaatcacagcatcctatggactgggccaaagtgggcagacattgcagtccagcccaaagaggcctgtcccag

SEQ ID NO: 9174 - DNA, 201 bp, Homo sapiens
acaggtgccctgaggaatgaatgggtggacggcgcttacagactcgggtgccacttcctcttgtccagctccatgccctcccccatagtgtgtggaccatygggggcctagaactgaggtcctggttggtagcacccaggagcctgttcccaacatggccccatggcagggcctggtctccaggtgtggcatgaggtgcta

SEQ ID NO: 9175 - DNA, 201 bp, Homo sapiens
atctgaggacctgggaggatttcagaaatcgctggtcagtcccagcaactaaggctcaaatgccctccccaggattctgctggagatcattctgccagtcrctccaggagcgaggggctcacctcttcctaaggcaggactttccacgaggctagaccagaccagtgtcctccaattaattcatttccctgtgtcttccat

SEQ ID NO: 9176 - DNA, 201 bp, Homo sapiens
tgacacagttccccctaagcctcgcttcttcactgtttaaaggggataataatagcatctgctctgttagactgagggctggttaagtggaataacatacktagcacatagcctggtacccacttattttttttattttgctactttgtttcaaatcttcaaatcttcctattattccttttttacagagccatgtcagaa

SEQ ID NO: 9177 - DNA, 201 bp, Homo sapiens
agtatctttgaactgcattaagtggctttcacacctccgcatcctgctcattggctttcaagtggccttaggggtgttactattgtttgaatgtttgtctyctccaaaaatcatgttgaaatttaatccccgatgtggtagtgttgagaggtgaggcctgtaagaggtgactgggtcatgagggcaaagctatcataaatg

SEQ ID NO: 9178 - DNA, 201 bp, Homo sapiens
tcctgaagaaggaggtccttcagggcctgtggacatagagacgagggtacacacaccaggtgggtggcactatttatgtgagtgtaccaacgtgagaatgwcagcacaggttgaccagcagcctggactgactagaggccaaatgctaaggtgcactgggcaatgcagttgggtgagagaaaggggcactagatgcttaca

SEQ ID NO: 9179 - DNA, 201 bp, Homo sapiens
cagtgctatggagaggctgggaacgcactgctgcctgtgttgcttgtttatttatttccttttattcccagtgttctctcattccccttcccatccccaawagtcaaccattccaattgtgtttaatgtgtttttttttcacatgttcttgcaaattgtgcattatcatttcgtggatattatccttagtttatgccaata

SEQ ID NO: 9180 - DNA, 201 bp, Homo sapiens
tggtttgtagcttacctctgcctgtccccctctggggactaagttttattaactgaataaattagatgggtgggtatattcaatagagtagggaggtttawcattacaggtttctttcagatatttttcccccttgctgcccagttctctcctttagccatagctctgttttggagaaagctttattgtagcttgacagag

SEQ ID NO: 9181 - DNA, 201 bp, Homo sapiens
attgcagaagtttaactgcttctctgctgcctctagattctctttcccaaacactgcattgctatctcctcgctcaaagtcccctggaagccgtctgtcargaaactgattctgattattaaatgcagctgtagcttgttgctccatcagcctcagcaaggagtgctgattaaagaagttggagaagccaataagtcaaag

SEQ ID NO: 9182 - DNA, 201 bp, Homo sapiens
cttctctgctgcctctagattctctttcccaaacactgcattgctatctcctcgctcaaagtcccctggaagccgtctgtcaagaaactgattctgattaytaaatgcagctgtagcttgttgctccatcagcctcagcaaggagtgctgattaaagaagttggagaagccaataagtcaaagtgcacggaccaccaagcc

SEQ ID NO: 9183 - DNA, 201 bp, Homo sapiens
gtatacacatacaaaaagtcacagacacaaagagggaaatgagccacagtgttaggagatagctcagagactctgagccacagatactcggctgtgggtayctgagtcagttttcctggaaatagctttgaaataccagcatctctagtcctttctgaatttgtaagtagtctttggacttttgttatcaaacatcagagt

SEQ ID NO: 9184 - DNA, 201 bp, Homo sapiens
taaataggtttaatttcaggaaataaaactggggctaaattagtacttctctgacggaaaatgtataaataatgtgatcccctggggacccaggttagcaytagatttatttttaaattttataactcatctgaaagagagagaacacagtggaatctatatatttgtatattcctctaagctgttctgatttgaaagata

SEQ ID NO: 9185 - DNA, 201 bp, Homo sapiens
aaactcaatttgttttccagaaatttttcaaattttcccatgacaaaatttacatttattttctgattttaacagtaagagtaccattctaattttcatckggtctttgcttcattggttgacatttgccttgcccttggacttgagaacttgaagtatcaatgaggcatagcacatcagtaaataagccccgctaagcca

SEQ ID NO: 9186 - DNA, 201 bp, Homo sapiens
tttctagaaaatcaacagaatggggtgtgctatgctcattcttgatataacaaataccaaaaacttcattaatccatgacaacatgcaatagttaccacaraagagcaatattgagagtgtattagttatctattgctgtgtaacaaaattaccccaaaacttagtggcttaaaacaaacttttgttagctcattgtttct

SEQ ID NO: 9187 - DNA, 201 bp, Homo sapiens
atattttcagcttggccttttaatcatgcaagagagaataaaaggtcacatgggtggccagcaggctccacaaagaattccacccacccgtttgtcgaagycgagtggtatctatgtgaatctccattatgccactctacctttctgtgtaagttaggaattttctaacataaaagtattttcctattaaaaaaaagaaac

SEQ ID NO: 9188 - DNA, 201 bp, Homo sapiens
aattttcaattattttttctttaagctatttcattgaatatttctcccattcaatattgggggattgtgttgggagaggagggtctccctttcccacttcygcaaatggggcactcacagtatttggagtgtcttctgggtcctgcaggagcagtctggttccttcagagagtctgtgggtccttttgggattgctggttt

SEQ ID NO: 9189 - DNA, 201 bp, Homo sapiens
aataccacattacttctgcaagaatggccataatcaaaaaataagaaaacagtagatgttggcgaggatgtggtgatcagggaacacttccaccctgctgrtggggatgtaaactagtacagccactatggaaaacagtgtagggattccctaaagaaccaaaagtagaactacctaccatttgatccagcaattccgcta

SEQ ID NO: 9190 - DNA, 201 bp, Homo sapiens
agggccgagcacagtgcctggcacgtgagaaataggtgttgagaaaagttatttcactcttccttttctaactggaaaccaactccaagcacagatttgasgggggacgagcagggaggcacagtagataaagcctgtgagttactgcgcccagcgagaaaggggtcggtggagtcaaagagagaaggcactgcgtgggga

SEQ ID NO: 9191 - DNA, 201 bp, Homo sapiens
cttactatgtgccaggaatggtgaggagtaccgagagggagtgagacatcacccctgctctcagaagcagcagtgcggcggggagggcaggactccaaaamggctccgattccaggcccgcgtttgcttcccgggaacaggcgtctaatggccctggtttattatcacccccttttcaatgccacttttgtttttctcttt

SEQ ID NO: 9192 - DNA, 201 bp, Homo sapiens
tgacgtattgtttccttcagggcacagaaaatatggagtctagcgaacagaagcagggcccatgcgtaggggtggtccaggtttacaccaaagaaaatgartactactcacagctgtctggcaaggtggcaagagagcgcctcggaggtcgtgagtgtccctcaccatccataggaatgccacaaaagcccttgctgccag

SEQ ID NO: 9193 - DNA, 201 bp, Homo sapiens
ttttccatgatgatcatttgatttaaaccgaccagtgtgtggctgagctctgtgaactggggcatcaggggatcagggctgcaccaccagggctggagatggagctggggatagagactgtattagctggaagtacatggagcacatgctaagacgattaacacacaagataacacattttaaaaactaattttttcccat

SEQ ID NO: 9194 - DNA, 201 bp, Homo sapiens
aaagtgtttaggaaattaagtctaaatcaagcccttcttggagattcatagaatatcaaaggccctgaaaggttctttaataaagaaacctgttcagcttyatttaacccagtgttttcgcagcgtctttgctaaagtactgctgcatatggccgtggtgggttgggcaactagacccgctgagatggtcccttgaaaacg

SEQ ID NO: 9195 - DNA, 201 bp, Homo sapiens
tcaagtctcattctaagaccagtttaaattgaaatgtgattggtgattattaagatttaagactatcacagattattaagacttaagtttaccactatgcstggaagttcctttcccagagagtttcttctacatgtaagaactggactctaattctagacccacatctactccagactatatttagaaggcaccattggg

SEQ ID NO: 9196 - DNA, 201 bp, Homo sapiens
ccacctctctgggcttgatcacttttccatacggtcaagcggagatagtcattctctccctgtctccttgaaagggagtatgagggtttgtgagcaataamccttacaccaacatatattgctattagtccattgatggcatctgtttacctctcagttgtaggtgcttcaaaattaaagaaaatctatttcttgaaaagt

SEQ ID NO: 9197 - DNA, 201 bp, Homo sapiens
aggtgctgctgagtctctgccttctgacagaccccacaacagcacaacaggacaacagagcacaaagccacagggacaagggaagaggcaaaacagagaaygccttacagccctaatgttgaatctaaaacaaagaacagcgtcactgcagcgtgagaaaagtggcaacgggctgtggcaccggcccttggttagggcatc

SEQ ID NO: 9198 - DNA, 201 bp, Homo sapiens
tgtaaattcacccttaagtcttaaggataggtacgagatccaatcagccttcactcttatctctaatttattctgtctcatcagaaccagaaaacatcacygcactttccttggaggtaagtgctttattccatgtagtgtgccacaggactgcatcttgccactacataaatacacataatatatgatttcctccttcaa

SEQ ID NO: 9199 - DNA, 201 bp, Homo sapiens
cccggtgtagaggtggctgtgccctccctcccatcattactcctacactacctcagcaaagccatagccaagcctcagggaccacaatgatatcacacccygaggaccttcagagggactgactgagaggtctgggggtgctctggggtcctgtgctggtgtcccagagctgagggagcaagggatgctcacttcccctgc

SEQ ID NO: 9200 - DNA, 201 bp, Homo sapiens
cacgtgggcactgagctcttttccagaaactttccaaagagacccatgggtctggccaagaccctcaggggttgccctcattggcctggggacagtttttsagcgactgctctttgagaagaagtcagcatcagagggagtcagagaagaggggtaagcaagctaggttggggagctgctacccccaaatcagactgcaaa

SEQ ID NO: 9201 - DNA, 201 bp, Homo sapiens
attcgccccagcgcagcattcctccttcctaagcttgcacagggcctggtattgaagggcagcagattcattccagcatgactactgcagctacctgtgtmtcctggcggaaggggcagcctcaggagtgtggagttcagggatccagctttgacttggccacgcccagagccagccagcctcgagcacctgtttcctgtc

SEQ ID NO: 9202 - DNA, 201 bp, Homo sapiens
tattaggctatcaaccactgtttgctgactgagaaaaaaatgaatgaccaatagaacacagaaacattatggcaggcatgctcctggaagcagttctcctrgcacacgcttctgaaggcctttcctttttcccccttccctctccctccacccatacaagggtccagacgagtgagtcttctgtcaacttcgggtccaacc

SEQ ID NO: 9203 - DNA, 201 bp, Homo sapiens
cagtaggtgctcaatcaatagacgcagaaaaatgagcttcagtcttcatccacttcggataaattttcttttatttccatactcttttgtgacatgtgtgrcacaagtattcaatctcacagggatgttaaaacccacactcgaagggtgtccagtgtgcttaggaaatgtgggtttgcgcaatcacaggccaagcctggg

SEQ ID NO: 9204 - DNA, 201 bp, Homo sapiens
cttcgatttaataactcagtgatgagcttggagataaaattgagcctgctgtgaaaactaggtctgtggcttccttgaggaccatttctacagaatattattttttttgttttctctctcttaaatggttatacacaatatccctatccttctcctcactttattgattttccagaatgagagtacgaggtatgactataa

SEQ ID NO: 9205 - DNA, 201 bp, Homo sapiens
ggtttcatcatgttggccagtctggtctcgaactcctgacctcaggtgatccgcccacctcggcctcacaaagtgctgggattacaggcatgagccacagygcccggcccactttattttatagcttatgcatgtgacctatcttcttggcttgactgtaagtccctaagaggagggcccacatcttaagccagtgagtgc

SEQ ID NO: 9206 - DNA, 201 bp, Homo sapiens
gggggtgaatgtagggagagtgagcatttttattttattattttatttcatctcaaaaagcgtgttgacttttcccaagtgctgacacaacttggacttaytcataaaagaaaatcagaatcgcccttgtgggaaacacagcagccctgtctgagcgccactgaggtgactcccggatgctgtgcggtgcagttctgaagc

SEQ ID NO: 9207 - DNA, 201 bp, Homo sapiens
gtttcatgctttaggcgtgaggtttcaggactgtagtctaattatttcttccagtggagtagaatgtctgaaaggatttggagtaacagggctgatgaagyggcaaggaaggtgagtagctatctaggcaagtatgtgaacacagcctggaagggcttgtagtaccaagctgctcttaaagctcaggtaccaagacccaga

SEQ ID NO: 9208 - DNA, 201 bp, Homo sapiens
agtctttctgcatcttttgtatttctttaatgagtgtgaatatttagcaaaaaagagaaattttactaaaaagagtgggaaactgctcccttctagtggtraaggggaaagcagtttcatgctttaggcgtgaggtttcaggactgtagtctaattatttcttccagtggagtagaatgtctgaaaggatttggagtaaca

SEQ ID NO: 9209 - DNA, 201 bp, Homo sapiens
acttcctggttggctactgagagaaatgagtctcttgagcaattatcctttgcaggtagcttccatgaagaacccagtttttgagtgcctctagcagagamtaagcttcaaacctcattaaccatggatccaatccaatatggcagcttgtatgttctccattctcaaagcccaatataaatgatgggctttcttcattca

SEQ ID NO: 9210 - DNA, 201 bp, Homo sapiens
acattggttcggactctggctcttgaaaatgggcctgcgcattctgagagcatgtgtgtctggagatgttctccccagcccagctcccatagagcccggtrcagggtgaacccacaatggaagctgagaagctgaacccagccagtgcccctctccaggggagatgaggggttcctgactctggcagcccgatccccagca

SEQ ID NO: 9211 - DNA, 201 bp, Homo sapiens
tcagtaaagcggtgcctggctgagtatttacttaggttcatgcacagatagcccaagatccaaaaacagtgatgatgaatgattctgcggctacctaaacyagctgtccagtggaggggcacaaggctctgcaccagggcctgcctacagaccaatgaactgaagggaggcttagaaggcacacttactacattgcagata

SEQ ID NO: 9212 - DNA, 201 bp, Homo sapiens
ttgcaggttcaattctctcctatcataaaacaaacaactgagccagccaactaaccaaccaaccaaccaaccaaccaatcaaccaaccaactcactaaccrcctcttctttgactccaccccaggcaccactccacttatccttctcttcccagcctagtgacttgaaagaggactttgtatttgctcactttctcacctc

SEQ ID NO: 9213 - DNA, 201 bp, Homo sapiens
tcatcatagagaatttccattaatttctggccgtgtgccactgcaaccagctttcaccctgacttgtcatataacaaaatatcattaaattgaactctagtttttttttttttttttttagacagggtcttactctgttgcccaggctggagtacagtggcacaatcacagctcactgcagcctcaacctccccaggctcg

SEQ ID NO: 9214 - DNA, 201 bp, Homo sapiens
tctctgacggaaaatgtataaataatgtgatcccctggggacccaggttagcactagatttatttttaaattttataactcatctgaaagagagagaacayagtggaatctatatatttgtatattcctctaagctgttctgatttgaaagatattaaatcaataggaataactttctgagactcttgtaagattgcataa

SEQ ID NO: 9215 - DNA, 201 bp, Homo sapiens
ttgttagctcattgtttctgtgggtcaggaatcctggcatggcttagctgagtgcaaaggctgagtccagagggactgagggctgaggccagagggatcarggtgtcttggagtagtagtcaaatggctggcctgatctgtggtctcatctgaaggcttgactgggggaagatctgcttctaagcctcatcacacggttat

SEQ ID NO: 9216 - DNA, 201 bp, Homo sapiens
ggctcttttgagtccctcttcgtgtgtggatcaacaagtcacccaagctacacaccatcaacgtttggggcttatctctgtttagatggatagggttatgyaaaaaagaccctctccttccctctctctgtgtaggaaatatgttttccctagcactcagcattgtccaaactttcaggaactccaaaggcttaaagatgg

SEQ ID NO: 9217 - DNA, 201 bp, Homo sapiens
tcatcccataacacagtattaggctatcaaccactgtttgctgactgagaaaaaaatgaatgaccaatagaacacagaaacattatggcaggcatgctccyggaagcagttctcctggcacacgcttctgaaggcctttcctttttcccccttccctctccctccacccatacaagggtccagacgagtgagtcttctgtc

SEQ ID NO: 9218 - DNA, 201 bp, Homo sapiens
agaagaggacctgtgcagggaaactcccctttataaaaccatcagatcttgtaagacttattcactaccacgagaacaacataggaaagacgtgaccccaygattcaatttcctcccaccaggtccctcccaccacacgtgggaattgtgggagctacaattcaagatgagatgtgggtggggacacaaccaaaccatatc

SEQ ID NO: 9219 - DNA, 201 bp, Homo sapiens
gtgacctcagccagggtggcagctgtggggatggaaagagttggccaaagagagatttaataattgtgactgacaggattgtagttgagagagagagaacwactcctaggtttggggtttgggttagttttggtttttcaagcttttttgactatgatctacagtaagaaacacattcacattttgatacagaatacacac

SEQ ID NO: 9220 - DNA, 201 bp, Homo sapiens
tttattggagtgtgatgacagatagtgaataaattaacataaatttgcataatacaatacagctgttaatttatgatcatattaaaacacaaagttttgtmgtttgaagcagttaaaagtcttaatcttctgaaaatttccctcttgtttgttatttgtttatgagttacttagggttattagataaaatacaggcttctg

SEQ ID NO: 9221 - DNA, 201 bp, Homo sapiens
ctgtcagttaaacttattagagttacccattcaatcaaaagcacctggatttagatggctctggcttttgagggcaaagtgagtggaaaaaataatggagractggagtccgaacagaattttaatttatgttttcagtagtaataaagccttctctagattaataactgggaaagcactttgaaaagcatcaagcattat

SEQ ID NO: 9222 - DNA, 201 bp, Homo sapiens
gtgcagctcctacaaaatttgagaccctgaaaggatctcaaacttgaactccgagttgctcccctgtggttttgttaattcaacagcaaattttcctaagsctgactctggtgtctgtaggtcgaaggcctcataatatgctacatttatgcatattcgccctgtcagttaaacttattagagttacccattcaatcaaaa

SEQ ID NO: 9223 - DNA, 201 bp, Homo sapiens
gttcctaaggatcacttttttaaaaaatcttttttaaatgggagtaagctgttatctgcacaaagcccttggggtgaagtccagtcaacagggcttccctyaggagatgttctctaaactgtgttcatgaaagtgaataagagttagcaggcaaaggagaaagggggttggagagggatctagagtttcagagaaagagaa

SEQ ID NO: 9224 - DNA, 201 bp, Homo sapiens
aatttaaggaaaagacaaaatgctgtgagatttgggctaacacgaacttctccctttgtcacgacccctccatcagatggcccctgagttctgcagcctcraggaaggcctgccctatctggacatggtgattgcagagacgctgaggatgtacccgccagctttcaggtgtgtggtagccccctcccctgcccgagtccc

SEQ ID NO: 9225 - DNA, 201 bp, Homo sapiens
agagctattgtattttatgaatatttgtgaattttaggatcttcttcttgaatcttagctgtgtgaaaaatatcttccaaacagtgttcattttcccagamagcactacatataacctcttcatctgcagccaatttaggtgtactcccggcatggtgccctaattacacctttgttatccattatcagatggttcccctc

SEQ ID NO: 9226 - DNA, 201 bp, Homo sapiens
aaagagtaagatggtgctccccattccagcaaacactggccacagtggacagtccaggagagagctgtgcaccaggaaggtgtcagctggacagtagtcargcgtccagtaaagcagcgatgaggaggctgtcagtggacaccagggccccactagtgggtggttcaggaacctgagaagcccccggccctgagaaaggag

SEQ ID NO: 9227 - DNA, 201 bp, Homo sapiens
tttcttcttcccattttccctcttctaagccatagctcagtagtatggtgaaatgtctttgattttagtttaaagaaatgaaatcagattccagatttgcwacctcttattagttgtgtggccttcagacaatcctttaacctcctgattctcaatttcctcctgtgtaaaatacattagactagctaatccctaaggtct

SEQ ID NO: 9228 - DNA, 201 bp, Homo sapiens
gtggcgccatgggcccaggtgagggtgatcaccaaaccctggggttcagggatgccgtgtttagactctgattgtgggcggcggtgagtctgtgggcttaytagccacacactgaattcctaaggagaggcagggagggagctgtggacattccaggtgattctgcgaattcagctctgcctctggggctgtgcaggaaga

SEQ ID NO: 9229 - DNA, 201 bp, Homo sapiens
gggtcatcctatgggaggggaggtggcgccatgggcccaggtgagggtgatcaccaaaccctggggttcagggatgccgtgtttagactctgattgtgggyggcggtgagtctgtgggcttactagccacacactgaattcctaaggagaggcagggagggagctgtggacattccaggtgattctgcgaattcagctctg

SEQ ID NO: 9230 - DNA, 201 bp, Homo sapiens
attgcctaattgtctctcctgtcagatagtcagacccttggaaactgtgactgggtcttgatttgctttcgtgcccccagtacttttgtaagtataatatsacatgtgtttacgcactatctccagttagagttcacgccaccagctgactgactgactgagcctttcatccatattttcattaatgtcattaagtatctg

SEQ ID NO: 9231 - DNA, 201 bp, Homo sapiens
cttcctcggaccatccttgagagtcacgtcttcttggcagtgtcccatagactgtgaatggtgagtgagatcactttagaaggtacacggactttaaaaawctttcattataaagcatttatttattttttaatttttaattttaattttttattttgagaaggagttttgctctcgttgcccaggctggagtgcaatggc

SEQ ID NO: 9232 - DNA, 201 bp, Homo sapiens
ggaactcagcactcccccagcaccatgcttggtatctgctctctggccatggttttgaactatcagctgagcccaagcaaccttgcagaccacattttgaytatgtcttcctcggaccatccttgagagtcacgtcttcttggcagtgtcccatagactgtgaatggtgagtgagatcactttagaaggtacacggacttt

SEQ ID NO: 9233 - DNA, 201 bp, Homo sapiens
ggccttccaaagtactgggattacaggcatgagccaccatgcctggccgctttgcaacatttgattctgttaattttgggtatatgtcaaagctgtcagtyacgtaggggtagaaaaaaagttgtgcatcattgattataatgccagggccccattttacagatgtgaatatggaggtccagagaagttatgtgatctgat

SEQ ID NO: 9234 - DNA, 201 bp, Homo sapiens
tggctaattttatgttttacttatttatttatttatttatttatttatttgtaaagacaggattttgctatgttgcccaggctggtcttaaacgcctgagstcaaatgatcctcccacctcggccttccaaagtactgggattacaggcatgagccaccatgcctggccgctttgcaacatttgattctgttaattttggg

SEQ ID NO: 9235 - DNA, 201 bp, Homo sapiens
tcagtcagtggggatctacaaatgtttcagcaaagcattactgaaataacaagtatttttggaagatctggccaggcatggtggctcatgcctgtaatccmagaacttcaagaggccaaggtgggaggatcgtttgaacccaggagttcaagaccaacttgggcaacatagggagaccccgtttctacaaaacattaaaaa

SEQ ID NO: 9236 - DNA, 201 bp, Homo sapiens
tatttttggaagatctggccaggcatggtggctcatgcctgtaatccaagaacttcaagaggccaaggtgggaggatcgtttgaacccaggagttcaagaycaacttgggcaacatagggagaccccgtttctacaaaacattaaaaaaattagccagctgtggttgtgtgtgtctgtagtcccagatattaatacttgag

SEQ ID NO: 9237 - DNA, 201 bp, Homo sapiens
tccagaatgatgagaggataatttctgttgttttaagccacccggtttgtggcaatttgttagagaagccctgggtaactagtctggtctccttgctcccrttggtcttactgagccaaagcatcccattggccttactgagccaaagcatcccattgcatcatgtttgttactgtaaccctcaaatctttttcttgacct

SEQ ID NO: 9238 - DNA, 201 bp, Homo sapiens
ggcagatcctatctactctcttagtgatgcacaatgacatctgggctagtgcctgacacagagtaggcactaaatatatttttatggaataaagaatggamcaactacattgtttcaatatctaatcaaaggaggaaatagcttacagattttatgaggcttagtaaccagcttgatacactcaaggtgaaactttggaaa

SEQ ID NO: 9239 - DNA, 201 bp, Homo sapiens
gtacagatatccaaagtagagcctttgggtatttaaaaataatttgtaaatgccaaattaagagtttaaagggcactgtatgaactagttgtgtgtgtgtragagagagagagagagagagaaggagagagagagagagaatgacagagaaaaagagagagagagaaaaggagagagaaagagacagagaaagagatagaa

SEQ ID NO: 9240 - DNA, 201 bp, Homo sapiens
agtgaagcagaatggctttttatcccttgtgtatgatcatcaagacacaggacagcacagagattcaaaatacaatgcattccccttgctcgtctggtcargctcaccttcctattgcacagggttgattggttggaggccgccaacctctagctgaaaggcagagacagtctcccctgttatttcggtaccaagctgtgt

SEQ ID NO: 9241 - DNA, 201 bp, Homo sapiens
tggttgctgcatattttaatgactactgctatctaagtctttgtgacccaccctcataaagatcaagaacctgtattaattccctcttctttgggtagaarcatccaacagggcatgatagcttacagtagaaatctgcagttaaaatcccagcttcaactttctttctctctactgcttgttaccttaatggatttaggc

SEQ ID NO: 9242 - DNA, 201 bp, Homo sapiens
aagcagagtatcgcagaaaattacaatcacgtcaggcagcaacaaaggattctagtcaaaggcacgtagaagacccgatggtgggcagctggcctgggctytctttcacactgtccaggaatatgtttggattcagaatgggtggccccctctttatacacagggcatgcctctgaagagttgtgtgtaaatcacatttta

SEQ ID NO: 9243 - DNA, 201 bp, Homo sapiens
ctgttggtgtttgggggcagagcctgtctctgtatgcagcacctgctcacactcacacagctcagagtcaggtaccaagggttgcctgtttagactaacayactgcctcttcaccacattcctgcgagataaataccatcatccttattattaccatcccattttacagaggaggaaactaggcacggagagattaagtag

SEQ ID NO: 9244 - DNA, 201 bp, Homo sapiens
tattaggtgtatgcgtgaatttggaaaaaagacaaaaaaaatctttcatttaaaaagacactgttttaaactaggcacagtacactttgatcgttttcccraaaccgcgttggacaccatttttccatgatgatcatttgatttaaaccgaccagtgtgtggctgagctctgtgaactggggcatcaggggatcagggctg

SEQ ID NO: 9245 - DNA, 201 bp, Homo sapiens
ccagcctgcaggtcagggccctcctccatcagttaccacttgtgtttctggagggcaacgcctgagtcctgggttcctttgtatccccatggcacctcagrtatctggcccgctttcctacaggttaacaaccttctcaaagcttcacaggcattttcttaacaccgccttcctccccagcccaagctggccctttggtct

SEQ ID NO: 9246 - DNA, 201 bp, Homo sapiens
ctggccagaaactctgctgagatctgttggagagtttcctgcaaagataagagttaacaagcccccagattcccttccccgctcaggaggggccctcactrtcagctttggggctgatagaagcacagttccaagcgcctggcttcctcctcctccccagtggataaaatgctggaactccgtcaggcaggactgccataa

SEQ ID NO: 9247 - DNA, 201 bp, Homo sapiens
tttgaaatatggaggaccgaaaaggccccatagtcaaataatttggtgaaatattacaaactatattcttcaagattcaccatgtacctgagcatatgaarggcttgagaaaggcctgcagtaaagaaacctgcttaactttgtttattctgggctcaaataggttttcaaaaggagagaacgtgggttgttaacttcctg

SEQ ID NO: 9248 - DNA, 201 bp, Homo sapiens
atggatgtaaaaatccattggtgagcaataaagtgtttcacaaggcaaaacactattattattctagatctctgcagacagcaatttctgcagcaggtcarcactgtcagtgaagctcagcccagagccatcatggagaagactgatgccccgtgggttgtgtgtttgtgtgcgcacgcagcctggtttatgttttttcat

SEQ ID NO: 9249 - DNA, 201 bp, Homo sapiens
gggattacaggcatgagccaccatgcccggccaggatgttctgaatattaaactagctgaccggtggacattagctgtgctgtggaaaagtgaagcagaawggctttttatcccttgtgtatgatcatcaagacacaggacagcacagagattcaaaatacaatgcattccccttgctcgtctggtcaggctcaccttcct

SEQ ID NO: 9250 - DNA, 201 bp, Homo sapiens
tcaggtgtggagaagcgctagggtaggtctcagacagacagtcggaaagacctatgcccctgagtgcacattaggacagccagggggctaaaaagggagarctggtgcccaggccccacctcagaccaacactggggagtagggcccaagcatccatctatactaaaacatataaaaatctggctgtttctggctgggcgc

SEQ ID NO: 9251 - DNA, 201 bp, Homo sapiens
ggaaactttctcccctagcttggctactgcactgcaaccccggtcttagcttgggctgtcataaccaaacaccattgagtgtgtggcttaaacaacagactttttttttttttgagatggagtcttgctctgtcacccaggctggagtgcagtggcgtgatcttggctcactgcaacctccacctcccaagttcaagtgat

SEQ ID NO: 9252 - DNA, 201 bp, Homo sapiens
accttgacctcttgagggccagatggaagtgcagactcgattaattgcacagatgtttattgagtgcttactatgtgccaggaatggtgaggagtaccgagagggagtgagacatcacccctgctctcagaagcagcagtgcggcggggagggcaggactccaaaacggctccgattccaggcccgcgtttgcttcccggg

SEQ ID NO: 9253 - DNA, 201 bp, Homo sapiens
cagtggtgctcggaggccacgtaggactgtgccaggggctgtctggaggatgcaggaaggggaagtgtagcaaatggggcctcggtggaaagctggggggygggggagggtcagaagcaaaacttctctattttctgcctaagtttggaaccaactgaggtatggaaagaggttttaggcaaaggaaataaaattttctct

SEQ ID NO: 9254 - DNA, 201 bp, Homo sapiens
gaggcaggagaatcacttgaagcagggaggcggaggttgcagtgagcaaagattgtgccattgccctccagcctgggcaataagaaagaaactccgtctcaaaaaaaaaaaggaccacatgttattatggggctgtacagactgttgcaaagcactgagaccccttggtcaaataaacacattacagcaggtcaaattttt

SEQ ID NO: 9255 - DNA, 201 bp, Homo sapiens
tttggctgagatagaaagaagaagagtagaggccaaatgtgtgctaggaaaatgtgatgtttggggcacaagtagagaggacaaccttggcagtggcagaygagagagaacctcaggactggtgctaaggaggtgggttatttaaagaaagttgtgcaggtatagagtggagaaggggtgcagggggaggatggaattgag

SEQ ID NO: 9256 - DNA, 201 bp, Homo sapiens
agttgcatcctgaccactaatatcagaaaggcccctcctcccagcccgtgaagaggggcctctctgggtgtgtacctggaaccctatcttggaagttaagwtttgtggtcactgctaccaacacaccaactcccaggacacaggatactagggacttctgtgccccatcagtggacaagtcacaagttcccaaagcagggt

SEQ ID NO: 9257 - DNA, 201 bp, Homo sapiens
gagagaacctcaggactggtgctaaggaggtgggttatttaaagaaagttgtgcaggtatagagtggagaaggggtgcagggggaggatggaattgagttaaaaaaaaaaactagcaaaaaacattctgatagcacaggtgagagagataagagtgatttagattatcagaaatggaaggaaaagaaggagaattttatag

SEQ ID NO: 9258 - DNA, 201 bp, Homo sapiens
ccctgttatcagctgcttccaaaggccagggtggtcgttagtgcatcattaataacccattatcgggttgtcatctctgaatttatctaaatttatctcamttattgtaaccctgtagactgataagccctataagtataaaatacactggatgaaaaagctacttcctattatttgttctaaaaaattaactccttcaag

SEQ ID NO: 9259 - DNA, 201 bp, Homo sapiens
ctcccgagtagctgggattgctggcacgggccaccacacctggctaatttttgtatttttagtagagagggggtttcaccatgttgaccaggctagtcttraactcctgacatcaagtgatccacctgccttggcctcccaaagtgctgagattacaggagtgagccactgtgccaggcccagacatgtattttctcacag

SEQ ID NO: 9260 - DNA, 201 bp, Homo sapiens
gctgaacaatgagaacacatgcgcataaggaggagaacaacacacactgaggcctgttgggggaggggggaggaagagcatcaggataaatagctaatgcytaatacctaggtgatgggttgataggtgcggcaaaccaccatggcatatatttacctatgtaacaaacctgcatgtcctgcacatgtatcccaaaactta

SEQ ID NO: 9261 - DNA, 201 bp, Homo sapiens
agcctgggtgacagaatgagatcctgtctcaaaagaaaagaaaagaggccaggaagctctttcaaagaactttctttagtacacctgggtgtcaggcactrtcaaagtcctaagactacaaagatgcttaggctatagtcttttttctcaagaaggaagatgacaaccatattccaggtgacaagtagcaacacctgaact

SEQ ID NO: 9262 - DNA, 201 bp, Homo sapiens
aagtgtggctgtagtcatcaatacttcagagtccaaaaatacattggccttgcctgaccagttgcccattttctggaatagctgggtatttatctagcagygagagaccattatcctgagacacagtcgtgttccaccgacacctgatctactaattaaaatcactatcatgatggactgtttaaattctggtttaaatgt

SEQ ID NO: 9263 - DNA, 201 bp, Homo sapiens
gctgaaaggcagagacagtctcccctgttatttcggtaccaagctgtgtttcttaggcattaaaatggagggaaagcaaccactggcccctcactgggatygttcttgaggattccagacagaccataagtaattcattgagtcgctcacaaagggcctggccctgaaggtttgtggctgcagcatccaggcgagccaaag

SEQ ID NO: 9264 - DNA, 201 bp, Homo sapiens
ttgggacatacttatactaaaaagttaatcttattgtatatctgaaattcacatttaactgaatggttatattaatatttttatttgataaatcaggcaaytctgtatttcataagcagtttaacctctctctactggctcttctctggcagggcagaggggtgctgttttatggagaaaggcacttactgctgggacctt

SEQ ID NO: 9265 - DNA, 201 bp, Homo sapiens
agaaagatagaaatttaagtattcttctagaaatgttatgttcatatacaagcatatatagtctaccctttaaaagtaaagcataaatgagattgtgccaktgcccttgggtaaaatgaacaatctgatcaaatattttcctctctgggagaagaagctatcggtagagacatagacaacagggaacagattttcaaaccc

SEQ ID NO: 9266 - DNA, 201 bp, Homo sapiens
aaatgtatttaaatattgggccaggcagagtggctcatgcctgtgatcccagtactttaggaggctgagactggaggatcactggagtccaggagttcaasacaagcctgggcaacatagtgagatgtccccgcatctctacaaacaaacaaaaaacaattagacaggcatggtggcttgcacctgtagtcccagttactc

SEQ ID NO: 9267 - DNA, 201 bp, Homo sapiens
gagccatgattctgccactgcacttcagcttgagcaacagagcgagaccctgtccgagagagagagagagacgcaagagagagaaacagagagagatggcrgtataaattctcgtggttattctagttcttttggttccatatatctgtttacaggaatcagcttgtcaatttttaaaatgtttaatttttgtgagtatat

SEQ ID NO: 9268 - DNA, 201 bp, Homo sapiens
tctcccttggaatttctcttccttagtcattttcagaaagttaggagtcggcaaccttaaggaggagtttcctatcatctctcctccacttcctcccctcrtttcctccccgtcttctccttggagtccttcatcaatgtctctattttctgttcaggataaacaaagagtccctcttacctgcacaggcctcacctgcct

SEQ ID NO: 9269 - DNA, 201 bp, Homo sapiens
gagctcctgggagttatcttgggaatgactgcaaggtctgaggtagatcgttccaggagcaggtgcttatatacagtggaatggcacccactggcacaccrctaggaattctgttttcttaccaccaccggagccaggtctctgtcacggtgatgagaagttcccaaagtcatttctcctctctagggtgtcccctctctg

SEQ ID NO: 9270 - DNA, 201 bp, Homo sapiens
tctccactgttattgatgatgatgatgataaatgaatgtttctgtgccagatcctaaactaaacaaaagttaacttgatactcacaatggctgtatgaagygggagttatcaccatccccatttcatcagtggggaaagaaaggctggattagtcagggatctccagaggaaccgaactaataggacagagacagaaagac

SEQ ID NO: 9271 - DNA, 201 bp, Homo sapiens
gataatctcctcaaagtcagctgattttaagtgttaaccatatctaccgaagaccttcccagcaaccctgggattcatgtttgattaaataactgcacacwatagcctagcaaagttgacacaaaagactaaccaagctaaataacttgagaacataagataataccctaggacagggcctaggtcggattggcactcacg

SEQ ID NO: 9272 - DNA, 201 bp, Homo sapiens
tagcatgtggttgaaggtggtaaagtcaagaagtccacaaccatcagccccgccccaggactcactgtgggtctcctgctccttcagcgggccccctgtcrctctctcccccacaaaccctaaggcctcctccagaaagctcctagaactgataaaagaattcagcagtttcttttatcctgggctggggtcagagcgacg

SEQ ID NO: 9273 - DNA, 201 bp, Homo sapiens
attcttttcaaccttgtctctaatattccatgattccatggttctgatgccattcctcagcgctctgctgttcttgcctgaccaagtggatcaatggtggctctggcatttctataaaggggatttcagggctgcctgctggggagggaggcttgaagctgtgtctgcactgcatcttcacagcactgagaaaatgccagt

SEQ ID NO: 9274 - DNA, 201 bp, Homo sapiens
tgtataaacaaagcaaaacatcagattgatgtgtgtccattactgagctgcgtgagtgggtgctcagcgatgccttcccgggaaggaagtgactctcccasaaataaaatgattgaatgaactcttcccctaaccctagtgccataataacaacaaacctaacaactatcgcttgccactgaagggaagtacgcggtctat

SEQ ID NO: 9275 - DNA, 201 bp, Homo sapiens
ctcccagaaataaaatgattgaatgaactcttcccctaaccctagtgccataataacaacaaacctaacaactatcgcttgccactgaagggaagtacgckgtctatgggaaccctggtagccttatatggacttgttttttggttgccggaataacatgcatctggacatgggaatgagactggcgagaaagggaggggg

SEQ ID NO: 9276 - DNA, 201 bp, Homo sapiens
gatcacatgggcttgctatgctaatacttcacccagaatgggacaattgcaggggggtggcagatgccatcggggctggcccgcggcccacatgtgctcarttccttcctccaagactgggtctgatacagtgtagacagcaggagatggagagtgacttagatgcagcggttggccagtggggcccaccgggatcacttg

SEQ ID NO: 9277 - DNA, 201 bp, Homo sapiens
acatctttcctggtttaccagaaataggtgctgttgcacaacttcctggtggatagggtaggggggtgttagctgataggggagttccctggagccctcgrctctctctgttgctttcagcctcagccctcagtgcagagtttggccctggcccgcgctgtggggccctcctaaacctcccctatgtccttgcaaaggtgt

SEQ ID NO: 9278 - DNA, 201 bp, Homo sapiens
tcagtaggcacctgggaaccccaggctgtaaagcagtgaagagggagtgtagtcagttgtacatttaaggattttaactccatccgtacacagagagtgascaaaattggtagcatcatctcatgatctaagagcgtacctaaggagataattgggaggttctcaggagaagtgtggcattgtggaaatcagccaggcctt

SEQ ID NO: 9279 - DNA, 201 bp, Homo sapiens
tacccaagctctttaaactgtctgccaagctcaaaggcaaaattggtatttcccaggccttttggacgggtcatagtgcaatagaaaggtggaaatattgsctgggtttatgaagacataacttcttatccaattggcaaacattttttaaatgcctactcggctgggtacaaaagaacctagaattattctgagcaccca

SEQ ID NO: 9280 - DNA, 201 bp, Homo sapiens
cctcccgtgaagctgggattacggacatgtgccaccatgcccggctaatttttgtatttttagcagagacggagtttctgcatgttggtcaggttggtctygaattcctgacctcaggtgatctgcccaccttcacctcccaaagtgctgggattataggcgtgagccaccgcgcccagccgagaactttttcatatgctc

SEQ ID NO: 9281 - DNA, 201 bp, Homo sapiens
aacccatccctaccatccagaggaaaccactcctctgacatcaatttgtatagatttctcttttcctgctgttgaacttcatgtaaatgtaaacttacagyatgtatccttttgttctggcatcttttgctcaacataatgtctgtaagagtcatccataccacgtatttagattaatatagccaggtgtggtggctcagt

SEQ ID NO: 9282 - DNA, 201 bp, Homo sapiens
agtcacttccatacacaaaccttgagtgtaaagctcaatgtattattgtctatgtattcccctatgtgacaccacccagatcaagacacaaacatttccarcactccagagggttccctcatgcctcttctcagtcaacccatccctaccatccagaggaaaccactcctctgacatcaatttgtatagatttctcttttc

SEQ ID NO: 9283 - DNA, 201 bp, Homo sapiens
tcctctcttacctgttgtcacccctctaatgacttttcactttctctgctcaccttctccttcctgcctcttttagaaatgggaaacaaagggcccatagrccctaaaaggggccaccctttgaaggaggagacatgaccacaaatgtcaccctttgatatcctaatgggatccatgttaaaaaaggaagtttttaacctg

SEQ ID NO: 9284 - DNA, 201 bp, Homo sapiens
gccataattagaagaggcccctttccagcagctgaagctgactaggcagatagagcccaaatttgtttttagccaccacatgcccctgagctgacccctcragctgtggacacatctcacaacctcacccggaggccattctctcaggccagtcacactctcccacagagagagcgaagatgatgtcaaatctatggccac

SEQ ID NO: 9285 - DNA, 201 bp, Homo sapiens
gcccagttcacgtgaccgttggcagccacagggagccacggagtcccaccagcgtcccatagagccacttggagcttcaggtacaaggaacaagcccctcktaggccccctcaggaaaatttattctcgcagccaagcatgtcaagtgcaatatcaggaacacccttgtccttcttgaacactgcttctggccagaaactc

SEQ ID NO: 9286 - DNA, 201 bp, Homo sapiens
gaggtggggagcccaggccaccaggatgcagacagaggaaagcttattgggtgtgaggtgcttggggctgagtcttaaagaaattagagaaagtccccctscctgtgttccgaactaggtgagccatccagagtgtgtccttgtcatcgcaagagcttatgagatgagtacaattatcatctctattttatagacaaagaa

SEQ ID NO: 9287 - DNA, 201 bp, Homo sapiens
gttcacgcagctatcatagaaggcgttgctccagccctccttggccggcggacggacaaaggaggcattgcccctgacgaactcgcccaccagcacccggrccaggaacatcgtgtgggtctgcgtgtcggatttgctgtagtggtgggaatatgcagcatctcgggcaaagtagctccctgaaatgacacacgagggctc

SEQ ID NO: 9288 - DNA, 201 bp, Homo sapiens
aaccatttttggggggttccaattagacctcacttttcattcttttagggaagtacgtattcattcttttgttgattatgtggcaaactttttcatacctrccatatgccaggcactgtgtaggtgctgactgtaaagagacagtgtccctcgaggaactctcggtttagtgagggaggcagacaaggaaagggaccagca

SEQ ID NO: 9289 - DNA, 201 bp, Homo sapiens
aactacaatcacttctggttagtccactagtgaacccaaaagtgacttaaaagtaaaaatcattattagcaagagattaagaacataacttcattgagagrtcaatgttaagagaacagttcattaaaagtttctgtttaaaaagaaaaggaaaggcccaaatagccatttcaaggcagagcaggtgaaaggcctggaaca

SEQ ID NO: 9290 - DNA, 201 bp, Homo sapiens
atcatctccctttcctttctgtttggagaacatccttcagccattctttaagggtaaatatgtgagtgacaaaatctcttagttttccttcatcagagaaygccattatttccacttttctcctgaaggatactttcaccaaatagatgacttgtgattgacagctatttcctttcagcacttgaaaaatgtgccacttcc

SEQ ID NO: 9291 - DNA, 201 bp, Homo sapiens
ggtagacctggtgtttctcaaagatcacaaagatggaggggtcggacacactgttcacgcagctatcatagaaggcgttgctccagccctccttggccggbggacggacaaaggaggcattgcccctgacgaactcgcccaccagcacccgggccaggaacatcgtgtgggtctgcgtgtcggatttgctgtagtggtggg

SEQ ID NO: 9292 - DNA, 201 bp, Homo sapiens
atatttggtagaattcttcattgagaattctacattagagaattgtactctctaagtacattgagtaccacatcatagggtggtgtaatttttgcttcaamcatcaagtatgatttaagagactccaaggtatcctggcctggagatgtgtttttcaggaaattttaaattatgaattcaaataaaaaatatgaataatta

SEQ ID NO: 9293 - DNA, 201 bp, Homo sapiens
ctgtgagctggttctacctcattggtgtgctatggataacattcccatgaattcagatagatagaggaattgccccatttgaaattgaagagcaagactgyaaaaggaggggatgatggaatgcaggacccagccacttagaatacgtggtacatgggggtatatagagcactcaaagtctgagtggggtatcctgacacc

SEQ ID NO: 9294 - DNA, 201 bp, Homo sapiens
aaggggcctttccaaaatgtgtgcttatggcccagacactcctttaaccctaggttttccagaaagtctgttttgccccaggactgtggacagcattatgktttgtttggtgagctttcttttttttttttttttaggttgtattttataactgaatatggcatgtgtgaaaatatcagctaccagactctgttagtccag

SEQ ID NO: 9295 - DNA, 201 bp, Homo sapiens
ataaatctcagtggtttcctgatcattccataatcatgatggcattcactttattgagtgggagatgaagtgatgcaggaatgagccaatcctaatacatkttagaagtgtattaatcctaaataaagcctaaaatcatctattttcttcagtaattgtttccatggtgggaggttagggggagcttttgaggtgatttaa

SEQ ID NO: 9296 - DNA, 201 bp, Homo sapiens
gtgtgctggacatggcaagtatgtattcctcatgacatttaatgtgctcatgttcttcagtggtttaccttttgctaataaatctcagtggtttcctgatyattccataatcatgatggcattcactttattgagtgggagatgaagtgatgcaggaatgagccaatcctaatacattttagaagtgtattaatcctaaat

SEQ ID NO: 9297 - DNA, 201 bp, Homo sapiens
cctgcctcagcctcccaaagtgctggaattacaggcgtgagccaccgcgcccggcttcaatccactttttaattcatgcccccagactgattctttctggrccacatgtgttttcttccaaatcgtcttgtttgggaattttatctggcctctcctcctcttgtcccaccatcaaaattcagtgtaaaatcttctttctca

SEQ ID NO: 9298 - DNA, 201 bp, Homo sapiens
gtgcccttctgttctcttagctcaggctgacctgtggcctgaggatgccgccctgcgggaggagaggtctgttttttcccctccttctacccctcccccamccctgctgggcccctttctcctccaggagtggggcctgtgaacggatccccaaatcctgcctacctggagctgccctcagtgccttccctgcggggcttc

SEQ ID NO: 9299 - DNA, 201 bp, Homo sapiens
ctctcttaaatggttatacacaatatccctatccttctcctcactttattgattttccagaatgagagtacgaggtatgactataaagtaacgtgactgaytattttagcatacactccaatacttatacagccaaatgaattttatgaccttcggaggcattttcctgataggctaaacccttactgcagatatgccact

SEQ ID NO: 9300 - DNA, 201 bp, Homo sapiens
gtatggcttgattcaggggctcaagccctgtccaagttgttctctctccccatttctcagctccggtttctctgggcacactcccttctcaggcacatctyccctaggggtctcaagccagctgtgtaaccagtgttttgaacagtctcaactcagtgaggtaccaacttgaaaccatttggtgttttttgtttcattttt

SEQ ID NO: 9301 - DNA, 201 bp, Homo sapiens
catgatgaggcaagaacagatggctccaatggggagttgtccctgaggaacaagaaaagagaagagaatgattccagtagtccaaaccagcctgggaggayggatccctccagaggacaactaccatgtttacaccactccctgccttctgtgccaagtgttttgcatattttgtttctaatctttgtcacgactcttcaa

SEQ ID NO: 9302 - DNA, 201 bp, Homo sapiens
agaaagagcagatatgtgcatggcatcagttcagactcttctgtggacagtgataaaaaaaactcagcccagattgtctcagggagtttactgacccctayaactgaaaactccagagggcagagctgccttcaggtatggcttgattcaggggctcaagccctgtccaagttgttctctctccccatttctcagctccgg

SEQ ID NO: 9303 - DNA, 201 bp, Homo sapiens
aggaacaagaaaagagaagagaatgattccagtagtccaaaccagcctgggaggatggatccctccagaggacaactaccatgtttacaccactccctgcyttctgtgccaagtgttttgcatattttgtttctaatctttgtcacgactcttcaagggaggtattattttcatttttgcagatgaggaactagactcagt

SEQ ID NO: 9304 - DNA, 201 bp, Homo sapiens
cagggtcctgacctcaggggttccgattccataagtctgggctgggacccaggaacccgcattttattttattttattttttgagatggagtctcgctctrtcatccaggctggagtgcagtggcacaatcttggctcacagcaaactccgccgcctaaggaacccacgttttaaataaatgtttccagtgattctgatgc

SEQ ID NO: 9305 - DNA, 201 bp, Homo sapiens
gcctgcagggcagtagaaggcagaagataatcaggtctagaatgtgtgatgtcatttagagagccatggggcgataggagtctgtcccaccagctataacmatagtcacatccagttatgtcagtctgccaggaggacacagcaagtgctcatgttaggccaggcacagtggctcatgccagtggctcatcccagcacttt

SEQ ID NO: 9306 - DNA, 201 bp, Homo sapiens
cacctgccctttccacaccagagccccagggtcccggggagactaaagctggggtctatttctattcccccaaccaagacgggagcttcacatccccacayactgagaggccagaatgggtcagaccagagtgagtgtgctctggctaagactggccgacagctctgttcccctggggtggggactggacgtggccctttg

SEQ ID NO: 9307 - DNA, 201 bp, Homo sapiens
ccccaaccaagacgggagcttcacatccccacacactgagaggccagaatgggtcagaccagagtgagtgtgctctggctaagactggccgacagctctgytcccctggggtggggactggacgtggccctttggtttaactgcattttactctttccagcctgtctggccattattcttgcaggagcacgcaggactaaa

SEQ ID NO: 9308 - DNA, 201 bp, Homo sapiens
attttaggtaccgctgcagctagaatccaaatctgccctaggtccaaaaaatggtgtctatatcaagatcgtatcccgctgacacagaaggctgccgggtsgggggagggcacccccaaattcaaagaaaaccctaagtgtggatgttcagaattttggaaaaatgtcactgaagtgattgaaagagtgcctggcatgcaa

SEQ ID NO: 9309 - DNA, 201 bp, Homo sapiens
ttttttcaaaattgatttagttattttaagttctttgcctttccatataagttttggaataagtttgtctacacctacaaatattcttgctgagactttgrttggaattgcattaaactgatatgccagttttgggagaattgatatttttacattgtggagtcttccaatccatgaacatgatatgtttctccacttagt

SEQ ID NO: 9310 - DNA, 201 bp, Homo sapiens
agagagagagagagaaggagagagagagagagaatgacagagaaaaagagagagagagaaaaggagagagaaagagacagagaaagagatagaaagagatagagaagatagaagagggggagagagagagagagaggagagagagaggtggagcgaattggtttccttgacaacaggatatccaatcaactttttcctcca

SEQ ID NO: 9311 - DNA, 201 bp, Homo sapiens
atattatcttctagaatttttatagtttcaggtcttaggtttaagtctttaatccatcttgagtgaatttttgtatgagagatgaagatccagtttattcycctacatgtggctagccaattatcccagcatcgtttattgaaagggtgtcctttccctacttcatgtttttgtttgctttgtcgaagatcagttggttgt

SEQ ID NO: 9312 - DNA, 201 bp, Homo sapiens
agtgaatggccccatggtgacggtggccctgtcagtggctctcttggccctcctgaaatggtaagtgcagccagccctagggactgtgacagcgtcagccrtctcaccctggagccttgctggtgccatggcggggtatgtgggagtgtgtttttcttcttttctaatctagcgggagtgagtattaacacagcttcagaa

SEQ ID NO: 9313 - DNA, 201 bp, Homo sapiens
gagagagagagagaaggagagagagagagagaatgacagagaaaaagagagagagagaaaaggagagagaaagagacagagaaagagatagaaagagatagagaagatagaagagggggagagagagagagagaggagagagagaggtggagcgaattggtttccttgacaacaggatatccaatcaactttttcctccaa

SEQ ID NO: 9314 - DNA, 201 bp, Homo sapiens
aagtgaatggccccatggtgacggtggccctgtcagtggctctcttggccctcctgaaatggtaagtgcagccagccctagggactgtgacagcgtcagcygtctcaccctggagccttgctggtgccatggcggggtatgtgggagtgtgtttttcttcttttctaatctagcgggagtgagtattaacacagcttcaga

SEQ ID NO: 9315 - DNA, 201 bp, Homo sapiens
agagagagagaaggagagagagagagagaatgacagagaaaaagagagagagagaaaaggagagagaaagagacagagaaagagatagaaagagatagagaagatagaagagggggagagagagagagagaggagagagagaggtggagcgaattggtttccttgacaacaggatatccaatcaactttttcctccaactt

SEQ ID NO: 9316 - DNA, 201 bp, Homo sapiens
tttcgccatgttggccaggctggtctcaaaatcctgacctcaggtgatccgcaagtgctgggattacaggcgtgagccactacgcccggcctgtgcatgcstttctgttccttctgctgatgtggggggtgttgggctcctgtcaggggcctcctgatgccccgttggggcacttcctcgctcagcttcctcgtccctgac

SEQ ID NO: 9317 - DNA, 201 bp, Homo sapiens
cagcctcctgtctcatctggaagaccaccactctggggtctcagaggaatgatggaagccttggggtttctaaaattggaagtgaatggccccatggtgayggtggccctgtcagtggctctcttggccctcctgaaatggtaagtgcagccagccctagggactgtgacagcgtcagccgtctcaccctggagccttgct

SEQ ID NO: 9318 - DNA, 201 bp, Homo sapiens
tttctagtttctttaaattttatttttaaaatatagaatgtttgatatatcaggaatttatttggaagatggagttagggacacaccctttttcccccccyccaggagggtagagttccatctggaaattcatccttttccaaatgatttgaaatgtcacttttatcatttattaattcctaggtgtatttctgatttctc

SEQ ID NO: 9319 - DNA, 201 bp, Homo sapiens
tccatgagccaagcagggacagagccccaggactctggggaccctgctttctccatggcaccctgtggaccatccagccccggaggagcgcctgtgagtcraatgcccaggtactcccagcactggacttctccttaactttctctgaactttctggaagttgagcatctcagacactcacaactgtgatctgcagtagcg

SEQ ID NO: 9320 - DNA, 201 bp, Homo sapiens
ttcagaattttggaaaaatgtcactgaagtgattgaaagagtgcctggcatgcaaggataagaggttctttacataacatttcctaaatgcttaataaacrtttgttgcacttggttttgacattgccaatggggtttgaaccagtgctctctctaaatgaagaattgctgataaataagtgaaaatgtagttttgacaaa

SEQ ID NO: 9321 - DNA, 201 bp, Homo sapiens
aggctgtcagtttattggcctatttataaaggtctgactctctgacatgttctccaggctccccacattaaccactaaggaggcactctttgcagatgaatttttttttttttttttttttttttggcctcggcttaaagaggaacctattaacctttgcccggaatctatggctggtgaatggcttgtcatagcatgtta

SEQ ID NO: 9322 - DNA, 201 bp, Homo sapiens
acactgcgttgacatcatggaattcccactgcatgcttaacaccataatgaacactagacatcaaagataagaagacaagatgtgtttccaccactcacaracgagcagaaagacagtcaggaaaaaaattacaattactagagaaccactaggagtcaaccaggcaagaaaagaggagccgttccaggcaaggcaggggg

SEQ ID NO: 9323 - DNA, 201 bp, Homo sapiens
caagacagagctatacggttactaagaaaacttgctttaaaaccatctaaagtctgtatacattccatcaagcagatgtgtgtttgcgcagtgaaaatgcrgcacagatgttaaaaggtaaatatttttctaagctctagccgatgggtggattagacacctacatctatcagggtgcgtattttccttggataggaccat

SEQ ID NO: 9324 - DNA, 201 bp, Homo sapiens
aagtgggaggtgatctgagggttctgtatgctgagcttccccacagaggactctttgccccgctagacctgagactggctggggccagccacaaaggcagscccatggctgatggagccaacagggcacctctgcagggggcacctctccagggtggtaggagtgaaatagagcaggccccaagttttagaaaatgaccag

SEQ ID NO: 9325 - DNA, 201 bp, Homo sapiens
caatttttgtacttttagtagagacggggtttcgccatgttggccaggctggtctcaaaatcctgacctcaggtgatccgcaagtgctgggattacaggcrtgagccactacgcccggcctgtgcatgcctttctgttccttctgctgatgtggggggtgttgggctcctgtcaggggcctcctgatgccccgttggggca

SEQ ID NO: 9326 - DNA, 201 bp, Homo sapiens
gcagcagccgcgtcctgtgcagcttcacgcccggagaactgtgcagcaaacgtgtctagatccagaaggcatgggaaggtgtaggcaagcttgcagccccytcggcccacaccactgtgaactcaactcgcatgtccttggaggtgcgggaagaagcagctaactggcatccctgccccagctctgaagcctaaaaggaca

SEQ ID NO: 9327 - DNA, 201 bp, Homo sapiens
aaaacttgagcacctacctatctcacaggtctgacatgagactcaaaggagctctcagagccctcccagggcagactgtccaagtatcagggattccaacygggattccactgctccttggtgttcttgtagccagcctgcatcttggggagtctgccgaattcagaagccccatacctcaccagctcggggtgagcttct

SEQ ID NO: 9328 - DNA, 201 bp, Homo sapiens
atgtcttgatgtcatcacatcatgggaactctagttcaaatgaagtttttggcagaatcaccaggttgaagtgggaggtgatctgagggttctgtatgctsagcttccccacagaggactctttgccccgctagacctgagactggctggggccagccacaaaggcaggcccatggctgatggagccaacagggcacctct

SEQ ID NO: 9329 - DNA, 201 bp, Homo sapiens
gattcgacccatccatgagcatgggatgtgtttccatttgtttgtttcatctatgatttctttcagcagtgttttgtagttttccttgtagagttctttcsactccttggttaggtatattcctaagtatttttatttttttgcagctattgtaaaaggggttgagttcttgatttgattctctgcttggtcattgttggt

SEQ ID NO: 9330 - DNA, 201 bp, Homo sapiens
tgccaccacccacgcaccacaccattgctgcagacccagtcctttgcagagcaagcattttgcatgttttccatgggtgtggctgggttggggtggttagvaaagtgtgcagaagatggtgtgggagaagggcagggcatggagaatcacagtggggtctcttcatgcttgtggactctcctggtggagctggttctctgg

SEQ ID NO: 9331 - DNA, 201 bp, Homo sapiens
acgattgtattgtcagcagtgacagtttgacttcctctttagcgatacggatgctctcctttctttcttccttccttccttcattccctccctccctaccytctctttctctttctctctttctctctttctttctttctttctttctttctttctttctttctttctttctttctttctttctttcttctctctctctct

SEQ ID NO: 9332 - DNA, 201 bp, Homo sapiens
agtctcccccaaaatgaagaaactctggtttgagaatgtaaatcactaggtaaagattctgtttattttctttatttccatgtttcccaatatttaatttkcaaccctctaagagcagttattttataaaataagtcccagctgaaatgaatttgataggattttagaatttctttctcccttaacacatcctattagcct

SEQ ID NO: 9333 - DNA, 201 bp, Homo sapiens
ccctgctctcaccacttagaaaccaacccagggaccaaccaagcatattcccagcagtaggcaagaagatccctaaagaagggaagtgagacctgcgtttwttcccctgatacttgggaaatctagcagatatagagacagtgacccaggtatccaagggattggtccaaattcaccatcctgtaactcgaaatgcaatgc

SEQ ID NO: 9334 - DNA, 201 bp, Homo sapiens
attgtattgtcagcagtgacagtttgacttcctctttagcgatacggatgctctcctttctttcttccttccttccttcattccctccctccctaccttctctttctctttctctctttctctctttctttctttctttctttctttctttctttctttctttctttctttctttctttctttcttctctctctctctctc

SEQ ID NO: 9335 - DNA, 201 bp, Homo sapiens
tattgtcagcagtgacagtttgacttcctctttagcgatacggatgctctcctttctttcttccttccttccttcattccctccctccctaccttctctttctctttctctctttctctctttctttctttctttctttctttctttctttctttctttctttctttctttctttctttcttctctctctctctctctctt

SEQ ID NO: 9336 - DNA, 201 bp, Homo sapiens
tttgggccagtcaatcttggcctgcagggctggctacaggatctgtgaggcccagtgagaaataaaagcgtggtagcctttattcccaaagcagggggacrtgtccatcgtggtactcagcgagcttctttgtttcttctgcagtctctttttcgacttgtcatggtgctttttattttccatttactgttgttctaagta

SEQ ID NO: 9337 - DNA, 201 bp, Homo sapiens
tgaagcaggagaatcacttgaacccgggaggtggaggatgcagtgagccgagatcacaccactgcactccagcttgggcgacagaaaaagactctgtctcaaaaaaaaaataaataaataaaagataaagttatgaagactctcaagacagcgccacagaggattaacccccgcacagagcccttttcattggtcacttgc

SEQ ID NO: 9338 - DNA, 201 bp, Homo sapiens
gccccctctccccatgccagcattaagacctgatgtgcagcccttccctgatctcctttggagcctcttgcaaactgtcatccaattctttcttttattcttttttttttttttttttgagatggagtcttgctctgttgcccaggctggagggcaatggtgtgatcttggctcactgaaacttctgcctcttgggttcaa

SEQ ID NO: 9339 - DNA, 201 bp, Homo sapiens
atgagctggaaaaaaagaaaaaaaaaactcctgctgcaataaattacatcacagtggagatctctttctacccagaaaattctgagcccagacaatggctyatttatttcagacaatattcaatacaacagaattccaggtcaatagaaggatttctgcaggttcttagagttggtagcaaagggatttaacccacggaga

SEQ ID NO: 9340 - DNA, 201 bp, Homo sapiens
cctccaagtttcctctttcccaccagctcactgtggcctttgtgtctcacataaattttgtcttctgtgtctgaaactcttactgacttctgcttccttgytccctgggtctacactgttccttctcttcctggaactgacccttcgatctctgggcttcctaccttgagtaatttgtcaaaatcctgttcttgcaattgg

SEQ ID NO: 9341 - DNA, 201 bp, Homo sapiens
ttggtcctgggccgaacctggggacgtacctaggaatttctagccaaataagcaatagagggaagggtctgactgatgacggagcatgagcacactctagraagggcaaagaattgatctgggggatgggatggggcggggccctaagatttcaactccaccctggaaaagcaggacttaggggaggcatgtctgaagttc

SEQ ID NO: 9342 - DNA, 201 bp, Homo sapiens
gcaaagtaaataaccctcaagacccttaaatcttcaaccttcaggatcagatgaaatcacattcagtagtctcattcttgttttcactctagcagggaaaygtgtaatcagttgtagaaacgttttcaataaaagcagtgtgaattttaaaagtcatctggaaacgtcatgtattccttaatgataagttagtggttatag

SEQ ID NO: 9343 - DNA, 201 bp, Homo sapiens
aagttgacactgctccacgtgctgcacaagttccggttccaagcctgccctgagacccaggtgaggcccccctgctcagaggcaggggcaggggcaggggygggagggccaccccagttctctgcgtgagagcaggccagcctgggggcaacatcaggctctgcctccgtgagcttgggcaagctccttaacctctctcgg

SEQ ID NO: 9344 - DNA, 201 bp, Homo sapiens
caagtgattctcctgcctcagcctcctgagtagctgggattacaggcttgtaccacccatgccccatgcccggctaatttttgtatttttagtacagactrggtttcaccatgttggccaggctggtcttgaactcctgacctcaggtgatccgcctgcgtcggcctcccagagtgctgggattacaggcatgagccacca

SEQ ID NO: 9345 - DNA, 201 bp, Homo sapiens
attttcttccctttaaaaaatacttgaggccaggctcagtggctcaccgctgtaatcccagcactttgggaggccgaggcgggtggatcatgaggtcaggmgttcgagaccagcctgaccaacatggcgaaaccccgtctgtactaaaaaaatacaaaaattagcctagtatggtgccgcgcacctgtaatcccagctact

SEQ ID NO: 9346 - DNA, 201 bp, Homo sapiens
ttgtcatggacctgtattgccaccaaggtggctttggctccctgagtcctgaccctctgcttgttacttcccaacaggcgtcgggtttggagttcaagtcrgtagccgacagcgttctgtttttacgtgacaaaagatgggaagaggtcagaggtgccctgatgtctgctttcagtcctgaaaagctgaacgaggtaagac

SEQ ID NO: 9347 - DNA, 201 bp, Homo sapiens
taagggacatgttctcctgatacactagctgggctccactcacccaagtcattaattggagtcttattgggctactgcctcatatcctactcccgaagagytgatacctcccataacctcattcttagggtcagctggccgtaccagaaagagcactggattaggagccagatctgggttctggtcttagctcagctatcc

SEQ ID NO: 9348 - DNA, 201 bp, Homo sapiens
attgtcagcagtgacagtttgacttcctctttagcgatacggatgctctcctttctttcttccttccttccttcattccctccctccctaccttctctttytctttctctctttctctctttctttctttctttctttctttctttctttctttctttctttctttctttctttctttcttctctctctctctctctcttt

SEQ ID NO: 9349 - DNA, 201 bp, Homo sapiens
tatcaattcagtagttagcccatcaaagtaaaaaattgaattacactgtgtaaggccaccttgggatccaaaagataaaagagaagataagggacatgttytcctgatacactagctgggctccactcacccaagtcattaattggagtcttattgggctactgcctcatatcctactcccgaagagctgatacctcccat

SEQ ID NO: 9350 - DNA, 201 bp, Homo sapiens
gtcagcagtgacagtttgacttcctctttagcgatacggatgctctcctttctttcttccttccttccttcattccctccctccctaccttctctttctctttctctctttctctctttctttctttctttctttctttctttctttctttctttctttctttctttctttctttcttctctctctctctctctctttctc

SEQ ID NO: 9351 - DNA, 201 bp, Homo sapiens
ggctaatttgggtaatggtactattttactggagacaaataaaaggaattagggggagagtctcatattaaaatagagggttggataaggggagtttatamtctttccccatcagtggcttttatgctctatcaattcagtagttagcccatcaaagtaaaaaattgaattacactgtgtaaggccaccttgggatccaaa

SEQ ID NO: 9352 - DNA, 201 bp, Homo sapiens
agcagtgacagtttgacttcctctttagcgatacggatgctctcctttctttcttccttccttccttcattccctccctccctaccttctctttctctttctctctttctctctttctttctttctttctttctttctttctttctttctttctttctttctttctttctttcttctctctctctctctctctttctcttt

SEQ ID NO: 9353 - DNA, 201 bp, Homo sapiens
ttccttttattcccagtgttctctcattccccttcccatccccaatagtcaaccattccaattgtgtttaatgtgtttttttttcacatgttcttgcaaaytgtgcattatcatttcgtggatattatccttagtttatgccaatagtactgccgtagatctcattctattccttagttttttcatttagcactgtgcttt

SEQ ID NO: 9354 - DNA, 201 bp, Homo sapiens
acagtttgacttcctctttagcgatacggatgctctcctttctttcttccttccttccttcattccctccctccctaccttctctttctctttctctctttctctctttctttctttctttctttctttctttctttctttctttctttctttctttctttctttcttctctctctctctctctctttctctttctccctc

SEQ ID NO: 9355 - DNA, 201 bp, Homo sapiens
atcctgttcaagagggctctgccctcatgacccatttgtcccccaaagaccccaccttctaatactgtcatctgggggtttaagatttcaacatatgaatytgttggggggatggatacaaacattcagaccatggcagagctgctaaggagacattgggtgcaaggtgacttaggaatgaagcactcagaggatcaggaa

SEQ ID NO: 9356 - DNA, 201 bp, Homo sapiens
cagtttgacttcctctttagcgatacggatgctctcctttctttcttccttccttccttcattccctccctccctaccttctctttctctttctctctttytctctttctttctttctttctttctttctttctttctttctttctttctttctttctttctttcttctctctctctctctctctttctctttctccctct

SEQ ID NO: 9357 - DNA, 201 bp, Homo sapiens
tttgacttcctctttagcgatacggatgctctcctttctttcttccttccttccttcattccctccctccctaccttctctttctctttctctctttctctctttctttctttctttctttctttctttctttctttctttctttctttctttctttctttcttctctctctctctctctctttctctttctccctctctc

SEQ ID NO: 9358 - DNA, 201 bp, Homo sapiens
ctttttaaggctgagtaatattccattgtaagcctattctgccttttgtttattcgtttgtttgtagatggcggagtgtgttacttccagcattgagctamtgtgaataatgttacttgaatatggatgtggaaatacctctttgagaccctgcttttagttcttttgggtatatatgcagaggtggaattgccagatcac

SEQ ID NO: 9359 - DNA, 201 bp, Homo sapiens
tgacttcctctttagcgatacggatgctctcctttctttcttccttccttccttcattccctccctccctaccttctctttctctttctctctttctctctttctttctttctttctttctttctttctttctttctttctttctttctttctttctttcttctctctctctctctctctttctctttctccctctctctc

SEQ ID NO: 9360 - DNA, 201 bp, Homo sapiens
gcacaaagtcagaggggatggtttccccatgtcttgaagtgctcactgctggccctgctccagatgttgtccactcaacagacatttcagtctttgctacrtgtacagcatggagctcatggcagtgggagagactacccatcccctccagaaaatgtatcattcatgtctcttttcccaaagaaagctgacatctaattt

SEQ ID NO: 9361 - DNA, 201 bp, Homo sapiens
gacttcctctttagcgatacggatgctctcctttctttcttccttccttccttcattccctccctccctaccttctctttctctttctctctttctctctttctttctttctttctttctttctttctttctttctttctttctttctttctttctttcttctctctctctctctctctttctctttctccctctctctct

SEQ ID NO: 9362 - DNA, 201 bp, Homo sapiens
gacagagagcttcactgggagctcctcagtggtccaggcgagagagacagggcctgaagccagttggcattagacgttggagctggaatacagcacactgygttgacatcatggaattcccactgcatgcttaacaccataatgaacactagacatcaaagataagaagacaagatgtgtttccaccactcacaaacgagc

SEQ ID NO: 9363 - DNA, 201 bp, Homo sapiens
ttccctccctccctaccttctctttctctttctctctttctctctttctttctttctttctttctttctttctttctttctttctttctttctttctttctttcttctctctctctctctctctttctctttctccctctctctctctctctctttctttctcttgtctgattgttctggctaggacttccagtactatgt

SEQ ID NO: 9364 - DNA, 201 bp, Homo sapiens
cctctttcagcctctgtttcagcctctgcctcagtccttgccagagacgtcaggcttagcacagagcagctgggagccttcagcagagaaggaaggcaccrcttagacatctgcacgggcagtttttaaacatagggaacatgaaggaaataccacagaatttatggagtgaaagctttaaaaagaaacacaagtctgaag

SEQ ID NO: 9365 - DNA, 201 bp, Homo sapiens
accactcacaaacgagcagaaagacagtcaggaaaaaaattacaattactagagaaccactaggagtcaaccaggcaagaaaagaggagccgttccaggcraggcagggggaacagcatgtgcaaaggcatgggagtgagagatcatggagggtttcagtcggtatgatcaggattggctcttggcggtggggtggggagg

SEQ ID NO: 9366 - DNA, 201 bp, Homo sapiens
tccctccctccctaccttctctttctctttctctctttctctctttctttctttctttctttctttctttctttctttctttctttctttctttctttctttcttctctctctctctctctctttctctttctccctctctctctctctctctttctttctcttgtctgattgttctggctaggacttccagtactatgtt

SEQ ID NO: 9367 - DNA, 201 bp, Homo sapiens
tcagtgcctgccatgtaggaacaccacaccattcagcagggcagctatgtgtttgctgtctattcttgggccatattaataacctggttcaaagatgcagrgattaagataaatgtaccaagcagaagtggtaaacaggaagtgagagctgacttctatttgttattgcaaaaatatttattaacctgttaatgtgtgccc

SEQ ID NO: 9368 - DNA, 201 bp, Homo sapiens
aaatggatgcatgaagggatggatgagtacattttcatcaaggaccaagtgagcctagcctcggggctgcaggctcctgggcagtgagtggtaatggggtrggggcttggtcaccctgggaagggggctgagcagggggtcctctgtccccagcctcattccacacaccatgctgcctgcccctgatccccttcacactca

SEQ ID NO: 9369 - DNA, 201 bp, Homo sapiens
agctgctaagataatttctgcccacattctattggctaagcaatccacatgcccaaggttaacattaatggggcagggaagaagactctgtccactgtagygggaggcactgcacagtcatggagcaaggggcattgatgtagaattttgatacagatggggcatgaagcatcaggagcagtgattcactctacctcatgc

SEQ ID NO: 9370 - DNA, 201 bp, Homo sapiens
aaagtactaagcatagtgcctgagacacaggaaactaaaaactattgtaaattataataatagtaatgattgtgtaactcttgtatgtcaatatacatgtwtaatatatttttcttgtgcagtgacaaagttattgtcaggctaatgactgcaatgactatgtctttgtggtacctacattattggtgaaagaactgaaca

SEQ ID NO: 9371 - DNA, 201 bp, Homo sapiens
ctcctcatctcttctctgtatccacccccgacctggtgtttccctcagattcacacgggaggcagctcaggactgcgaggtgctggggcagcgcatccccrcaggcgctgtgctagagatggccgtgggtgccctgcaccatgaccctgagcactggccaagcccggagaccttcaaccctgaaaggtgagtactgcccct

SEQ ID NO: 9372 - DNA, 201 bp, Homo sapiens
tttccctccaggtactccacatcagcattctcaagactggagaagttaggcctcagacatcccaagccttctcctttcattggaaacttgacatttttccrccaggtaagggctgtcttccattggcttccatcataaaatatgctgagggccaggcacagtggctcatggctgtaatcccagcactttgggaggccgaag

SEQ ID NO: 9373 - DNA, 201 bp, Homo sapiens
aataacaaggtcgtttcaacactttttaaagctcagcttccatggtgccatccattaggagagtctgtgttctggaagtgactaaggtgtgaacacttttygtgtaattgctcttaaccatcatgtttatgtactatttagatggggttgaagaacagcatagagatggtttactttaatactggcagatggctatgtgag

SEQ ID NO: 9374 - DNA, 201 bp, Homo sapiens
gagcatcccatgagcaagaagcctcagctctttgtcctcctctgtgtaggagcccacaaggatgctttatctccaatctggaatggacacttagcatcctkagttctgccctgctcaaaatccatacctgttcatgagtaccagggcttcagggcccgagaacccacagctaacacccataggagaaaggtttcatatgag

SEQ ID NO: 9375 - DNA, 201 bp, Homo sapiens
tgaatggctcttccatttgcctttgaagattgcttgtaactcttcaagttcacttcttcatctcactgccagaccacagcttgagactgatgattgacatkgccactaggttcttcccaaagactccagcctaaagattgttagctgcttcccccaaaggcttagccttctctgctagagttttggttctttggagcatcc

SEQ ID NO: 9376 - DNA, 201 bp, Homo sapiens
cactaaggaggcactctttgcagatgaatttttttttttttttttttttttttggcctcggcttaaagaggaacctattaacctttgcccggaatctatgsctggtgaatggcttgtcatagcatgttagtttgatgaggcaattgtggtcttttttgttaaaacaccccccagcacctcttgatactacttggcctactg

SEQ ID NO: 9377 - DNA, 201 bp, Homo sapiens
tagggcaaaaggtaaaggaatctaaatgtctaaaaccaaattaactccagatactagtgtgaactttcaagcaaaaaaagtcacacaccaccgcatacacstttgaaattctactaaattttgaatgtttgacgttagcctttaaactggaacatattcttctttcttccttaggatctttaaatcttttaaagtttgggt

SEQ ID NO: 9378 - DNA, 201 bp, Homo sapiens
ctccctccctaccttctctttctctttctctctttctctctttctttctttctttctttctttctttctttctttctttctttctttctttctttctttcttctctctctctctctctctttctctttctccctctctctctctctctctttctttctcttgtctgattgttctggctaggacttccagtactatgttgaa

SEQ ID NO: 9379 - DNA, 201 bp, Homo sapiens
tctctttctctttctctctttctctctttctttctttctttctttctttctttctttctttctttctttctttctttctttctttcttctctctctctctctctctttctctttctccctctctctctctctctctttctttctcttgtctgattgttctggctaggacttccagtactatgttgaagaggagtggtggga

SEQ ID NO: 9380 - DNA, 201 bp, Homo sapiens
ggcccaggaccagaagccagacctaatctccgatatcagtcagggtggacaggtccatcatggttggaacagatccatgctggagaggcaccgagtctcaygatgtgtggctggaggttgttcctgcttctggggccagggctgggcctgcagatgagggacagagcacctggctagaaaggagagaggactgcagcggct

SEQ ID NO: 9381 - DNA, 201 bp, Homo sapiens
tctttctctttctctctttctctctttctttctttctttctttctttctttctttctttctttctttctttctttctttctttcttctctctctctctctctctttctctttctccctctctctctctctctctttctttctcttgtctgattgttctggctaggacttccagtactatgttgaagaggagtggtgggagt

SEQ ID NO: 9382 - DNA, 201 bp, Homo sapiens
tctctgtaagatttttgcattgggtgtaaatatctaagtaattcatgtggatatcttctcccaggtaggtgtggccagctgattacttattcccagggagytggagcagcaggaaggaatggcctggaaactggaaataatcccatttgccggggtaagctagctgtggaaaactgaccaggctgtgggtaccgagagagc

SEQ ID NO: 9383 - DNA, 201 bp, Homo sapiens
aatattcttgctgagactttgattggaattgcattaaactgatatgccagttttgggagaattgatatttttacattgtggagtcttccaatccatgaacatgatatgtttctccacttagttcttcttttatttctttcatcaacattgtaaatggcaatgtgctttcatttggtttacacatgttcattgttagcatgt

SEQ ID NO: 9384 - DNA, 201 bp, Homo sapiens
aaccgaactccagtggaagcacttctcctgcagagaccagctcccgcacctgactgtgggcccaggctgggcacctcccacccagtagcaccttcttgttytttaaaatcacaagttcaactattattgaaattatttccaagccttaactcggaatcatgctaagaagctaacacaaatatattaattgaccatttaaga

SEQ ID NO: 9385 - DNA, 201 bp, Homo sapiens
atattcttgctgagactttgattggaattgcattaaactgatatgccagttttgggagaattgatatttttacattgtggagtcttccaatccatgaacatgatatgtttctccacttagttcttcttttatttctttcatcaacattgtaaatggcaatgtgctttcatttggtttacacatgttcattgttagcatgta

SEQ ID NO: 9386 - DNA, 201 bp, Homo sapiens
ttgatttcatgaccactagtgagtcaaaatcagcaatttgagaagcaaagggccagatgatatctgaagtcctttccagttgtaaactggatgactacaarccaatgagacagcccctatcagtgtgcatcagaaaattgttagaggccattgtgtttgcctctttgtggtttaagattctgagaaacctctgtcaaagtc

SEQ ID NO: 9387 - DNA, 201 bp, Homo sapiens
tattcttgctgagactttgattggaattgcattaaactgatatgccagttttgggagaattgatatttttacattgtggagtcttccaatccatgaacatgatatgtttctccacttagttcttcttttatttctttcatcaacattgtaaatggcaatgtgctttcatttggtttacacatgttcattgttagcatgtag

SEQ ID NO: 9388 - DNA, 201 bp, Homo sapiens
ctttcatttttctagtttctttaaattttatttttaaaatatagaatgtttgatatatcaggaatttatttggaagatggagttagggacacacccttttyccccccctccaggagggtagagttccatctggaaattcatccttttccaaatgatttgaaatgtcacttttatcatttattaattcctaggtgtatttct

SEQ ID NO: 9389 - DNA, 201 bp, Homo sapiens
agtttgcaaatacttcctcccagtctgtggcttgtctcttcactttgctgattgtttcctttgctgtgcagaagttttttaacttgatgcaatctcaatcrtccatttttgcgttggttgcctgtgcttgtggggtattactcaagaaatctttgcccagttcaatgtcctagatattttctcaagtgttttcttttagta

SEQ ID NO: 9390 - DNA, 201 bp, Homo sapiens
gcctgggcaacaaagcaagactctgtctaaaaacaaaaaaaaagaaagaaagaaagaagaaggaaagaaagaggaaagaaagaaggaaggaaggaaggaargaaggaaggaaggaaggaaagaaagagaaggaaggaaagaaggaaggaaggaaggaaagaaagagaaagaaagagagaaagaaagagagaaagaaggaaa

SEQ ID NO: 9391 - DNA, 201 bp, Homo sapiens
tgggcaggacaggcctgcgcctaaggacagggatggggggaaagttcaagcattttcacttcaagaaaaattgtggtgcacctcagcccagaagctataayttagtggtggacaccaaatttaaataactgattatctggcttttcgtcattttgtaactaaaaggtttttgctttaaaaaaacatctttagtctaagttt

SEQ ID NO: 9392 - DNA, 201 bp, Homo sapiens
gaattggtttatggccttattgagttgttttttgttttcttggttaaaatcagtaaaagcaaacaaacaaacacaaaaagtagttagtattcttttctttytttgtaccacatctgttgaattcctgtttctcaaagattttcctgacaattttggaaaatacgatgactcaggtaaatgttttccaagtgcctaatatgt

SEQ ID NO: 9393 - DNA, 201 bp, Homo sapiens
ggcggatcacctgaagtcaggagttcgagaccagcctgaccaacatggtgaaaccccgcctctactaaagatacaaaaattagccgggtgtggtggcacaygcctatagtcccagctactcaggaggctgaggcaggaagatcacttgaacctgggaggtggaggttgcagtgagccaagatcacaccattgtactccagc

SEQ ID NO: 9394 - DNA, 201 bp, Homo sapiens
gggagtgagagatcatggagggtttcagtcggtatgatcaggattggctcttggcggtggggtggggagggggaccgggggcaggcaggcggggggaatarggaggcacaaggccaaagaacaaggcagggagcagggtgtgaaggacatcatgtgccacatgctaaagacttggcaaaccattgaagggtgttcagtaaa

SEQ ID NO: 9395 - DNA, 201 bp, Homo sapiens
agtgagagatcatggagggtttcagtcggtatgatcaggattggctcttggcggtggggtggggagggggaccgggggcaggcaggcggggggaataaggwggcacaaggccaaagaacaaggcagggagcagggtgtgaaggacatcatgtgccacatgctaaagacttggcaaaccattgaagggtgttcagtaaagaa

SEQ ID NO: 9396 - DNA, 201 bp, Homo sapiens
tccacctcttccacacccatccaaactcttgctgttcttcaagacactcctcagatactgcctcctccaggaagccttccctgcctccatccacatgcacytttccccttccctgaactctggcagcgctcaccatgtgtgtcactcgttgtcacagttgatccccttgtgccttccagtatttacagtgaaggaggatat

SEQ ID NO: 9397 - DNA, 201 bp, Homo sapiens
gtactatcttggtcgtcggatgtttattgttatttctgagccagacatgatcaagcaggtgttggttgagaacttcagtaactttaccaacagaatggtaygtagttttctttccgcatatagatggatggggaattgttctcagatggagacactgcatgtcagatccaatggggatgcaatcaggcctctgatcaggtt

SEQ ID NO: 9398 - DNA, 201 bp, Homo sapiens
ctgtgttcatgaaagtgaataagagttagcaggcaaaggagaaagggggttggagagggatctagagtttcagagaaagagaaaaacagctcacgagaagkaccacaccctagagagatgacatggtcaagggtctaacggaataatgcgacatcatctcaacactatgtgccaaggactgtcctgaaagctgtgtcataa

SEQ ID NO: 9399 - DNA, 201 bp, Homo sapiens
gtttatgcggatattaggttgcctcagtcaacaatgcttgaaaatggctttaaaatgagcatcatatcatgaagccatatttgtatttaaattaaaattgtttttttttttggtctatgtcataccagggataatatagagcaacagagaaccagggaaaatgtgattcatgcatctccaagtcaggaaaaagagactatt

SEQ ID NO: 9400 - DNA, 201 bp, Homo sapiens
ttaggttgcctcagtcaacaatgcttgaaaatggctttaaaatgagcatcatatcatgaagccatatttgtatttaaattaaaattgtttttttttttggyctatgtcataccagggataatatagagcaacagagaaccagggaaaatgtgattcatgcatctccaagtcaggaaaaagagactattggaatcatagcca

SEQ ID NO: 9401 - DNA, 201 bp, Homo sapiens
tgccagtggagaaagtctcctccaaccctcaggctcagcaccactcagggccagtgagatgcacaaacagcatcttgcaggtaccacaatgccttcatcasttgtatcttccccgaccctgtgatgaagtaggatgaagatggctgagggtatggacgttgggcccacctccctggcttaaagctgctggaccccttaccc

SEQ ID NO: 9402 - DNA, 201 bp, Homo sapiens
caccaaccctgactgccaagagaagcttctgagagaggtagacgtttttaaggagaaacacgtgagtacaagttggatccagttacccatgggatatccayaggacaattgattttgtgtttgtgggagtgaaacttatttttaatgacttgctaatatcacattctaagcttataagatgaaatagggtcattgcttggc

SEQ ID NO: 9403 - DNA, 201 bp, Homo sapiens
tcaggaaaatgaacgaggaggttttttaaaatctactttacaaacgaggaaatgtatcgggttccttaagagcctttccaggaaaatttttgctcatttgyggccaaactcgaaataaaacttaggtcccccaactcccaaccctgcgttttctggtttccttccaccactctttctagtatccattttcctggtctccaa

SEQ ID NO: 9404 - DNA, 201 bp, Homo sapiens
gtggtcactgctaccaacacaccaactcccaggacacaggatactagggacttctgtgccccatcagtggacaagtcacaagttcccaaagcagggtgaccaatcgatctggatcaggtggcagggcctcggatcttaactgtccatttcattgttatgcacacaaacttatcttagagatccggccatctgcctgttccc

SEQ ID NO: 9405 - DNA, 201 bp, Homo sapiens
agtttgagtttcaatacacacagaaagctagattgtactgatagtctccatgtttttccttgcccttaaattgtgatttggctgatctctgcgtgatgctwaacaaccagtttgactcattaattttgctgaactaactgaacttttgacctaattggctgctggttagggatcagagccatatgtgcaggtttttctaag

SEQ ID NO: 9406 - DNA, 201 bp, Homo sapiens
cccacatgttgaaaaacactgggttagagggtcacagttcaggaaaatgaacgaggaggttttttaaaatctactttacaaacgaggaaatgtatcgggtyccttaagagcctttccaggaaaatttttgctcatttgtggccaaactcgaaataaaacttaggtcccccaactcccaaccctgcgttttctggtttcctt

SEQ ID NO: 9407 - DNA, 201 bp, Homo sapiens
ggtcactgctaccaacacaccaactcccaggacacaggatactagggacttctgtgccccatcagtggacaagtcacaagttcccaaagcagggtgaccaatcgatctggatcaggtggcagggcctcggatcttaactgtccatttcattgttatgcacacaaacttatcttagagatccggccatctgcctgttcccgt

SEQ ID NO: 9408 - DNA, 201 bp, Homo sapiens
ctggttctcccttgtgaccactttaaaaatcgactcatttggccaggtgtggtggcttatgcctttaatcccagcactttgggaggccaaggcaggaggaycgcttgaggccaggagttaagaccaacctggacaatatagggagaccctgtctctacaaagaatctgaaatactagttgggagtggtggcacatacctgt

SEQ ID NO: 9409 - DNA, 201 bp, Homo sapiens
gtcactgctaccaacacaccaactcccaggacacaggatactagggacttctgtgccccatcagtggacaagtcacaagttcccaaagcagggtgaccaatcgatctggatcaggtggcagggcctcggatcttaactgtccatttcattgttatgcacacaaacttatcttagagatccggccatctgcctgttcccgtc

SEQ ID NO: 9410 - DNA, 201 bp, Homo sapiens
agataggagaattgcttgaacccaggaagcagaggttgcagtgagccaagattatgccactgcactccccattctgggcaacagagcaagattccatctcaaaataataataataataataataataataataataaataaatagcaaaagaaagaaaaaaccctcagctaagaagtatactgttgtgttttttggggttt

SEQ ID NO: 9411 - DNA, 201 bp, Homo sapiens
ggaaaaaaaacaacaggccaggcatgatggcttacacctataattcttttgggaggctcactttgggaggctgaggtaggaggatcacttgagcacaggawttctcgagaccagcctgggcaatataggaagtctccgtctctacagaaaatacaacaattagccaggtgcggtgacatgcatctgtggtcccagctactc

SEQ ID NO: 9412 - DNA, 201 bp, Homo sapiens
ataataatagtaatgattgtgtaactcttgtatgtcaatatacatgtataatatatttttcttgtgcagtgacaaagttattgtcaggctaatgactgcartgactatgtctttgtggtacctacattattggtgaaagaactgaacaccagccagatatttatgtatttattgagtagtcttctattttttttccagagg

SEQ ID NO: 9413 - DNA, 201 bp, Homo sapiens
aacaggaagctcagggtaactcacagtccccaccccagacacttcttcttttcaggcacacttcaaaataaaatcaggatctacatacactataagttggygtggtagctgaatattggccccctaaaatgtcgatgtcctagcctctggaacttgtgaatgcaaccttagatggcagaactgattttgaagatgtgatta

SEQ ID NO: 9414 - DNA, 201 bp, Homo sapiens
gataggagaattgcttgaacccaggaagcagaggttgcagtgagccaagattatgccactgcactccccattctgggcaacagagcaagattccatctcaaaataataataataataataataataataataataaataaatagcaaaagaaagaaaaaaccctcagctaagaagtatactgttgtgttttttggggtttt

SEQ ID NO: 9415 - DNA, 201 bp, Homo sapiens
tatctgctctctggccatggttttgaactatcagctgagcccaagcaaccttgcagaccacattttgattatgtcttcctcggaccatccttgagagtcaygtcttcttggcagtgtcccatagactgtgaatggtgagtgagatcactttagaaggtacacggactttaaaaatctttcattataaagcatttatttatt

SEQ ID NO: 9416 - DNA, 201 bp, Homo sapiens
ataggagaattgcttgaacccaggaagcagaggttgcagtgagccaagattatgccactgcactccccattctgggcaacagagcaagattccatctcaawataataataataataataataataataataataaataaatagcaaaagaaagaaaaaaccctcagctaagaagtatactgttgtgttttttggggttttt

SEQ ID NO: 9417 - DNA, 201 bp, Homo sapiens
aagtcaagatgtgtccatctttaccataaaaaaaaacaaaaaacttgcttcaataaccaataaacagatcaaacaacagaaaaataaatagcaaaagactkcagggctcgatggctcacacctgtaatcccagcactttgggaggcggaggtgggtggatcacctgaggtcaggagtttgagaccagcctgaccaatacgg

SEQ ID NO: 9418 - DNA, 201 bp, Homo sapiens
tccatcacaggcccacaccttgtctcagaattaagaggaaatgcttctggctgccaggggtggggtggggtaggatgcagagcctctccctccaccaccayctccatccttttccctttctctgaaaatctcatttgatgattccccagcctggctgcaaattaaagatttgtagacctgaaagatgctaccgatggttat

SEQ ID NO: 9419 - DNA, 201 bp, Homo sapiens
ccctcctgcccctccagccaaaattacctttttgatgtcccatttccccaggacactattttgtcctagggatcaaaaataaaaaaataagaaagaaagaragagagagagagagagagagagagaaagaaagaaagggaagggggaaagaaagaagaaaagaagaagaaagaaagaagaaagaaaaagaaagaggaagga

SEQ ID NO: 9420 - DNA, 201 bp, Homo sapiens
ttttagaaaagtccctcatcagattatcaggaagtcgtgggttttccgtgatcatgctgtggtcagatccagcccaaccagagagccaaaaacaaaacaarcatacaaaacaaacaaacaaacaaacaaaacccaaatccctggcaagccccacgaaatgactgctctgataacattcagcagacaagcctgtttgaaatc

SEQ ID NO: 9421 - DNA, 201 bp, Homo sapiens
aataatcgtctccagttccacccacattgctgcaaatgccattaactcattcctttttatggctgagtagtattccatcatatatatatatatatacatayatatatatatatatgtgtgtgtgtgtgtgtgtgtgtgtgtgtgtgtgtgtatatatatatatatatatacaccatagtttctttatccactagttgatgg

SEQ ID NO: 9422 - DNA, 201 bp, Homo sapiens
taaaagaggcccttccaccgcgtagggttacagtgagaagactgaatctatgaggaagcaggaggttgcactttatagactccaaacccggtaaataaacrtctgctgttgatgagccgtccagtcaatggtgttttgttacagaagtccaaatgaacaaaggcaatccctgactctcagaaaaacgcctggcactcagta

SEQ ID NO: 9423 - DNA, 201 bp, Homo sapiens
catggcttacgcctataatcccagcactttgggaggccgaggtgggtgaatcacctgaggtcaggagttcaagaccagcctggccaacatggtaaaacccygtctctataaaaatacaataactacgtgggcatggtggtgagcgcctgtaattccagctacttgggaggctgacgcatgagactcgcttgaacccgggag

SEQ ID NO: 9424 - DNA, 201 bp, Homo sapiens
aaagcaatgagtgaaatggcaggatcagtcaggctgtgaggaaatttggagggggttctgaaaatcataccatgggcaaccatgtggctgacccagctgcwgggtgaagctgtgttgttcttgctgttcctctggtcatttaccttggctctcctccagcttgactgcacttgcctgtgttaaggtttcagatcactccaa

SEQ ID NO: 9425 - DNA, 201 bp, Homo sapiens
ccacaggagacacgtacagccccaagcactaagaccctggtgactctttgctgtcacattagccactggctcatcattttactcagctccagaggaaaccsaactcctcgagtaattctttggtttttcttcaaagtccccagtccaccactggctctgccttttaagctggacataggaaagctttctggatgtcagtga

SEQ ID NO: 9426 - DNA, 201 bp, Homo sapiens
cgccccccttgaactcattcctacacctgtaaccactgacagtttttgaaaactgttcacctggagttcctggttctctttctcttaaatcaaacattgartaaatgaagacactcagatgttcaaacatgtgcatcaagattttacttgtgagagtggttgccatgcatgacctagggaagctctcatggcttcagtcaa

SEQ ID NO: 9427 - DNA, 201 bp, Homo sapiens
ggttgccatgcatgacctagggaagctctcatggcttcagtcaaaccttgccaactttttttagctgtgcatttcttgagaaaggtcaactcacattacgrgtctacagctctgagcaagggagaagttcttcctgaaagcacaaacagactacagagggcagtgaaaccagaaacacaggtgtgcaacctcatttgcctg

SEQ ID NO: 9428 - DNA, 201 bp, Homo sapiens
ctaacttgttggccactgatggactttaaccagggtgtttgtcatggacctgtattgccaccaaggtggctttggctccctgagtcctgaccctctgcttrttacttcccaacaggcgtcgggtttggagttcaagtcggtagccgacagcgttctgtttttacgtgacaaaagatgggaagaggtcagaggtgccctgat

SEQ ID NO: 9429 - DNA, 201 bp, Homo sapiens
cttcatctgcagccaatttaggtgtactcccggcatggtgccctaattacacctttgttatccattatcagatggttcccctcatcagccaagcctgcgamcttctcctggctcatttaaaacgctatgcggaatctggggacgcatttgacatccagaggtaaggctgctgcattacagatgagaaatcgagtttttgaa

SEQ ID NO: 9430 - DNA, 201 bp, Homo sapiens
gcttgtcctacagaaggtggggacacttcctctggctcctcctgacagagcaaggtgctgtctgcttggaggggaagctgaagggtttcagctccttgaasggtacccccagctttgccttccccccttgtgcagacactcacgtgtccccatggccacagcctggtccctctcacaggtggtgacacagcctcttcccaa

SEQ ID NO: 9431 - DNA, 201 bp, Homo sapiens
cattgtgggtagcccctgccagagtcctttcagatctctgtgctcccatctcccgtaggtgctactgcaattacaccacagatgtggttgccagcgtcgcstttggcaccccggtggactcctggcaggcccctgaggatccctttgtgaaacactgcaagcgtttcttcgaattctgcatccccagacctatcctggttt

SEQ ID NO: 9432 - DNA, 201 bp, Homo sapiens
acaatgtatgttttctgtaataatatacagatgttcatgaagcctgccttaaagtttgtcttgtgtttatttgagtgctaagagcccttgctttttgttcrttgctattaagaaaactgtaaaatcattaagaggaagagggagacaaagttaataaaactagataattaggttgttaattcatcaaggacaatttgatgt

SEQ ID NO: 9433 - DNA, 201 bp, Homo sapiens
ttaataacccagtttttagctttttggaaaagaacttaatctgactactcctataagataacaaaaagaatcatttgagtttaaaatggccttttgagggsgcagctttcctatagcctaagaggttaaattttctggagctcctgccagacacttttccttctgtttgtttctaaagcacaatgtatgttttctgtaata

SEQ ID NO: 9434 - DNA, 201 bp, Homo sapiens
ttttttaaggctcaacaaatatccaatagtcagacagaagagtgatcaaaatagaaagcatgtatttaaactgggactgacaggtgacaggggatgcctcwtagccacaatgatcataatgtaaatgcttaattaactgtttgtcagtagccattgaatgtctgtctggtccactaggctgtaagtgccacagagcaaggg

SEQ ID NO: 9435 - DNA, 201 bp, Homo sapiens
aggagacattgggtgcaaggtgacttaggaatgaagcactcagaggatcaggaagctgcattaggaaggagagaggaatgggagctccagggtaggcctgraatccggaatctccacctcccaccctccaacaatcgaatggggtgtttcccgcagtgtgtccttgagaccatcgtttccactgacagtaataattgttac

SEQ ID NO: 9436 - DNA, 201 bp, Homo sapiens
cttgggggtgggatgggcattttaaagcactcttgagaaagtagaacacactccattttaaggcagtttctttgcagtgcttcttcgtacacatcaacccyatgctcactctgccccatggcctccaggtgacccatctgttccaaggcagcagcctttccagtgccttcacctgctatggtgccacaacatggctctcgt

SEQ ID NO: 9437 - DNA, 201 bp, Homo sapiens
ataaaaacaaaggattaactgcagatgactaagcccacatgatggaaacagaatcaggtacagtaaataatgaacgtagacaggattagattcctacaaayaatacattgtgttctcctgctcttcattggcaatcatccccagtagggaatcagtggaactctttgagtggccaaggaaaacatctccatgtgcccagga

SEQ ID NO: 9438 - DNA, 201 bp, Homo sapiens
ttgggttccgcccctggagattcgatttagtgggtctggagtgaggcctgggcttcttagaagccccagcggattctaaaatgcagccaggaggaagaacsttgccagaatcccatgaggcacagatgcaaatgtgcatagtgacattgggttgcattatcaatggcaggactgactttataaacctccacatccttactg

SEQ ID NO: 9439 - DNA, 201 bp, Homo sapiens
aacactgtgatgaccaaggcggagattagagggatgcatctacaagccaaagaccatggattgccagcaactaccaggagatggacagaggcaaggaaggrgctcccttcgtgtcttcagagggagcatggccctgctgatgtcttgacctcagaattctgaactccagaatgatgagaggataatttctgttgttttaag

SEQ ID NO: 9440 - DNA, 201 bp, Homo sapiens
ggagaattgcttgaatctgggaggcggaggttgcagtgagccaagatagtgccactgcactccaccctgggcggcagagcgagactctgtctcaaaaaaarcaaacaaacaaacaaaaaaaacagtcccctaaacaatgaagaataaaaaaaaaagaaaaaaaaaggccccctgccattctccatcccaatcccatcccct

SEQ ID NO: 9441 - DNA, 201 bp, Homo sapiens
gagctgacctagaagaggtcaatgatttggcctgctaggggcagacatactcaatgcacatgtccaagcaaggaggacacaataatattgccctcagcttygatcaatttatcctccaagccatttgtctgccgtttctaatttctttcaccatcccctcacccacccctccacgcagactaggtccagtgccccaaactc

SEQ ID NO: 9442 - DNA, 201 bp, Homo sapiens
agccctgtcctcgccacagtgcccgcatcttcattggttcacctttgcaggtatcatctgtgacctgtcatccaggctctgagccctgaggataataagtytccctcgaaggtcctgggtttgttggagctttttctccctcttgccatgtccttttcacggtccatcctctgagtttgtgaattatctttcttcgtggcc

SEQ ID NO: 9443 - DNA, 201 bp, Homo sapiens
gtgatcttgcttatgaagtgataacctagcttcaagagtgttgaagcagggtccagagctcagtgtaggggccaggttggtcctgggccgaacctggggaygtacctaggaatttctagccaaataagcaatagagggaagggtctgactgatgacggagcatgagcacactctaggaagggcaaagaattgatctggggg

SEQ ID NO: 9444 - DNA, 201 bp, Homo sapiens
agcaggtgaatctgggtaaacgatacatgggtatctaatgtactattcttcaacttttctgtaagttcagaattatttcctaatgaaaattaaaacagaaaaacaaacaaaccaaagaaatgtgcaagaggaagacaatcaatgacatagacagaccaagtcagatgaagactgaggagtattcatcagatgtacccataa

SEQ ID NO: 9445 - DNA, 201 bp, Homo sapiens
agaggctggggtgagaggatcagttgagcccaggatgtggatgttgtagtgagccaagatcgcaccactgcacttccaacagcaaagaccctgttcccccmaaaaaaacacaaaaaacaaaaaacaacaaaaaaaaaacaacccaccaaaaaacagaaacaacagatagtgatgcagaattttcccactgagacactgaca

SEQ ID NO: 9446 - DNA, 201 bp, Homo sapiens
gcaggtgaatctgggtaaacgatacatgggtatctaatgtactattcttcaacttttctgtaagttcagaattatttcctaatgaaaattaaaacagaaaaacaaacaaaccaaagaaatgtgcaagaggaagacaatcaatgacatagacagaccaagtcagatgaagactgaggagtattcatcagatgtacccataaa

SEQ ID NO: 9447 - DNA, 201 bp, Homo sapiens
ataagcagccagagatgagagaaacgggggtcctcacccagatcctgcccactcccaagctctccctccttcctgacatctggctacgtctctgcacagcrttagctattccctgcctatcctgaccactgctgtcccctgcacctatcctcatgcttgtcctgccacccggaacccactgttcagctgcagacctggaca

SEQ ID NO: 9448 - DNA, 201 bp, Homo sapiens
ttcaatattctagtgaaagatctaaaatacaatcggaatacacaagcatagacttgggttaattccagggattgtgcatatggattaggctttatttactygctaatgctaaccaaatgtcatgaaactgagtactgattctcagttttgtctaagcacttaatgatcattttcataattatttcaccgtattcactgtaa

SEQ ID NO: 9449 - DNA, 201 bp, Homo sapiens
attaatttctggccgtgtgccactgcaaccagctttcaccctgacttgtcatataacaaaatatcattaaattgaactctagttttttttttttttttttkagacagggtcttactctgttgcccaggctggagtacagtggcacaatcacagctcactgcagcctcaacctccccaggctcggggaattctcccacccca

SEQ ID NO: 9450 - DNA, 201 bp, Homo sapiens
caggtgaatctgggtaaacgatacatgggtatctaatgtactattcttcaacttttctgtaagttcagaattatttcctaatgaaaattaaaacagaaaaacaaacaaaccaaagaaatgtgcaagaggaagacaatcaatgacatagacagaccaagtcagatgaagactgaggagtattcatcagatgtacccataaat

SEQ ID NO: 9451 - DNA, 201 bp, Homo sapiens
aatgccaggcgcatgacaggtgctcactcattcattcaacaaacattaatgagcaaatggataagcagccagagatgagagaaacgggggtcctcacccakatcctgcccactcccaagctctccctccttcctgacatctggctacgtctctgcacagcgttagctattccctgcctatcctgaccactgctgtcccctg

SEQ ID NO: 9452 - DNA, 201 bp, Homo sapiens
ctcttctgcatctcctaggttcttgccccaatgtacctggtaccttccctctctctcatcacttacctggctccccaagggcaggattggtccttcctcakctttagctgagcactcagcattgtgccaggggcactcaacacacttctgttgagtaataggcacgcagttacttgttgaaccaaactgcgttagaagaga

SEQ ID NO: 9453 - DNA, 201 bp, Homo sapiens
tggtggctcatgcctgtaatcccagcactttgggaggccaaggtgggcggatcacaaggtcaggagatggagaccatcctggctaacacggtgaaaccccrtctctactaaaaatacaaaaacttagctgggcgtggtggcgggcacctgtagtcccagctacttgggaggctgaggcaggagaatggcgtgaacccagga

SEQ ID NO: 9454 - DNA, 201 bp, Homo sapiens
aggtgaatctgggtaaacgatacatgggtatctaatgtactattcttcaacttttctgtaagttcagaattatttcctaatgaaaattaaaacagaaaaacaaacaaaccaaagaaatgtgcaagaggaagacaatcaatgacatagacagaccaagtcagatgaagactgaggagtattcatcagatgtacccataaata

SEQ ID NO: 9455 - DNA, 201 bp, Homo sapiens
attataccattttttagccacgcgtggtggctcatgcctgtaatcccagcactttgggaggccaaggtgggcggatcacaaggtcaggagatggagaccaycctggctaacacggtgaaaccccatctctactaaaaatacaaaaacttagctgggcgtggtggcgggcacctgtagtcccagctacttgggaggctgagg

SEQ ID NO: 9456 - DNA, 201 bp, Homo sapiens
aggaaataattataccattttttagccacgcgtggtggctcatgcctgtaatcccagcactttgggaggccaaggtgggcggatcacaaggtcaggagatsgagaccatcctggctaacacggtgaaaccccatctctactaaaaatacaaaaacttagctgggcgtggtggcgggcacctgtagtcccagctacttggga

SEQ ID NO: 9457 - DNA, 201 bp, Homo sapiens
ggtctcatccccaggacctgaaacattaatttatgagggtgaccttgacctcttgagggccagatggaagtgcagactcgattaattgcacagatgtttaytgagtgcttactatgtgccaggaatggtgaggagtaccgagagggagtgagacatcacccctgctctcagaagcagcagtgcggcggggagggcaggact

SEQ ID NO: 9458 - DNA, 201 bp, Homo sapiens
ttgcaagacataatttccaaaggaaataattataccattttttagccacgcgtggtggctcatgcctgtaatcccagcactttgggaggccaaggtgggcrgatcacaaggtcaggagatggagaccatcctggctaacacggtgaaaccccatctctactaaaaatacaaaaacttagctgggcgtggtggcgggcacct

SEQ ID NO: 9459 - DNA, 201 bp, Homo sapiens
cccaaatagtcaaaagttatggcaattcagatagatgtttgcaagacataatttccaaaggaaataattataccattttttagccacgcgtggtggctcaygcctgtaatcccagcactttgggaggccaaggtgggcggatcacaaggtcaggagatggagaccatcctggctaacacggtgaaaccccatctctactaa

SEQ ID NO: 9460 - DNA, 201 bp, Homo sapiens
agtacatatatatatgtagatagatagacagattttcttttaccatgttactattcctctgaagtaaatttaaaaggtatttaggtttatgggattttatkaaactaggattcagttgtaccactaaacttattaagataatcgaaggaagatagccagtaaagctagttataaaaatgtggcttagactgtactgacttt

SEQ ID NO: 9461 - DNA, 201 bp, Homo sapiens
tttgctcacgcaagcaaaccattgtcctgataggaaagtggtttgctcagacaaattagtttgcattaatttcctgaagccaacagtgaagctgtttcttsgttcagaggtttatcttcctcggcaagaattttctggagcagagaggaagtcactgacacaggtggtctcgatgctcactccaagagttgagttgtgtgg

SEQ ID NO: 9462 - DNA, 201 bp, Homo sapiens
atctgcagccaatttaggtgtactcccggcatggtgccctaattacacctttgttatccattatcagatggttcccctcatcagccaagcctgcgaccttmtcctggctcatttaaaacgctatgcggaatctggggacgcatttgacatccagaggtaaggctgctgcattacagatgagaaatcgagtttttgaatcac

SEQ ID NO: 9463 - DNA, 201 bp, Homo sapiens
catcaggtggaggaggcggccctggagagaggcctggtttccatcccagctctcccaccatctgcctgtggcctctgcaagctccccaagccctgggggcyttcgtttcctccctgcaaagggagctgccctcagaagcactcagctcggttcttggcatggggagtgattagctctgcacaaacctggtagtttcacgag

SEQ ID NO: 9464 - DNA, 201 bp, Homo sapiens
tgccctgccaccttcccctgggaagcattaaggttcaatgcttggctctgtgcttgtttttcttacccctatcccagaggactcatccccgtctgtgcgayaccatctccccacttctacgccaagctgctcacggtctcacccaggtggggtggtggagggggcctccagcaaaatcctgcaaaagctgatctccttccc

SEQ ID NO: 9465 - DNA, 201 bp, Homo sapiens
ttttgtttttctctttcaagtatcatttccatccataatggtcccactggcccggattttgcccaataagaaccgagacgaactgaatggcttttttaacraactcattaggaatgtgattgccttgcgggaccagcaagctgccgaagaggtaacgtattttaataggacacagccttgaaatggaatggagccgacttt

SEQ ID NO: 9466 - DNA, 201 bp, Homo sapiens
tctctttcaagtatcatttccatccataatggtcccactggcccggattttgcccaataagaaccgagacgaactgaatggcttttttaacaaactcattrggaatgtgattgccttgcgggaccagcaagctgccgaagaggtaacgtattttaataggacacagccttgaaatggaatggagccgactttggcatcact

SEQ ID NO: 9467 - DNA, 201 bp, Homo sapiens; identical to SEQ ID NO: 1013

SEQ ID NO: 9468 - DNA, 201 bp, Homo sapiens; identical to SEQ ID NO: 1016

SEQ ID NO: 9469 - DNA, 201 bp, Homo sapiens
acacagagatactaagaataaatcaggatagtcatacttatttttcttttttgagtggacttccagataggtagatgaggtaaatcacatttctgtttctrcaaatcatttgacaaagtcttccccagctgactcatcagtaaagcggtgcctggctgagtatttacttaggttcatgcacagatagcccaagatccaaaa

SEQ ID NO: 9470 - DNA, 201 bp, Homo sapiens
attttccagtggtgctcggaggccacgtaggactgtgccaggggctgtctggaggatgcaggaaggggaagtgtagcaaatggggcctcggtggaaagctrgggggtgggggagggtcagaagcaaaacttctctattttctgcctaagtttggaaccaactgaggtatggaaagaggttttaggcaaaggaaataaaatt

SEQ ID NO: 9471 - DNA, 201 bp, Homo sapiens
aattgacgttttaaaaagcacaactgtagatttagattttcacagtcttttgctagattctttaccaaagactattagtgagtagtaaccctgggattgtytaaaactttattaaggatgagggaataaataggtttaatttcaggaaataaaactggggctaaattagtacttctctgacggaaaatgtataaataatgt

SEQ ID NO: 9472 - DNA, 201 bp, Homo sapiens
tagaaaatgaccaggggctgggtgaattttggaagcaagataaatgtggataaagagaaaaaaggattctgaggtttcaagtctggcttcagagttgaaasctccttctgccaggaggagtaatagggaagccaagaggataaaatgatttcccagtcctggaaaggcagcttaaaaccatccttccacttgctcttaagg

SEQ ID NO: 9473 - DNA, 201 bp, Homo sapiens
gatccatgttaaaaaaggaagtttttaacctggtctcagaggacacttgcaagagatgccaaggaaggcagtgtgatcatcccaagtcaagcagcctaacrtgagcctgtgagagagaaactgcaatccacccgcaacgtgtggtcatcaaagggcggcaaccccagttaccagcttgagattaaaaacccaaattaaaac

SEQ ID NO: 9474 - DNA, 201 bp, Homo sapiens
gttactggaaccattaaaaaatgtttcatacaatgaactgaaaaccacttcccgggaaattctacttctttattctactggggaagtaaaggcaaagtcartgtctcttcttcacagcagtttttaaatatttgaaaactgcattcactgtgttactaattaattgtcttaactttaggctcaacatgagtttatggtcaa

SEQ ID NO: 9475 - DNA, 201 bp, Homo sapiens
gagttttcctaattccaaaagcagctcccctttgcatatgaagagcagagggtttgaggctctaagccatggtgtagacaggatgcaggaaatgacagggrggctgcttctgggctgtggaagatgggtggaggggacaaaatgagaagtgtcctatattcctccccaaaacctcctggtttctggatgcttcctcaaact

SEQ ID NO: 9476 - DNA, 201 bp, Homo sapiens
cagcttcagggcattttcttctagatgaggcccctcttgatcgcttatagcagatataacgagggtgctgagcaaggctactttatcacctcattttttcytctagatgcttgtgtgtgtataactttgactcatgagttgtcaaagagattcatttttaaaatctgtactttaaaaggaagaccaccacagtggaatcct

SEQ ID NO: 9477 - DNA, 201 bp, Homo sapiens
ctgaggaggaggctcacaaatggaataagggaagatggggcccgtcagcgcccaggccagcttcagggcattttcttctagatgaggcccctcttgatcgyttatagcagatataacgagggtgctgagcaaggctactttatcacctcattttttcctctagatgcttgtgtgtgtataactttgactcatgagttgtca

SEQ ID NO: 9478 - DNA, 201 bp, Homo sapiens
cgacccaatggcggctgctgcttcttctgcctgggcacctcatcatccccagcagtagttcctaggtgtgagcgtggcaaggagcccagaaatacagaagsagcgtttaggggcctcacggtagcttcatgcctgactcttttctctcctcttccggcctggcctctaggcctttctggatcgccagccagtcagactcta

SEQ ID NO: 9479 - DNA, 201 bp, Homo sapiens
gtgcgatctcagctcactgcaacctcctcctcccgggttcaagcgattctcgtgcctcagcctcctgagtagcagggactacaggcgcacgacaccatgcytggctaatttgggtatttttagtagagacggggtttcaccatgttggccaggctggtctccagctcctgacctcaggtgatccacacacctctgcctccc

SEQ ID NO: 9480 - DNA, 201 bp, Homo sapiens
cacagaaactgatcaatggacacagtacttcctggacctaaactcagccacgaatccatcagacaagaccttattagctgtcatgttgaataacaaagggrttaggctcttcaacatgaaaatgcggtggccgattctccactgacccgttataaacagcagagcagaaaaggaagttggtgcaggtggaccaggaagctg

SEQ ID NO: 9481 - DNA, 201 bp, Homo sapiens
tgcaaactgtcatccaattctttcttttattcttttttttttttttttttgagatggagtcttgctctgttgcccaggctggagggcaatggtgtgatctyggctcactgaaacttctgcctcttgggttcaagagatcctcctgtctcagcctcccaagtaactgggattacaggtgcccgccactatgcctggctaatt

SEQ ID NO: 9482 - DNA, 201 bp, Homo sapiens
ctcactttgagagctggctgagatcccaggcagggtggccagtggctgctccagggctgtgaagggctccccctgcagacggaggaactaggcctcccagygcctgtaactggaacgttggcggcttgagaatggacttgccctgaaggccggcctcctgctgctctgggaaaaagagggaacagaagaaagcaatccgcc

SEQ ID NO: 9483 - DNA, 201 bp, Homo sapiens
ggccaggcctttgactgtggatgagattgtgggccaggccttcatcttcctcatcgctggctatgaaatcatcaccaacacactttcttttgccacctacstactggccaccaaccctgactgccaagagaagcttctgagagaggtagacgtttttaaggagaaacacgtgagtacaagttggatccagttacccatggg

SEQ ID NO: 9484 - DNA, 201 bp, Homo sapiens
cagcactttggaaggccgaggcaggcggatcacttgaggtcagaagttggagaccaacctggccaacatggtgaaaccccatctctactaaaaatacaaargttagccaggcatggtggcagatgcctgtaatcccagctatttgagaggctgaagcaggagaatcacttgaacccgggaggtggaggatgcagtgagccg

SEQ ID NO: 9485 - DNA, 201 bp, Homo sapiens
ggaaaagacaaaatgctgtgagatttgggctaacacgaacttctccctttgtcacgacccctccatcagatggcccctgagttctgcagcctcgaggaagkcctgccctatctggacatggtgattgcagagacgctgaggatgtacccgccagctttcaggtgtgtggtagccccctcccctgcccgagtccccacctcc

SEQ ID NO: 9486 - DNA, 201 bp, Homo sapiens
aacttctccctttgtcacgacccctccatcagatggcccctgagttctgcagcctcgaggaaggcctgccctatctggacatggtgattgcagagacgctraggatgtacccgccagctttcaggtgtgtggtagccccctcccctgcccgagtccccacctcctacccctaccccctgccccagcctgcaggtcagggcc

SEQ ID NO: 9487 - DNA, 201 bp, Homo sapiens
gactggcccaaggccatggctaagggttacagacccggaacagaaccctgccctttgcctcccttgtgggacccaaagccaggccaaggtcaaggggaggsgctgcagggggggcttcctcattgggtgtggacagcaaaggttgattttgagatttccccccagctctaattctcagtaatttggcctttgaaacaggag

SEQ ID NO: 9488 - DNA, 201 bp, Homo sapiens; identical to SEQ ID NO: 1073

SEQ ID NO: 9489 - DNA, 201 bp, Homo sapiens
tagacaaaggaggacttctcttggttttctgcctacccagccagaagatcccaggccatgggcctgtggagccaaagttcttaaccactgcactgtgtcamctttctatgatgtcaggcctcagcaaggcttatgaaggaacaggaacagccttgaaaatgaagttgggaagggataggccaggcctcccaggagcccaaa

SEQ ID NO: 9490 - DNA, 201 bp, Homo sapiens
tacaaccagcaacgtgaagagacaagaaaacgctgccatcttaggaagtcaaaaaacccccacaaaacccaacaaagacctgagcgtttattcagcatggraaatagaggactcaagggggacctgactgctgtttcttaatacctgaagaactcttgtggggaattttgtgggatcctagaggccacaatgggggcctgt

SEQ ID NO: 9491 - DNA, 201 bp, Homo sapiens
gaggagtaagggagctggaatccactttccaggcaaatgtaactgacgttcactccgaggctggctccgtttctgcctctgtgagatggggcacagcagcrgccggaaggttatttgtgtgcaaagccaacagcagatgtgaaagtgctttggaaggcagggatcttggaaggaacgtgggctgggattgtttgaccggga

SEQ ID NO: 9492 - DNA, 201 bp, Homo sapiens
tttctgcctctgtgagatggggcacagcagcggccggaaggttatttgtgtgcaaagccaacagcagatgtgaaagtgctttggaaggcagggatcttggraggaacgtgggctgggattgtttgaccgggatgtgaggtcggccgcagacacagccccgattcttcccctggggcctggagggagcctgggccactcgag

SEQ ID NO: 9493 - DNA, 201 bp, Homo sapiens
cctcagccctgcacaggggctgcttgggacaaggcacccgtcccccagcctcaatttcctccctggtcaagtgggattcagtaactaccatttgtggcacyggaaaaatggcagctgccacgggggcctccattttacagatgaggaaacaggctcaggagggcaagtgactctgcagcctgtgttagataaagaacccga

SEQ ID NO: 9494 - DNA, 201 bp, Homo sapiens
gcctgattcatcttcatgatcccgtggaacctggcacaggaggtgccagccaatctctatttgatttttgcaaaccttttcttgatgtataatttacctayagaaaagcacagctatcttaagtgcacaccttggtgggcttctacaaggtgaacacacccatgtgacctccacccaaactaagaaatcagaccagcaccc

SEQ ID NO: 9495 - DNA, 201 bp, Homo sapiens
ttttccattgctgtgtatactccattgtatgaatctaccacaatgcatttgcctgttttcctgcaaaataacatttggattgattccagcttggggctgtyacaaataaggcagccatggccaccaggctccgtgctgggtgtccacacacaggcacctgtgctgctcagttgatctttctgaatcactgtcttcaatgat

SEQ ID NO: 9496 - DNA, 201 bp, Homo sapiens
gctgccatttactgaggcctgctgcgtattcagcacatggatgacgccaaatcacagtttactaagaggaacgtcttgccgtttcctgaatgcgtctcatrcacactggcctctgctcatgccctttcctctgcctggaacactttttccattgctctttcggggaatcttcttcaagatccacctcctctgagaagcccg

SEQ ID NO: 9497 - DNA, 201 bp, Homo sapiens
gtgatgttgactggctcagaggtctccaactctgatgcctctagggtctgggcaggccatgtgagtgacagcagggggcagatggggcctgcggtgacccmgggagcccttgcttggcccaccctgcagctgttctctgtttttgcttgttgttgccacgaaggattgtgggccctggtggccgctcttctgatgtttaga

SEQ ID NO: 9498 - DNA, 201 bp, Homo sapiens
gaactgcggaagagtgaagaggagagagaagccaggctctggggagctgcaggcagccaggccgggctgctgcggagtgcgtggccccaggaatgggggcrtctggtggtatctgggctggctggagaggtggttggggagatagtgctcttggggggctggcccccactgagccctcataagctctgaccagaagcacag

SEQ ID NO: 9499 - DNA, 201 bp, Homo sapiens
ggaataagaactgaaaccaaagatgggcagaagaagaggtgaaaagcgggaaaggagagtgggggtgggaagggtggctgagcatggctgggaccgcagcytgagcctggcttggaggcaggaggacagagctgattttgaccctgcgacagttttggtgtgtgaccttgggctggtcgctgtctctctctgggccatatt

SEQ ID NO: 9500 - DNA, 201 bp, Homo sapiens
tttgtgagcacttctttctcccaacgttatgtttgggagcttcgtctgtgtggttgcgggtagctaactcattttttccattgctgtgtatactccattgwatgaatctaccacaatgcatttgcctgttttcctgcaaaataacatttggattgattccagcttggggctgttacaaataaggcagccatggccaccagg

SEQ ID NO: 9501 - DNA, 201 bp, Homo sapiens
aaggtgaacacacccatgtgacctccacccaaactaagaaatcagaccagcacccagaggcccctagagcccccgcctcgccactgccccgcccccactgmcttctgcctgtctatgtagttctataatacatacatctgtagaattacgtagaaatgaaattctgcagcgcgtgttcttttgtgagcacttctttctccc

SEQ ID NO: 9502 - DNA, 201 bp, Homo sapiens
ctgcatcagtcattggtttcaagctgcccctaggggagggaatgtaacctcccaggtattagtggattaggtggtccctgtcagccaaaatgatcttctaragaagagcataggtgtggcccatgggcagctgacacctgccagctggggatgggccggtgcgccagcctgggaagcagatctggagatagtagccacttg

SEQ ID NO: 9503 - DNA, 201 bp, Homo sapiens
agatagtagccacttggcttttcttggtttgcccgtcagtgggatggggctgaaggtagcacctgcttcctaaggctgctgtggcggtcgaccaaggtgayggctgtgccacgctgtgctcgtgtgtgtgtggagggtgggatcattattcccggatgtgtgggtgctgttggaattccttatgtccagagacattgatgt

SEQ ID NO: 9504 - DNA, 201 bp, Homo sapiens
tgggtgccagccctgtcactaactccctgtgccatttgggtcaagtttccttccctctctggaccttggtttctctatttgtaagatgagggttggaacaraagaaatgtgttctctttcagttctggtagtctaagattcattcactcactcattcatttattcagtatttactgcctctcactctttgctagtctcata

SEQ ID NO: 9505 - DNA, 201 bp, Homo sapiens
ctgattctggagcccagctcttcatcactcttccgttcagtccctttccacgcccctaaacaggatgtaatgtggcaggaagacaagttgagacctgtgtytgagctaaaaaaaaaaaaaaaaaaaaaaaaaacccacacagtcagcaagggggaaacagatggtgggtggctggttgcctgtcagctgagcatgagttac

SEQ ID NO: 9506 - DNA, 201 bp, Homo sapiens
aacactttttccattgctctttcggggaatcttcttcaagatccacctcctctgagaagcccgccctgacccctacggttggaccctgagctctgggtgtkgacccagagccctgtgtgctgggtccctgggagtcgtgccctctggcctggatgctcgtttgggtcttgacccagcctgattcatcttcatgatcccgtg

SEQ ID NO: 9507 - DNA, 201 bp, Homo sapiens
tcaactttcctgatgagacaaagcctttccagctcactctttagcaggtagagggggcagttagagcatgcaccgtgctcctggtactactgccgaaccaygtaagcttgccccagccaaaagcagattctgtttgctgggcaccccctgccagtccctgagctcagtgctttgcaaatataatgcaatttaatcttcact

SEQ ID NO: 9508 - DNA, 201 bp, Homo sapiens
cggtaggtgctcagagagtgtttactgagagtcagtgaatgcccagaggtagcaaaaaccaccacccaattgtgcttgtttatggtgcacctgctgtgtgyccggctccgcgcaccacacgattccatttgacctcagcaatcctgtgaggcaggtcagtgattatccccattcctcagatgaggagccgaggcccagaga

SEQ ID NO: 9509 - DNA, 201 bp, Homo sapiens
gcacactggcctctgctcatgccctttcctctgcctggaacactttttccattgctctttcggggaatcttcttcaagatccacctcctctgagaagccckccctgacccctacggttggaccctgagctctgggtgttgacccagagccctgtgtgctgggtccctgggagtcgtgccctctggcctggatgctcgtttg

SEQ ID NO: 9510 - DNA, 201 bp, Homo sapiens
ctccagggagctgacccagaggtggaggccacggaggcagggtctctggggactgtcggggggtacagagggagaaggctctgcaagagctccctggcaawacccccttgtgtaattgctttgtgtgcgacagggaggaagtttcaataaagcagcaacaagcttctgtctggctgatgtgtttctggaaatacagtgtag

SEQ ID NO: 9511 - DNA, 201 bp, Homo sapiens
tgtgtgtcggggtcctccagggagctgacccagaggtggaggccacggaggcagggtctctggggactgtcggggggtacagagggagaaggctctgcaaragctccctggcaatacccccttgtgtaattgctttgtgtgcgacagggaggaagtttcaataaagcagcaacaagcttctgtctggctgatgtgtttctg

SEQ ID NO: 9512 - DNA, 201 bp, Homo sapiens
cttccctgtgtgtcggggtcctccagggagctgacccagaggtggaggccacggaggcagggtctctggggactgtcggggggtacagagggagaaggctytgcaagagctccctggcaatacccccttgtgtaattgctttgtgtgcgacagggaggaagtttcaataaagcagcaacaagcttctgtctggctgatgtg

SEQ ID NO: 9513 - DNA, 201 bp, Homo sapiens
gtgcctgcttccctgtgtgtcggggtcctccagggagctgacccagaggtggaggccacggaggcagggtctctggggactgtcggggggtacagagggaraaggctctgcaagagctccctggcaatacccccttgtgtaattgctttgtgtgcgacagggaggaagtttcaataaagcagcaacaagcttctgtctggc

SEQ ID NO: 9514 - DNA, 201 bp, Homo sapiens
cctcctgtgcctgcttccctgtgtgtcggggtcctccagggagctgacccagaggtggaggccacggaggcagggtctctggggactgtcggggggtacaragggagaaggctctgcaagagctccctggcaatacccccttgtgtaattgctttgtgtgcgacagggaggaagtttcaataaagcagcaacaagcttctg

SEQ ID NO: 9515 - DNA, 201 bp, Homo sapiens
cagcggccggaaggttatttgtgtgcaaagccaacagcagatgtgaaagtgctttggaaggcagggatcttggaaggaacgtgggctgggattgtttgacygggatgtgaggtcggccgcagacacagccccgattcttcccctggggcctggagggagcctgggccactcgaggggatgagaagtggggatctccccttt

SEQ ID NO: 9516 - DNA, 201 bp, Homo sapiens
aggcaggggccgtgtcctctcagcttccagctcagtcaaaccacggccttctgcccaccaaagagaacttgagacctgtgctaatcattagggtaacttgyccggcccaagctcttgttgggcaacttgtgaagtcacggctgtcactggttcctcctttcctggtgactcacagtgtggtcttgggcaagtcacagtgcc

SEQ ID NO: 9517 - DNA, 201 bp, Homo sapiens
cacagcccagctgggctctcagagcttggggagaaggcagcgctgtgtccaggtggaaaccggggacatgaggggaaggcaagggcttggaggcttggaartgttgactgtctgcatactctgtaggtcggccaggtactttccaggaactaccaacagctgttggttagggacatgggtggggcagtgagggccttctga

SEQ ID NO: 9518 - DNA, 201 bp, Homo sapiens
gaaatgggggagggtgagcctgggttttaaatgcaggtggttttcacaaaagtagaaatacctctggtgcctggtgctggggctgaggggagggagggggkactgcagagggagaggggatgggggcgcctctctgcctccactgaggcactgaggggaagggttaggccttaggcagagcccgggtggctggaagatgcc

SEQ ID NO: 9519 - DNA, 201 bp, Homo sapiens
gggtttgtgtagaggattctctgggtcacccaaacttgcacactttgggaacccagcaaactttctttctttttttaaaaaatctattctttttttcaaarttcagtaacttgcccatcttttgtggtttgatttgttttgttttgtttttgtttttaagagatggggtcttgctctgtcacccaggctggaatgcagtgg

SEQ ID NO: 9520 - DNA, 201 bp, Homo sapiens
gttgaaagttcatctgtttggggttgaaaaatgggtccaaactgccaggtggggaaaaccctgggtgagaatctgttagaacttgccacctttatgtccartgcccctgggctggacagagaggccacgttctctgccactgcagctctgtgcgcttcacggaggggtgaggaggccggtgggggcagggtgggagttgta

SEQ ID NO: 9521 - DNA, 201 bp, Homo sapiens
cctgaagtgggctgtggaagaagaacacaaggccccccgccccttttttttgagactgagtcttgctctatcacccaggctggagtgcagtggcgtgatcytggctcactgcaacctctgcctcccgggttcaagtgattcttgtgcctcagcctcccaagtagctggaatcacaggtgtgtgccatcatgcccggctaag

SEQ ID NO: 9522 - DNA, 201 bp, Homo sapiens
aggtgggaggggctggtcggggggccgtgatgcaggctcagctgactgatgctttgctttgcctccagatcatgagcgtcttgttgttcatcgagcactcrgtagaggtggcccatggcaaggcgtcctgcaagctctcccagatgggctacctcaggatcggtaggtccaggggacgccggtggagtggcggggggagga

SEQ ID NO: 9523 - DNA, 201 bp, Homo sapiens
acccactccccttgctaacactcactctgtcttggaacccatgctgcctggggaggccgtttgccttgtgcagggtggctgtgggtgcttgtgcagaaacycaaagggttcagctagagaaatggagaaatggagcaggtggtccctgaagactctgagatcagtcaagattgttctggttgcctcctgagtgattttaga

SEQ ID NO: 9524 - DNA, 201 bp, Homo sapiens
gggaggctgaggcaggagaattgcttgaacctgggaggtggaggttgcagtgagccaagatcgcgccactgcgctctagcctgacagagtgagactctttwaaaaaaaaaaaggtaaagcattcaaatcatagtatttgaagaaggagtctctattgccctgacctcgtgcaggtaagttcacccatgtgcccagccccag

SEQ ID NO: 9525 - DNA, 201 bp, Homo sapiens
tttggaatgcgtccaccctgcctcaaatgccagcacccactccccttgctaacactcactctgtcttggaacccatgctgcctggggaggccgtttgcctkgtgcagggtggctgtgggtgcttgtgcagaaactcaaagggttcagctagagaaatggagaaatggagcaggtggtccctgaagactctgagatcagtca

SEQ ID NO: 9526 - DNA, 201 bp, Homo sapiens
gctggaatgcagtggtgccatcacagctcactgcagccttgaactcctgggttcaagagatcctcccacctcagcttcctgagtagctaggatcacaggcrcatgccaccatggccagctaattttaaatatttttttttgtagagacagggtcccactatgttgcccaggctggtctcaaacccttggcctcaagtgatt

SEQ ID NO: 9527 - DNA, 201 bp, Homo sapiens
gtcagattcaaggactctagttttgggaggaggaactcagaggttgtccttccgagctcctgccaatgcaagagctgagagaagcaaatcactctttgagygtccctgtaccctgtattttaggccttcaagctctgagactatgcacattcttagaaggacagtgtggcatgcaggggcgcctcacaggtagcaagtccc

SEQ ID NO: 9528 - DNA, 201 bp, Homo sapiens; identical to SEQ ID NO: 1076

SEQ ID NO: 9529 - DNA, 201 bp, Homo sapiens
tgtttgaccgggatgtgaggtcggccgcagacacagccccgattcttcccctggggcctggagggagcctgggccactcgaggggatgagaagtggggatstcccctttgtgcctccagtggggaggcaggggccgtgtcctctcagcttccagctcagtcaaaccacggccttctgcccaccaaagagaacttgagacct

SEQ ID NO: 9530 - DNA, 201 bp, Homo sapiens; identical to SEQ ID NO: 1077

SEQ ID NO: 9531 - DNA, 201 bp, Homo sapiens; identical to SEQ ID NO: 1079

SEQ ID NO: 9532 - DNA, 201 bp, Homo sapiens; identical to SEQ ID NO: 1066

SEQ ID NO: 9533 - DNA, 201 bp, Homo sapiens
agttggcctcccggagccgtgctgtgagtacccagcccccacctctcaccggacagcagagcccaggtctggcatgggagatgggaggggaccagacacgrgccctgtgctcaggctggggagggtaggagccctcttcctggctggtgtcttgacccagtctctgagtccctccacattgccccaagtttcttcctctgt

SEQ ID NO: 9534 - DNA, 201 bp, Homo sapiens; identical to SEQ ID NO: 1060

SEQ ID NO: 9535 - DNA, 201 bp, Homo sapiens; identical to SEQ ID NO: 1061

SEQ ID NO: 9536 - DNA, 201 bp, Homo sapiens
caaatccccaccagctggtaaaggtgatagcctcactcttctgcttaaagccgtcagtggctgctcatcacactagaataaaatggaaactcctcaccatrggatccagcctctgcccacctctctgacagcatctccctgcgattctccaccccacaccttgctccagccacactgacctcaccaaccctgtccctgtct

SEQ ID NO: 9537 - DNA, 201 bp, Homo sapiens
agtggggggttatcttcctgcaccccgaaagagtcctctctccttcccagaaagggcagggcctgggggctttcccataggctagctggcaacaggtgtgmtgataggaccttgagcatctggatggaaaaagagaagctgtggtccagatgtgtcaatagcccatgctggctgtcatctggacccagccatgggtgacga

SEQ ID NO: 9538 - DNA, 201 bp, Homo sapiens
tttggtacaatgagcacgtacttagaacggttttagatttacgaaaatattgcaaacacagtacagatagttcttgcgtcccccatgcctagttcctctaktgctaacgtctcaacgttagtgtggtgcgtttgttgcaatgggtgaatgaatattcgtgggctgttattaaagtcagtgcttcacccctatttccccagc

SEQ ID NO: 9539 - DNA, 201 bp, Homo sapiens
ttttcttgtttttgataatcttgacagttcgaggagtatttgtcaggcattttgtcaaatgttcttcaactggggtctctggtggttttctcatgattagwctgggaatgtgcttttgggaggaagaccacagaggtgatgtgccagtctcagaacatcgtactaagaaaaggttctgccaacttgacttaccactgttgc

SEQ ID NO: 9540 - DNA, 201 bp, Homo sapiens
ggattacaggcatgagccaccgagcccagtctagagaaatttcttaaattgggtctcttgggtcctggctttttgtcaacctgaagcacgttctaagtcgmtggtagaaagtggacacccccagaagacacttttgcccagaaatctctttcttcctgacccctcttccccagagtgcccggaattccactgtcagaaatg

SEQ ID NO: 9541 - DNA, 201 bp, Homo sapiens
ccgctgccccctgccccttcctgttattcacacccactggtggtgggcagtgctgggtgctgagagggtgggaggcgggtatgttaggcggtcccacctgmgttctggagatcttcacacataccttttggagaaccatgtttctccctgagattccctgggcaggtgacctcagttccctggtaacatgagcctccacgg

SEQ ID NO: 9542 - DNA, 201 bp, Homo sapiens
gaatgtacctgcaatcacatctcatcagcctgccttatgagggttacatgaggaacacacacattgggggtgcagcccatggtcagcactcagtcagtgcygctgggagtgaattgacacctgaggaaaggacatgtgcgctttttagcccccagcccccagtattatttcttctttggaaccaagttgaagaaaggaaga

SEQ ID NO: 9543 - DNA, 201 bp, Homo sapiens
attgggggtgcagcccatggtcagcactcagtcagtgccgctgggagtgaattgacacctgaggaaaggacatgtgcgctttttagcccccagcccccagkattatttcttctttggaaccaagttgaagaaaggaagagaaggatgattcatgccagtgagcgcccactgtggggtggcttgagggctgctgccagtcaa

SEQ ID NO: 9544 - DNA, 201 bp, Homo sapiens
gtgcgctttttagcccccagcccccagtattatttcttctttggaaccaagttgaagaaaggaagagaaggatgattcatgccagtgagcgcccactgtgkggtggcttgagggctgctgccagtcaaggacacagtctcccaaacctgcttttctcactctccccaactgttgtccttgaagagaccggggggctacatc

SEQ ID NO: 9545 - DNA, 201 bp, Homo sapiens
gattgtttgaccgggatgtgaggtcggccgcagacacagccccgattcttcccctggggcctggagggagcctgggccactcgaggggatgagaagtgggratctcccctttgtgcctccagtggggaggcaggggccgtgtcctctcagcttccagctcagtcaaaccacggccttctgcccaccaaagagaacttgaga

SEQ ID NO: 9546 - DNA, 201 bp, Homo sapiens
cctgtccccactccccctccccagctgccccgccccagctgtgacgaccttgtccctgcctgtctaaggggcaggaaggaagtgaggagggcagccagcarcttccccttctctgccctgctccaggcaccaggctctttccccttcagtgtctcagaggaggggacggcagcaccatggacccccgcttgtccactgtcc

SEQ ID NO: 9547 - DNA, 201 bp, Homo sapiens; identical to SEQ ID NO: 1063

SEQ ID NO: 9548 - DNA, 201 bp, Homo sapiens
aagcacagcctgacctgggcctttttccaggtctacatgttcaagtgcgtgtggcggtgctacagattgatcaagtgcatgaactcggtggaggagaagaraaactccaagatgctccagaaggtgagtgtggctgcaggtgggtgccagccctgtcactaactccctgtgccatttgggtcaagtttccttccctctctg

SEQ ID NO: 9549 - DNA, 201 bp, Homo sapiens
aagtgagggcctactatgtgccgctcagtaactgggactttaattgctgctcctcattcctcctccttgtatttgtcctccccagagctcctccaagttcyccctgatgacgctgcagctgctggacttctgcctgagcatcctgaccctctgcagctcctacatggaagtgcccacctatctcaacttcaagtccatgaa

SEQ ID NO: 9550 - DNA, 201 bp, Homo sapiens
cctgaagcacgttctaagtcgatggtagaaagtggacacccccagaagacacttttgcccagaaatctctttcttcctgacccctcttccccagagtgccyggaattccactgtcagaaatgcattgtctgggttaaaaaacttaacacctgctatgatttcaacagtgtcaaaacaggatacgtcaaaactgggcgagga

SEQ ID NO: 9551 - DNA, 201 bp, Homo sapiens
aattagctgggcatgatggcgggagcctgtagtccaagctacgcgggaggctgaggcaggagaattgcttgaacctgggaggtggaggttgcagtgagccragatcgcgccactgcgctctagcctgacagagtgagactctttaaaaaaaaaaaaggtaaagcattcaaatcatagtatttgaagaaggagtctctattg

SEQ ID NO: 9552 - DNA, 201 bp, Homo sapiens
aagtgatcatttggaggagaccctagcgaagccgggtggagggctagcaggtgagtgcctgaagtgggctgtggaagaagaacacaaggccccccgccccttttttttgagactgagtcttgctctatcacccaggctggagtgcagtggcgtgatcctggctcactgcaacctctgcctcccgggttcaagtgattcttg

SEQ ID NO: 9553 - DNA, 201 bp, Homo sapiens
gtatttgtcaggcattttgtcaaatgttcttcaactggggtctctggtggttttctcatgattagactgggaatgtgcttttgggaggaagaccacagagrtgatgtgccagtctcagaacatcgtactaagaaaaggttctgccaacttgacttaccactgttgctggtgactttgagcccccggctgaggttactcctt

SEQ ID NO: 9554 - DNA, 201 bp, Homo sapiens
gagttgtagcccctcctcagtgtcagaactgagttgttctcctcacctcaggggtgtgaaccccagcttctaaaagcaggaggcccccatggcccatcccrcccagagagtggctgaagggcctagcctggcctggccgagacttctctgttgccaacctggccccgaggcctccaggaagtgaggcttttattttgagcc

SEQ ID NO: 9555 - DNA, 201 bp, Homo sapiens
gacggggatgagtttgagaggcattgtcaaccttctggtggtgtcagtttttttgtggaatggcagatttcttcatggatgttatttgctccttatcagayccccaagcagttggtgcagtgtaattcacagaaatggaaagcgagctcctgttcacacttgagggcagaggcccagagacatcaagtgactttcctgagg

SEQ ID NO: 9556 - DNA, 201 bp, Homo sapiens
tagcacatagcaaatatccaagacctgccagtcattatcatcatcattttgccagaggtgggggtttgggtcccatgaccccaggttggaattgcaggtcrttcttgaccatactcagccctcatctctctgtctctcccaggtggtcctgccgtcctacgaggaagccctgtctttgccatcgaagaccccagagggggg

SEQ ID NO: 9557 - DNA, 201 bp, Homo sapiens
tactcctcacagtagcctcctaaggaagttactagtattatccccatcttgcagatgggaaaaccgaggcacatagaagtcaagtagcttgcccagggtcacatagctggagagaggaagacccaggattctgaacatgggctctctgtgtgtaaaggccactcttttgtctgagatgccctactgacctggcatgccatc

SEQ ID NO: 9558 - DNA, 201 bp, Homo sapiens
cagttcttctgaaggtatatggactgagaatgttttcccaaggaaaatggtgcactgttttcaaaataagggggacttgatgctgaataggcaaaggcaartatgtccactacagggctgggaactgcacctatctcatgcaggcaatgtctagcacatagcaaatatccaagacctgccagtcattatcatcatcatttt

SEQ ID NO: 9559 - DNA, 201 bp, Homo sapiens
ccccacaccttgctccagccacactgacctcaccaaccctgtccctgtctcaggccgattcctcattgctctcaggccactccccagggatgccttcctcrgcctcaccctggctgaagtggaccccagcctgcacctccagcccagcaccctctgtcgcatcctcctgtgctatgtgtgatgttctgcttttgtctttgt

SEQ ID NO: 9560 - DNA, 201 bp, Homo sapiens
gttctggtagtctaagattcattcactcactcattcatttattcagtatttactgcctctcactctttgctagtctcatatcgattccaggaggcgcagaraaaactaagatgccacctctgccttagaggagtgtacagttcagacacatagatacaattacaacttggtgtgaagcacagggacaataagcacagagga

SEQ ID NO: 9561 - DNA, 201 bp, Homo sapiens
cttagctgggttcttctgactcagggactctggtggggctgcaccagagatggtacctggggctgtggacaactgagggcttgattagatctgaaggatgmactcctggtggctcactcacagggcgtgggctctttgcctaattcctcatcctgtggacttgtagtagtgctgcttgagtgctctcctgacatggctgct

SEQ ID NO: 9562 - DNA, 201 bp, Homo sapiens
tggcttcccctgcgggagtgatgtaagagataagcaaggaggaaaggcagtgtcttttaagacttctatcacttctgccacattctgttagttagaagtgmgttgctaagtccagcccacactcaaggggagaggaaataaacaccacctttagaagggaggcgtctcaaagaatgtgtggtaatatttgcaaatgaccac

SEQ ID NO: 9563 - DNA, 201 bp, Homo sapiens
atagcaagattctgtctctacaaaacataaaaaaaaaaaagttggatgtggtggcgtgtgcctgtagtcccagctactagggaggctgaagcgggaggatygcttgagcctgggaggttgaggctgcagtgggccataatcatgccactgcactccagcctaggcgacagagtgagaatctctctctaaaacaaaaaacaa

SEQ ID NO: 9564 - DNA, 201 bp, Homo sapiens
cccctgcatcagtcattggtttcaagctgcccctaggggagggaatgtaacctcccaggtattagtggattaggtggtccctgtcagccaaaatgatcttstagagaagagcataggtgtggcccatgggcagctgacacctgccagctggggatgggccggtgcgccagcctgggaagcagatctggagatagtagccac

SEQ ID NO: 9565 - DNA, 201 bp, Homo sapiens
gcacagagcccatgtgtaaagagctgatttcaattttacctgcaaaatcagaaaaatatgggactcatgttagaacctgtctctcaagactggcgcgaggwtgacacgagagagtgtatggtcagtcggccctccctatccgcaggttccacatcgtggattgcagattgaaaatactcagatgcagagcccgtgatacag

SEQ ID NO: 9566 - DNA, 201 bp, Homo sapiens
tggggcagggaaccatgcccatttgctggctgtgtggccttgaacaggttacttcacgtctctgtgtgtctgtggtttaggccaggttccctggagttggrgcttgggaggaagattcttgtgctggtgatttattgagggagccctctcaggaagaaacttgtcaggagtgaggaaggcaggttcgagaaaaggaggaag

SEQ ID NO: 9567 - DNA, 201 bp, Homo sapiens
catgcaggggacacttgacggtgctgggcctacctttcagaaccgggagaagtacctgctgcccttcctgtccctgcaaatcatggactatctcctgtgcmtgctcaccctgctgggctcctacattgagctgcccgcctacctcaagttggcctcccggagccgtgctgtgagtacccagcccccacctctcaccggaca

SEQ ID NO: 9568 - DNA, 201 bp, Homo sapiens; identical to SEQ ID NO: 1086

SEQ ID NO: 9569 - DNA, 201 bp, Homo sapiens; identical to SEQ ID NO: 1087

SEQ ID NO: 9570 - DNA, 201 bp, Homo sapiens
gtgccctcgaggcctcttaattattactggcttgctcatagtgcatgttctttgtgggctaactctagcgtcaataaaaatgttaagactgagttgcagcygggcatggtggctcatgcctgtaatcccagcattctaggaggctgaggcaggaggatcgcttgagcccaggagttcgagaccagcctgggcaacatagtg

SEQ ID NO: 9571 - DNA, 201 bp, Homo sapiens; identical to SEQ ID NO: 1089

SEQ ID NO: 9572 - DNA, 201 bp, Homo sapiens
tacagagaacaataatattgggtggtgagcatctgtgtgggggttggggtgggataggggatacggggagagtggagaaaaagggggcacagggttaatgrgaagtccaggatccccctctacatttaaagttggtttaagttggctttaattaatagcaactcttaagataatcagaattttcttaaccttttagcctta

SEQ ID NO: 9573 - DNA, 201 bp, Homo sapiens; identical to SEQ ID NO: 1093

SEQ ID NO: 9574 - DNA, 201 bp, Homo sapiens
acccgtgagcccatagttaaaactctttagacaacaggttgtttccgtttacagagaacaataatattgggtggtgagcatctgtgtgggggttggggtgygataggggatacggggagagtggagaaaaagggggcacagggttaatgtgaagtccaggatccccctctacatttaaagttggtttaagttggctttaat

SEQ ID NO: 9575 - DNA, 201 bp, Homo sapiens
taagataaggaaagggtcacagtttggaatgagtttcagacggttataacatcaaagatacaaaacatgattgtgagtgaaagactttaaagggagcaatmgtattttaataactaacaatccttacctctcaaaagaaagatttgcagagagatgagtcttagctgaaatcttgaaatcttatcttctgctaaggagaac

SEQ ID NO: 9576 - DNA, 201 bp, Homo sapiens
cagctcatctggccagaagagctgagacatccgttcccctacaagaaactctccccggtaagtaacctctcagctgcttggcctgttagttagcttctgaratgagtaaaagactttacaggaaacccatagaagacatttggcaaacaccaagtgctcatacaattatcttaaaatataatctttaagataaggaaaggg

SEQ ID NO: 9577 - DNA, 201 bp, Homo sapiens; identical to SEQ ID NO: 1099

SEQ ID NO: 9578 - DNA, 201 bp, Homo sapiens
ttctaacagattctgtgtagtgggatgagcagagaacaaaaacaaaataatccagtgagaaaagcccgtaaataaaccttcagaccagagatctattctcyagcttattttaagctcaacttaaaaagaagaactgttctctgattcttttcgccttcaatacacttaatgatttaactccaccctccttcaaaagaaaca

SEQ ID NO: 9579 - DNA, 201 bp, Homo sapiens; identical to SEQ ID NO: 1101

SEQ ID NO: 9580 - DNA, 201 bp, Homo sapiens; identical to SEQ ID NO: 1103

SEQ ID NO: 9581 - DNA, 201 bp, Homo sapiens
ctttatattttctaacagattctgtgtagtgggatgagcagagaacaaaaacaaaataatccagtgagaaaagcccgtaaataaaccttcagaccagagayctattctctagcttattttaagctcaacttaaaaagaagaactgttctctgattcttttcgccttcaatacacttaatgatttaactccaccctccttca

SEQ ID NO: 9582 - DNA, 201 bp, Homo sapiens; identical to SEQ ID NO: 1106

SEQ ID NO: 9583 - DNA, 201 bp, Homo sapiens
tgtatctataaaaataaacaaaattagcttggtgtggtggcgcctgtagtccccagccacttggaggggtgaggtgagaggattgcttgagcccgggatgrtccaggctgcagtgagccatgatcgtgccactgcactccagcctgggcgacagagtgagaccctgtctcacaacaacaacaacaacaacaaaaaggctga

SEQ ID NO: 9584 - DNA, 201 bp, Homo sapiens
ggatgaactagaacattttctcgatgattcgctgtccttgttatgattatgttactgagctctgttgtagcacagacatatgtccctatatggggcggggktgggggtgtcttgatcgctgggctatttctatactgttctggcttttcccaagcagtcatttctttctattctccaagcaccagcaattagctttacctt

SEQ ID NO: 9585 - DNA, 201 bp, Homo sapiens
actcagaaactacaaacacaaacttcacagaaaatgtgaggattttacaattggctgttgtcatctatgaccttccctgggacttgggcacccggccattwcactctgactacatcatgtcaccaaacatctgatggtcttgccttttaattctcttttcgaggactgagagggagggtagcatggtagttaagagtgcag

SEQ ID NO: 9586 - DNA, 201 bp, Homo sapiens; identical to SEQ ID NO: 1084

SEQ ID NO: 9587 - DNA, 201 bp, Homo sapiens
agagtgaaaatccccactaagatcctgggtccagaaaaagatgggaaacctgtttagctcacccgtgagcccatagttaaaactctttagacaacaggttktttccgtttacagagaacaataatattgggtggtgagcatctgtgtgggggttggggtgggataggggatacggggagagtggagaaaaagggggcacag

SEQ ID NO: 9588 - DNA, 201 bp, Homo sapiens
tgtatgacaactcttaattgtggcaactcagaaactacaaacacaaacttcacagaaaatgtgaggattttacaattggctgttgtcatctatgaccttcyctgggacttgggcacccggccatttcactctgactacatcatgtcaccaaacatctgatggtcttgccttttaattctcttttcgaggactgagagggag

SEQ ID NO: 9589 - DNA, 201 bp, Homo sapiens; identical to SEQ ID NO: 1085

SEQ ID NO: 9590 - DNA, 201 bp, Homo sapiens; identical to SEQ ID NO: 1088

SEQ ID NO: 9591 - DNA, 201 bp, Homo sapiens; identical to SEQ ID NO: 1091

SEQ ID NO: 9592 - DNA, 201 bp, Homo sapiens; identical to SEQ ID NO: 1090

SEQ ID NO: 9593 - DNA, 201 bp, Homo sapiens
cacagggtggaacaagatggattatcaagtgtcaagtccaatctatgacatcaattattatacatcggagccctgccaaaaaatcaatgtgaagcaaatckcagcccgcctcctgcctccgctctactcactggtgttcatctttggttttgtgggcaacatgctggtcatcctcatcctgataaactgcaaaaggctgaa

SEQ ID NO: 9594 - DNA, 201 bp, Homo sapiens
ccctacaagaaactctccccggtaagtaacctctcagctgcttggcctgttagttagcttctgagatgagtaaaagactttacaggaaacccatagaagayatttggcaaacaccaagtgctcatacaattatcttaaaatataatctttaagataaggaaagggtcacagtttggaatgagtttcagacggttataacat

SEQ ID NO: 9595 - DNA, 201 bp, Homo sapiens
tgatatcctttattctttatattttctaacagattctgtgtagtgggatgagcagagaacaaaaacaaaataatccagtgagaaaagcccgtaaataaacyttcagaccagagatctattctctagcttattttaagctcaacttaaaaagaagaactgttctctgattcttttcgccttcaatacacttaatgatttaac

SEQ ID NO: 9596 - DNA, 201 bp, Homo sapiens; identical to SEQ ID NO: 1096

SEQ ID NO: 9597 - DNA, 201 bp, Homo sapiens; identical to SEQ ID NO: 1095

SEQ ID NO: 9598 - DNA, 201 bp, Homo sapiens; identical to SEQ ID NO: 1097

SEQ ID NO: 9599 - DNA, 201 bp, Homo sapiens
agtcataaagaacctgaacttgaccatatacttatgtcatgtggaaaatttctcatagcttcagatagattatatctggagtgaagaatcctgccacctaygtatctggcatagtgtgagtcctcataaatgcttactggtttgaagggcaacaaaatagtgaacagagtgaaaatccccactaagatcctgggtccagaa

SEQ ID NO: 9600 - DNA, 201 bp, Homo sapiens
aggttgtttccgtttacagagaacaataatattgggtggtgagcatctgtgtgggggttggggtgggataggggatacggggagagtggagaaaaaggggrcacagggttaatgtgaagtccaggatccccctctacatttaaagttggtttaagttggctttaattaatagcaactcttaagataatcagaattttctta

SEQ ID NO: 9601 - DNA, 201 bp, Homo sapiens
actgtatatagtatagtcataaagaacctgaacttgaccatatacttatgtcatgtggaaaatttctcatagcttcagatagattatatctggagtgaagratcctgccacctatgtatctggcatagtgtgagtcctcataaatgcttactggtttgaagggcaacaaaatagtgaacagagtgaaaatccccactaaga

SEQ ID NO: 9602 - DNA, 201 bp, Homo sapiens; identical to SEQ ID NO: 1104

SEQ ID NO: 9603 - DNA, 201 bp, Homo sapiens
gtcatctatgaccttccctgggacttgggcacccggccatttcactctgactacatcatgtcaccaaacatctgatggtcttgccttttaattctcttttygaggactgagagggagggtagcatggtagttaagagtgcaggcttcccgcattcaaaatcggttgcttactagctgtgtggctttgagcaagttactcac

SEQ ID NO: 9604 - DNA, 201 bp, Homo sapiens; identical to SEQ ID NO: 1107

SEQ ID NO: 9605 - DNA, 201 bp, Homo sapiens; identical to SEQ ID NO: 1108

SEQ ID NO: 9606 - DNA, 201 bp, Homo sapiens; identical to SEQ ID NO: 1109

SEQ ID NO: 9607 - DNA, 201 bp, Homo sapiens
  misc_feature (1)...(201): n = A,T,C or G, or insertion/deletion polymorphism (see Tables 1-2)
gattacagcgatgccagagagaatatccagagattctttggccatgrtgcggaggantcgctggcngatcaggctgccaatraatggggcaggagtggcaragaccccaatcacttccgacctgctggcctgcctgaganatactgagcttcctcttcactctgctctcaggagatctggctgtgaggccctcagggcagg

SEQ ID NO: 9608 - DNA, 201 bp, Homo sapiens
gaagccaattacatcggctcagacaaatacttccatgctcgggggaactatgatgctgccaaaaggggacctgggggtgcctgggctgcagaagtgatcasgtaactggagctcctgggacgttagggctgggtgagcagagcttgcctgccttggacagtcaggagggagacgagctccttgtggagaagttagaggctg

SEQ ID NO: 9609 - DNA, 201 bp, Homo sapiens
actctgacatgagagaagccaattacatcggctcagacaaatacttccatgctcgggggaactatgatgctgccaaaaggggacctgggggtgcctgggcygcagaagtgatcaggtaactggagctcctgggacgttagggctgggtgagcagagcttgcctgccttggacagtcaggagggagacgagctccttgtgga

SEQ ID NO: 9610 - DNA, 201 bp, Homo sapiens
cctgggacgttagggctgggtgagcagagcttgcctgccttggacagtcaggagggagacgagctccttgtggagaagttagaggctgcggcccctcctcytcttgccctctctctgcctctgtgctcagtgtgaggtctgagtggatggtaggagtgagtgattcctcatcctccctctctgggtgctgttcatccagcc

SEQ ID NO: 9611 - DNA, 201 bp, Homo sapiens
aatgtgcttctcaacccatggtatccaaggctgctatgatcacaggctgaaagcttgaagtcagtggaagatttgtccttcctcattcccctctaaggtgktgttggagtctttatgttctcctgatgtcccttctgcctttcctttcctttccaggggctcgggacatgtggagagcctactctgacatgagagaagcca

SEQ ID NO: 9612 - DNA, 201 bp, Homo sapiens
tagcagtggctcttcaccagggcacttgaagaagccaactaggataaaggaatgtgcttctcaacccatggtatccaaggctgctatgatcacaggctgawagcttgaagtcagtggaagatttgtccttcctcattcccctctaaggtgttgttggagtctttatgttctcctgatgtcccttctgcctttcctttcctt

SEQ ID NO: 9613 - DNA, 201 bp, Homo sapiens
caaatacttccatgctcgggggaactatgatgctgccaaaaggggacctgggggtgcctgggctgcagaagtgatcaggtaactggagctcctgggacgtyagggctgggtgagcagagcttgcctgccttggacagtcaggagggagacgagctccttgtggagaagttagaggctgcggcccctcctcctcttgccctc

SEQ ID NO: 9614 - DNA, 201 bp, Homo sapiens
actcgctgaactgagaccaagacctccaagattatggcttaggaatctgcattttttttttttttttgagacaagagtctcgctctgttgccaggctagastgcaatggtggaatcatagctcattgtaacctcaaactcctgggctcaagtgatcttcctgcctcagcctcccaagtagtgaggacaacaggagtgtgcc

SEQ ID NO: 9615 - DNA, 201 bp, Homo sapiens
agcttgaagtcagtggaagatttgtccttcctcattcccctctaaggtgttgttggagtctttatgttctcctgatgtcccttctgcctttcctttccttkccaggggctcgggacatgtggagagcctactctgacatgagagaagccaattacatcggctcagacaaatacttccatgctcgggggaactatgatgctg

SEQ ID NO: 9616 - DNA, 201 bp, Homo sapiens
gacaaatacttccatgctcgggggaactatgatgctgccaaaaggggacctgggggtgcctgggctgcagaagtgatcaggtaactggagctcctgggacrttagggctgggtgagcagagcttgcctgccttggacagtcaggagggagacgagctccttgtggagaagttagaggctgcggcccctcctcctcttgccc

SEQ ID NO: 9617 - DNA, 201 bp, Homo sapiens
gactgcaggttaggaatttgagaccagcctgggcaacatggtgaaactcccactgtactaaaaattttaaaaattactcaaacatattggcaaacaactgyagtcccagctacttgggaggttgagatgcaaggatcacttaaacctgggaggctgaggctgcagtgagccatgattgcaccactgcactccagctcaggc

SEQ ID NO: 9618 - DNA, 201 bp, Homo sapiens
agagcctactctgacatgagagaagccaattacatcggctcagacaaatacttccatgctcgggggaactatgatgctgccaaaaggggacctgggggtgyctgggctgcagaagtgatcaggtaactggagctcctgggacgttagggctgggtgagcagagcttgcctgccttggacagtcaggagggagacgagctcc

SEQ ID NO: 9619 - DNA, 201 bp, Homo sapiens
  misc_feature (1)...(201): n = A,T,C or G, or insertion/deletion polymorphism (see Tables 1-2)
ctggcctgattattaatctccttcttgcctgccttgattacagcgatgccagagagaatatccagagattctttggccatggtgcggaggactcgctggcngatcaggctgccaatgaatggggcaggagtggcaaagaccccaatcacttccgacctgctggcctgcctgagaaatactgagcttcctcttcactctgct

SEQ ID NO: 9620 - DNA, 201 bp, Homo sapiens
atgagagaagccaattacatcggctcagacaaatacttccatgctcgggggaactatgatgctgccaaaaggggacctgggggtgcctgggctgcagaagrgatcaggtaactggagctcctgggacgttagggctgggtgagcagagcttgcctgccttggacagtcaggagggagacgagctccttgtggagaagttag

SEQ ID NO: 9621 - DNA, 201 bp, Homo sapiens
ctggggagctgctaaacagattagagagtcgaggattgttgtcagttactcagagaaagaacaatcatcctttccaggagcacctgagctgtttgttttgmgtagaagatgcaaaataaggcctgcaatgggtataaaatgtccctcagcataaatcgcataggagtatgactaaggctgttgactcttctgtcttctttc

SEQ ID NO: 9622 - DNA, 201 bp, Homo sapiens
gctgcagaagtgatcaggtaactggagctcctgggacgttagggctgggtgagcagagcttgcctgccttggacagtcaggagggagacgagctccttgtrgagaagttagaggctgcggcccctcctcctcttgccctctctctgcctctgtgctcagtgtgaggtctgagtggatggtaggagtgagtgattcctcatc

SEQ ID NO: 9623 - DNA, 201 bp, Homo sapiens
  misc_feature (1)...(201): n = A,T,C or G, or insertion/deletion polymorphism (see Tables 1-2)
ggccatggtgcggaggactcgctggctgatcaggctgccaatgaatggggcaggagtggcaaagaccccaatcacttccgacctgctggcctgcctgaganatactgagcttcctcttcactctgctctcaggagatctggctgtgaggccctcagggcagggatacaaagcggggagagggtacacaatgggtatctaat

SEQ ID NO: 9624 - DNA, 201 bp, Homo sapiens
  misc_feature (1)...(201): n = A,T,C or G, or insertion/deletion polymorphism (see Tables 1-2)
tattgctcactggcctgattattaatctccttcttgcctgccttgattacagcgatgccagagagaatatccagagattctttggccatggtgcggaggantcgctggctgatcaggctgccaatgaatggggcaggagtggcaaagaccccaatcacttccgacctgctggcctgcctgagaaatactgagcttcctctt

SEQ ID NO: 9625 - DNA, 201 bp, Homo sapiens
gagattagaggttgaggatccttcagtagttcctataccaagccataagttgtgctgcatctgcaggtagggtcagggagctccgctgaacagatgtggargacatcagagtgggaggaaaaggaagcaagtcgtgtggggagagaagacccagcctgcaatgatgactggttaactactgtttcttacctaatacacact

SEQ ID NO: 9626 - DNA, 201 bp, Homo sapiens
gagggtgggctattgctcactggcctgattattaatctccttcttgcctgccttgattacagcgatgccagagagaatatccagagattctttggccatgrtgcggaggactcgctggctgatcaggctgccaatgaatggggcaggagtggcaaagaccccaatcacttccgacctgctggcctgcctgagaaatactga

SEQ ID NO: 9627 - DNA, 201 bp, Homo sapiens
ctgcagggactttccccagggaccacatccagcttttcttccctcccaagaaaccagcagggaaggctcagtataaatagcagccaccgctccctggcagrcagggacccgcagctcagctacagcacagatcaggtgaggagcacaccaaggagtgatttttaaaacttactctgttttctctttcccaacaagattatc

SEQ ID NO: 9628 - DNA, 201 bp, Homo sapiens
ctggtttgttctgtttccattcttccttctccagccttcttgacaagagctgggaactaacgtgcctcaagcccccacaaggaccacagcattttctcatytagtttcagaatgactctgtgacgcaatcttcctctcttggaaggtgagaaagctgatcttggaaggtgagaaagctgagacttagagcagctgaagcca

SEQ ID NO: 9629 - DNA, 201 bp, Homo sapiens
aagccaactaggataaaggaatgtgcttctcaacccatggtatccaaggctgctatgatcacaggctgaaagcttgaagtcagtggaagatttgtccttcytcattcccctctaaggtgttgttggagtctttatgttctcctgatgtcccttctgcctttcctttcctttccaggggctcgggacatgtggagagcctac

SEQ ID NO: 9630 - DNA, 201 bp, Homo sapiens
tctccttcttgcctgccttgattacagcgatgccagagagaatatccagagattctttggccatggtgcggaggactcgctggctgatcaggctgccaatraatggggcaggagtggcaaagaccccaatcacttccgacctgctggcctgcctgagaaatactgagcttcctcttcactctgctctcaggagatctggct

SEQ ID NO: 9631 - DNA, 201 bp, Homo sapiens
ccaacactctgcccacccttcttctactaccttccagtgagctcctcgaaagaagggtctgcggtgaggatgcccctttatctctgcctatttccttcccrttacaaaaacttgaaacctgcctttcccatgttgatttcactttattctcatctttacccatggggtatgcctcctgcaattcctcctagacaatagaat

SEQ ID NO: 9632 - DNA, 201 bp, Homo sapiens
atacttccatgctcgggggaactatgatgctgccaaaaggggacctgggggtgcctgggctgcagaagtgatcaggtaactggagctcctgggacgttagrgctgggtgagcagagcttgcctgccttggacagtcaggagggagacgagctccttgtggagaagttagaggctgcggcccctcctcctcttgccctctct

SEQ ID NO: 9633 - DNA, 201 bp, Homo sapiens
gttagaggctgcggcccctcctcctcttgccctctctctgcctctgtgctcagtgtgaggtctgagtggatggtaggagtgagtgattcctcatcctcccyctctgggtgctgttcatccagcctaggggtgcccagcctggctgaatggggtggtgcccagtgttttcatccctccttccttggcctttctgggctcctc

SEQ ID NO: 9634 - DNA, 201 bp, Homo sapiens
gattagggccctgccttttttggttttgtttctgttttcttttttttgagacagagtctcactctgtcacccaggctggagtacagtggcttgatctcgastcattgcaacccctgcttcctgggttcaagaaattgtcgtgcctcagcctcccgaggtagcttggattacaggcatgtggcaccatgcctggctaatttt

SEQ ID NO: 9635 - DNA, 201 bp, Homo sapiens
tttcagaggtctagcacaagaagtaaaatttttttttaaatctttgcatttcctcagagcccacaaacatgcatgtgtcttagtggctgcccatgctctgrctgaggagagcaaaccgtgccatattctctgcaggcctttaggagagagtgaaaactcctacaagagtgggaaggtagataagagaagatcctttataat

SEQ ID NO: 9636 - DNA, 201 bp, Homo sapiens
tgaccaggtcccgctgccttgatggattatacacttgacctcagtgtgacaacagtgaccgactactactaccctgatatcttctcaagcccctgtgatgsggaacttattcagacaaatggcaagttgctccttgctgtcttttattgcctcctgtttgtattcagtcttctgggaaacagcctggtcatcctggtcctt

SEQ ID NO: 9637 - DNA, 201 bp, Homo sapiens; identical to SEQ ID NO: 1153

SEQ ID NO: 9638 - DNA, 201 bp, Homo sapiens
aaaagaataaactgatgaatatcatgcagatatatctctaaaacaataagcaaaatacaaagggaaaaacaatatatcatttatgtaagttaaaacaatayatcatttatgtaagttaaaacacacaaaaatatatattgtttatggatatatataaatatgtaaaagtacagggggaaattgtttggaatgatacatacc

SEQ ID NO: 9639 - DNA, 201 bp, Homo sapiens; identical to SEQ ID NO: 1149

SEQ ID NO: 9640 - DNA, 201 bp, Homo sapiens; identical to SEQ ID NO: 1150

SEQ ID NO: 9641 - DNA, 201 bp, Homo sapiens; identical to SEQ ID NO: 1151

SEQ ID NO: 9642 - DNA, 201 bp, Homo sapiens; identical to SEQ ID NO: 1152

SEQ ID NO: 9643 - DNA, 201 bp, Homo sapiens
cgaaagtcgtaaaaacaggaaaaaatgaggggacatttggtgaggtaccaagatgtgagactgtttatattgtggctcgtttaatttttagaacctcaaaygtgtcggtttctccagtgtcacctttgtttttcctttgtaaacagacaagtggacagaaaagtaggtagatagaacggctgccagtccccgccacccaca

SEQ ID NO: 9644 - DNA, 201 bp, Homo sapiens
tcgtaaaaacaggaaaaaatgaggggacatttggtgaggtaccaagatgtgagactgtttatattgtggctcgtttaatttttagaacctcaaacgtgtcsgtttctccagtgtcacctttgtttttcctttgtaaacagacaagtggacagaaaagtaggtagatagaacggctgccagtccccgccacccacagcccag

SEQ ID NO: 9645 - DNA, 201 bp, Homo sapiens
gcaggagaatctcttgaacccaggaggcggagcttgcagtgacccgagatcatgccattgcactccatcctgggtgacagagtgagactccatctcaaatwaaaaaaaaaaaaaagcaagcagaagggaaaaccatcctttcttcaggtaactcaaattttagaccaaggagtcacatttgtatggaactgaaatgtggct

SEQ ID NO: 9646 - DNA, 201 bp, Homo sapiens
tgggatgtcctgtggtctttcctggacagtaagctctttggtaccatgtcccctcctgtcccctcttgtgtcacccagttgggcctcagcaggcccttggkccccctatggcagtgggtggggggaccgtctgctcccacctgggacctgtgctcagtcccccgcccctccacagcactgcttcatgatgccccagtccct

SEQ ID NO: 9647 - DNA, 201 bp, Homo sapiens
gggatgtcctgtggtctttcctggacagtaagctctttggtaccatgtcccctcctgtcccctcttgtgtcacccagttgggcctcagcaggcccttgggycccctatggcagtgggtggggggaccgtctgctcccacctgggacctgtgctcagtcccccgcccctccacagcactgcttcatgatgccccagtccctg

SEQ ID NO: 9648 - DNA, 201 bp, Homo sapiens
gttccagagcttgctgggcctgctcctggctggcggcctcctgggccgccctgggtgtggcttcaccttgcagagcagcttgcttcaacctgcgggactcyggcttggccatcgggtttccactcgaggacggtgaccaacctgcagctcctctgccggtggcggcactcgagtgtcccctcacaccccctgtggccttgc

SEQ ID NO: 9649 - DNA, 201 bp, Homo sapiens
acctaggccgaggtgagtcacagccctggggagggcgcatggccacggtgttctcaggaagcaaaggggactgtggggtcagggctctttagagcagaccrcaggtaaaacagtaagtagaacttgggggtttcttgagtaatgagccacttgtttttcttgatttaaaaaactgactttaaagaatgctaataaatccgc

SEQ ID NO: 9650 - DNA, 201 bp, Homo sapiens; identical to SEQ ID NO: 1175

SEQ ID NO: 9651 - DNA, 201 bp, Homo sapiens
gctgagcctgcagattgggtttcttgtgcctgtgggatgtcctgtggtctttcctggacagtaagctctttggtaccatgtcccctcctgtcccctcttgygtcacccagttgggcctcagcaggcccttgggccccctatggcagtgggtggggggaccgtctgctcccacctgggacctgtgctcagtcccccgcccct

SEQ ID NO: 9652 - DNA, 201 bp, Homo sapiens
ttttgagacggagtctcactctgtcgcccaggctggagtgcagtggcgcgatctcggctcactgcaagctccgcctcccaggttcacgccattctcctgcytcagcctctggattagctgggactacaggcacccgccaccacgcctggctaattttctgtatttttaatagagacgggttttcactgtgttagccaggat

SEQ ID NO: 9653 - DNA, 201 bp, Homo sapiens
ccagcgtccagacaaagggacagtggattctggtgtccagacaaggggaaggtagtggcgcccaagcaggggtgcttacaaccctgaagcccaagaggggktgttgcagagtgtcagcagccctgttactcccattgccctgctccaggctatagctctggggctggctccgtccccgctgcttccctttgctgcctcctg

SEQ ID NO: 9654 - DNA, 201 bp, Homo sapiens
gccgcagcaagcactggggtgaggctgcacctaacggccatgtctcactaacagctgtctctgcttggaggtgccctgcccatgtttgagctggtggagcwgcagccttcacatctggcctgccccgacgtcctgaacctgtccctaggtgagagctgccaagtccaggtggggtccctcggaggtacgatctgtgccctt

SEQ ID NO: 9655 - DNA, 201 bp, Homo sapiens
aaaaatacaaaaattaggcatgacggtgcatgcctgtagtcccagctactcaggaggctgaggtgggaggatcccttgaggccggaagggggaggttgcartgagctgagatcacaccactgcactccaccttgggtgacagagccagacccttgggtgacagagccagaaggaacgtttgggaatggaatcatcgtgttg

SEQ ID NO: 9656 - DNA, 201 bp, Homo sapiens; identical to SEQ ID NO: 1227

SEQ ID NO: 9657 - DNA, 201 bp, Homo sapiens
caggatggccaggaagggtctcactctgaaggtttaagttttgacgaagacttaaagcagtgtaggaggaagggcaggtagcaagagcctggtgtggctcrggtgcagcgggtggcggtgggagaagcaggagctgaggatagaaaggtgacttaggctcagtgtagtggggccttgccagctcatagtgaggactcggtg

SEQ ID NO: 9658 - DNA, 201 bp, Homo sapiens
atgcctgtagtcccagctactcaggaggctgaggtgggaggatcccttgaggccggaagggggaggttgcaatgagctgagatcacaccactgcactccascttgggtgacagagccagacccttgggtgacagagccagaaggaacgtttgggaatggaatcatcgtgttggtcgatctgcagatgttagtgattgtgag

SEQ ID NO: 9659 - DNA, 201 bp, Homo sapiens
ggttctcaccccacttggaaaactggtggctgtgccccatttcatgggtgaggagactgaggctggaagaagtccaggcctgtgtctgtcctgtagctatygaccaggctctcagactccagaaacaaacctcagtaggaatcagaagtgttggccgggcgcggtctgcctgtagctatcgagcaggctgtcagactccag

SEQ ID NO: 9660 - DNA, 201 bp, Homo sapiens
tcagtagaaatcagaagtgtcggccggttgcggtggctcatgcctgtaatcccagcactttcggaagctgatgtgggcggatcatctgagatgaggagttygagaccagcctgaccaacatgggagaaacccatctctactaaaaatacaaaattagccaggcgtggtggcacacacctgtaatcccagctactcgggagg

SEQ ID NO: 9661 - DNA, 201 bp, Homo sapiens; identical to SEQ ID NO: 1173

SEQ ID NO: 9662 - DNA, 201 bp, Homo sapiens
gcctgcctcaaagttggcaaaacccacagcgtctcagagctgcgttcatgttctagttcctgcctctgtgccagtgagaccagaaaaccaggccactcaamagcctcttgcgtgtgctctctatgaatggaggctggggcaagggcaggacccctgggcctcaggcgagaagaagcagatttaccctcagctttcttcctg

SEQ ID NO: 9663 - DNA, 201 bp, Homo sapiens
caccccaggtgaccacttgaggccactggtggaaaagcagcatgccctggggttcattttcagcctggtcgcgggcggcctcctgtgtgcccctttccctsatggtctggtgccctcggctccctccccacctcctgcccactgcttctcagtgtgatgtgggtgcagtgggtctgaaatgcggcctcctctgtccctttc

SEQ ID NO: 9664 - DNA, 201 bp, Homo sapiens; identical to SEQ ID NO: 1174

SEQ ID NO: 9665 - DNA, 201 bp, Homo sapiens; identical to SEQ ID NO: 1176

SEQ ID NO: 9666 - DNA, 201 bp, Homo sapiens
cgtgtgtctggatgtgagcgtgtgtgggcgcgtgctgagtgtgcatggatgagtgtgagccatggtgagtgtgtccccctcacacctacatttaaacacaygggcggcccctccacccacccctgcaccaccttcgtcacacccacatttaaacacgggcggcccctccacccacccactcctgcaccaccttttgttttc

SEQ ID NO: 9667 - DNA, 201 bp, Homo sapiens
tcagcagcactggatgtcatcaagcgtttgaatttctgcctttctgataattggaaaatgcgttgttttgtttaactttgcattttctggatgacttacgrgggtcagtgtcttcatatgtttgtcagacattccttttgctccgtgactgacttgttcatgtgttttgcccattttgaggaggttgtcgggacatttcac

SEQ ID NO: 9668 - DNA, 201 bp, Homo sapiens; identical to SEQ ID NO: 1155

SEQ ID NO: 9669 - DNA, 201 bp, Homo sapiens
cattttctggatgacttacgggggtcagtgtcttcatatgtttgtcagacattccttttgctccgtgactgacttgttcatgtgttttgcccattttgagraggttgtcgggacatttcactctccagtaaatgtggcccttggcgttactgagtcctaagaggtgtgtgttgccccaggtggagctgatggaggagggag

SEQ ID NO: 9670 - DNA, 201 bp, Homo sapiens
gaagggatggaagctctttaacttttatgaagttattggtaggttggaggagagaaacgtgacgtgttcatcacagtatacgtatcttttttgtttttgtyttcaatttagtaaccagtagattctccaagctgcttttccgtgacgagaaagagaaacagtgaatttgtatcatcgggtcttagtttcttggggtcctaa

SEQ ID NO: 9671 - DNA, 201 bp, Homo sapiens
caccccctgtggccttgctggcatcttttctccgggtgcggccatggcctccagcccccctcttcttctcggtcaggtggaagatggatggcacggccgtrggcttcagcaggcgatgctggtcctccagcctcttggagaagctgtctttggtgaaatgctcactacagagaaatgaatacttagtgggagtccagttat

SEQ ID NO: 9672 - DNA, 201 bp, Homo sapiens; identical to SEQ ID NO: 1164

SEQ ID NO: 9673 - DNA, 201 bp, Homo sapiens
aggtcagggaggtctttgtaccgttctgatgcctcagtccatggctcctcattgtgtcttcctcttcagctggagctgcgagggtgtccaggaggggtgarttctgctcggagggcctgccgagggcattccttcctgtcctccagcatgagagggacagtgtggggcccctagagtacagggaagacctcctcataactg

SEQ ID NO: 9674 - DNA, 201 bp, Homo sapiens; identical to SEQ ID NO: 1166

SEQ ID NO: 9675 - DNA, 201 bp, Homo sapiens
actgggcccacctggatagtccaggaaagtctcatctgaaggttcctcacccaggcccatcccacagcccctggcaatgcttacccaagagtgaaatcctyttgttttgcctgggtttgtctcttggccacagaagggtgctgagacccacagctgctgcccccacagatgggggaccctgcctgccttctactccagcac

SEQ ID NO: 9676 - DNA, 201 bp, Homo sapiens
cgttatgttggattcagtgttagtaaagagactcatgtttggttgggtctctgttgaccttgtactctgtgctgcacctctgcttacagaatacctcccawccatgccggttcgtgactgctcacccgtttcagtgatctgagagggctggccctgaaagagtggttactgctcccgtgcagtttagagcttttcctgcac

SEQ ID NO: 9677 - DNA, 201 bp, Homo sapiens
gggtctctgttgaccttgtactctgtgctgcacctctgcttacagaatacctcccatccatgccggttcgtgactgctcacccgtttcagtgatctgagarggctggccctgaaagagtggttactgctcccgtgcagtttagagcttttcctgcaccttgacttgtccgtttcacagtgaggacaccaagtcacaagaag

SEQ ID NO: 9678 - DNA, 201 bp, Homo sapiens
gctgagtttgcccaactgtaggctaatgtaagtgttctgagcacatttaaggcaggctaggctaagctatgatgttaggtagattacgtgtattcaatgctttttttttttttttttgagacagagtttcactctcccacctgggctggaatgcagtggcgcgatctcaggtcactgcagcctccgcctcctgggtttaag

SEQ ID NO: 9679 - DNA, 201 bp, Homo sapiens
gccgaggcgggaggatcatgaggtcaggagattgagaccatcctggctaacacagtgaaaccccgtctctactaaaaaaaatacaaaaaattagccaggcrtggtggcgggcgcttgtagtcccagctactcaggaggctgaggcaggagaatggcatgagccgggaggcagagcttgcagtgagccgagatcgcgctact

SEQ ID NO: 9680 - DNA, 201 bp, Homo sapiens
tttggtgaaatgctcactacagagaaatgaatacttagtgggagtccagttatccctctgaacagcttttaaccattggattagacgttttgagtcctttrgggggaacctacaggacaaatgacaaaaagtaattagaaataattaaatgtctccccttaaaataatcaactgtaaaagcaaaacaagtatttttgcacg

SEQ ID NO: 9681 - DNA, 201 bp, Homo sapiens
ctgtggctcagttttaacaaatgggctcattgagtgagttccaaattcatgtttcaccttccatgatgtagccaagctgagaactcttaaaaatgcctcaycgcctttttcactcagggccacctttttcccaaggaacttctcaaaactccctcaattccaattttattgaagttctacatgtaggctattgccttgaat

SEQ ID NO: 9682 - DNA, 201 bp, Homo sapiens
ggggtgagttctgctcggagggcctgccgagggcattccttcctgtcctccagcatgagagggacagtgtggggcccctagagtacagggaagacctcctyataactgaagagatgcgagtctgagagtctttattggctcttttgtaggaatcgctgcaggtctctttggtccttggagccagcccgtgaggccgggggc

SEQ ID NO: 9683 - DNA, 201 bp, Homo sapiens
aagactgaagatgacttcaatgattggtgccagcaagtcaaaaaggtttgtagccgccccacacccacagccgagctgagccacccagggagacaggcagyggggcgtgcaggggtcgaaggcctgcgtccaggtctcaggcagcctcactgggccgtggggagctttgtcccgcctggcacagctatgtagctgagcagg

SEQ ID NO: 9684 - DNA, 201 bp, Homo sapiens
tgggccggatgctgtggctcacgcctgtaatcccagcactttgggaggccgaggtgggtggatcacttgaggtcaggagatcgagaccagcctggctaacrcagtgaaaccctgtctctactaaaaatacaaaaattagccgggcatggtggcagatgtctgtaatcccagctactcgggaggatgaggcaggagaatttc

SEQ ID NO: 9685 - DNA, 201 bp, Homo sapiens
tgagaccggagaattgattgagcctgggagtttgaggctgcagtaagctgtgattacaccactgtactccagcctgggtgacaaaatgagtcccggtctcaaaaaaaaaaaagaaaaaaaaacaggagcagagctcttggacaaagccctgctgtggaaagcttgcttcatctggctgcagccgctccacaacgcccgtca

SEQ ID NO: 9686 - DNA, 201 bp, Homo sapiens
gtcccaggctgctcccactgcagcttggttccacatctttcttcagcctcttgcggtcaatgggctctcgggggacagatggcctttctcgggtgtgcttrgaggagaaactgtacgaatgaagtgagccgataaatttgcacgccccagatcctgggggcgtaaagtcatccatagaaatgccactcttatctgtcacgc

SEQ ID NO: 9687 - DNA, 201 bp, Homo sapiens
gtggcttcaccttgcagagcagcttgcttcaacctgcgggactctggcttggccatcgggtttccactcgaggacggtgaccaacctgcagctcctctgcyggtggcggcactcgagtgtcccctcacaccccctgtggccttgctggcatcttttctccgggtgcggccatggcctccagcccccctcttcttctcggtc

SEQ ID NO: 9688 - DNA, 201 bp, Homo sapiens
agaggggcctgggtctcccacagctgagaatcctttaaacagtgcctgtagggccctctattgtggatttggtagttctgcctgcaccgagggagatgctwgcaggtgcttctgaaccctgtgtttgggaattagctgcgcatacaattaaggcttttgggtatagtaaaatttgtgtgcctttgaccctgtggttctgag

SEQ ID NO: 9689 - DNA, 201 bp, Homo sapiens
acccacctcggcctcccaaagtgctgggattacaggcgtgagccactgcgcgcagcctggcgcacacttcttaccagaacctagtcacgaattcctcgtckaactagaattaggtatgtttgttactgtaaacgcagcttggtggcttacagtgattggcactctaacagtcaggtcaggctagagagccagccaccgcag

SEQ ID NO: 9690 - DNA, 201 bp, Homo sapiens
ctgagagtagcaccccatgcttctccagcacctgctcctaaccaggaaattggggtagaccagaaccccagtcttcccagcagctcagtgtttcttgcccyggagcatctgccttcatcacagtgactctgaacacgctgccatggtgacatctggtaaaccttaggatggccatggaaaacgactctttgccctgtttct

SEQ ID NO: 9691 - DNA, 201 bp, Homo sapiens
ggcgcacacttcttaccagaacctagtcacgaattcctcgtcgaactagaattaggtatgtttgttactgtaaacgcagcttggtggcttacagtgattgrcactctaacagtcaggtcaggctagagagccagccaccgcagacagaggagtggacgcgtgaacgttgagttgagaccaaaggggccacctggtgggata

SEQ ID NO: 9692 - DNA, 201 bp, Homo sapiens
catggccaaacgctccccgcttggcagcatccgccagctgtaactggaggaacaggaccaggtcgggtttgggaaggcccacgtctggctgtttacaccartctagggaaaaattctgccaagaaagaacccaacagttaaagcttagtgtagtctaggtttttgtttcgaaagtcgtaaaaacaggaaaaaatgagggga

SEQ ID NO: 9693 - DNA, 201 bp, Homo sapiens
tttaactttatttttgtcctttactttttaagtctaaagtaagtgcttgaatcgggtgggttttcatttttttgctttctcacccctcaggttggcccctracttggcctctcaccctcgtgtcagctgttagacactgactcagtggctcagaatatgaaaggctcaggaagtagcatgctggccccacctccctgtccc

SEQ ID NO: 9694 - DNA, 201 bp, Homo sapiens
gactcagtggctcagaatatgaaaggctcaggaagtagcatgctggccccacctccctgtccccataccttagcagagcagctgcccagcagggcctcctyctctttcctaagagtttactccatccatggtgggtgtcttggtaggcccgagatacgagagggagtgctgctgttacaagaatttacagttgttctcttc

SEQ ID NO: 9695 - DNA, 201 bp, Homo sapiens
ctctttcctaagagtttactccatccatggtgggtgtcttggtaggcccgagatacgagagggagtgctgctgttacaagaatttacagttgttctcttcrgcacagaaatgctgtaaatggcctctttcgatactagtttatgaaattataagtgtctgatgattgtgcatctttggtttcaacagctactctgacctac

SEQ ID NO: 9696 - DNA, 201 bp, Homo sapiens; identical to SEQ ID NO: 1160

SEQ ID NO: 9697 - DNA, 201 bp, Homo sapiens
ggtgtatttgaacttaatggaacacctcttattcccttcactctgaagttggcttccttgcctataaagtttggtgataaacctaagaaatacacctgctrtgcattttactgcgtccgtgatgaaaatccctcaacttcacagccgctcaggcctcgtgaccctgctttcagagggagcctttttccttttcttccttat

SEQ ID NO: 9698 - DNA, 201 bp, Homo sapiens
ggggagggccggagtgcgtttctctggacggaggagcagagcagcttggggcacggtgtgggagccctccttagggacctcatgggtcacgttcgccgtgrctgcgccactcctgttcactgccaagcaccgtgattgctccttggatttgctcccctggggtttcctggtctccttgatggtttatacagtgagcaatct

SEQ ID NO: 9699 - DNA, 201 bp, Homo sapiens; identical to SEQ ID NO: 1165

SEQ ID NO: 9700 - DNA, 201 bp, Homo sapiens
agtaaaacagagtaagatggcatgcagggctaatcattagcccagcaggtaagcaccatggctctgcagccagctgcctccttagaaagtggggtgttgcsccatggaagtggtggcatgctcttctggtagcattgttgaaatgaaaacaggttcagtccttgatcactaggctttttgtacccgggtacctctggggac

SEQ ID NO: 9701 - DNA, 201 bp, Homo sapiens; identical to SEQ ID NO: 1167

SEQ ID NO: 9702 - DNA, 201 bp, Homo sapiens
agtaaatgtggcccttggcgttactgagtcctaagaggtgtgtgttgccccaggtggagctgatggaggagggagtcggtgcctgtggtgtgggactgacyggctgcctcctgccagtgggcttgtggcctgtggggccatctggccatgagcacttctctctctgtctgccacgacaggggggacaggccccacctcgga

SEQ ID NO: 9703 - DNA, 201 bp, Homo sapiens
cgaggcgggtgggtcacgaggtcaggagatcaagaccatcctggccagcatggtgaaaccccatctctactaaaaacacaaaaattagctaggcttggtgrcatgtgcctgtagtcccagctactcgggaggctgaagcaggagaatcgcttgaacccgggaggtggaggttgcagtgagccgagatcacgccattgcact

SEQ ID NO: 9704 - DNA, 201 bp, Homo sapiens
tgtggctcagttttaacaaatgggctcattgagtgagttccaaattcatgtttcaccttccatgatgtagccaagctgagaactcttaaaaatgcctcacygcctttttcactcagggccacctttttcccaaggaacttctcaaaactccctcaattccaattttattgaagttctacatgtaggctattgccttgaatc

SEQ ID NO: 9705 - DNA, 201 bp, Homo sapiens
aggtaacaaagcaccagtcagcaggaaactcaccaccgggaagcctttctatcaaaacataacttcaaaatcagtaaagtgggccgggcatggtggctcaygcctataatcccaacttcaaaatcaataaagcgggccgggcgcggtggctcacgcctataatcccaacttcaaaaccaataaagtgggccgggcgcggtg

SEQ ID NO: 9706 - DNA, 201 bp, Homo sapiens
tggccaggactcctctcttttttctttttttttgagacagtctagctcagtagcctgggctggagtgcagtggtgcaatcttgggctcactgcttcctccrcctcctgggtcccggttcaagcagttctcctgcctcagcctccccagtacctggaattacaggcacccgccaccatgcccagctaattttttcaattttt

SEQ ID NO: 9707 - DNA, 201 bp, Homo sapiens
ggtcttgaactcctgacctcgtgatccacctgccttcgcctcccagagtgctgggattacaggcgtgagccaccgcgcctggccaggactcctctctttcttttttttttttttattttttttccgagacagagtctagctctgtagtccaggctggagtgcagtggtgcaatcttgggctcactgctacctccgcctccc

SEQ ID NO: 9708 - DNA, 201 bp, Homo sapiens
ctgatgtggagaattgctagaacccaggagatggaggctgcagtgagctgagatcgcaccactgcgctccagcctctgcaacagagttagaccctatctgaaaaaaaaaaaaaaaaaaaaagaagaagaagaatgctaataaatgttttaaattactgaaactgttttctgtacagatttgttttgataacttggcgtata

SEQ ID NO: 9709 - DNA, 201 bp, Homo sapiens
gtttcattctagaggaggagtcacatgatagactgtgttcaacaggcttgctctggcatctcttttgagaatgtactgcagaggggcaagggcagaggcarcgagaccagctaagagactgttgaacaagccagcaaggagatgccagtggattagctcagggtgggtaagaggttgacttctgcatgtgttttggaggtt

SEQ ID NO: 9710 - DNA, 201 bp, Homo sapiens
tgatgtggagaattgctagaacccaggagatggaggctgcagtgagctgagatcgcaccactgcgctccagcctctgcaacagagttagaccctatctgaaaaaaaaaaaaaaaaaaaaagaagaagaagaatgctaataaatgttttaaattactgaaactgttttctgtacagatttgttttgataacttggcgtatat

SEQ ID NO: 9711 - DNA, 201 bp, Homo sapiens
agcacttaaatagccacactgcccattccttgaggacagagctggtgtcttgtgcttgcatttctagtgcatcacttgtgtctggcatgtggttggtaataaaaaaaaaacagaacttgaattaataataacctacacattcccctactatcaaagctttcagtttgtagagtttaacataaatccagtatgttagcataa

SEQ ID NO: 9712 - DNA, 201 bp, Homo sapiens
ggctggcgtcgctgtgctcgctctgcacggcttccgtggctggctttggggtgacgtcggcaggaggggcagaggggctctgggaaggcttctgcggtgtygcggtaagtgatgagctgggagggctctgggccaggcccttgtcgggtcccaggctgctcccactgcagcttggttccacatctttcttcagcctcttgc

SEQ ID NO: 9713 - DNA, 201 bp, Homo sapiens
acccaggagatggaggctgcagtgagctgagatcgcaccactgcgctccagcctctgcaacagagttagaccctatctgaaaaaaaaaaaaaaaaaaaaagaagaagaagaatgctaataaatgttttaaattactgaaactgttttctgtacagatttgttttgataacttggcgtatatgtatttgaaatcctggagaa

SEQ ID NO: 9714 - DNA, 201 bp, Homo sapiens
acatgtaggctattgccttgaatccaattttccataagaaagagctcatttaggccgggcgcggtggctcatgcctgtaatcccagcaccttgggaggccraggtgggtggatcatgaggtcaggagttcaagaccagcctggccaacatggtgaaaccccgtctctactaaaaatacagaaactagctgggcatggtggc

SEQ ID NO: 9715 - DNA, 201 bp, Homo sapiens
gagaagctgtctttggtgaaatgctcactacagagaaatgaatacttagtgggagtccagttatccctctgaacagcttttaaccattggattagacgttktgagtcctttagggggaacctacaggacaaatgacaaaaagtaattagaaataattaaatgtctccccttaaaataatcaactgtaaaagcaaaacaagt

SEQ ID NO: 9716 - DNA, 201 bp, Homo sapiens
cactgaaggagtaggagaaaattcccctgagttggtgagagttgagtctttagagctaaagacccccaaatttttttatcagaagtacttaaacatacatrttcctgataatatttccaaattgcagaagtaaagggaaacttctctaaacatccaaataatagtatcactactaagctgctttgaagaaaggcagtctca

SEQ ID NO: 9717 - DNA, 201 bp, Homo sapiens
tgtaatcccagcactttgggatgccgaggcgggtgggtcacgaggtcaggagatcaagaccatcctggccagcatggtgaaaccccatctctactaaaaayacaaaaattagctaggcttggtgacatgtgcctgtagtcccagctactcgggaggctgaagcaggagaatcgcttgaacccgggaggtggaggttgcagt

SEQ ID NO: 9718 - DNA, 201 bp, Homo sapiens
agtgggtcctgccctgtgactgtgggtgtgccaggtcaccacacaggtgtgtgctgggtcacagacacgccccttccctgcctctccattctgtttcttcrtcgtctggccatcctcgggggcattgtgacacagcggagggagtgaggcaggactttataagggagagtgaggctggcttctgcagcattgagagctttg

SEQ ID NO: 9719 - DNA, 201 bp, Homo sapiens
cctgggaatttctatgaaactaatgcggaataaaatgaaaaaaggacaaaaccctgctgcctggaaatgtgaaacctcaaaaaagtcaagtgtagagaccstaactatgtatctgaacctgatgtgtacagaactcagaagaaaacctgtgtatcttcagtactagtatatgggttctttacaaagtgaaaattaatgaaa

SEQ ID NO: 9720 - DNA, 201 bp, Homo sapiens
ctgaagcaggagaatcgcttgaacccgggaggtggaggttgcagtgagccgagatcacgccattgcactccatcctgggtgagagagcgagactctgtttaaaaaaaaaaaaaaaaaaaaagattctgaaaaaggtttggatgccatctgtatctttagtgtgaaagtgaaaacttgtttctcatatttatggtagagctg

SEQ ID NO: 9721 - DNA, 201 bp, Homo sapiens
atatatgtataaatatatatatacgtgtgtgtgtgtgtgtgtgtatgtatatatttttccccccccccgtcgtccaggctggagtgcagtggcgtgatctyggctcactgcaacggggttttgccatgttggccaggctggtcttgaacccttgacctcaggtgatccacccaccttggcctcctaaagtgctgggattac

SEQ ID NO: 9722 - DNA, 201 bp, Homo sapiens
agagtgttcctgagagccacacagcctcatcaccacaaaagaggtgacgccacgactcaccagggtccgtcttggccccttgctgtccagggaacaacccrtgccgctgatttgtgttcctggttgagggtccggtgctgtgtgtatatagttgtgatgtctttctagtctttaattgagaaggttctgcctctttgttgt

SEQ ID NO: 9723 - DNA, 201 bp, Homo sapiens
agctgtggcgcagccccagagtgcacaccacgctccatgcacctcctgggcagggtggcagtagtggggaacatgggctggagctctgtggctcacactttttgtttgtttgtttgtttttgagacggagtctcactctgtcgcccaggctggagtgcagtggcgcgatctcggctcactgcaagctccgcctcccaggtt

SEQ ID NO: 9724 - DNA, 201 bp, Homo sapiens
gctgtggcgcagccccagagtgcacaccacgctccatgcacctcctgggcagggtggcagtagtggggaacatgggctggagctctgtggctcacactttttgtttgtttgtttgtttttgagacggagtctcactctgtcgcccaggctggagtgcagtggcgcgatctcggctcactgcaagctccgcctcccaggttc

SEQ ID NO: 9725 - DNA, 201 bp, Homo sapiens
ggccgggcgcggtggctcacgcctataatcccagcacttcgggaggccaaggtgggtagatcacatgaggtcaggagttaaagaccagcctggtcaacatygtaaaaccccatgtctactaaaaaaaaagttagctgggcatggtggcacgccctcgtaatcccagctgctcgggaagctgaggcacgagaattgcttgaa

SEQ ID NO: 9726 - DNA, 201 bp, Homo sapiens
tggcaagattatgaaaaaattttcttacgcttttctatattttccaagtttgaatttcactgtaagcacctggctttgtaccgccctttttctgttacacrgtcatcatttgcttgcttgttgtgggagcacttttgcacaggtctgcttggttagtgaaagcatgtctccctttctaggaaggttgtgcaggaccagcgt

SEQ ID NO: 9727 - DNA, 201 bp, Homo sapiens
ggcgtgaggcacgtccatcagtaggcacgtgctgctttcgttctgcaagtgtcaaggcgagtgtcgaggatgaaagcatgaggcgcttgcagggggtcctyggaaccaggtgccactcctcggcctgacggggagccccgccccctcccgggtctccactgtgccccaggcatgcccaccccactcccccacagccctctt

SEQ ID NO: 9728 - DNA, 201 bp, Homo sapiens
ggccgtggggagctttgtcccgcctggcacagctatgtagctgagcagggtggggcgtcctggattgcccatctggcaacacagttaacaaccctggggayggatgttgcgtgttgactttagaatgggatttccagtgtcctcatccgtctcctgttgagatgggggtggtgatggggtgctgagctacgccggccgagt

SEQ ID NO: 9729 - DNA, 201 bp, Homo sapiens
tctcgtgggcgaatcaaggcacagcaacgcagtggagcctgaggggagccgggcactggtgcaggggaccatgcacagggcaccctcggagctccgttccyggccacaggagccaaggcaggctggaatgtccagcacctgcatgctgggggcctctgctgcgccactggcagtgggaatggaagcccccacctcttagcc

SEQ ID NO: 9730 - DNA, 201 bp, Homo sapiens
taacatctcgtgggcgaatcaaggcacagcaacgcagtggagcctgaggggagccgggcactggtgcaggggaccatgcacagggcaccctcggagctccrttcctggccacaggagccaaggcaggctggaatgtccagcacctgcatgctgggggcctctgctgcgccactggcagtgggaatggaagcccccacctct

SEQ ID NO: 9731 - DNA, 201 bp, Homo sapiens
gtatctttagtgtgaaagtgaaaacttgtttctcatatttatggtagagctgacctgtaattttttttccaatagattggaggtggacacaaaggaagagrcagccagacagctacttcagcgtcctcaacgcattcatcgacaggaaggacagttactactccattcaccagataggtgggaggctgcagaatgtgccag

SEQ ID NO: 9732 - DNA, 201 bp, Homo sapiens
ttcccctcagagcttttctggtgtcgtgggatgtggagcaggaggctgtaaacctgtaaacactgacctctgaccatctgtgcgctgctgtcacatcaccyccgtgtcatcccacatcacccccgtcccacccaggcccagaccctgggccttgcccttcctgctgtccatgcggcttgcagtgcctggtgctcggcacag

SEQ ID NO: 9733 - DNA, 201 bp, Homo sapiens
ttttaagggcattccatgagcaggtaccacaccccaggtgaccacttgaggccactggtggaaaagcagcatgccctggggttcattttcagcctggtcgmgggcggcctcctgtgtgcccctttccctgatggtctggtgccctcggctccctccccacctcctgcccactgcttctcagtgtgatgtgggtgcagtggg

SEQ ID NO: 9734 - DNA, 201 bp, Homo sapiens
acaggtttgtccgctggctgtggccggctggcccctttctcttggccgcagcaagcactggggtgaggctgcacctaacggccatgtctcactaacagctrtctctgcttggaggtgccctgcccatgtttgagctggtggagcagcagccttcacatctggcctgccccgacgtcctgaacctgtccctaggtgagagct

SEQ ID NO: 9735 - DNA, 201 bp, Homo sapiens
catctgcataaaacatattggccactgctctgccttgaaccgccctggctcttcactgctgactcaggcggggctctacccgacctccctggcatgacacsttgtgctcctgggacacaccagcctcagggcctttgcatgtgtggtgcctggcacttggaccctgttcccccgacacctgcctgggttgcgccccatgtc

SEQ ID NO: 9736 - DNA, 201 bp, Homo sapiens
ctgcaccatctcgagcaaaggcacgtcgtgaaggcagagctcttttcagctttctggaagaaaggtctgctgcaaccctgaaggaacctgggcgtggcaayatttacatctaggaggaaaactgtggctcagttttaacaaatgggctcattgagtgagttccaaattcatgtttcaccttccatgatgtagccaagctga

SEQ ID NO: 9737 - DNA, 201 bp, Homo sapiens
gtgctgggattacaggcgtgagccaccgtgcctggccaggactcctctcttttttctttttttttgagacagtctagctcagtagcctgggctggagtgcrgtggtgcaatcttgggctcactgcttcctccgcctcctgggtcccggttcaagcagttctcctgcctcagcctccccagtacctggaattacaggcaccc

SEQ ID NO: 9738 - DNA, 201 bp, Homo sapiens
caaagagatacttgccagtgttcatttagctctgctgtactttaaataaaagatatgtgtatctttagttcaaagctggtgccttggaacggtgtcaaacatgagaagaatgttccaacagcaagatggaatcattgtcttgcagtgttgaaattagaccggtggtggccaggcgcagtggctcacgcctgtaatcccagc

SEQ ID NO: 9739 - DNA, 201 bp, Homo sapiens
aaagagatacttgccagtgttcatttagctctgctgtactttaaataaaagatatgtgtatctttagttcaaagctggtgccttggaacggtgtcaaacatgagaagaatgttccaacagcaagatggaatcattgtcttgcagtgttgaaattagaccggtggtggccaggcgcagtggctcacgcctgtaatcccagca

SEQ ID NO: 9740 - DNA, 201 bp, Homo sapiens
gtcagtctggcagtgaggacaaatgactccaatgaaagaaaagtaaataccagagcaagcacagtcagaaacagagtggggaggagaatcacaatagctgraactcaactctctgagaggcagtgcagccaaatagaggcagctgagagcagagtatgtggattagaacttttcgggagagttggccactgaaggagtagg

SEQ ID NO: 9741 - DNA, 201 bp, Homo sapiens
cccttcagagtcctctgtccagcagctccccagcccccaccacacccttccactcacacttctcttgctgctgcctggagtggccccaccaagtcagcgcygtttctctggaagcaccaggccactcgccatgctcgctgtttctcctggtcccctgcctgctccccaccagcccccgcccctgttgctggatgatcctcc

SEQ ID NO: 9742 - DNA, 201 bp, Homo sapiens
aagagatacttgccagtgttcatttagctctgctgtactttaaataaaagatatgtgtatctttagttcaaagctggtgccttggaacggtgtcaaacatgagaagaatgttccaacagcaagatggaatcattgtcttgcagtgttgaaattagaccggtggtggccaggcgcagtggctcacgcctgtaatcccagcac

SEQ ID NO: 9743 - DNA, 201 bp, Homo sapiens
tgaagcctctccttctgcatctgcctgttctgtatcccactcaaggccctcaggcatcccacgttccacattcctgaaatggccctgtctcccctcacccwcagcctgctcctcagcatggcagtcactgtctccacccagcttttctgtcaggttccctggggtcctgcacaagtccgtctctgccacatcccacgtcac

SEQ ID NO: 9744 - DNA, 201 bp, Homo sapiens
catgagccgggaggcagagcttgcagtgagccgagatcgcgctactgcactccagcctggtgggcgacagagtgagactccgtctcaaaaaaaaaaaaaaraaaagaaaagaaattagaccggtggtgttttcatcctttttccttgagaataagttttctggattttagtctatatattgaataaagcctacaggtcaaa

SEQ ID NO: 9745 - DNA, 201 bp, Homo sapiens
tgccccctcatgcctcccccgatcttgttggggcatccttccgtctggaggctgggtcgggtgctgtccaggccttcctgtgacgtgtctcctggcaccaygtgccaccagaggtcagggctgggggcgggtgtgtgttgctaatgtgtatctgttccctgcagcgcaaatgggagttggcgaaggcaagtccataggcca

SEQ ID NO: 9746 - DNA, 201 bp, Homo sapiens
ctgtggcgcagccccagagtgcacaccacgctccatgcacctcctgggcagggtggcagtagtggggaacatgggctggagctctgtggctcacactttttgtttgtttgtttgtttttgagacggagtctcactctgtcgcccaggctggagtgcagtggcgcgatctcggctcactgcaagctccgcctcccaggttca

SEQ ID NO: 9747 - DNA, 201 bp, Homo sapiens
tgtgagccactgcacccggcgagtggatattttttccgaagtttgactccttttctatcaggagctacatgaattaccttataaatcacatgatgtggcaygggaagatgatgaaattatgacaggggctatgaaataagacaagggaacctctccatggcgaattgctgaggcagctggtgtcaggcctaagtggatctc

SEQ ID NO: 9748 - DNA, 201 bp, Homo sapiens
tgtggcgcagccccagagtgcacaccacgctccatgcacctcctgggcagggtggcagtagtggggaacatgggctggagctctgtggctcacactttttgtttgtttgtttgtttttgagacggagtctcactctgtcgcccaggctggagtgcagtggcgcgatctcggctcactgcaagctccgcctcccaggttcac

SEQ ID NO: 9749 - DNA, 201 bp, Homo sapiens
gaagatgatgaaattatgacaggggctatgaaataagacaagggaacctctccatggcgaattgctgaggcagctggtgtcaggcctaagtggatctcatwcatctgagagtcagtgaaggaacaagtgtggtggctcacacttgtagtcccagcactttgggaggctgaggtgggtggatcactggagcccaagagtttg

SEQ ID NO: 9750 - DNA, 201 bp, Homo sapiens
tggggaacatgggctggagctctgtggctcacactttttgtttgtttgtttgtttttgagacggagtctcactctgtcgcccaggctggagtgcagtggcrcgatctcggctcactgcaagctccgcctcccaggttcacgccattctcctgcctcagcctctggattagctgggactacaggcacccgccaccacgcctg

SEQ ID NO: 9751 - DNA, 201 bp, Homo sapiens
ggacggatgttgcgtgttgactttagaatgggatttccagtgtcctcatccgtctcctgttgagatgggggtggtgatggggtgctgagctacgccggcckagtgcgtgtggcccacccccctctgccgtggtggtcagactgtgctgtgtgttgatcaccacactgggttctcgtgtagcctttagtgtggagctgcctc

SEQ ID NO: 9752 - DNA, 201 bp, Homo sapiens
ggatgtcctcatggacagcttcgatgcttttggaagcatccaccatctgttcccaccggggtttcaggagaaaaagaggctcatcagcacgttccaggctrgtcacgggagcccacgcctgtaatcccagcactttgggaggcccacgagggaggactgcttgtacccaggagttcaagaccagcctgggctacacaggga

SEQ ID NO: 9753 - DNA, 201 bp, Homo sapiens
atctcatacatctgagagtcagtgaaggaacaagtgtggtggctcacacttgtagtcccagcactttgggaggctgaggtgggtggatcactggagcccargagtttgagaccagcctgcttaacatagggaaaccccacctctacaaaaaatacaaaaattaggcatgacggtgcatgcctgtagtcccagctactcagg

SEQ ID NO: 9754 - DNA, 201 bp, Homo sapiens
tatttcttttttctctgggtggcaagattatgaaaaaattttcttacgcttttctatattttccaagtttgaatttcactgtaagcacctggctttgtacygccctttttctgttacacagtcatcatttgcttgcttgttgtgggagcacttttgcacaggtctgcttggttagtgaaagcatgtctccctttctaggaa

SEQ ID NO: 9755 - DNA, 201 bp, Homo sapiens; identical to SEQ ID NO: 1156

SEQ ID NO: 9756 - DNA, 201 bp, Homo sapiens
gcactttggggaggccaaggcaggtagatcacttgagcccaggagtttaagacaagcctggctggcaacatagcgaaatcctgtctccacaaaaaaattasccaggcacagtgaaggcctgtaggcctagctactcaggaggctgaagtaggaggatcacctgagcccaggaggtcaaggctgcagtgagccacgatcgtg

SEQ ID NO: 9757 - DNA, 201 bp, Homo sapiens; identical to SEQ ID NO: 1157

SEQ ID NO: 9758 - DNA, 201 bp, Homo sapiens; identical to SEQ ID NO: 1158

SEQ ID NO: 9759 - DNA, 201 bp, Homo sapiens; identical to SEQ ID NO: 1159

SEQ ID NO: 9760 - DNA, 201 bp, Homo sapiens
tccgctggctgtggccggctggcccctttctcttggccgcagcaagcactggggtgaggctgcacctaacggccatgtctcactaacagctgtctctgctyggaggtgccctgcccatgtttgagctggtggagcagcagccttcacatctggcctgccccgacgtcctgaacctgtccctaggtgagagctgccaagtcc

SEQ ID NO: 9761 - DNA, 201 bp, Homo sapiens; identical to SEQ ID NO: 1162

SEQ ID NO: 9762 - DNA, 201 bp, Homo sapiens; identical to SEQ ID NO: 1224

SEQ ID NO: 9763 - DNA, 201 bp, Homo sapiens
gtaagtggctcagagtttccatggacaagaaagttgaaatcacgggcaacatacacacttcctcgcctgagtccccacgggagcctcggcgagtgttgtcrgtcgccccatgccgtgcaggtgctccgtggggcctgtgcgccaagccagatgcacggtggcctcgctctcctatcccggcggtcataccaagagaggaga

SEQ ID NO: 9764 - DNA, 201 bp, Homo sapiens
cagtcatcatttgcttgcttgttgtgggagcacttttgcacaggtctgcttggttagtgaaagcatgtctccctttctaggaaggttgtgcaggaccagcrttccctgtgcaggcgccactgcgtttcctgcagattccgaccggcactgcaacggattccctgccggagctgaggtcaccaacaggccgtcgccatggag

SEQ ID NO: 9765 - DNA, 201 bp, Homo sapiens
cctggggaacagagtgaaacccggtcttctcccctcaaaaaaaatcaaccaactcagatgatccttgaggacattatactgaatgaaatagggcaggtgcmaaaaaacaaacactgcatgataccactcacatgaggtactcagagtaatcaaattcatagagacaggagaatgcgggttcccagagcctagggagaggag

SEQ ID NO: 9766 - DNA, 201 bp, Homo sapiens
ttagtgaaagcatgtctccctttctaggaaggttgtgcaggaccagcgttccctgtgcaggcgccactgcgtttcctgcagattccgaccggcactgcaayggattccctgccggagctgaggtcaccaacaggccgtcgccatggagacccctggtacttctcattcccctgcgcctggggctcacggacatcaacgagg

SEQ ID NO: 9767 - DNA, 201 bp, Homo sapiens
cgtggcggccacctgagcacacaggcatttggtgctgaatgctgtttgggaatgacgaggaaaactttcggatttttgcgttttttttttcagcatgttgsgataagtactgtgttcacgtggttgggaatctgaagggtataagagccggaactgtgtccttgcaccctcacgtccctcccccaggcaccacctcctgtg

SEQ ID NO: 9768 - DNA, 201 bp, Homo sapiens
gaaaagctgcgtgaccagcatcatctgcaggcacagccagtcgggctggggcgagaccctcggccctgctctggaggaggagctcaagggactgaagctcygcgggccgtggccacaagcgacagtgctggcgcccgacgtgccagaagccctggctgccgcctggaaagaggccacgtgggcagcggtgggcacgggcga

SEQ ID NO: 9769 - DNA, 201 bp, Homo sapiens
gtcactgtcacctgtcactgtccatctttttgatgcttgacggttccacctttggccggtggccacctcagtctggtggtgtcttttgccgtgttctggcrtttttcgtttatgttttgagccctcccttatgttctgggttaagcagatgctgcaggcacctctgaacattccctgcctggccctggaatcagcctggct

SEQ ID NO: 9770 - DNA, 201 bp, Homo sapiens
ttcactgtaagcacctggctttgtaccgccctttttctgttacacagtcatcatttgcttgcttgttgtgggagcacttttgcacaggtctgcttggttastgaaagcatgtctccctttctaggaaggttgtgcaggaccagcgttccctgtgcaggcgccactgcgtttcctgcagattccgaccggcactgcaacgga

SEQ ID NO: 9771 - DNA, 201 bp, Homo sapiens; identical to SEQ ID NO: 1231

SEQ ID NO: 9772 - DNA, 201 bp, Homo sapiens; identical to SEQ ID NO: 1232

SEQ ID NO: 9773 - DNA, 201 bp, Homo sapiens; identical to SEQ ID NO: 1233

SEQ ID NO: 9774 - DNA, 201 bp, Homo sapiens
ttaaatttattagaactaacacatactagaactggctctttgaagcaataacatatatgttttaaaaaaatcaaagttaaaatccctcccttggctaagcrctgtggctcccgcctgtaatcctagcactttgggaggtggaggcaggcagattgcttgagtccaggagtttgagaccagccgcctaggtaacatggtaaa

SEQ ID NO: 9775 - DNA, 201 bp, Homo sapiens
ttgggcttgggttgagcctgtggctgagagtagcctctgggtggcagtgtcctctgctctcccatccggggcctgcagtgggacactatgtcagatccccrgagatggtgtcttttttcctttgtaattaatgaataatccagtggtgacactgagcatgtcctggtgagctgtgtgactcctgcctgataatggtggttt

SEQ ID NO: 9776 - DNA, 201 bp, Homo sapiens
caaagaatagtagggacttctgaagattcaggagtggctttagagaggtagcagggacatcatgatgtttttcagctctttaaaaagataggagtgggccrgatgctgtggctcacgcctgtaatcccagcactttgggaggccgaggtgggtggatcacttgaggtcaggagatcgagaccagcctggctaacacagtga

SEQ ID NO: 9777 - DNA, 201 bp, Homo sapiens
actgtccatctttttgatgcttgacggttccacctttggccggtggccacctcagtctggtggtgtcttttgccgtgttctggcgtttttcgtttatgttwtgagccctcccttatgttctgggttaagcagatgctgcaggcacctctgaacattccctgcctggccctggaatcagcctggctcctctgagtggggagt

SEQ ID NO: 9778 - DNA, 201 bp, Homo sapiens
agaaacctcgatctagacgccgggcatgctccatgctcccggagtgtcttctcccatcaccgcaccctccggttgatgtgtcctccggaccattgactcaygggtgtgtgtaggcagaaggggtggaagcgaggaaaggcgttgctgaggaggcccggagggagcgggttctggctgtgctggcactagccaggctggcag

SEQ ID NO: 9779 - DNA, 201 bp, Homo sapiens
ggctccctccccacctcctgcccactgcttctcagtgtgatgtgggtgcagtgggtctgaaatgcggcctcctctgtccctttcctctgccggctcggccrcccacctgcccacctgcctcatcctcccaggtgaggagctcatctacctggacccccacaccacgcagccagccgtggagcccactgatggctgcttcat

SEQ ID NO: 9780 - DNA, 201 bp, Homo sapiens
ggaagcccccacctcttagccgactgcagatgggggtgtcgtgttctgctcatcgtcatttcgttttaggggtttttctgtaagactgaagatgacttcartgattggtgccagcaagtcaaaaaggtttgtagccgccccacacccacagccgagctgagccacccagggagacaggcagtggggcgtgcaggggtcgaa

SEQ ID NO: 9781 - DNA, 201 bp, Homo sapiens
gcgcccgctcctggaaagccccgttctcatagcgctcatggccaaacgctccccgcttggcagcatccgccagctgtaactggaggaacaggaccaggtcrggtttgggaaggcccacgtctggctgtttacaccagtctagggaaaaattctgccaagaaagaacccaacagttaaagcttagtgtagtctaggtttttg

SEQ ID NO: 9782 - DNA, 201 bp, Homo sapiens
caaagtcgtgtctttcatgagctggtggaaacaccggagcgcccgctcctggaaagccccgttctcatagcgctcatggccaaacgctccccgcttggcakcatccgccagctgtaactggaggaacaggaccaggtcgggtttgggaaggcccacgtctggctgtttacaccagtctagggaaaaattctgccaagaaag

SEQ ID NO: 9783 - DNA, 201 bp, Homo sapiens; identical to SEQ ID NO: 1238

SEQ ID NO: 9784 - DNA, 201 bp, Homo sapiens
ggaacatgccaccacacccagctaatttttaaaaacattttgtagagggggtctccctatgttgcccagcctggtctcaaactcctgggctcaagcgatcmtcccacctcagcctcccaaactgctgagattataggtgtgagccaacatgcctggccaggagttgccattgttgttgttgttattgctattgttttatag

SEQ ID NO: 9785 - DNA, 201 bp, Homo sapiens
gcattttcaaagaactgaaacaaatttagttgggatagaacatcaaacacaatagcagaataataggaagaaaccaagagttgcaatgcagagggaaacarggccaggttgagggctcccagctttattcagggaaccttagaattgccgaagacttttaaatgtgaagtgacaggattacatatgttttaggaagctcaa

SEQ ID NO: 9786 - DNA, 201 bp, Homo sapiens
ggcaaacatacgggcaagtcgtggactgcctcccggagttcagccaggacacgttcatggttcttgccaattacatcttcttcaaaggtgaggcttgctcwgacagaattattgccactgcctctgcaagtaaatgctcttacagcagagagccagctaataggttctttgctaaccacttggggaaatctatgaataaga

SEQ ID NO: 9787 - DNA, 201 bp, Homo sapiens
acttcaagaattttgagagaagaatcccaaatattcctgccagttagacaagaaaatgaaacaatacaacccaaagcacaatgacaatgatgctgcagcamatttactagaagctgtcctgtgaaaagggtgcttaggagctctggtctggaatctgagtcttgctcctgctctcaccaggcggcttgtcctaaccctgca

SEQ ID NO: 9788 - DNA, 201 bp, Homo sapiens
tacttacaaagtgcttagaagaattcctagaagatagtaagtgttcagtaaatgctagctaataatgttattattagttctgtaattagtatggtgagtayaaaaaatatggagaatagcaaaaagattaatcatgagataaaaaaggaatgtccacgttttatgttctgtctcttagcaatatatttttggcatcttaga

SEQ ID NO: 9789 - DNA, 201 bp, Homo sapiens
ctgcagatggattacaagggagatgccgtggccttctttgtcctccctagcaagggcaagatgaggcaactggaacaggccttgtcagccagaacactgakaaagtggagccactcactccagaaaaggtgggcatctgtgtcaatctcctgggccctgaggcaggggatgcacacattcaaagatgagggagagattgtg

SEQ ID NO: 9790 - DNA, 201 bp, Homo sapiens
tttggcatcttagaatgattttagcagcgttccctggtgctcatagtctgggaagagagaaggaaggctgcagtgtaactggaattcaagaaagagattgrgcaatgccccacgggagggcaggaaaggtgctgaggagtttctgagcagagagagatcactttcagctgggactgagggacagcttcaaggaggcggtgg

SEQ ID NO: 9791 - DNA, 201 bp, Homo sapiens
cctactatatgtaaagcagataaagggttgctaccttcactgaagcctcggaggaaagtgtccagaatcctaatcatccacagccttgtcttcttcagtgyccctcatggcagccctgtggggcacattgtgaaggtgggatttgtggtatgagcaatagagaatcatgacattatttatggagaaaagtgacatgttcac

SEQ ID NO: 9792 - DNA, 201 bp, Homo sapiens; identical to SEQ ID NO: 1244

SEQ ID NO: 9793 - DNA, 201 bp, Homo sapiens
cggcaatggtcccgcttccatactctgagtcctgagagcagcacaatgagcaatgggccacggttgcactacagcaaaggcagctcgtgtcctttgagtcmgacccaccgtccctccttccctcgttgcctgacaggctgtgctggcacctctatgtcacccccattaccgagggcatctctggcagcctcagtagagccc

SEQ ID NO: 9794 - DNA, 201 bp, Homo sapiens
agctaataatgttattattagttctgtaattagtatggtgagtataaaaaatatggagaatagcaaaaagattaatcatgagataaaaaaggaatgtccamgttttatgttctgtctcttagcaatatatttttggcatcttagaatgattttagcagcgttccctggtgctcatagtctgggaagagagaaggaaggctg

SEQ ID NO: 9795 - DNA, 201 bp, Homo sapiens
tgctcagacatggctccagcctcctgcagagtaggcaagaagatgtcctacagtagcacaaaggagatagtaggtgtgaagaagtgactaatgacacttgytgttcacaactagttttttccagaaactatgaggaaccccaagtagtcagcagtgggtgacggctgtcagcatccctccgacagccttgcttccagtggc

SEQ ID NO: 9796 - DNA, 201 bp, Homo sapiens
tggaactcctgatctcaggtgatccacctgcctcgaaagtgctaggattacaggcgtgagccaccgcgcccagccaccaccccagttctgaggctggtgtwaatgcttctccatctcagggcagcacaccaagtgtctactgagcccatacattgggcacttttccgtgctggtgggggaagggggaaggaggacaggaag

SEQ ID NO: 9797 - DNA, 201 bp, Homo sapiens
tgaaattgctatcaggtcatttagtctgaagtctccttggggccaaagccatgtcagctgaggcttgaaggggaagcagacagatgtgactagaactgcarctcatcagcaactgactgccagtgctcagggcacctgaaggagcacagcaaaaaggacagccttttgctccaggtttccactttttgagagatatgaaca

SEQ ID NO: 9798 - DNA, 201 bp, Homo sapiens
aaccaacccaaatacccatcaatcaatgagtggataaaaaaactgtggtgtatatatatatatgatggaatactactcagccataaaaaggaacgaattarttgcattcacatcagcctgggtggaccttgagactattattctaagtgaagtaactcaggaatggaaaaccaaacatcgtatgttctcactcataagtgg

SEQ ID NO: 9799 - DNA, 201 bp, Homo sapiens
cttggcaggcaacccacaaggctgtgctggatgtcagtgaagagggcactgaggccacagcagctaccaccaccaagttcatagtccgatcgaaggatggyccctcttacttcactgtctccttcaataggaccttcctgatgatgattacaaataaagccacagacggtattctctttctagggaaagtggaaaatccca

SEQ ID NO: 9800 - DNA, 201 bp, Homo sapiens
tacccatcaatcaatgagtggataaaaaaactgtggtgtatatatatatatgatggaatactactcagccataaaaaggaacgaattaattgcattcacakcagcctgggtggaccttgagactattattctaagtgaagtaactcaggaatggaaaaccaaacatcgtatgttctcactcataagtggagctaagctatg

SEQ ID NO: 9801 - DNA, 201 bp, Homo sapiens
tctttctagggaaagtggaaaatcccactaaatcctaggtgggaaatggcctgttaactgatggcacattgctaatgcacaagaaataacaaaccacatcmctctttctgttctgagggtgcatttgaccccagtggagctggattcgctggcagggatgccacttccaaggctcaatcaccaaaccatcaacagggaccc

SEQ ID NO: 9802 - DNA, 201 bp, Homo sapiens
ggtatgggtagtggcatggtccgccatagtgaacagtgtcatgggaagactggttgcttctcacgctgggaaatgcctctctcccatggctcaggctgccracagacagagcaggagtggcacatattaacaagagagcaccatttctctgtctgtttctctctccagtctgttggatttgcacttgccaaggttttcaat

SEQ ID NO: 9803 - DNA, 201 bp, Homo sapiens; identical to SEQ ID NO: 1255

SEQ ID NO: 9804 - DNA, 201 bp, Homo sapiens
ggttgttgtctagaggcagtttggttgagaaggattaattcagtgtttgcaagcaatctgagctgctcagtcagtcatcccagctctgcaaattagtatgwttaaataaattcacaaagactcagtttgatcatccctgatatgggaataatacttatttcttattaatttttatgacaatttaaagagataatgtctaac

SEQ ID NO: 9805 - DNA, 201 bp, Homo sapiens
cacagacaagtcaaccatgctatttggggtaagttgcacagactctctgtggcctgtttactcatttgcaagtaaaacagcaataataagatctacatcawgggaatattgtgaggctcagagattatgtgagagagctctgctaactggcctatctgtcctcattctgctgctgatggcgtgggggtgttaaagggtctc

SEQ ID NO: 9806 - DNA, 201 bp, Homo sapiens
agtttggttgagaaggattaattcagtgtttgcaagcaatctgagctgctcagtcagtcatcccagctctgcaaattagtatgtttaaataaattcacaawgactcagtttgatcatccctgatatgggaataatacttatttcttattaatttttatgacaatttaaagagataatgtctaacacatggaaggtgcttag

SEQ ID NO: 9807 - DNA, 201 bp, Homo sapiens
aatttaaagagataatgtctaacacatggaaggtgcttagtagatggaaaaataccttttggcttgttagaagctaagttcctctgaaatggaacaaaatygtaggctgttagtgctcaaacactggtgacttgtcctagagactgagccaggcctaaattctggtctcctggctctgtaaccattccacattttttgcca

SEQ ID NO: 9808 - DNA, 201 bp, Homo sapiens
cagagttgctctcttgaaaagagttctcatggccttatgggttttgtgtcctaagccaagtggaagcaccctttcagtcgctaccagacccagaagcaggmaagtttctttgtggatgagaggacttctctccaggtccccatgatgcaccaaaaggaaatgcacagattcctctatgaccaggatttggcttgcaccgtc

SEQ ID NO: 9809 - DNA, 201 bp, Homo sapiens
gtgcagtggcacaatcttggctcactgcaacctcttctgcttcccaggttcaagggattatccagcctcagcatcccaagtagctgaaattacaggcaccygccaccctgtcaggctaatttttatatttttagtagagacggggtttcaacatgttgtccaggctggtctagaactcctggcctcaagtgatccacctgc

SEQ ID NO: 9810 - DNA, 201 bp, Homo sapiens
gaagtgactaatgacacttgttgttcacaactagttttttccagaaactatgaggaaccccaagtagtcagcagtgggtgacggctgtcagcatccctccracagccttgcttccagtggcactttacagtgaaagcaagcttaggtggcaacctggtgcccactcagacttgcattggcaagcagatacaaaaacagccg

SEQ ID NO: 9811 - DNA, 201 bp, Homo sapiens
caggtcttgatcaactccagctgcaaaagcccaacatccatctcgattaggctcaccatcttgtcctttactaactgtgtgatcttggcaattttctcacmttttttgggcctctactgtaaaactaagaacatgatacctgcctcattgggttgctcagtagattcattgagtttctacccatagagaatgtagaactta

SEQ ID NO: 9812 - DNA, 201 bp, Homo sapiens
tccccatttcagtttgctgtctttgcctcactaattgtactttgacataaagacttcttttctctctttgtgctagccaagtgggaaaagccctttcaccytgaatatacaagaaagaacttcccattcctggtgggcgagcaggtcactgtgcatgtccccatgatgcaccagaaagagcagttcgcttttggggtggat

SEQ ID NO: 9813 - DNA, 201 bp, Homo sapiens
gttgcactacagcaaaggcagctcgtgtcctttgagtcagacccaccgtccctccttccctcgttgcctgacaggctgtgctggcacctctatgtcacccycattaccgagggcatctctggcagcctcagtagagcccttgctcccatcagatccaaaggctcctcttctgggggccccggtgccccacacacctcggat

SEQ ID NO: 9814 - DNA, 201 bp, Homo sapiens
cttggaaaaaataaaaaaagaagaccatgagcaagattaaccaagaagagagaaaatccaaataagctcaattagaaatgaaatgaaagattttaaaaccracaccacagaaatacaaaagatcattcaaggctactattaacacctttatgtgcataaactagaaaagctagaggagatggataatttcctggaaagatc

SEQ ID NO: 9815 - DNA, 201 bp, Homo sapiens
aatcccagtgctttgggaggccaaggtgagaggattacttgaggccaggagtttgagactagcttgggcaacatagcaagaccctgcctctatgcaaaatdaaaaaaaacatatatagctggacatgttgatgcatgcctatagtcccaactacctgggaggatgaggaaagaggatcacctgagcccaggaatttgaggt

SEQ ID NO: 9816 - DNA, 201 bp, Homo sapiens
gctatgattgtgccactgcactccagtctgggcaacaaagctagatcctatctctaataaaaaattattattatcattatattgttaaagggtgcttctaytttaattaaaacatgtttaaaaaattaaatattaagaacattgtaaacattaaagttcctgttttatgtgatctctaaactatttcccatctcacttgct

SEQ ID NO: 9817 - DNA, 201 bp, Homo sapiens
tcagagcagaactgaatgaaattgaaacaacaacaacaaaatagcaaaagataaatgaaacaaaaagctggttcttggaaaaaataaaaaaagaagaccaygagcaagattaaccaagaagagagaaaatccaaataagctcaattagaaatgaaatgaaagattttaaaaccgacaccacagaaatacaaaagatcattc

SEQ ID NO: 9818 - DNA, 201 bp, Homo sapiens
accggctgacgagggctaatgcgtgggctgtgaaggtctccccgggtgccgtggaccagtttcccatctcctcgcggctggctgccttcctgactccgatracgtcatgtgtgcacacacagccctccgggtgctcagccccttccctgcgggtttgtaacggcaatggtcccgcttccatactctgagtcctgagagcag

SEQ ID NO: 9819 - DNA, 201 bp, Homo sapiens
attttgtgtttgggcagagattaaaacaccaaataagaggcacgggccaaggggagaggccaggatttaagagattattcctgttgtccatgaagctccayggctctagtcagttgctaatttcagccccatagtccctggctcctttggggtgagtcttctccttgcccccatcacagaagggagtgccatagactcttc

SEQ ID NO: 9820 - DNA, 201 bp, Homo sapiens
ctcacataaatgtaaggtaaaggggtggaaatagacattctatgcaaatagacactaaaagcaaacagaagtggctatacttatatcagacaaaacaaacyttaaagcaacagcagttaaaaaagataaagagggacattatataatgataaaaggccttgtccaacacaaaaatattacagtcttaaatatatatgcacc

SEQ ID NO: 9821 - DNA, 201 bp, Homo sapiens
gtcagccagaacactgagaaagtggagccactcactccagaaaaggtgggcatctgtgtcaatctcctgggccctgaggcaggggatgcacacattcaaaratgagggagagattgtgctaacagctgttggataatcacttctgcacagtgagcaccaactgcatgcaggacagagagcctggggctgtctatacatgtt

SEQ ID NO: 9822 - DNA, 201 bp, Homo sapiens
aaacccccagctgaaccttgtaacaattccaactgaacaggaagtctcctggccagaactcaagggagggcctgaatctggtgtgcagactccacaggccrataggcgtgaaagccctacttgttctcataagtgggaggctggtagcctggggcaagttctcagcccttcctgcccactgcctataaacaaacttggtgc

SEQ ID NO: 9823 - DNA, 201 bp, Homo sapiens
gaaacccccagctgaaccttgtaacaattccaactgaacaggaagtctcctggccagaactcaagggagggcctgaatctggtgtgcagactccacaggcyaataggcgtgaaagccctacttgttctcataagtgggaggctggtagcctggggcaagttctcagcccttcctgcccactgcctataaacaaacttggtg

SEQ ID NO: 9824 - DNA, 201 bp, Homo sapiens
acccacaaaccctctgaaggaaggaggttgctcctgcagaacccaagagacagtccaaatattgtgagtgcccaagctgtgaaagtgggaaaggtggattktctgtcactgaacacacaccctcactggggcacctgaaggtctagatcatgggagaaggatctgaccttatctggagctgagtcaatttagagagccaag

SEQ ID NO: 9825 - DNA, 201 bp, Homo sapiens
gagactagcttgggcaacatagcaagaccctgcctctatgcaaaatgaaaaaaaacatatatagctggacatgttgatgcatgcctatagtcccaactacmtgggaggatgaggaaagaggatcacctgagcccaggaatttgaggttacagtgagctatgattgtgccactgcactccagtctgggcaacaaagctagat

SEQ ID NO: 9826 - DNA, 201 bp, Homo sapiens; identical to SEQ ID NO: 1240

SEQ ID NO: 9827 - DNA, 201 bp, Homo sapiens
gagagagctctgctaactggcctatctgtcctcattctgctgctgatggcgtgggggtgttaaagggtctctgattcagggcctggaccctcagtttaccmcctcaatggttcttacttctcttgcagacatattttgttccaaaatggcatcttacctttatggagtactctttgctgttggcctctgtgctccaatcta

SEQ ID NO: 9828 - DNA, 201 bp, Homo sapiens
ggaagtctcctggccagaactcaagggagggcctgaatctggtgtgcagactccacaggccaataggcgtgaaagccctacttgttctcataagtgggagkctggtagcctggggcaagttctcagcccttcctgcccactgcctataaacaaacttggtgctgtttggggggacatggtgggagtgagactggtcttttg

SEQ ID NO: 9829 - DNA, 201 bp, Homo sapiens
cgctcaccatgtgctgggtcccgtgctgcacaatttgtgccttatcacactcagtcctctgaacaactctgtaaggtaactatctctgttttacaaaggcraaacagagaagtccagagaggttacttgtccaccacgaatgtcagggttagattcaagcccagccctgttggggtttgaaattgctatcaggtcatttag

SEQ ID NO: 9830 - DNA, 201 bp, Homo sapiens
ctttcccctctggctgagcacagacctcccctggccttgcattggattcatacaccttccttctctaaaatgaccacttactgttgtatctcagggtcaaygcacagggttggagctcctctgtaaagttgtgttaaaggaaatgaaatctttctgatgaaactgaacaggtgagggtgctgtaggcagggctggggagac

SEQ ID NO: 9831 - DNA, 201 bp, Homo sapiens
gccataaaaaggaacgaattaattgcattcacatcagcctgggtggaccttgagactattattctaagtgaagtaactcaggaatggaaaaccaaacatcrtatgttctcactcataagtggagctaagctatgaggatgggaagacatgagaatgatacaatggacttcggggactcgagagaaagagtgggagcggggt

SEQ ID NO: 9832 - DNA, 201 bp, Homo sapiens
gatgaagggcaagggggattatgaaggcactgtgcttgtgaaaaggatgatggggggaaggacatccaggtcatgggggggaaattataaaatttgtgagragagaaaagccttcagacggatgtgacctattggagcacacacctgctttgctttcccctctggctgagcacagacctcccctggccttgcattggattc

SEQ ID NO: 9833 - DNA, 201 bp, Homo sapiens
acctgcctcgaaagtgctaggattacaggcgtgagccaccgcgcccagccaccaccccagttctgaggctggtgtaaatgcttctccatctcagggcagcmcaccaagtgtctactgagcccatacattgggcacttttccgtgctggtgggggaagggggaaggaggacaggaagcaggtgtgtagagcaatgaggaaca

SEQ ID NO: 9834 - DNA, 201 bp, Homo sapiens
gggcagatactttgaaaaaaaagagcccttcctgtttgctgtgcattgtcttcataccagttcccagaattgacctgacaaatattgaccaggttgctgtsatcttcaaacaccattttcctgtgggtagaggtgatgcagtgctgaagacctgggcccctgctcagtgcctttgctctgtaagtactttgcctgtgccca

SEQ ID NO: 9835 - DNA, 201 bp, Homo sapiens; identical to SEQ ID NO: 1243

SEQ ID NO: 9836 - DNA, 201 bp, Homo sapiens
gggcatctctggcagcctcagtagagcccttgctcccatcagatccaaaggctcctcttctgggggccccggtgccccacacacctcggatgtgccagggrcctcatgtaggctttctcatgctattttataaggaaagaaacaaaacagaaaggagttatgctggagagctggcagaagtcccaggggaacctaaccccc

SEQ ID NO: 9837 - DNA, 201 bp, Homo sapiens
ggcatccaggaggggcatttgtagcagagtatgctatgcctgagcaaggggtaggtgagtgggaagagaagggagggaggtggaccctgggctgttgctaytggtgttgactgcagaggctgcagataaattcactggccagcagtggggccgaagagaggggaagcagtcaactctcaaggccacatgtcatagggttcc

SEQ ID NO: 9838 - DNA, 201 bp, Homo sapiens
tccgccatagtgaacagtgtcatgggaagactggttgcttctcacgctgggaaatgcctctctcccatggctcaggctgccgacagacagagcaggagtgrcacatattaacaagagagcaccatttctctgtctgtttctctctccagtctgttggatttgcacttgccaaggttttcaatttctggaacatataacctg

SEQ ID NO: 9839 - DNA, 201 bp, Homo sapiens
ggcgtggaggccgcgtctaataggccacctctgctgatgggaatgcggattctttaggaggcacaacccagcgtcagtgggggccccctgagagccacctrccccactgccagcctccacagaaaggggcacagacccctggtgcttgtggcatcctggcgcctggcagcacccgcttcccctccatgtggctgatgtcct

SEQ ID NO: 9840 - DNA, 201 bp, Homo sapiens
ccattaaccccagtcagtgcccttttccacaaattctcccaggtaactagcttcatgggatgttgctgggttaccatatttccattccttggggctcccargaatggaaatacgccaacccaggttaggcacctctattgcagaattacaataacacattcaataaaactaaaatatgaattcatctgtcaacagagtcct

SEQ ID NO: 9841 - DNA, 201 bp, Homo sapiens
acccaagcccaaaagaaacaagacttggggcgtggaggccgcgtctaataggccacctctgctgatgggaatgcggattctttaggaggcacaacccagcrtcagtgggggccccctgagagccacctgccccactgccagcctccacagaaaggggcacagacccctggtgcttgtggcatcctggcgcctggcagcacc

SEQ ID NO: 9842 - DNA, 201 bp, Homo sapiens
gacttcaggtgggtctcccctactcaacccaagcccaaaagaaacaagacttggggcgtggaggccgcgtctaataggccacctctgctgatgggaatgcrgattctttaggaggcacaacccagcgtcagtgggggccccctgagagccacctgccccactgccagcctccacagaaaggggcacagacccctggtgctt

SEQ ID NO: 9843 - DNA, 201 bp, Homo sapiens
ttgtgaaaagcagagacttacctgaagtcacatggaggccagtaccatcgatgactcaggacatttactagccaactccccgacttcaggtgggtctcccytactcaacccaagcccaaaagaaacaagacttggggcgtggaggccgcgtctaataggccacctctgctgatgggaatgcggattctttaggaggcacaa

SEQ ID NO: 9844 - DNA, 201 bp, Homo sapiens
aagagagggccttttgagaccacctcttcctgaagtcttgtgaaaagcagagacttacctgaagtcacatggaggccagtaccatcgatgactcaggacayttactagccaactccccgacttcaggtgggtctcccctactcaacccaagcccaaaagaaacaagacttggggcgtggaggccgcgtctaataggccacc

SEQ ID NO: 9845 - DNA, 201 bp, Homo sapiens
actcagaagagagggccttttgagaccacctcttcctgaagtcttgtgaaaagcagagacttacctgaagtcacatggaggccagtaccatcgatgactcrggacatttactagccaactccccgacttcaggtgggtctcccctactcaacccaagcccaaaagaaacaagacttggggcgtggaggccgcgtctaatag

SEQ ID NO: 9846 - DNA, 201 bp, Homo sapiens
accctgtttgcactgcagttccccctccagctcaggctgcattcccagccctaaaacaaggggtcttcctgctcctgtaccactttgatccctggaagtgraataaaggctcttctggcacattttgtaacttaaaataaagcacaagagatatcacattagtttgcaagggctatcttaataaatactacatgccaggca

SEQ ID NO: 9847 - DNA, 201 bp, Homo sapiens
tccctactccacaggtggatagaggtgttcatccccagattttccatttctgcctcctacaatctggaaaccatcctcccgaagatgggcatccaaaatgyctttgacaaaaatgctgatttttctggaattgcaaagagagactccctgcaggtttctaaagtgagttgaatgaaaatatttgcaaaacagtccaagctg

SEQ ID NO: 9848 - DNA, 201 bp, Homo sapiens
gccctaaaacaaggggtcttcctgctcctgtaccactttgatccctggaagtggaataaaggctcttctggcacattttgtaacttaaaataaagcacaaragatatcacattagtttgcaagggctatcttaataaatactacatgccaggcagcttaaacaacagaaatttttgactcacagttctggaggttagaagt

SEQ ID NO: 9849 - DNA, 201 bp, Homo sapiens
aagaggaattaagaaatgaattgggcatcattaccccaggcttgatagaaagggaaaaaaactgccattgagtactttcggcatgcctggagctttgtacwttgactgtcatataatcccgaaatggccccacacccaggaggtgggcaatatcatttgcattttgcaaagggagacactgagtttcagacagctgctttt

SEQ ID NO: 9850 - DNA, 201 bp, Homo sapiens
cagcctctgcttgtgacaagaggcatcccagatatcagaggctggacagagacatggagacagagttgctctctctcatcgctcctctaggctccatcagycctgctactttgctccccactcctgggctgtcttcatccacacatccagatggccgatcctcacatcgccactccagctaatgaacgactggaaaggggg

SEQ ID NO: 9851 - DNA, 201 bp, Homo sapiens
tgtttatataccaatttttgtctcttcccttctgtgaggctgctaaaatctctgctcttctagcaggtggcttttgcatgattatttgctgtctcattccrcacacgcatcacttatgaggcagaaaattaccttgaagggaaatttcatgcaggacattgtatctgcttcatcatgattatcttttatctagaaacttga

SEQ ID NO: 9852 - DNA, 201 bp, Homo sapiens
agggtgcatttgaccccagtggagctggattcgctggcagggatgccacttccaaggctcaatcaccaaaccatcaacagggaccccagtcacaagccaamacccattaaccccagtcagtgcccttttccacaaattctcccaggtaactagcttcatgggatgttgctgggttaccatatttccattccttggggctcc

SEQ ID NO: 9853 - DNA, 201 bp, Homo sapiens
attcttaaaaaataagtccatgaagcagaaacatcaaaaagcatgggatttggaatttgagacctgactttgaagcccacacagaacacagacaagtcaaycatgctatttggggtaagttgcacagactctctgtggcctgtttactcatttgcaagtaaaacagcaataataagatctacatcatgggaatattgtgag

SEQ ID NO: 9854 - DNA, 201 bp, Homo sapiens
cacttgctttgtatgatctctcttaatttacacaataaccttacggggcatatgcagttattattaccttttatagatcgggaacctgaagcacgcagcaycttaataattttgcaaccataagtggcagaactgagactcactccggtcttcctgctctgtgtttgtaaccatctcaatcccggtgtaaggaccaatggg

SEQ ID NO: 9855 - DNA, 201 bp, Homo sapiens
gcctcaagtgatccacctgccttggcctcccaaagtgctgggattacaggcatgagccaccgcacccagccccttccaatctttttattcatacacagatyatattttatttgaagcatcaacaaaatactggaatggtttggtgtggtagtgaaggcttggactgggggataggatccaagttctgagtgtggccccatc

SEQ ID NO: 9856 - DNA, 201 bp, Homo sapiens
tctttttattcatacacagattatattttatttgaagcatcaacaaaatactggaatggtttggtgtggtagtgaaggcttggactgggggataggatccmagttctgagtgtggccccatccgtccacttaatgagcaagtgacttaacctcacagagcctcagtttcccatctacaaagtagggatgactgtgcctctc

SEQ ID NO: 9857 - DNA, 201 bp, Homo sapiens
taaggattaaattaaataagacaaagcaagtgtttctcaacaagggcactaccggtatttgggcaggaccactcttcattgaatgtgactattctgggtgyttcaagagctttcgggagcccagctgttccccaactaaactccagcagcatccctccaccaggcattgagctgatccaaaatgtcacctctatctccttt

SEQ ID NO: 9858 - DNA, 201 bp, Homo sapiens
agacagtgaaaaataatcatggctgggtgcagcagctcagacctacaatcccagtgctttgggaggccaaggtgagaggattacttgaggccaggagtttragactagcttgggcaacatagcaagaccctgcctctatgcaaaatgaaaaaaaacatatatagctggacatgttgatgcatgcctatagtcccaactacc

SEQ ID NO: 9859 - DNA, 201 bp, Homo sapiens
ccaggaatttgaggttacagtgagctatgattgtgccactgcactccagtctgggcaacaaagctagatcctatctctaataaaaaattattattatcatyatattgttaaagggtgcttctattttaattaaaacatgtttaaaaaattaaatattaagaacattgtaaacattaaagttcctgttttatgtgatctcta

SEQ ID NO: 9860 - DNA, 201 bp, Homo sapiens
gtgtccagaatcctaatcatccacagccttgtcttcttcagtgcccctcatggcagccctgtggggcacattgtgaaggtgggatttgtggtatgagcaayagagaatcatgacattatttatggagaaaagtgacatgttcaccctcttgttttcagagaatgggtccagcttggctttggctactgggaacagggatcc

SEQ ID NO: 9861 - DNA, 201 bp, Homo sapiens
aggaaagagaaggaaagaaaactggtatggtttgagcccttactaagttaccttcagtttatgttgttctatttaactaattctatttttaattgaaatayaattcacatgtcataaaattcaccattttattgctttttagtatattcacaagtttgggcaactactccgctgtgtaatatcagagcatttttttgtcac

SEQ ID NO: 9862 - DNA, 201 bp, Homo sapiens
gaacttcagactctgccatgtttcactccattcagatgtgaggcaggttagcttgccaaggggaactgcacttcctggcacaccattcgtgtatgtattcwttcacagttgttaaacatccactgtgttttgggctctctgtcagacccctgccccactagactctattccaccccccagccaactggcgcgggtcttgct

SEQ ID NO: 9863 - DNA, 201 bp, Homo sapiens
ctcctgggccctgaggcaggggatgcacacattcaaagatgagggagagattgtgctaacagctgttggataatcacttctgcacagtgagcaccaactgyatgcaggacagagagcctggggctgtctatacatgttcacacttgaagttcactatcacctgatgaggagtcttagtaccactcattacacagatgagga

SEQ ID NO: 9864 - DNA, 201 bp, Homo sapiens
ggagagagaaggggtggccacaggaggacaggagttcagggtggggagaagcaaagtggggagtgtggtggattttaagagctgactgaatgagctttggmcacggttttcccccaagagagcaatgacctgggggccctcagacatagatcccagactcagaagagagggccttttgagaccacctcttcctgaagtctt

SEQ ID NO: 9865 - DNA, 201 bp, Homo sapiens
aaacaacaaaaacaaacaaacaaacaaaaaacaaaaacagaagagctgacactcaaagagtaaaaacaactaacctaagccacagggccttcctgtgctgrcttagaacaaggaccaatggccagttatgaagggctcccgcaacgctgcctgaagcaaggtttgttttatacacaatgctcttccctcaggctctccatt

SEQ ID NO: 9866 - DNA, 201 bp, Homo sapiens
atgctggagagctggcagaagtcccaggggaacctaaccccctggccctcacgctcccactttatttcacaaacagaacaagctgccactgcactccagcytgggcaacagagcaaggccctgtctcaaaacaacaaaaacaaacaaacaaacaaaaaacaaaaacagaagagctgacactcaaagagtaaaaacaactaa

SEQ ID NO: 9867 - DNA, 201 bp, Homo sapiens
tcttttctctctttgtgctagccaagtgggaaaagccctttcaccctgaatatacaagaaagaacttcccattcctggtgggcgagcaggtcactgtgcawgtccccatgatgcaccagaaagagcagttcgcttttggggtggatacagagctgaactgctttgtgctgcagatggattacaagggagatgccgtggcct

SEQ ID NO: 9868 - DNA, 201 bp, Homo sapiens
ctgagaaagtggagccactcactccagaaaaggtgggcatctgtgtcaatctcctgggccctgaggcaggggatgcacacattcaaagatgagggagagawtgtgctaacagctgttggataatcacttctgcacagtgagcaccaactgcatgcaggacagagagcctggggctgtctatacatgttcacacttgaagtt

SEQ ID NO: 9869 - DNA, 201 bp, Homo sapiens
gcaggtttctaaagtgagttgaatgaaaatatttgcaaaacagtccaagctggaagcacctgcagaattaatcacacgctcttatttcgttgataaggaarcagaggcctgaaaggtgaagtcagggtcttctgcggccagaagaaccgaatcttgcggcctatggccaccatccctctggcatgcagcattgttatccct

SEQ ID NO: 9870 - DNA, 201 bp, Homo sapiens; identical to SEQ ID NO: 1254

SEQ ID NO: 9871 - DNA, 201 bp, Homo sapiens
acacctcctatagtacctgcataataagcgtacatgttcaacccaatggaccaaatgcataaattacacattcaaagaacctagagattatctaaaggcaygcgtgtggtcagtgataatccatttggtaatagaagtcgagtaaatttcagaagtgccagaagagagaagggagagagtgatgaagtcacaacaggagag

SEQ ID NO: 9872 - DNA, 201 bp, Homo sapiens
catccaaaatgcctttgacaaaaatgctgatttttctggaattgcaaagagagactccctgcaggtttctaaagtgagttgaatgaaaatatttgcaaaamagtccaagctggaagcacctgcagaattaatcacacgctcttatttcgttgataaggaagcagaggcctgaaaggtgaagtcagggtcttctgcggccag

SEQ ID NO: 9873 - DNA, 201 bp, Homo sapiens; identical to SEQ ID NO: 1256

SEQ ID NO: 9874 - DNA, 201 bp, Homo sapiens
cttcaccagctaataccttcttgggggtgcatcttcttttatggggtactctgagatgaaatctggtacttagttctacttactgcttgctgcataacaasccaccccaaaaccgaatgacttaagacaatcacttccttggttctatgggttaactgggctcagctgggcagttttcatgtgttggagtaggtggcagct

SEQ ID NO: 9875 - DNA, 201 bp, Homo sapiens
agaagtgatcctggggccactgaaggggacctttgtcattggttttcagaaaatgttgagaggccccactggaatatgatgaacataatggacattttctygaggaaagtgtatctgtgagcctatgaaaaataatgcctgtagtcacaggagctcaagcctccctgaagcttagaaatccaggaactccaggttaagaat

SEQ ID NO: 9876 - DNA, 201 bp, Homo sapiens
cctccacccttcatctacccatccagcaaactatccacccatttatccatccatcagttcatccatctatccatccatccatccatccatccatccatgcrtccattcatccacctagctagccatctagctagccaaccacctatccactaatctattcatctatctatctctctatcggttcatccatccatccattca

SEQ ID NO: 9877 - DNA, 201 bp, Homo sapiens
gctggggaggtgagtcagggcccaataaataaagctcttgaatgtcaggggcttgagcattttttctgagctcaatggggagccattgaggaattcgaggygaggtgagtgatacaccagatcagcatctggaaaggtcaccctgtctgcagggtggaggagcgcttggagatgggagtgagtgagagacaatggaaggtg

SEQ ID NO: 9878 - DNA, 201 bp, Homo sapiens
tggaattgcaaagagagactccctgcaggtttctaaagtgagttgaatgaaaatatttgcaaaacagtccaagctggaagcacctgcagaattaatcacaygctcttatttcgttgataaggaagcagaggcctgaaaggtgaagtcagggtcttctgcggccagaagaaccgaatcttgcggcctatggccaccatccct

SEQ ID NO: 9879 - DNA, 201 bp, Homo sapiens
taacttagaaagaaaattccactttagtcaaacaggcaaatacaaaactacacaacagaaatcgccaatcacataagtggaaatggagagaaatgaacagktttgcaaaagaattactcattcagtaaaagggttctttataaagttccatctaagttaaattatatctggtataataaaatgtgattcatttacatattt

SEQ ID NO: 9880 - DNA, 201 bp, Homo sapiens
tttctggaattgcaaagagagactccctgcaggtttctaaagtgagttgaatgaaaatatttgcaaaacagtccaagctggaagcacctgcagaattaatmacacgctcttatttcgttgataaggaagcagaggcctgaaaggtgaagtcagggtcttctgcggccagaagaaccgaatcttgcggcctatggccaccat

SEQ ID NO: 9881 - DNA, 201 bp, Homo sapiens
gggccaaagccatgtcagctgaggcttgaaggggaagcagacagatgtgactagaactgcagctcatcagcaactgactgccagtgctcagggcacctgamggagcacagcaaaaaggacagccttttgctccaggtttccactttttgagagatatgaacacattagtaaaatgcctgtgtctgggaacaggcagccagg

SEQ ID NO: 9882 - DNA, 201 bp, Homo sapiens
acttctcttgcagacatattttgttccaaaatggcatcttacctttatggagtactctttgctgttggcctctgtgctccaatctactgtgtgtccccggycaatgcccccagtgcatacccccgcccttcctccacaaagagcacccctgcctcacaggtgtattccctcaacaccgactttgccttccgcctataccgc

SEQ ID NO: 9883 - DNA, 201 bp, Homo sapiens; identical to SEQ ID NO: 1251

SEQ ID NO: 9884 - DNA, 201 bp, Homo sapiens
cccaggcgaggatcaacagccatgtgaaaaagaagacccaagggaaggttgtagacataatccaaggccttgaccttctgacggccatggttctggtgaaycacattttctttaaaggtaaggatttgagaagttgatttttatttatttattttatgatgatgatgatgatttttgcttagtgaaatacacaagccagac

SEQ ID NO: 9885 - DNA, 201 bp, Homo sapiens
ccactagaagtaattccccatttcagtttgctgtctttgcctcactaattgtactttgacataaagacttcttttctctctttgtgctagccaagtgggaraagccctttcaccctgaatatacaagaaagaacttcccattcctggtgggcgagcaggtcactgtgcatgtccccatgatgcaccagaaagagcagttcg

SEQ ID NO: 9886 - DNA, 201 bp, Homo sapiens
acaaatataagaaaaaatgctcaacattactaatgatcagggaaatgcaaatcaaaaccacagtgtgatatcaccttactcctgcaagaatggccataatmaaaaaataatagacgttggcgtggatgtggtgaaaagggaacatttctgcactgctggtgggaatgtaaactagtacaacccctatggaaaacggtgtgc

SEQ ID NO: 9887 - DNA, 201 bp, Homo sapiens
ggccatagtcaacacccactgcaatgtattgagtaaacccaatgccaggcatttgaaccttgaatcctttcaaggtagacatcaccattccagggcaaaarcactcagtttagtttactcagttaagtaaaagtgtctccactagggccactgatgtttgtttttcccttggcaggcaacccacaaggctgtgctggatgt

SEQ ID NO: 9888 - DNA, 201 bp, Homo sapiens
gcatttgaaccttgaatcctttcaaggtagacatcaccattccagggcaaaagcactcagtttagtttactcagttaagtaaaagtgtctccactagggcyactgatgtttgtttttcccttggcaggcaacccacaaggctgtgctggatgtcagtgaagagggcactgaggccacagcagctaccaccaccaagttcat

SEQ ID NO: 9889 - DNA, 201 bp, Homo sapiens
atgtgcccaccccaagatagccctattgtttagggtctgggacccatcagtgtctggcatcatgcttggcattaggtgctcagcaggagctcagtgaatgrataaatgagcttttggtgtcctctaagtgtaaactccacaaaaacagcacttttggtctgtttactgctacatctccagcacctaaaggaaagcttggca

SEQ ID NO: 9890 - DNA, 201 bp, Homo sapiens; identical to SEQ ID NO: 1258

SEQ ID NO: 9891 - DNA, 201 bp, Homo sapiens; identical to SEQ ID NO: 1259

SEQ ID NO: 9892 - DNA, 201 bp, Homo sapiens
agagtggctggtgaccttgatgaggacagcctgagtggggacacagaggccagaacagaacagagtggactgaggagcaaagggaggtaccaagcagggcrgtctgtggggttcctggatgcagctggattggtttgctgctcaaagaaaatcccagctcagacctactctaggacagaagaggccttcatgaaagatgcc

SEQ ID NO: 9893 - DNA, 201 bp, Homo sapiens
gattacaggggaggcctctacggttaggaaggggacaagtctgcagattgcagataggagagcaaacgccaagcagccagcaggccttcatctagctctgwcataggaacctccacacctcctcatcctcacagaggtctgccccagccactgcctgggccactgctgctgcagcctggtctcttaagacacagaccaggt

SEQ ID NO: 9894 - DNA, 201 bp, Homo sapiens
ctttgtggctgctgcccctggggccactgccaccactgctgctcctgctgcagctccagccaaggctgaagccaagaagagttggaggagttggatgagamtatgggatttggcctatttgactaatcaccaaaaggcaaccaactcagccagctttatttgcaaaacaaagaaatgaaggcttacttctttcaaaaaaaa

SEQ ID NO: 9895 - DNA, 201 bp, Homo sapiens; identical to SEQ ID NO: 1261

SEQ ID NO: 9896 - DNA, 201 bp, Homo sapiens
ggagttacagcagcgaaccagatacacagaatccctgcctcccagagctcacatgaggaggaagacagacaaaaagcaactcagcaaatgcataaataagmaattgaagaaaatgaaacaaaatgaccagggaagaggggtgctctttagctcgggtaatgtggaaaggccgatctgaggtgagagcaacagaaatgatgg

SEQ ID NO: 9897 - DNA, 201 bp, Homo sapiens
tttaaaccctgcatggcaacccctgacacactgccaggctgcccagggaatacagggcaacctggaagtccaactacttccttcagatcatccaatttttyaatcattatctgaaatgtttcattgtagaagcagcaatgtgggctccaagtagatgcagcagatccacatgtccctctgagggaaagccatggtgccaat

SEQ ID NO: 9898 - DNA, 201 bp, Homo sapiens; identical to SEQ ID NO: 1263

SEQ ID NO: 9899 - DNA, 201 bp, Homo sapiens
aggtaagaagaccaggggctcagttttgaacctgtcaattttgagacgcatacagaataaccaagcagagatacaaagtaagcacttacatctatgagtcrggagcgcgggaaaaattcaggaatggagatctacacttgggagccatcatcgtaggggtagcattctagctttggggtgtatagatcatccagtgacaga

SEQ ID NO: 9900 - DNA, 201 bp, Homo sapiens; identical to SEQ ID NO: 1264

SEQ ID NO: 9901 - DNA, 201 bp, Homo sapiens
aaaatacaaaattagccgggcatggtggcgcttgcctgtaatcccagctactcgggagactgaggcaggagaattgcttgaacctgggaggtggaggttgyggtgagccaagatcacaccactgcactccagcctgggcaacaagagtgaaactctgtctcaaaaaaaaaaaaaaaaaaaaaaaaaattgagatctgaagc

SEQ ID NO: 9902 - DNA, 201 bp, Homo sapiens
caggaggatcacctgaggttgggatttcgagaccagcctgaccaacatggagaaaccctgtttctactaaaaatacaaaattagccgggcatggtggcgcwtgcctgtaatcccagctactcgggagactgaggcaggagaattgcttgaacctgggaggtggaggttgcggtgagccaagatcacaccactgcactccag

SEQ ID NO: 9903 - DNA, 201 bp, Homo sapiens
acaagcaaaccacagtcacagtggtgattaccactgcacaggaaacataggctacacgctgttctcatccaagcctgtgaccatcactgtccaaggtatgsggagtctgccaagatgtagggaggggagaagaggggatggacaagggctgaggtcacatgggcctacatggaggtctgagaaagcccatagcagcaaaat

SEQ ID NO: 9904 - DNA, 201 bp, Homo sapiens
ctgggggtgggaggacaggaaacatctgccagagggaaggcctgagctggtcccatccaatcctggccctggtccttggtcctgaggactcaggccccacygcctaatcctgctaacctcctgtgtgtccctcccagctctcccaggagaccctgagtgcagggaaatgggagagaccctccctgagaaaccaggtgaata

SEQ ID NO: 9905 - DNA, 201 bp, Homo sapiens
tgagctggtcccatccaatcctggccctggtccttggtcctgaggactcaggccccaccgcctaatcctgctaacctcctgtgtgtccctcccagctctcycaggagaccctgagtgcagggaaatgggagagaccctccctgagaaaccaggtgaatacagagttgtctcagggattcagtgatggctcaccagggctgc

SEQ ID NO: 9906 - DNA, 201 bp, Homo sapiens
ggtcccatccaatcctggccctggtccttggtcctgaggactcaggccccaccgcctaatcctgctaacctcctgtgtgtccctcccagctctcccaggakaccctgagtgcagggaaatgggagagaccctccctgagaaaccaggtgaatacagagttgtctcagggattcagtgatggctcaccagggctgccggctg

SEQ ID NO: 9907 - DNA, 201 bp, Homo sapiens
gatggctcaccagggctgccggctggacctgagccagcgagaaggggcttgtgcgagttcagctgggagccagggagggagcagcgatggggggatggccrgggctcaaatcgcttggtcaactctgagtctaatttctgggcctaaagaggacctcgctggagatgagaagagaaacaccagtcccagatacagaggaga

SEQ ID NO: 9908 - DNA, 201 bp, Homo sapiens
tttctgtctgccagacatcatgtcaagttctgtgagtaacgtacctctgagactgaaaaacccttggaatctatccttacaactttttcttatcatatttrtgtctttcagaatggctggtgctccagacccctcacctggagttccaggagggagaaaccatcatgctgaggtgccacagctggaaggacaagcctctgg

SEQ ID NO: 9909 - DNA, 201 bp, Homo sapiens
ccagggctgccggctggacctgagccagcgagaaggggcttgtgcgagttcagctgggagccagggagggagcagcgatggggggatggccagggctcaamtcgcttggtcaactctgagtctaatttctgggcctaaagaggacctcgctggagatgagaagagaaacaccagtcccagatacagaggagagggcggtgt

SEQ ID NO: 9910 - DNA, 201 bp, Homo sapiens; identical to SEQ ID NO: 1265

SEQ ID NO: 9911 - DNA, 201 bp, Homo sapiens
ctttttatttcttatgtggatggaagattttatgcagggtatagtatggtctgaatgtttctgtgcccccaaaattcatatgatatgaattaatcaaatarcaacccccagggtgatggtattaggaggtgaggtctttgggtaggtgattaggtcatgagggcagagcccttataaaagagggccgagggagctcaaagg

SEQ ID NO: 9912 - DNA, 201 bp, Homo sapiens
gtgggacagggagaatacaaacgttgtcattaaaatagtaaccccccatcctgccctaatgtctgtcttccctagtgcccagcatgggcagctcttcaccratggggatcattgtggctgtggtcattgcgactgctgtagcagccattgttgctgctgtagtggccttgatctactgcaggaaaaagcggatttcaggtt

SEQ ID NO: 9913 - DNA, 201 bp, Homo sapiens
agcttctgcagacagtcaagctggtgagtatgccctttgcttccttgtattgacagtgttgtatcctcataatatgatgctgtgtttgctggggcggcggrggggtatgtctattccactgaaaatcaagcttgggttcagcatgggcagttcccccattttagtggggtctgggatttgcttcttagatccactgaagac

SEQ ID NO: 9914 - DNA, 201 bp, Homo sapiens
caggatcttgagatgggtcctggagaaggaagagcccaagctcacctccccagcatttcacatacgcagctaaatttgaagccgtgttctcctgctcgacrttgatccactctcttctcttttacagcttctgcagacagtcaagctggtgagtatgccctttgcttccttgtattgacagtgttgtatcctcataatatg

SEQ ID NO: 9915 - DNA, 201 bp, Homo sapiens
taattaaaggagtcacgtgatctgatttagctttatgtaaacatctgacagtgttcagtttaatagagtctgtagagaaaatgcttctagatagtatttcttttttttttcccccaagtagctgggactccaggcacacaccaccatgccaagtgacttgtttttatttatttttatagagacagggtctcagtatgttgc

SEQ ID NO: 9916 - DNA, 201 bp, Homo sapiens
agctcagcagttaatggcacagccaaaatcgcaatcctgactttagtttctgttttatgccatctcagtaatggtacctggcctttcatatacagaatactttttttttttggccaggcacagtggctcatgcctgtaatcccagcactttgggaggacgaggtggatggatcacttgaggtcgggagttcgagaccagcc

SEQ ID NO: 9917 - DNA, 201 bp, Homo sapiens
atctgtttacagacagaggtttgcaggaaagagtgggcgtggactgcttactgggaagcactgttgtgagttgctcattcattccccatttcacccacccyctttgcttagcatgcgtggtgggggaagggggaatttctaataattttctcagcatgtgttaggttgtttttgcctcagtcttgattgagcaagggggtt

SEQ ID NO: 9918 - DNA, 201 bp, Homo sapiens
tttccactctgcccctcagcagctcccccaaaggctgtgctgaaacttgagcccccgtggatcaacgtgctccaggaggactctgtgactctgacatgccrgggggctcgcagccctgagagcgactccattcagtggttccacaatgggaatctcattcccacccacacgcagcccagctacaggttcaaggccaacaac

SEQ ID NO: 9919 - DNA, 201 bp, Homo sapiens
ctttccactctgcccctcagcagctcccccaaaggctgtgctgaaacttgagcccccgtggatcaacgtgctccaggaggactctgtgactctgacatgcyagggggctcgcagccctgagagcgactccattcagtggttccacaatgggaatctcattcccacccacacgcagcccagctacaggttcaaggccaacaa

SEQ ID NO: 9920 - DNA, 201 bp, Homo sapiens
agatcaggcagaggctgataggctgttgcaactattttgacttttattcctgagtgagttgagatggctttaattaaaggagtcacgtgatctgatttagstttatgtaaacatctgacagtgttcagtttaatagagtctgtagagaaaatgcttctagatagtatttcttttttttttcccccaagtagctgggactcc

SEQ ID NO: 9921 - DNA, 201 bp, Homo sapiens
acagtgttcagtttaatagagtctgtagagaaaatgcttctagatagtatttcttttttttttcccccaagtagctgggactccaggcacacaccaccatrccaagtgacttgtttttatttatttttatagagacagggtctcagtatgttgcccaggctggtcttcagctcctggcctcaagtgatcttccctcctcag

SEQ ID NO: 9922 - DNA, 201 bp, Homo sapiens
ggtctcagtatgttgcccaggctggtcttcagctcctggcctcaagtgatcttccctcctcaggctctcaaagtattgggattataggcgtgagccaccaygcctggcttagatactgtttctacctgcttccaatgtctgaaaatataagcacatttctattgttgtttacttgagctgcactcttggtgcataaaccct

SEQ ID NO: 9923 - DNA, 201 bp, Homo sapiens
ccattaaattagtaatccccagaccacaaaaactgacggcttcaggccctgtcgagtagcctctacagttactgaaatgcgctcatttctctactcaaacrtagtattttaaattcctcagaattgttttaaatatctgctctgcatctttgaaacctctgaaaacttctgcttttagaagtcccacagatataataccat

SEQ ID NO: 9924 - DNA, 201 bp, Homo sapiens
ttctctactcaaacgtagtattttaaattcctcagaattgttttaaatatctgctctgcatctttgaaacctctgaaaacttctgcttttagaagtcccayagatataataccatatattgcctataagagaatgctcacatctgtcatgaagcatcttcatttctgtctgccagacatcatgtcaagttctgtgagtaac

SEQ ID NO: 9925 - DNA, 201 bp, Homo sapiens
ttgggaggacgaggtggatggatcacttgaggtcgggagttcgagaccagcctggccaacatggaaaaaccccatctctactaaaaatacaaaattagccrggcgtgatggcgcatgcctgtaatccagctactcaggaggctgagggaggaggattgcttgaacttgggaggtggagtttgcagtgagccgagatcgcgc

SEQ ID NO: 9926 - DNA, 201 bp, Homo sapiens
aaaaggaaaaagtgattttaaatttaaaatttttcttgaatgccccttttattcagagtcacaaatgaatactgaattcacctgtgtgaattcaagtcatrcctttttatttcttatgtggatggaagattttatgcagggtatagtatggtctgaatgtttctgtgcccccaaaattcatatgatatgaattaatcaaat

SEQ ID NO: 9927 - DNA, 201 bp, Homo sapiens
cccttttattcagagtcacaaatgaatactgaattcacctgtgtgaattcaagtcatgcctttttatttcttatgtggatggaagattttatgcagggtayagtatggtctgaatgtttctgtgcccccaaaattcatatgatatgaattaatcaaatagcaacccccagggtgatggtattaggaggtgaggtctttggg

SEQ ID NO: 9928 - DNA, 201 bp, Homo sapiens
tgtgtgaattcaagtcatgcctttttatttcttatgtggatggaagattttatgcagggtatagtatggtctgaatgtttctgtgcccccaaaattcataygatatgaattaatcaaatagcaacccccagggtgatggtattaggaggtgaggtctttgggtaggtgattaggtcatgagggcagagcccttataaaaga

SEQ ID NO: 9929 - DNA, 201 bp, Homo sapiens
ctggaggaggtggtatgtgagggcagcgcttagctagggaaggaggactctccaggcactgggccaaggcagggactgaggctgggtggggcttatatgakgggggagtagatagggtactgcaagcctctgagaaagagaaataatcccactaacacctcacaaagcactttgcaattggttcatagccaacacctcagt

SEQ ID NO: 9930 - DNA, 201 bp, Homo sapiens
ggctgtgctccatagagtaatgatgcctccagctatgcgaggctttgggcccaccctccgtactgtccccaggggctaaggggaatccttccctctgctcstgcatgctcaccagtgtgctttcattcatttggtggagaaacctgggtagggaggaggcacaagtccagccacagaaaccctgtgccagtgaggctgggg

SEQ ID NO: 9931 - DNA, 201 bp, Homo sapiens
tctgaatgtttctgtgcccccaaaattcatatgatatgaattaatcaaatagcaacccccagggtgatggtattaggaggtgaggtctttgggtaggtgaytaggtcatgagggcagagcccttataaaagagggccgagggagctcaaaggcctcttccgccatgtgaggacacagtaagaagcctcagttctgtgaacc

SEQ ID NO: 9932 - DNA, 201 bp, Homo sapiens
gcctggcacgtcatggactgttcaaggctgtgctccatagagtaatgatgcctccagctatgcgaggctttgggcccaccctccgtactgtccccaggggmtaaggggaatccttccctctgctcctgcatgctcaccagtgtgctttcattcatttggtggagaaacctgggtagggaggaggcacaagtccagccacag

SEQ ID NO: 9933 - DNA, 201 bp, Homo sapiens
ccaggtggggaagtgaggagagacaaacagaggggtgagagggagacagaaggaagacagctggtaagagaccctatggtgtattttttctatgtaaacargataaaaactgctcctcctggaacagcaaagttctccctatgtctccaagctacaaacttgcatgctagctactaactagctactctccctctctctctc

SEQ ID NO: 9934 - DNA, 201 bp, Homo sapiens; identical to SEQ ID NO: 1273

SEQ ID NO: 9935 - DNA, 201 bp, Homo sapiens; identical to SEQ ID NO: 1274

SEQ ID NO: 9936 - DNA, 201 bp, Homo sapiens; identical to SEQ ID NO: 1275

SEQ ID NO: 9937 - DNA, 201 bp, Homo sapiens
aagcatacacagcatctgccattgtccacctgcaggatgggggagctgaagaatgtatctattgcctctggccctcattagttgagcgttgcccctggggkcatttactcccccctcatttccaggttgaactttgtcagatgaggaatgccacacacacacacaccagggaagactctggggcagaatgtgttcgtcacc

SEQ ID NO: 9938 - DNA, 201 bp, Homo sapiens
gtaggagttgtttgcccttggccaatatgaaaaacctgagtgttctcccttcacttctagcgacaagtaacacatcccctgtcttgccatgaaaagagctktaactgtagcagccggtggcaggttttctgttcccaggtggggaagtgaggagagacaaacagaggggtgagagggagacagaaggaagacagctggtaa

SEQ ID NO: 9939 - DNA, 201 bp, Homo sapiens
gaaaatgaccactaacgctacaggcttaaagaagcacttacacattgaatccacttttctttaatcatcagagatgtggataaaaaccaacacacaaggayacccaaggcggtagtgccagcaagggaaaaaaaggctttggaggaggagccaggcagcgctgggtgtgcatccttaggcaagtctcttgacctctgggca

SEQ ID NO: 9940 - DNA, 201 bp, Homo sapiens
agaacaacactacattagtaggccacctgctaacttctgcctttcacattttccagcttaaaacatctccatcctccccattatgtaagaaagaagtacargtgtttctgactgctccctctcccatgatcccataacccatcagttctgaagctgcattatccaaccttctgaatctctctgaccaccctccaagtcttc

SEQ ID NO: 9941 - DNA, 201 bp, Homo sapiens
gattacttgaggccaggagttcgagaccagcctagccaacatggtgaaaccctgtctctactaaaaaatacaaaaattagctgggcacggtggagcatgcytgtaatctcagctactcaggagactgaggcacaagaatcacttgaacccaggaggcagaggttgcagtgagtcaagatcgcaccactgcactccagcctg

SEQ ID NO: 9942 - DNA, 201 bp, Homo sapiens
tgagactgggccaagaaagaagctgccatccatgtgatgggtccacagagaaggatagatcgagtcaggattctcaagcagtttggctgtgcaattggcaygtattctctgaccccttggcattctctggagagaatgcactaaatattttcactgcatttcacctgagtttctcagcctcaacatcactgacatttggaa

SEQ ID NO: 9943 - DNA, 201 bp, Homo sapiens; identical to SEQ ID NO: 1277

SEQ ID NO: 9944 - DNA, 201 bp, Homo sapiens
gtgatggtgactgcccccttcatgcatgagtgttgctgtggggccaccccgtcggcaggtggcagtgctgctatgcgcttgacgtgcagccgcgcaaagaygaacatgtgcacgtagagggtgcccatgaggagcatcatggcgaagaacatggtgatgaggcacacaatgaccattttgctctccgagtagacgatgaac

SEQ ID NO: 9945 - DNA, 201 bp, Homo sapiens
ttcctccaccctctctcactatctgtctctctaccctccccatccttttattctagaggagaataaactctaaggccagattgaatgagcatccaaaagamgtatctggagggagattttgtctttcctgtgagcagcagcagcttcctacggaccctgctggagccccagctcggatcagcccttctgacagcaatgaat

SEQ ID NO: 9946 - DNA, 201 bp, Homo sapiens
gaactatgacccccagaaggacaagcgcttctcgggcaccgtcaggcttaagtccactccctgtcccaagtgtgggtcctgggggaacagcagcactgtgrcgagaccaaggccacggatatccccccaagtggacactgaggtgccaaaaaaactcaagaataagaatctggtcaagaagctggccaagaagtatgatgc

SEQ ID NO: 9947 - DNA, 201 bp, Homo sapiens
tcctgcacgggaaccagtgaaagtgccccaagttcctgaagatggtggagttgcagatcagcttgaagaactatgacccccagaaggacaagcgcttctcrggcaccgtcaggcttaagtccactccctgtcccaagtgtgggtcctgggggaacagcagcactgtggcgagaccaaggccacggatatccccccaagtgg

SEQ ID NO: 9948 - DNA, 201 bp, Homo sapiens
aaggccacggatatccccccaagtggacactgaggtgccaaaaaaactcaagaataagaatctggtcaagaagctggccaagaagtatgatgcatttttgscttcagagtctctgataaagcaaatcccacgaatcctcggcataggcctaacaaaggcagtaaagttcccttccctgctcacacacgatgaaaacacggt

SEQ ID NO: 9949 - DNA, 201 bp, Homo sapiens
tggtggctcacacctgtaatcccagcactttaggaggctgaggtgggcagttcatgggttcaagagatcgagaccatcctggccaacatgatgaaatcccmtctctactaaaaatacaaaaattagctgggcgtggtggcacacacctgtaatcccacttactcaggaggctgaggcaggcgaattgcttaaacccgggag

SEQ ID NO: 9950 - DNA, 201 bp, Homo sapiens
ttctggttagcgtggcatgagaacccataagcagcaaagtctctcacgacaccctggatgaggcggtgcaggaagtcctgcacgggaaccagtgaaagtgycccaagttcctgaagatggtggagttgcagatcagcttgaagaactatgacccccagaaggacaagcgcttctcgggcaccgtcaggcttaagtccactc

SEQ ID NO: 9951 - DNA, 201 bp, Homo sapiens
acaggtgcgcgccaccacgcccagctaatttttttggatttttagtagaggcagggtttcaccatgttgaccaggctggtctcaaactcctgacctcaagkgacacttctgccttagcctccccaagtgctgagattacaggcatgagtcaccgtgcccggcccacacacacatttttaacagaaagaatggaagatgaag

SEQ ID NO: 9952 - DNA, 201 bp, Homo sapiens
atgagcttgtgcataacattcacctggctgttaacttcttggtgtcactgctcgagaaaaaactggcagaatgtccgggccttatatatcaagagcaccaygggcaagccccagcgcctatattaaggcatatttgaaaagattctactgctactagtaaaaaaaacaaaaaacaaaaaaccaactaatcccatgaaaact

SEQ ID NO: 9953 - DNA, 201 bp, Homo sapiens
atgtttggctgtggctgttggccacgtgaagatgacagacgatgagcttgtgcataacattcacctggctgttaacttcttggtgtcactgctcgagaaamaactggcagaatgtccgggccttatatatcaagagcaccacgggcaagccccagcgcctatattaaggcatatttgaaaagattctactgctactagtaa

SEQ ID NO: 9954 - DNA, 201 bp, Homo sapiens
ttcttaaaactttcttcaactttggtataagaaagactctgtagcctgaaagttaattttcaaacatggctgcagaaagacttggtgtcaaaagatgtggraagtattttacacaatgaaaatcaccacaacaaccagggacctgtgggggtagagtcctttgggtttagaggcattgatgtaattttttttggcagtttt

SEQ ID NO: 9955 - DNA, 201 bp, Homo sapiens
ccaagccttttcctttgaggctcagggcgggctggctaacattgctatattgaacaacaacttgaataccttgatccagcgttccaaccacactcaggccrccaacggtacgccctatctttgcctcttcctctgtagcccaactggaagggatgagagggcctctctgccaccctcagactaggaagcctaagtgccccc

SEQ ID NO: 9956 - DNA, 201 bp, Homo sapiens
agaccaacaggggagtttatgtttgaatttgatgaagatgagatgttctatgtggatctggacaagaaggagaccgtctggcatctggaggagtttggccragccttttcctttgaggctcagggcgggctggctaacattgctatattgaacaacaacttgaataccttgatccagcgttccaaccacactcaggccacc

SEQ ID NO: 9957 - DNA, 201 bp, Homo sapiens
atgtgtcaacttatgccgcgtttgtacagacgcatagaccaacaggggagtttatgtttgaatttgatgaagatgagatgttctatgtggatctggacaaraaggagaccgtctggcatctggaggagtttggccaagccttttcctttgaggctcagggcgggctggctaacattgctatattgaacaacaacttgaata

SEQ ID NO: 9958 - DNA, 201 bp, Homo sapiens
tacaaactccatctcagcttttcttctcacttcatgtgaaaactactccagtggctgactgaattgctgacccttcaagctctgtccttatccattaccthaaagcagtcattccttagtaaagtttccaacaaatagaaattaatgacactttggtagcactaatatggagattatcctttcattgagccttttatcctc

SEQ ID NO: 9959 - DNA, 201 bp, Homo sapiens
tggccatgggctgatcccactacagcaagggcttgcatcctctcttctcaggagagagaaaggtgagcagagtgaggctggtcagtggtgtgatacccctstctgtgattcagagctgccataaaatctaaggctgaggtagaggaccaccctcccctaagaggtggagcctttgtgattcatcccagaagaggggcctaa

SEQ ID NO: 9960 - DNA, 201 bp, Homo sapiens
tatctgttttaaggtcccagaacattccacgagaggcatcttgctcaatattctttgacaggagcaggtcagcctggagccacatcagtgacctccagggkgcgctggagttaaggcctgatacccaatggcctcatttctgacccagttcaaatacatttcaccaaggcaaggattcctgtttgttctagttgccttctc

SEQ ID NO: 9961 - DNA, 201 bp, Homo sapiens
gatcccactacagcaagggcttgcatcctctcttctcaggagagagaaaggtgagcagagtgaggctggtcagtggtgtgatacccctctctgtgattcasagctgccataaaatctaaggctgaggtagaggaccaccctcccctaagaggtggagcctttgtgattcatcccagaagaggggcctaacctggtgctgtc

SEQ ID NO: 9962 - DNA, 201 bp, Homo sapiens
tccgaggagctggggccatcaagggtgagtgctcaggaggacgcaggagcgtcggggtgagtgatggggtggttcacatcaattgctgcttcagggatcasagattttaggggctcattgatctatctggtcctcatagtctatgttccctctggccctcataataataacagcaataacagccagaatttatgagactcc

SEQ ID NO: 9963 - DNA, 201 bp, Homo sapiens; identical to SEQ ID NO: 1386

SEQ ID NO: 9964 - DNA, 201 bp, Homo sapiens
ggcccacagtttcagtctcatctgcctccactcggcctcagttcctcatcactgttcctgtgctcacagtcatcaattatagaccccacaacatgcgcccwgaagacagaatgttccatatcagagctgtgatcttgagagccctctccttggctttcctgctgagtctccgaggagctggggccatcaagggtgagtgct

SEQ ID NO: 9965 - DNA, 201 bp, Homo sapiens
cagtgctagaggcccacagtttcagtctcatctgcctccactcggcctcagttcctcatcactgttcctgtgctcacagtcatcaattatagaccccacarcatgcgccctgaagacagaatgttccatatcagagctgtgatcttgagagccctctccttggctttcctgctgagtctccgaggagctggggccatcaag

SEQ ID NO: 9966 - DNA, 201 bp, Homo sapiens
aaggagcctgtggagctgggccagcccaacaccctcatctgccacattgacaagttcttcccaccagtgctcaacgtcacgtggctgtgcaacggggagcyggtcactgagggtgtcgctgagagcctcttcctgcccagaacagattacagcttccacaagttccattacctgacctttgtgccctcagcagaggacttc

SEQ ID NO: 9967 - DNA, 201 bp, Homo sapiens
ctttatggtgttgctccttcttcttccccatatgtccttcctttgacctcttaccttcttcctttttatattcataagtctttattcattctctagctttsaccacttgcatattcaaactgacattttgtcgtgtttttctctactgtctttatgcagcggaccatgtgtcaacttatgccgcgtttgtacagacgcata

SEQ ID NO: 9968 - DNA, 201 bp, Homo sapiens
tgtccttcctttgacctcttaccttcttcctttttatattcataagtctttattcattctctagctttgaccacttgcatattcaaactgacattttgtcrtgtttttctctactgtctttatgcagcggaccatgtgtcaacttatgccgcgtttgtacagacgcatagaccaacaggggagtttatgtttgaatttgat

SEQ ID NO: 9969 - DNA, 201 bp, Homo sapiens
aggagcctgtggagctgggccagcccaacaccctcatctgccacattgacaagttcttcccaccagtgctcaacgtcacgtggctgtgcaacggggagctrgtcactgagggtgtcgctgagagcctcttcctgcccagaacagattacagcttccacaagttccattacctgacctttgtgccctcagcagaggacttct

SEQ ID NO: 9970 - DNA, 201 bp, Homo sapiens
ggctgtgcaacggggagctggtcactgagggtgtcgctgagagcctcttcctgcccagaacagattacagcttccacaagttccattacctgacctttgtrccctcagcagaggacttctatgactgcagggtggagcactggggcttggaccagccgctcctcaagcactggggtatgcaactgcttttctctccataat

SEQ ID NO: 9971 - DNA, 201 bp, Homo sapiens
cacttgcatattcaaactgacattttgtcgtgtttttctctactgtctttatgcagcggaccatgtgtcaacttatgccgcgtttgtacagacgcatagamcaacaggggagtttatgtttgaatttgatgaagatgagatgttctatgtggatctggacaagaaggagaccgtctggcatctggaggagtttggccaagc

SEQ ID NO: 9972 - DNA, 201 bp, Homo sapiens
ccatgatgactttgcagttctggaggaaattttgtgagcgatctcagcacagtaagatttgttgcacatcagcagcactttcagctccttgaggctgtggrccagaaacttctggaagccactgggcagcatgttttttttgttgttgttgttgctcccataagcaatgttgggcatcaagatctggcccttggaccttct

SEQ ID NO: 9973 - DNA, 201 bp, Homo sapiens
agacttggtgtcaaaagatgtggaaagtattttacacaatgaaaatcaccacaacaaccagggacctgtgggggtagagtcctttgggtttagaggcattsatgtaattttttttggcagtttttatggttttatttacacacaaaacgtggacatgaactttctactcattttcttagctgtgcaccctggtactggggt

SEQ ID NO: 9974 - DNA, 201 bp, Homo sapiens
ctccacaccatacccttgtgcgctgtcctgtggcttccttttttcaccccacatgcagtcagctgccaggcctgatgaagtcccgggggtctctctgctcycgtcctcctcactccatgctcagcccagtccaggtccccgcgctcgctcccctgacaagctccagatgggctccccccatgaatccccaacccaaagtcc

SEQ ID NO: 9975 - DNA, 201 bp, Homo sapiens
gacaaaatatctgaacagaagaggacttaggagagatctgaactccagctgccctacaaactccatctcagcttttcttctcacttcatgtgaaaactacyccagtggctgactgaattgctgacccttcaagctctgtccttatccattacctcaaagcagtcattccttagtaaagtttccaacaaatagaaattaatg

SEQ ID NO: 9976 - DNA, 201 bp, Homo sapiens
ccatctccacctccatctccacaccatacccttgtgcgctgtcctgtggcttccttttttcaccccacatgcagtcagctgccaggcctgatgaagtcccsggggtctctctgctctcgtcctcctcactccatgctcagcccagtccaggtccccgcgctcgctcccctgacaagctccagatgggctccccccatgaat

SEQ ID NO: 9977 - DNA, 201 bp, Homo sapiens
ccacctttagtctccagtgtcattgctaaggcaagatcccaggtcttgactcagatatcctgacctgcctcttctcctggtgccttgggccccagaccctraaattccaggcccagagccccccagctccttgagtccagattcctcctcctctgccatccatccgcccctgcctgttcaattgccccactctgagtgtgg

SEQ ID NO: 9978 - DNA, 201 bp, Homo sapiens
gctgccctacaaactccatctcagcttttcttctcacttcatgtgaaaactactccagtggctgactgaattgctgacccttcaagctctgtccttatccrttacctcaaagcagtcattccttagtaaagtttccaacaaatagaaattaatgacactttggtagcactaatatggagattatcctttcattgagccttt

SEQ ID NO: 9979 - DNA, 201 bp, Homo sapiens
tccccagcttcctcctcctcctcccttcatttttttcctctttctagaaaaaaggtccagggctcaatcccacatcctgatactactccctcaagtccctmaggttggtgcaccaggctccccaccccacaagttcacaggaggaagccaaagctccaaggccttcctgtcccatccttgagaaatcctcttactgcacac

SEQ ID NO: 9980 - DNA, 201 bp, Homo sapiens
gttggggatgtgtgtggagttgggggagcatgcagggaattgtggaatcagccctgcccactttacccactcccctatggctccagctctccctccagcargttttgattgaacattcattctacgcagggagctccagtaatctaccctcagtccctgtcacatggctccactgcctcatctcattccccctacaaacct

SEQ ID NO: 9981 - DNA, 201 bp, Homo sapiens
ctccccagcttcctcctcctcctcccttcatttttttcctctttctagaaaaaaggtccagggctcaatcccacatcctgatactactccctcaagtcccwcaggttggtgcaccaggctccccaccccacaagttcacaggaggaagccaaagctccaaggccttcctgtcccatccttgagaaatcctcttactgcaca

SEQ ID NO: 9982 - DNA, 201 bp, Homo sapiens
tttttcatttttcaaaaatcttcagtgttctgacaatacttatctggctacatgggaacctctagggagctgattacaagcagagatccccagacctcccyacccagggaatctgagtctgggggcactgagtctggagatctgtgcatcacagaggatctccagaagagtcttcagaggagtgaggttggggacctgcgg

SEQ ID NO: 9983 - DNA, 201 bp, Homo sapiens
cctttgaggctcagggcgggctggctaacattgctatattgaacaacaacttgaataccttgatccagcgttccaaccacactcaggccaccaacggtackccctatctttgcctcttcctctgtagcccaactggaagggatgagagggcctctctgccaccctcagactaggaagcctaagtgccccctgctgtgtgat

SEQ ID NO: 9984 - DNA, 201 bp, Homo sapiens
agggggcggacatgagcggaggcgccactctcatctaatcctctttctccctctctctctcaatattaacgattcttcccaaatcttcccacccagggctrgattttaaaataggagttttcctagtaccgagttctgtggtcctaagcgggtcgcagagcctctccaggcctgttttctcaccacgcagagagagaattt

SEQ ID NO: 9985 - DNA, 201 bp, Homo sapiens
tttgctcctttctttttataactgctcatctgctctgtattatttcctttatggtgttgctccttcttcttccccatatgtccttcctttgacctcttacyttcttcctttttatattcataagtctttattcattctctagctttgaccacttgcatattcaaactgacattttgtcgtgtttttctctactgtctttat

SEQ ID NO: 9986 - DNA, 201 bp, Homo sapiens
agctccaaggccttcctgtcccatccttgagaaatcctcttactgcacacacctcacctctctccatccctttacacccagacttcctgaaggaaaaagaygaatgaactgagacactgccctgtgacagccgtggggaacccaagacaagtaaaatccatctcagccccgaggaggatgcgccacactcagcctcatgca

SEQ ID NO: 9987 - DNA, 201 bp, Homo sapiens
aaccttctctttttcatttttcaaaaatcttcagtgttctgacaatacttatctggctacatgggaacctctagggagctgattacaagcagagatccccmgacctccccacccagggaatctgagtctgggggcactgagtctggagatctgtgcatcacagaggatctccagaagagtcttcagaggagtgaggttggg

SEQ ID NO: 9988 - DNA, 201 bp, Homo sapiens
ctttgaggctcagggcgggctggctaacattgctatattgaacaacaacttgaataccttgatccagcgttccaaccacactcaggccaccaacggtacgscctatctttgcctcttcctctgtagcccaactggaagggatgagagggcctctctgccaccctcagactaggaagcctaagtgccccctgctgtgtgatc

SEQ ID NO: 9989 - DNA, 201 bp, Homo sapiens
ctgcggggagggggcggacatgagcggaggcgccactctcatctaatcctctttctccctctctctctcaatattaacgattcttcccaaatcttcccacycagggctggattttaaaataggagttttcctagtaccgagttctgtggtcctaagcgggtcgcagagcctctccaggcctgttttctcaccacgcagaga

SEQ ID NO: 9990 - DNA, 201 bp, Homo sapiens
accatgtgtcaacttatgccgcgtttgtacagacgcatagaccaacaggggagtttatgtttgaatttgatgaagatgagatgttctatgtggatctggayaagaaggagaccgtctggcatctggaggagtttggccaagccttttcctttgaggctcagggcgggctggctaacattgctatattgaacaacaacttga

SEQ ID NO: 9991 - DNA, 201 bp, Homo sapiens
aattctctgcggggagggggcggacatgagcggaggcgccactctcatctaatcctctttctccctctctctctcaatattaacgattcttcccaaatctwcccacccagggctggattttaaaataggagttttcctagtaccgagttctgtggtcctaagcgggtcgcagagcctctccaggcctgttttctcaccacg

SEQ ID NO: 9992 - DNA, 201 bp, Homo sapiens
taaagaggaggccctaggatttgtagaatgtaaggaagggaggaaaaattcaatctgataagtgttcattgatcttctaatgggttaaaagcattcagccrcataacaacaacaacaccgataactaactgagtagttaatatggtcaggcgctattctgaggatttacatttattaactcactttattctcacacatagt

SEQ ID NO: 9993 - DNA, 201 bp, Homo sapiens; identical to SEQ ID NO: 1285

SEQ ID NO: 9994 - DNA, 201 bp, Homo sapiens
ctgacattttgtcgtgtttttctctactgtctttatgcagcggaccatgtgtcaacttatgccgcgtttgtacagacgcatagaccaacaggggagtttakgtttgaatttgatgaagatgagatgttctatgtggatctggacaagaaggagaccgtctggcatctggaggagtttggccaagccttttcctttgaggct

SEQ ID NO: 9995 - DNA, 201 bp, Homo sapiens
tccaatccagaaagtctggatccaagactgtttatccactgtcctattcaccctattttgtgaaggaaaagaccaagttcaaattctccagagtccattgycaaataatggagtcagatctatatttctatacataattacaacacagtgtggtgggtgcctgtaactacttactgtctctacttggactcattccatggc

SEQ ID NO: 9996 - DNA, 201 bp, Homo sapiens
ttgctgacccttcaagctctgtccttatccattacctcaaagcagtcattccttagtaaagtttccaacaaatagaaattaatgacactttggtagcactratatggagattatcctttcattgagccttttatcctctgttctcctttgaagaacccctcactgtcaccttcccgagaataccctaagaccaataaatac

SEQ ID NO: 9997 - DNA, 201 bp, Homo sapiens
tattcaaactgacattttgtcgtgtttttctctactgtctttatgcagcggaccatgtgtcaacttatgccgcgtttgtacagacgcatagaccaacaggrgagtttatgtttgaatttgatgaagatgagatgttctatgtggatctggacaagaaggagaccgtctggcatctggaggagtttggccaagccttttcct

SEQ ID NO: 9998 - DNA, 201 bp, Homo sapiens
tagatagcacattcattcttaattatcagcagaatatttttgtaaaatattgacaacataacataaaacatgatttaaaatatagtgaccaaaaaacatcraagatcatctgactgtctgggatgggggtggggctcgggagaaggaacataatggaaaacatttgccgtcagaagaaggtgtaacttatctttttacatc

SEQ ID NO: 9999 - DNA, 201 bp, Homo sapiens
agtctatgttccctctggccctcataataataacagcaataacagccagaatttatgagactcctgcatagtttctttccccatttacatctcacaggaaycttcaatgaagataatattccattcatttagaaattattccttttatttagaaattattttgaaaaaactgaagctcaaaaagatgaataagttttccaa

SEQ ID NO: 10000 - DNA, 201 bp, Homo sapiens
gagtctccgaggagctggggccatcaagggtgagtgctcaggaggacgcaggagcgtcggggtgagtgatggggtggttcacatcaattgctgcttcaggratcacagattttaggggctcattgatctatctggtcctcatagtctatgttccctctggccctcataataataacagcaataacagccagaatttatgag

SEQ ID NO: 10001 - DNA, 201 bp, Homo sapiens
ctttcctgctgagtctccgaggagctggggccatcaagggtgagtgctcaggaggacgcaggagcgtcggggtgagtgatggggtggttcacatcaattgytgcttcagggatcacagattttaggggctcattgatctatctggtcctcatagtctatgttccctctggccctcataataataacagcaataacagccag

SEQ ID NO: 10002 - DNA, 201 bp, Homo sapiens
cttcagacagttttatttaagatgtgtagaataaagaggaggtcaggctgggtagaaccagaagtatctattgccctgttcgcggtcacctgagttatttytaatgttatgttataataaacaccacaataggcttctcttcatagatgcaaatactttttagtattcttggtagaaattcctaatgagctcagctgtctc

SEQ ID NO: 10003 - DNA, 201 bp, Homo sapiens
caagggcaccatggagtccacctttagtctccagtgtcattgctaaggcaagatcccaggtcttgactcagatatcctgacctgcctcttctcctggtgcsttgggccccagaccctaaaattccaggcccagagccccccagctccttgagtccagattcctcctcctctgccatccatccgcccctgcctgttcaattg

SEQ ID NO: 10004 - DNA, 201 bp, Homo sapiens
ttggggatgtgtgtggagttgggggagcatgcagggaattgtggaatcagccctgcccactttacccactcccctatggctccagctctccctccagcagrttttgattgaacattcattctacgcagggagctccagtaatctaccctcagtccctgtcacatggctccactgcctcatctcattccccctacaaacctc

SEQ ID NO: 10005 - DNA, 201 bp, Homo sapiens
tttgtcgtgtttttctctactgtctttatgcagcggaccatgtgtcaacttatgccgcgtttgtacagacgcatagaccaacaggggagtttatgtttgartttgatgaagatgagatgttctatgtggatctggacaagaaggagaccgtctggcatctggaggagtttggccaagccttttcctttgaggctcagggcg

SEQ ID NO: 10006 - DNA, 201 bp, Homo sapiens
tttttctctactgtctttatgcagcggaccatgtgtcaacttatgccgcgtttgtacagacgcatagaccaacaggggagtttatgtttgaatttgatgahgatgagatgttctatgtggatctggacaagaaggagaccgtctggcatctggaggagtttggccaagccttttcctttgaggctcagggcgggctggcta

SEQ ID NO: 10007 - DNA, 201 bp, Homo sapiens
cattctacgcagggagctccagtaatctaccctcagtccctgtcacatggctccactgcctcatctcattccccctacaaacctcaacccagcctttgccygtcctccctttcactgcccagcatcacatgcccccttctgctctctgctcccccacctctgggtttccttggtggctcccaacactgtccctcatcccac

SEQ ID NO: 10008 - DNA, 201 bp, Homo sapiens
catgcccccttctgctctctgctcccccacctctgggtttccttggtggctcccaacactgtccctcatcccacatgacagctctgcctatgggatggggrcgctgcatccgtcacttcctcctgacactgttcagtgtcaccagtgctgctccagcctcctctctccccagcctcacccctctgcagttcccagggctga

SEQ ID NO: 10009 - DNA, 201 bp, Homo sapiens
atgcccccttctgctctctgctcccccacctctgggtttccttggtggctcccaacactgtccctcatcccacatgacagctctgcctatgggatgggggygctgcatccgtcacttcctcctgacactgttcagtgtcaccagtgctgctccagcctcctctctccccagcctcacccctctgcagttcccagggctgag

SEQ ID NO: 10010 - DNA, 201 bp, Homo sapiens
cagtcattccttagtaaagtttccaacaaatagaaattaatgacactttggtagcactaatatggagattatcctttcattgagccttttatcctctgttytcctttgaagaacccctcactgtcaccttcccgagaataccctaagaccaataaatacttcagtatttcagagcggggagactctgagtcattcttactg

SEQ ID NO: 10011 - DNA, 201 bp, Homo sapiens
agcagtcattccttagtaaagtttccaacaaatagaaattaatgacactttggtagcactaatatggagattatcctttcattgagccttttatcctctgktctcctttgaagaacccctcactgtcaccttcccgagaataccctaagaccaataaatacttcagtatttcagagcggggagactctgagtcattcttac

SEQ ID NO: 10012 - DNA, 201 bp, Homo sapiens
gtcattccttagtaaagtttccaacaaatagaaattaatgacactttggtagcactaatatggagattatcctttcattgagccttttatcctctgttctyctttgaagaacccctcactgtcaccttcccgagaataccctaagaccaataaatacttcagtatttcagagcggggagactctgagtcattcttactgga

SEQ ID NO: 10013 - DNA, 201 bp, Homo sapiens
cccccttctgctctctgctcccccacctctgggtttccttggtggctcccaacactgtccctcatcccacatgacagctctgcctatgggatgggggcgcygcatccgtcacttcctcctgacactgttcagtgtcaccagtgctgctccagcctcctctctccccagcctcacccctctgcagttcccagggctgagccg

SEQ ID NO: 10014 - DNA, 201 bp, Homo sapiens
ttagtaaagtttccaacaaatagaaattaatgacactttggtagcactaatatggagattatcctttcattgagccttttatcctctgttctcctttgaaraacccctcactgtcaccttcccgagaataccctaagaccaataaatacttcagtatttcagagcggggagactctgagtcattcttactggaagtctagg

SEQ ID NO: 10015 - DNA, 201 bp, Homo sapiens
ctctgctcccccacctctgggtttccttggtggctcccaacactgtccctcatcccacatgacagctctgcctatgggatgggggcgctgcatccgtcacytcctcctgacactgttcagtgtcaccagtgctgctccagcctcctctctccccagcctcacccctctgcagttcccagggctgagccgtcctgctggtta

SEQ ID NO: 10016 - DNA, 201 bp, Homo sapiens
ccttcctgtcccatccttgagaaatcctcttactgcacacacctcacctctctccatccctttacacccagacttcctgaaggaaaaagacgaatgaactsagacactgccctgtgacagccgtggggaacccaagacaagtaaaatccatctcagccccgaggaggatgcgccacactcagcctcatgcaccccctccca

SEQ ID NO: 10017 - DNA, 201 bp, Homo sapiens
agaggcattcttcgtgagcactgaatcctcagtgatcctcagagcctggacactccagcttagggctctctgcctgagtcccctccaggctggatgcagayatgaacacgcccaggagcctgcacttgccaacttctctctctgcaaaccttgtctgtccaaggttatccaggacctcttggtcccattttccccaaagac

SEQ ID NO: 10018 - DNA, 201 bp, Homo sapiens
tgttcttgggcacactggggaaattaaggtgctgtgattgttctgctcatctgtttcatgctccacaaattaacttctccagtttattaacctcacccctwgcagaagttgcacagctggtggcagaggatagtggagatggggtagggctgggctcaagggcaccatggagtccacctttagtctccagtgtcattgcta

SEQ ID NO: 10019 - DNA, 201 bp, Homo sapiens
gaggcattcttcgtgagcactgaatcctcagtgatcctcagagcctggacactccagcttagggctctctgcctgagtcccctccaggctggatgcagacrtgaacacgcccaggagcctgcacttgccaacttctctctctgcaaaccttgtctgtccaaggttatccaggacctcttggtcccattttccccaaagaca

SEQ ID NO: 10020 - DNA, 201 bp, Homo sapiens
gatgagtggaccccagagccagagagtcccctgctcttcagaggtggggtctagagggtcatcagagactcactccactccacggtgacaggactatccamgctggtgtgctccacttggcaggtgtagacatctccctgctggggggtcatttccagcatcaccaggatctggaaggtccagtctccattacggatcagg

SEQ ID NO: 10021 - DNA, 201 bp, Homo sapiens
ccgtccctggaaaaggtaattctctgcggggagggggcggacatgagcggaggcgccactctcatctaatcctctttctccctctctctctcaatattaasgattcttcccaaatcttcccacccagggctggattttaaaataggagttttcctagtaccgagttctgtggtcctaagcgggtcgcagagcctctccagg

SEQ ID NO: 10022 - DNA, 201 bp, Homo sapiens
caattgctgcttcagggatcacagattttaggggctcattgatctatctggtcctcatagtctatgttccctctggccctcataataataacagcaataayagccagaatttatgagactcctgcatagtttctttccccatttacatctcacaggaatcttcaatgaagataatattccattcatttagaaattattcct

SEQ ID NO: 10023 - DNA, 201 bp, Homo sapiens
gagcctggacactccagcttagggctctctgcctgagtcccctccaggctggatgcagacatgaacacgcccaggagcctgcacttgccaacttctctctstgcaaaccttgtctgtccaaggttatccaggacctcttggtcccattttccccaaagacaagcactgaccactgggcacctctctctgtttactgtaccc

SEQ ID NO: 10024 - DNA, 201 bp, Homo sapiens
agatgtgagcagcaccatcagtaacgccgtcagagccactgtccggggggccgcagaaacctgcagaaccatcatggagctggaaaaggatggcaaaatgraaagagctgcagtcaggaaaagaaggactcgctaaagggagctcctgtttgaaatattagagaccatgaacccaagtagtcttctgtgaccctgggattg

SEQ ID NO: 10025 - DNA, 201 bp, Homo sapiens
cacagattttaggggctcattgatctatctggtcctcatagtctatgttccctctggccctcataataataacagcaataacagccagaatttatgagackcctgcatagtttctttccccatttacatctcacaggaatcttcaatgaagataatattccattcatttagaaattattccttttatttagaaattatttt

SEQ ID NO: 10026 - DNA, 201 bp, Homo sapiens
acatgctgttcttcctagggagtgccatgagcagtgtctggcaggtgtgtgtctacacagaattatcagtgacacggcacatgtttgtttctgtttgagtrtcttcaggcctgctctgttcttgggcacactggggaaattaaggtgctgtgattgttctgctcatctgtttcatgctccacaaattaacttctccagttt

SEQ ID NO: 10027 - DNA, 201 bp, Homo sapiens
accccagctgtttcctcctgtccattcaggaaccatcggacttgaatgctgcctgggtagaaatccgtcacgtggcagacaagcaggttgtggtgctgcaygggccccttcttggagggggaaacattcaccctaggctggactaggagcgtggaagaaaaataatgaaatagaatttgagattgtccttctttccttcct

SEQ ID NO: 10028 - DNA, 201 bp, Homo sapiens
tcgctgtcgaagcgcgcgaactcctcccggttgtagatgtatctctccaggaagcgctgtgtcccattaaacgcgtagcattcctgccgtccctggaaaasgtaattctctgcggggagggggcggacatgagcggaggcgccactctcatctaatcctctttctccctctctctctcaatattaacgattcttcccaaat

SEQ ID NO: 10029 - DNA, 201 bp, Homo sapiens
cgtcgctgtcgaagcgcgcgaactcctcccggttgtagatgtatctctccaggaagcgctgtgtcccattaaacgcgtagcattcctgccgtccctggaamaggtaattctctgcggggagggggcggacatgagcggaggcgccactctcatctaatcctctttctccctctctctctcaatattaacgattcttcccaa

SEQ ID NO: 10030 - DNA, 201 bp, Homo sapiens
cacgtcgctgtcgaagcgcgcgaactcctcccggttgtagatgtatctctccaggaagcgctgtgtcccattaaacgcgtagcattcctgccgtccctggwaaaggtaattctctgcggggagggggcggacatgagcggaggcgccactctcatctaatcctctttctccctctctctctcaatattaacgattcttccc

SEQ ID NO: 10031 - DNA, 201 bp, Homo sapiens
  misc_feature (1)...(201): n = A,T,C or G, or insertion/deletion polymorphism (see Tables 1-2)
tcccccacgtcgctgtcgaagcgcgcgaactcctcccggttgtagatgtatctctccaggaagcgctgtgtcccattaaacgcgtagcattcctgccgtcnctggaaaaggtaattctctgcggggagggggcggacatgagcggaggcgccactctcatctaatcctctttctccctctctctctcaatattaacgattc

SEQ ID NO: 10032 - DNA, 201 bp, Homo sapiens
accatggagtccacctttagtctccagtgtcattgctaaggcaagatcccaggtcttgactcagatatcctgacctgcctcttctcctggtgccttgggcsccagaccctaaaattccaggcccagagccccccagctccttgagtccagattcctcctcctctgccatccatccgcccctgcctgttcaattgccccact

SEQ ID NO: 10033 - DNA, 201 bp, Homo sapiens
gggtcatttccagcatcaccaggatctggaaggtccagtctccattacggatcaggttggtggacacgaccccagctgtttcctcctgtccattcaggaascatcggacttgaatgctgcctgggtagaaatccgtcacgtggcagacaagcaggttgtggtgctgcaagggccccttcttggagggggaaacattcaccc

SEQ ID NO: 10034 - DNA, 201 bp, Homo sapiens
ctactgtctttatgcagcggaccatgtgtcaacttatgccgcgtttgtacagacgcatagaccaacaggggagtttatgtttgaatttgatgaagatgagmtgttctatgtggatctggacaagaaggagaccgtctggcatctggaggagtttggccaagccttttcctttgaggctcagggcgggctggctaacattgc

SEQ ID NO: 10035 - DNA, 201 bp, Homo sapiens
cttagggcaggagcccccgcagcctgtctcagaatttgatcccttaaagataacgtcccctaggaattgttccctgagccagaccctccaagaatggcagytcggctcttacctggagtggccctgccctggaccacagatgtgagcagcaccatcagtaacgccgtcagagccactgtccggggggccgcagaaacctgc

SEQ ID NO: 10036 - DNA, 201 bp, Homo sapiens
agatggggtttggacatggccccagggtatagatgcagaagataagatgagtggaccccagagccagagagtcccctgctcttcagaggtggggtctagabggtcatcagagactcactccactccacggtgacaggactatccaggctggtgtgctccacttggcaggtgtagacatctccctgctggggggtcatttcc

SEQ ID NO: 10037 - DNA, 201 bp, Homo sapiens
tccagtaatctaccctcagtccctgtcacatggctccactgcctcatctcattccccctacaaacctcaacccagcctttgcctgtcctccctttcactgyccagcatcacatgcccccttctgctctctgctcccccacctctgggtttccttggtggctcccaacactgtccctcatcccacatgacagctctgcctat

SEQ ID NO: 10038 - DNA, 201 bp, Homo sapiens
tcagtccctgtcacatggctccactgcctcatctcattccccctacaaacctcaacccagcctttgcctgtcctccctttcactgcccagcatcacatgcycccttctgctctctgctcccccacctctgggtttccttggtggctcccaacactgtccctcatcccacatgacagctctgcctatgggatgggggcgctg

SEQ ID NO: 10039 - DNA, 201 bp, Homo sapiens
acttgggtttttttggtctctttcacaggcttttctgtcttggccaaatcacaactgtccagttcccaggatccggtcctttgctcttccccctgggtccyctctccctggatggtctcatgtatctcagtctcctccccggctgcagacccttctgtctacctgcccatcagaccacccatctgcccctcaagcacctca

SEQ ID NO: 10040 - DNA, 201 bp, Homo sapiens
gctaccctgaaagatgaggaggtgacatgatgtcagtaccttctaggtgtgtcctaggaggggtgtggagaggtctaggaggaagggtgtaagcaggaaargtggaagtcagtggaaaactaaggtacctactttgcagtccttcctctcagagtgttggtgtaaatttggactagaaatgtcctgagagtacaatggttg

SEQ ID NO: 10041 - DNA, 201 bp, Homo sapiens
ggtcatgggcccgcccagctcgtagttgtgtctgcacatcctgtccggcactgcccgcttctcctccaggatgtccttctggctgttccagtactccgcakcaggccgccccagctccgtcaccgcccggaactcccccacgtcgctgtcgaagcgcgcgaactcctcccggttgtagatgtatctctccaggaagcgctg

SEQ ID NO: 10042 - DNA, 201 bp, Homo sapiens
ttcctcagcctcccgaatagctgggattataggtgcctgccacttcacctggctaatttttgtattattagtagagacaaggtttctccatgttggtcagsctggttctctaggagcacttgaccaacgcctgacctcaagtgatccacccgctcggcctctcaaagggctgggattacgggcctgagccactgcatctgc

SEQ ID NO: 10043 - DNA, 201 bp, Homo sapiens
ttccatatcagagctgtgatcttgagagccctctccttggctttcctgctgagtctccgaggagctggggccatcaagggtgagtgctcaggaggacgcargagcgtcggggtgagtgatggggtggttcacatcaattgctgcttcagggatcacagattttaggggctcattgatctatctggtcctcatagtctatgt

SEQ ID NO: 10044 - DNA, 201 bp, Homo sapiens
agtaaagtttccaacaaatagaaattaatgacactttggtagcactaatatggagattatcctttcattgagccttttatcctctgttctcctttgaagarcccctcactgtcaccttcccgagaataccctaagaccaataaatacttcagtatttcagagcggggagactctgagtcattcttactggaagtctaggac

SEQ ID NO: 10045 - DNA, 201 bp, Homo sapiens
ctccacatcctctccagcacctgttgtttcctgactttttaatgatcgccattttaactggtgtgagatggtatctcaagacagtgtggcaattcctcaargatctagaactagaaataccatttgacccagccatcccattactggatatatacccaaaggattataaatcatgctgctataaagacacatgcacacata

SEQ ID NO: 10046 - DNA, 201 bp, Homo sapiens
aaaaataaagtccatagagaatataaattgactggtaaataaggaagaaagtgaaaaaaaatcatcaaagaccccacctccttcaaagcatctgattctaytttgtttagagtgaatatttttacaaactttcaaagaacattacttcttactttagacacttataaatgtgatcctgttggaccaccaattctaatttca

SEQ ID NO: 10047 - DNA, 201 bp, Homo sapiens
gaaattaatgacactttggtagcactaatatggagattatcctttcattgagccttttatcctctgttctcctttgaagaacccctcactgtcaccttccygagaataccctaagaccaataaatacttcagtatttcagagcggggagactctgagtcattcttactggaagtctaggaccaggtcacatgtgaatacta

SEQ ID NO: 10048 - DNA, 201 bp, Homo sapiens
agttagtatgaaaggtctgaaaatataaagcctgtgatgcacttaagatgacggaggaaagacagtgatactcattttaaccagtcagataagtcatgatrtttggggagattatgcgttttctttgctctgaaggtgatctcaaatattctgctggcccatctacagggattatcatttccccaattctgccacacctca

SEQ ID NO: 10049 - DNA, 201 bp, Homo sapiens
gacactttggtagcactaatatggagattatcctttcattgagccttttatcctctgttctcctttgaagaacccctcactgtcaccttcccgagaatacyctaagaccaataaatacttcagtatttcagagcggggagactctgagtcattcttactggaagtctaggaccaggtcacatgtgaatactatttcttgaa

SEQ ID NO: 10050 - DNA, 201 bp, Homo sapiens
tgcctgagtcccctccaggctggatgcagacatgaacacgcccaggagcctgcacttgccaacttctctctctgcaaaccttgtctgtccaaggttatccwggacctcttggtcccattttccccaaagacaagcactgaccactgggcacctctctctgtttactgtacccatgtccttggagagagaataggccagtag

SEQ ID NO: 10051 - DNA, 201 bp, Homo sapiens
ctggattaagaaaatgcacacatatacaccatggaatactgtgcagccataaaaaaggatgagttcatgtcctttgtagggacatggaggaagctggaaaycatcattcacagcaaactattgcaaggacaaaaaaccaaagaccacatgttctcactcataggtgggaactgaacaatgagaacacatggacacaggaag

SEQ ID NO: 10052 - DNA, 201 bp, Homo sapiens
ttttttaagtacatttaacttttgaaatggaattttacctgccaagtagacataagcaatgaggggttttatggtgtaatttgaaaccttcatttttttttgtatataagaaactttatcctgtttgtggaacccttagcaattgagttgcccagagcacggtttgaaaccactgatctgaatgaattcgtctcttattca

SEQ ID NO: 10053 - DNA, 201 bp, Homo sapiens
  misc_feature (1)...(201): n = A,T,C or G, or insertion/deletion polymorphism (see Tables 1-2)
ctcccccacgtcgctgtcgaagcgcgcgaactcctcccggttgtagatgtatctctccaggaagcgctgtgtcccattaaacgcgtagcattcctgccgtncctggaaaaggtaattctctgcggggagggggcggacatgagcggaggcgccactctcatctaatcctctttctccctctctctctcaatattaacgatt

SEQ ID NO: 10054 - DNA, 201 bp, Homo sapiens
gcaccttccagcgtcctctttacccagcaacagagaatgtcagctctatgatttctctgataggtgaatcccagccatgctgattcctctccacccatttscagtgctagaggcccacagtttcagtctcatctgcctccactcggcctcagttcctcatcactgttcctgtgctcacagtcatcaattatagaccccaca

SEQ ID NO: 10055 - DNA, 201 bp, Homo sapiens
agtgaccaaaaaacatcaaagatcatctgactgtctgggatgggggtggggctcgggagaaggaacataatggaaaacatttgccgtcagaagaaggtgtracttatctttttacatctctttctctaactctgaaaatgaactgtgaactggagctctcttgaccacgctggtacctaaaattctcccatctcttcccca

SEQ ID NO: 10056 - DNA, 201 bp, Homo sapiens
ctcctccaggatgtccttctggctgttccagtactccgcagcaggccgccccagctccgtcaccgcccggaactcccccacgtcgctgtcgaagcgcgcgwactcctcccggttgtagatgtatctctccaggaagcgctgtgtcccattaaacgcgtagcattcctgccgtccctggaaaaggtaattctctgcggggag

SEQ ID NO: 10057 - DNA, 201 bp, Homo sapiens
tggtagaaattcctaatgagctcagctgtctcttcagggcttccctgcccagtctcttaacatttaaacatgtcatttaccttaaaaacataagtgcaaaycaactgataaaaaacaaccttgccttcagtctgcatcctgtcccagagacactttctttgtgtcctcacacgtggagctaagcttctgacttgtctctgg

SEQ ID NO: 10058 - DNA, 201 bp, Homo sapiens
cttctcctccaggatgtccttctggctgttccagtactccgcagcaggccgccccagctccgtcaccgcccggaactcccccacgtcgctgtcgaagcgcrcgaactcctcccggttgtagatgtatctctccaggaagcgctgtgtcccattaaacgcgtagcattcctgccgtccctggaaaaggtaattctctgcggg

SEQ ID NO: 10059 - DNA, 201 bp, Homo sapiens
gggctcttcctgggtctttgtgggtggtcacaagctttcctctctcaagacagcagggttgcatggtcttgatagccttgtgattcgggttctgagagatycaggactgcaagggaggcctagacttttgatagctgcaaggactcagccagagatggaccgtagtgaatgctcctttttcctgtagctgaaatcagggag

SEQ ID NO: 10060 - DNA, 201 bp, Homo sapiens
cagggtcatgggcccgcccagctcgtagttgtgtctgcacatcctgtccggcactgcccgcttctcctccaggatgtccttctggctgttccagtactcckcagcaggccgccccagctccgtcaccgcccggaactcccccacgtcgctgtcgaagcgcgcgaactcctcccggttgtagatgtatctctccaggaagcg

SEQ ID NO: 10061 - DNA, 201 bp, Homo sapiens
gctgggaagagaggacactgccttagggcaggagcccccgcagcctgtctcagaatttgatcccttaaagataacgtcccctaggaattgttccctgagcyagaccctccaagaatggcagttcggctcttacctggagtggccctgccctggaccacagatgtgagcagcaccatcagtaacgccgtcagagccactgtc

SEQ ID NO: 10062 - DNA, 201 bp, Homo sapiens
gctgcagggtcatgggcccgcccagctcgtagttgtgtctgcacatcctgtccggcactgcccgcttctcctccaggatgtccttctggctgttccagtastccgcagcaggccgccccagctccgtcaccgcccggaactcccccacgtcgctgtcgaagcgcgcgaactcctcccggttgtagatgtatctctccagga

SEQ ID NO: 10063 - DNA, 201 bp, Homo sapiens
caaagccctcactcacctcggcgctgcagggtcatgggcccgcccagctcgtagttgtgtctgcacatcctgtccggcactgcccgcttctcctccaggakgtccttctggctgttccagtactccgcagcaggccgccccagctccgtcaccgcccggaactcccccacgtcgctgtcgaagcgcgcgaactcctcccgg

SEQ ID NO: 10064 - DNA, 201 bp, Homo sapiens
tcagagctgtgatcttgagagccctctccttggctttcctgctgagtctccgaggagctggggccatcaagggtgagtgctcaggaggacgcaggagcgtyggggtgagtgatggggtggttcacatcaattgctgcttcagggatcacagattttaggggctcattgatctatctggtcctcatagtctatgttccctct

SEQ ID NO: 10065 - DNA, 201 bp, Homo sapiens
ccatcggacttgaatgctgcctgggtagaaatccgtcacgtggcagacaagcaggttgtggtgctgcaagggccccttcttggagggggaaacattcaccytaggctggactaggagcgtggaagaaaaataatgaaatagaatttgagattgtccttctttccttccttccttccttccttccttccttccttccttcct

SEQ ID NO: 10066 - DNA, 201 bp, Homo sapiens
caggatctggaaggtccagtctccattacggatcaggttggtggacacgaccccagctgtttcctcctgtccattcaggaaccatcggacttgaatgctgyctgggtagaaatccgtcacgtggcagacaagcaggttgtggtgctgcaagggccccttcttggagggggaaacattcaccctaggctggactaggagcgt

SEQ ID NO: 10067 - DNA, 201 bp, Homo sapiens
aggccaacccggctgctcctgcgccctgggcacgggcccgcggggctgccctgggaccgccggcccaaagccctcactcacctcggcgctgcagggtcatsggcccgcccagctcgtagttgtgtctgcacatcctgtccggcactgcccgcttctcctccaggatgtccttctggctgttccagtactccgcagcaggcc

SEQ ID NO: 10068 - DNA, 201 bp, Homo sapiens
attacggatcaggttggtggacacgaccccagctgtttcctcctgtccattcaggaaccatcggacttgaatgctgcctgggtagaaatccgtcacgtggyagacaagcaggttgtggtgctgcaagggccccttcttggagggggaaacattcaccctaggctggactaggagcgtggaagaaaaataatgaaatagaat

SEQ ID NO: 10069 - DNA, 201 bp, Homo sapiens
tactgtctttatgcagcggaccatgtgtcaacttatgccgcgtttgtacagacgcatagaccaacaggggagtttatgtttgaatttgatgaagatgagawgttctatgtggatctggacaagaaggagaccgtctggcatctggaggagtttggccaagccttttcctttgaggctcagggcgggctggctaacattgct

SEQ ID NO: 10070 - DNA, 201 bp, Homo sapiens
agctgtttcctcctgtccattcaggaaccatcggacttgaatgctgcctgggtagaaatccgtcacgtggcagacaagcaggttgtggtgctgcaagggcyccttcttggagggggaaacattcaccctaggctggactaggagcgtggaagaaaaataatgaaatagaatttgagattgtccttctttccttccttcctt

SEQ ID NO: 10071 - DNA, 201 bp, Homo sapiens
accaacaggggagtttatgtttgaatttgatgaagatgagatgttctatgtggatctggacaagaaggagaccgtctggcatctggaggagtttggccaarccttttcctttgaggctcagggcgggctggctaacattgctatattgaacaacaacttgaataccttgatccagcgttccaaccacactcaggccaccaa

SEQ ID NO: 10072 - DNA, 201 bp, Homo sapiens
tattcattctctagctttgaccacttgcatattcaaactgacattttgtcgtgtttttctctactgtctttatgcagcggaccatgtgtcaacttatgccrcgtttgtacagacgcatagaccaacaggggagtttatgtttgaatttgatgaagatgagatgttctatgtggatctggacaagaaggagaccgtctggca

SEQ ID NO: 10073 - DNA, 201 bp, Homo sapiens
tctcatctaatcctctttctccctctctctctcaatattaacgattcttcccaaatcttcccacccagggctggattttaaaataggagttttcctagtaycgagttctgtggtcctaagcgggtcgcagagcctctccaggcctgttttctcaccacgcagagagagaatttactgaaaagaatgagctcaggggcactg

SEQ ID NO: 10074 - DNA, 201 bp, Homo sapiens
tgataggtgaatcccagccatgctgattcctctccacccatttccagtgctagaggcccacagtttcagtctcatctgcctccactcggcctcagttcctyatcactgttcctgtgctcacagtcatcaattatagaccccacaacatgcgccctgaagacagaatgttccatatcagagctgtgatcttgagagccctct

SEQ ID NO: 10075 - DNA, 201 bp, Homo sapiens
cctatgtgtgaggtcagttcctaagtgtgagggtttcgagaccagtcagtgtccctagattctctgacaagggggagaactatgaatcttcaggaaccccyaagccaaggtcaggaagtctccatttccctggcttcaaactatgctcaggagctggtatagaagaaagatggggtttggacatggccccagggtatagat

SEQ ID NO: 10076 - DNA, 201 bp, Homo sapiens
ttcccacccagggctggattttaaaataggagttttcctagtaccgagttctgtggtcctaagcgggtcgcagagcctctccaggcctgttttctcaccaygcagagagagaatttactgaaaagaatgagctcaggggcactgagtgatcactagggaggggcgagcactgaggggaaggcagtcccttctgctggtggc

SEQ ID NO: 10077 - DNA, 201 bp, Homo sapiens
aatctgataagtgttcattgatcttctaatgggttaaaagcattcagccacataacaacaacaacaccgataactaactgagtagttaatatggtcaggcrctattctgaggatttacatttattaactcactttattctcacacatagtctttgaggtaggtactattattttcactatttcacatgagagatacttaca

SEQ ID NO: 10078 - DNA, 201 bp, Homo sapiens
gccattttaactggtgtgagatggtatctcaagacagtgtggcaattcctcaaagatctagaactagaaataccatttgacccagccatcccattactggrtatatacccaaaggattataaatcatgctgctataaagacacatgcacacatatgtttattgcggcactattcacaatagcaaagacttggaaccaaccc

SEQ ID NO: 10079 - DNA, 201 bp, Homo sapiens
aactagaaataccatttgacccagccatcccattactggatatatacccaaaggattataaatcatgctgctataaagacacatgcacacatatgtttatwgcggcactattcacaatagcaaagacttggaaccaacccaactgtccatcagtgatagactggattaagaaaatgcacacatatacaccatggaatactg

SEQ ID NO: 10080 - DNA, 201 bp, Homo sapiens
ctcacacatagtctttgaggtaggtactattattttcactatttcacatgagagatacttacatctttttacatacacagagactttaagcactttgatcmagttcccacagctatgaagtagtagggctagcttccaatccagaaagtctggatccaagactgtttatccactgtcctattcaccctattttgtgaagga

SEQ ID NO: 10081 - DNA, 201 bp, Homo sapiens
tttccagtgctagaggcccacagtttcagtctcatctgcctccactcggcctcagttcctcatcactgttcctgtgctcacagtcatcaattatagacccyacaacatgcgccctgaagacagaatgttccatatcagagctgtgatcttgagagccctctccttggctttcctgctgagtctccgaggagctggggccat

SEQ ID NO: 10082 - DNA, 201 bp, Homo sapiens
caatccagaaagtctggatccaagactgtttatccactgtcctattcaccctattttgtgaaggaaaagaccaagttcaaattctccagagtccattgccwaataatggagtcagatctatatttctatacataattacaacacagtgtggtgggtgcctgtaactacttactgtctctacttggactcattccatggcaa

SEQ ID NO: 10083 - DNA, 201 bp, Homo sapiens
ggaccgccggcccaaagccctcactcacctcggcgctgcagggtcatgggcccgcccagctcgtagttgtgtctgcacatcctgtccggcactgcccgctyctcctccaggatgtccttctggctgttccagtactccgcagcaggccgccccagctccgtcaccgcccggaactcccccacgtcgctgtcgaagcgcgcg

SEQ ID NO: 10084 - DNA, 201 bp, Homo sapiens
aatctgtgagttgggaggtgagagcagaagagtcccgtagttccttctcactctgatgcatttatcattctaaacccagactttcacatacacattcatcrttttctttcatgataatagttgcttttatcctcttatctttgctaattcttacaaactaataaagactaagaaacaaaataaattaaatcctacaggtgt

SEQ ID NO: 10085 - DNA, 201 bp, Homo sapiens
aagaaacaaaataaattaaatcctacaggtgttccaaactcagcaataatttctagttggcctctaaaacaaaaatcaaaatataaatgtaagaaaagttyagaatgcttagtacctgtgtgatgaaataatctgtacactaaacccccaagtcatgagtttacctatacaacaaacctgcacatgtactcctgaacataa

SEQ ID NO: 10086 - DNA, 201 bp, Homo sapiens
ccaagttctggggaggctgggagaagtacctttaatgagaatgccttcaggggctaaaacctatccccctccctcccttctctccttaattgtccaagggrtgtgggctcctgctccaccctggggaataagaggcattcttcgtgagcactgaatcctcagtgatcctcagagcctggacactccagcttagggctctct

SEQ ID NO: 10087 - DNA, 201 bp, Homo sapiens
cgggcccgcggggctgccctgggaccgccggcccaaagccctcactcacctcggcgctgcagggtcatgggcccgcccagctcgtagttgtgtctgcacaycctgtccggcactgcccgcttctcctccaggatgtccttctggctgttccagtactccgcagcaggccgccccagctccgtcaccgcccggaactccccc

SEQ ID NO: 10088 - DNA, 201 bp, Homo sapiens
gaaacaaaagtttggaacaaatgccaaaataactgtactgtacttttgaatttatatgccccaaatgaaaaatattatcaacaaagctatacattctacaktttcatgttcataaactaagacagaaactttaaaactgtcaagagccctaaaatttgaaggatattttcttcttcctctcaattttgtatttttttctac

SEQ ID NO: 10089 - DNA, 201 bp, Homo sapiens
cacgggcccgcggggctgccctgggaccgccggcccaaagccctcactcacctcggcgctgcagggtcatgggcccgcccagctcgtagttgtgtctgcayatcctgtccggcactgcccgcttctcctccaggatgtccttctggctgttccagtactccgcagcaggccgccccagctccgtcaccgcccggaactccc

SEQ ID NO: 10090 - DNA, 201 bp, Homo sapiens
tatttctatacataattacaacacagtgtggtgggtgcctgtaactacttactgtctctacttggactcattccatggcaatgttcacacaaaaaatgccyctccagagatcttacaggtttctatttatcataacactcaccatgctttatatttttatatgttttgggaattctcttagcattagacagtgaacttcca

SEQ ID NO: 10091 - DNA, 201 bp, Homo sapiens
aacactggacattatccagttttctaacttttgccaatttcatgtgcataaagaaatatgctgttttattttgcatttctttaattactaataattggggytataattaggactgattagccacttgggggttccttttctataaattgcctgttcacattcattgtccatttttgtactatgtgcttccatcattttctt

SEQ ID NO: 10092 - DNA, 201 bp, Homo sapiens
actattcacaatagcaaagacttggaaccaacccaactgtccatcagtgatagactggattaagaaaatgcacacatatacaccatggaatactgtgcagycataaaaaaggatgagttcatgtcctttgtagggacatggaggaagctggaaatcatcattcacagcaaactattgcaaggacaaaaaaccaaagaccac

SEQ ID NO: 10093 - DNA, 201 bp, Homo sapiens
tctctgcgggcctctcctcacactgcacttgggtttttttggtctctttcacaggcttttctgtcttggccaaatcacaactgtccagttcccaggatccrgtcctttgctcttccccctgggtcccctctccctggatggtctcatgtatctcagtctcctccccggctgcagacccttctgtctacctgcccatcagac

SEQ ID NO: 10094 - DNA, 201 bp, Homo sapiens
cagaacattccacgagaggcatcttgctcaatattctttgacaggagcaggtcagcctggagccacatcagtgacctccagggtgcgctggagttaaggcytgatacccaatggcctcatttctgacccagttcaaatacatttcaccaaggcaaggattcctgtttgttctagttgccttctctaatgcccagaaaacat

SEQ ID NO: 10095 - DNA, 201 bp, Homo sapiens
ttccctgcccagtctcttaacatttaaacatgtcatttaccttaaaaacataagtgcaaaccaactgataaaaaacaaccttgccttcagtctgcatcctrtcccagagacactttctttgtgtcctcacacgtggagctaagcttctgacttgtctctggtacatccctgaggatcctctcatcttggccatcaggaacc

SEQ ID NO: 10096 - DNA, 201 bp, Homo sapiens
taggggctcattgatctatctggtcctcatagtctatgttccctctggccctcataataataacagcaataacagccagaatttatgagactcctgcataktttctttccccatttacatctcacaggaatcttcaatgaagataatattccattcatttagaaattattccttttatttagaaattattttgaaaaaact

SEQ ID NO: 10097 - DNA, 201 bp, Homo sapiens
aggatttgtagaatgtaaggaagggaggaaaaattcaatctgataagtgttcattgatcttctaatgggttaaaagcattcagccacataacaacaacaayaccgataactaactgagtagttaatatggtcaggcgctattctgaggatttacatttattaactcactttattctcacacatagtctttgaggtaggtac

SEQ ID NO: 10098 - DNA, 201 bp, Homo sapiens
tatgtggatctggacaagaaggagaccgtctggcatctggaggagtttggccaagccttttcctttgaggctcagggcgggctggctaacattgctatatygaacaacaacttgaataccttgatccagcgttccaaccacactcaggccaccaacggtacgccctatctttgcctcttcctctgtagcccaactggaagg

SEQ ID NO: 10099 - DNA, 201 bp, Homo sapiens
cagagactcactccactccacggtgacaggactatccaggctggtgtgctccacttggcaggtgtagacatctccctgctggggggtcatttccagcatcwccaggatctggaaggtccagtctccattacggatcaggttggtggacacgaccccagctgtttcctcctgtccattcaggaaccatcggacttgaatgct

SEQ ID NO: 10100 - DNA, 201 bp, Homo sapiens
agaaagtctggatccaagactgtttatccactgtcctattcaccctattttgtgaaggaaaagaccaagttcaaattctccagagtccattgccaaataayggagtcagatctatatttctatacataattacaacacagtgtggtgggtgcctgtaactacttactgtctctacttggactcattccatggcaatgttca

SEQ ID NO: 10101 - DNA, 201 bp, Homo sapiens
gcattcctgccgtccctggaaaaggtaattctctgcggggagggggcggacatgagcggaggcgccactctcatctaatcctctttctccctctctctctyaatattaacgattcttcccaaatcttcccacccagggctggattttaaaataggagttttcctagtaccgagttctgtggtcctaagcgggtcgcagagc

SEQ ID NO: 10102 - DNA, 201 bp, Homo sapiens
attcattctctagctttgaccacttgcatattcaaactgacattttgtcgtgtttttctctactgtctttatgcagcggaccatgtgtcaacttatgccgygtttgtacagacgcatagaccaacaggggagtttatgtttgaatttgatgaagatgagatgttctatgtggatctggacaagaaggagaccgtctggcat

SEQ ID NO: 10103 - DNA, 201 bp, Homo sapiens
aggatgtccttctggctgttccagtactccgcagcaggccgccccagctccgtcaccgcccggaactcccccacgtcgctgtcgaagcgcgcgaactcctsccggttgtagatgtatctctccaggaagcgctgtgtcccattaaacgcgtagcattcctgccgtccctggaaaaggtaattctctgcggggagggggcgg

SEQ ID NO: 10104 - DNA, 201 bp, Homo sapiens
tcagactgtgcctctgggaaggacagacccaggtttagtgtcacctccaccagctgcatccctactcatgtcctgtctgagattctggagcctgatgcagmatatcgggatgaggacagtgcagcggaaaaagcttgctaagaggaaattcagaaagagccaccctcatatctggaacaggggtgtgacctcaacaaggtg

SEQ ID NO: 10105 - DNA, 201 bp, Homo sapiens
gtgtcattgctaaggcaagatcccaggtcttgactcagatatcctgacctgcctcttctcctggtgccttgggccccagaccctaaaattccaggcccagrgccccccagctccttgagtccagattcctcctcctctgccatccatccgcccctgcctgttcaattgccccactctgagtgtggattctcccattttcat

SEQ ID NO: 10106 - DNA, 201 bp, Homo sapiens
attgcaagcaatgcttgtatctcacatggaactgcatatacatgtgggcctgacctgcatccctggaatgtatgtatcctagaaaggggttgcagggttgytggagatgcagctccttaatttgactaaacactgctcatcttctcatcagaatggctgtactcatctgaacttcctttgtcagtactctaattgtcctgc

SEQ ID NO: 10107 - DNA, 201 bp, Homo sapiens
gtgctgtttggtcgcatcttgtgtatacctacgtatctgcacttatccttctgaacctgctgttgtcctgtcacttgtgtttccttctgtgacttatacgygtctgcagaacaggacgtatgtattatttttatttgggtatttagcatctaacagtgtttgacatatagtagtcttttaatacatatttttgtctgaatg

SEQ ID NO: 10108 - DNA, 201 bp, Homo sapiens
ctcttaccttcttcctttttatattcataagtctttattcattctctagctttgaccacttgcatattcaaactgacattttgtcgtgtttttctctactktctttatgcagcggaccatgtgtcaacttatgccgcgtttgtacagacgcatagaccaacaggggagtttatgtttgaatttgatgaagatgagatgttc

SEQ ID NO: 10109 - DNA, 201 bp, Homo sapiens
ggaatacttgggtatctgttttaaggtcccagaacattccacgagaggcatcttgctcaatattctttgacaggagcaggtcagcctggagccacatcagygacctccagggtgcgctggagttaaggcctgatacccaatggcctcatttctgacccagttcaaatacatttcaccaaggcaaggattcctgtttgttct

SEQ ID NO: 10110 - DNA, 201 bp, Homo sapiens
tgtgatctccccagcttcctcctcctcctcccttcatttttttcctctttctagaaaaaaggtccagggctcaatcccacatcctgatactactccctcargtccctcaggttggtgcaccaggctccccaccccacaagttcacaggaggaagccaaagctccaaggccttcctgtcccatccttgagaaatcctcttac

SEQ ID NO: 10111 - DNA, 201 bp, Homo sapiens
ctataatgatttgtaacagagtgaagtgaatgtagaatgtcagatgttaagaggaagaatggaaaagagggctgggactagggtgatgtaggggatgcacytggcttaggtgcaaaatttgggggataccaaaagaactcagtaataaatcatattttaatgaaatatcttgaaaaggcaaaattaatgcaaagatacatg

SEQ ID NO: 10112 - DNA, 201 bp, Homo sapiens
ctgaagacagaatgttccatatcagagctgtgatcttgagagccctctccttggctttcctgctgagtctccgaggagctggggccatcaagggtgagtgstcaggaggacgcaggagcgtcggggtgagtgatggggtggttcacatcaattgctgcttcagggatcacagattttaggggctcattgatctatctggtc

SEQ ID NO: 10113 - DNA, 201 bp, Homo sapiens
cttcttcttccccatatgtccttcctttgacctcttaccttcttcctttttatattcataagtctttattcattctctagctttgaccacttgcatattcraactgacattttgtcgtgtttttctctactgtctttatgcagcggaccatgtgtcaacttatgccgcgtttgtacagacgcatagaccaacaggggagtt

SEQ ID NO: 10114 - DNA, 201 bp, Homo sapiens
  misc_feature (1)...(201): n = A,T,C or G, or insertion/deletion polymorphism (see Tables 1-2)
tccagtctccattacggatcaggttggtggacacgaccccagctgtttcctcctgtccattcaggaaccatcggacttgaatgctgcctgggtagaaatcngtcacgtggcagacaagcaggttgtggtgctgcaagggccccttcttggagggggaaacattcaccctaggctggactaggagcgtggaagaaaaataat

SEQ ID NO: 10115 - DNA, 201 bp, Homo sapiens
tgctcttcagaggtggggtctagagggtcatcagagactcactccactccacggtgacaggactatccaggctggtgtgctccacttggcaggtgtagacytctccctgctggggggtcatttccagcatcaccaggatctggaaggtccagtctccattacggatcaggttggtggacacgaccccagctgtttcctcct

SEQ ID NO: 10116 - DNA, 201 bp, Homo sapiens
atgaagcatgtgggatggcctcacagtcagctggggtttgagggtgaaattcaatgactttcgtgaactccttggctcctatgtgctcttcacctggaggrccagggcatgtgcagggatgaccaccttctccctgggacctgaacagggcagagaaatgggaagctcgggtgcaaagggagtggggaagatgggtccggg

SEQ ID NO: 10117 - DNA, 201 bp, Homo sapiens
gagtcccctgctcttcagaggtggggtctagagggtcatcagagactcactccactccacggtgacaggactatccaggctggtgtgctccacttggcagytgtagacatctccctgctggggggtcatttccagcatcaccaggatctggaaggtccagtctccattacggatcaggttggtggacacgaccccagctgt

SEQ ID NO: 10118 - DNA, 201 bp, Homo sapiens
gataagatgagtggaccccagagccagagagtcccctgctcttcagaggtggggtctagagggtcatcagagactcactccactccacggtgacaggactytccaggctggtgtgctccacttggcaggtgtagacatctccctgctggggggtcatttccagcatcaccaggatctggaaggtccagtctccattacgga

SEQ ID NO: 10119 - DNA, 201 bp, Homo sapiens
cctgaacagggcagagaaatgggaagctcgggtgcaaagggagtggggaagatgggtccgggcttacagtactgaacccaggaatgacaataactgtgtgygttgctgcaggtgacaaaatatctgaacagaagaggacttaggagagatctgaactccagctgccctacaaactccatctcagcttttcttctcacttca

SEQ ID NO: 10120 - DNA, 201 bp, Homo sapiens
tcctccaggatgtccttctggctgttccagtactccgcagcaggccgccccagctccgtcaccgcccggaactcccccacgtcgctgtcgaagcgcgcgarctcctcccggttgtagatgtatctctccaggaagcgctgtgtcccattaaacgcgtagcattcctgccgtccctggaaaaggtaattctctgcggggagg

SEQ ID NO: 10121 - DNA, 201 bp, Homo sapiens
gaacataatggaaaacatttgccgtcagaagaaggtgtaacttatctttttacatctctttctctaactctgaaaatgaactgtgaactggagctctcttraccacgctggtacctaaaattctcccatctcttccccagcaccttccagcgtcctctttacccagcaacagagaatgtcagctctatgatttctctgata

SEQ ID NO: 10122 - DNA, 201 bp, Homo sapiens
gaatgagctcaggggcactgagtgatcactagggaggggcgagcactgaggggaaggcagtcccttctgctggtggctggaggaggcggagacgtttcacktggggtcactgggagaaaaaacaggggcgggaggagctggggacgtggagggcggagctgctccccctacttaactccctgactgacatttccatcctga

SEQ ID NO: 10123 - DNA, 201 bp, Homo sapiens
ggaagccctcccttccttctttctcttttccatagctaagcgctctctcttctcgaccagtttcttgagaattcctcaacttgctcctgttgttttgcatktaggagatgtagaaatatatttcttaaaactttcttcaactttggtataagaaagactctgtagcctgaaagttaattttcaaacatggctgcagaaaga

SEQ ID NO: 10124 - DNA, 201 bp, Homo sapiens
cctcccttccttctttctcttttccatagctaagcgctctctcttctcgaccagtttcttgagaattcctcaacttgctcctgttgttttgcatgtaggaratgtagaaatatatttcttaaaactttcttcaactttggtataagaaagactctgtagcctgaaagttaattttcaaacatggctgcagaaagacttggt

SEQ ID NO: 10125 - DNA, 201 bp, Homo sapiens
ctttgaccacttgcatattcaaactgacattttgtcgtgtttttctctactgtctttatgcagcggaccatgtgtcaacttatgccgcgtttgtacagacscatagaccaacaggggagtttatgtttgaatttgatgaagatgagatgttctatgtggatctggacaagaaggagaccgtctggcatctggaggagtttg

SEQ ID NO: 10126 - DNA, 201 bp, Homo sapiens
caaaaaatgcccctccagagatcttacaggtttctatttatcataacactcaccatgctttatatttttatatgttttgggaattctcttagcattagacrgtgaacttccatgcagatgaccacatctaattcattattattattgttattcatgctggacctcaggtacaaaaggttaagaacttctcagttcattata

SEQ ID NO: 10127 - DNA, 201 bp, Homo sapiens
ttgtgaaggaaaagaccaagttcaaattctccagagtccattgccaaataatggagtcagatctatatttctatacataattacaacacagtgtggtgggwgcctgtaactacttactgtctctacttggactcattccatggcaatgttcacacaaaaaatgcccctccagagatcttacaggtttctatttatcataac

SEQ ID NO: 10128 - DNA, 201 bp, Homo sapiens
cctatctcttcattcttcccccagaggcccaagagccaatccagatgcctgagacaacggagactgtgctctgtgccctgggcctggtgctgggcctagtsggcatcatcgtgggcaccgtcctcatcataaagtctctgcgttctggccatgacccccgggcccaggggaccctgtgaaatactgtaaaggtgggaatgt

SEQ ID NO: 10129 - DNA, 201 bp, Homo sapiens
aaggttacacagcagatcaacgagccaagtttgaagtccagacccagctctgagggtcatacactgccttccccagattcctgcacacagtgacctactaycagggccctcctatctctctgggatccccagcctctatcttttgtggctgctttacaggaactccgagctatggactctgcattaggagacgaagtgcaa

SEQ ID NO: 10130 - DNA, 201 bp, Homo sapiens
cttcttccccatatgtccttcctttgacctcttaccttcttcctttttatattcataagtctttattcattctctagctttgaccacttgcatattcaaaytgacattttgtcgtgtttttctctactgtctttatgcagcggaccatgtgtcaacttatgccgcgtttgtacagacgcatagaccaacaggggagtttat

SEQ ID NO: 10131 - DNA, 201 bp, Homo sapiens
tcaggaaccatcggacttgaatgctgcctgggtagaaatccgtcacgtggcagacaagcaggttgtggtgctgcaagggccccttcttggagggggaaacrttcaccctaggctggactaggagcgtggaagaaaaataatgaaatagaatttgagattgtccttctttccttccttccttccttccttccttccttcctt

SEQ ID NO: 10132 - DNA, 201 bp, Homo sapiens
gctggtcactgagggtgtcgctgagagcctcttcctgcccagaacagattacagcttccacaagttccattacctgacctttgtgccctcagcagaggacktctatgactgcagggtggagcactggggcttggaccagccgctcctcaagcactggggtatgcaactgcttttctctccataatctcctggcatcctcta

SEQ ID NO: 10133 - DNA, 201 bp, Homo sapiens
ttgcctcttcctctgtagcccaactggaagggatgagagggcctctctgccaccctcagactaggaagcctaagtgccccctgctgtgtgatcctcttccmctagtggccatgggctgatcccactacagcaagggcttgcatcctctcttctcaggagagagaaaggtgagcagagtgaggctggtcagtggtgtgatac

SEQ ID NO: 10134 - DNA, 201 bp, Homo sapiens
ttgagaaatcctcttactgcacacacctcacctctctccatccctttacacccagacttcctgaaggaaaaagacgaatgaactgagacactgccctgtgmcagccgtggggaacccaagacaagtaaaatccatctcagccccgaggaggatgcgccacactcagcctcatgcaccccctcccattccagctcctgccgc

SEQ ID NO: 10135 - DNA, 201 bp, Homo sapiens
aagtcactggcaccgctgtccactgtgctgctgaggtcacctcccctcagcttccaagactcttctctgcgggcctctcctcacactgcacttgggttttwttggtctctttcacaggcttttctgtcttggccaaatcacaactgtccagttcccaggatccggtcctttgctcttccccctgggtcccctctccctgga

SEQ ID NO: 10136 - DNA, 201 bp, Homo sapiens
aggcttttctgtcttggccaaatcacaactgtccagttcccaggatccggtcctttgctcttccccctgggtcccctctccctggatggtctcatgtatcycagtctcctccccggctgcagacccttctgtctacctgcccatcagaccacccatctgcccctcaagcacctcaaacccagctacctccctgtaggtttc

SEQ ID NO: 10137 - DNA, 201 bp, Homo sapiens
tgacccttcaagctctgtccttatccattacctcaaagcagtcattccttagtaaagtttccaacaaatagaaattaatgacactttggtagcactaatayggagattatcctttcattgagccttttatcctctgttctcctttgaagaacccctcactgtcaccttcccgagaataccctaagaccaataaatacttca

SEQ ID NO: 10138 - DNA, 201 bp, Homo sapiens
gtgagggtttcgagaccagtcagtgtccctagattctctgacaagggggagaactatgaatcttcaggaacccctaagccaaggtcaggaagtctccattkccctggcttcaaactatgctcaggagctggtatagaagaaagatggggtttggacatggccccagggtatagatgcagaagataagatgagtggacccca

SEQ ID NO: 10139 - DNA, 201 bp, Homo sapiens
aattctcattccagggttaagcttcttctctgccctcagtaatgtggcccttccccttgtctgtatattttggagacatgaagcatgtgggatggcctcamagtcagctggggtttgagggtgaaattcaatgactttcgtgaactccttggctcctatgtgctcttcacctggaggaccagggcatgtgcagggatgacc

SEQ ID NO: 10140 - DNA, 201 bp, Homo sapiens
tttcaaagagcagtatacacaatgtgagcaagtatccttcgttcattgccgtcattgatatggtttggatatttgtcccttccaattctcattccagggtyaagcttcttctctgccctcagtaatgtggcccttccccttgtctgtatattttggagacatgaagcatgtgggatggcctcacagtcagctggggtttga

SEQ ID NO: 10141 - DNA, 201 bp, Homo sapiens
tcctttcaaagagcagtatacacaatgtgagcaagtatccttcgttcattgccgtcattgatatggtttggatatttgtcccttccaattctcattccagsgttaagcttcttctctgccctcagtaatgtggcccttccccttgtctgtatattttggagacatgaagcatgtgggatggcctcacagtcagctggggtt

SEQ ID NO: 10142 - DNA, 201 bp, Homo sapiens
tctttgtgtttgatggggatcatgttttatttttctttatataatgggccagtgtgttcccacaactactaaatagttcaccttttccccataggttagtrgtgtctcctttgctatactgaaagctcccattataggtgggcctgtgtctgagttccatcttgttccactgttctgtttgtctcttcttgtgccagtgtc

SEQ ID NO: 10143 - DNA, 201 bp, Homo sapiens
ttgttctttgctcctttctttttataactgctcatctgctctgtattatttcctttatggtgttgctccttcttcttccccatatgtccttcctttgaccycttaccttcttcctttttatattcataagtctttattcattctctagctttgaccacttgcatattcaaactgacattttgtcgtgtttttctctactgt

SEQ ID NO: 10144 - DNA, 201 bp, Homo sapiens
cccggctgctcctgcgccctgggcacgggcccgcggggctgccctgggaccgccggcccaaagccctcactcacctcggcgctgcagggtcatgggcccghccagctcgtagttgtgtctgcacatcctgtccggcactgcccgcttctcctccaggatgtccttctggctgttccagtactccgcagcaggccgccccag

SEQ ID NO: 10145 - DNA, 201 bp, Homo sapiens
acatcctgtccggcactgcccgcttctcctccaggatgtccttctggctgttccagtactccgcagcaggccgccccagctccgtcaccgcccggaactcycccacgtcgctgtcgaagcgcgcgaactcctcccggttgtagatgtatctctccaggaagcgctgtgtcccattaaacgcgtagcattcctgccgtccct

SEQ ID NO: 10146 - DNA, 201 bp, Homo sapiens
gggaccgccggcccaaagccctcactcacctcggcgctgcagggtcatgggcccgcccagctcgtagttgtgtctgcacatcctgtccggcactgcccgcytctcctccaggatgtccttctggctgttccagtactccgcagcaggccgccccagctccgtcaccgcccggaactcccccacgtcgctgtcgaagcgcgc

SEQ ID NO: 10147 - DNA, 201 bp, Homo sapiens
caacccggctgctcctgcgccctgggcacgggcccgcggggctgccctgggaccgccggcccaaagccctcactcacctcggcgctgcagggtcatgggcycgcccagctcgtagttgtgtctgcacatcctgtccggcactgcccgcttctcctccaggatgtccttctggctgttccagtactccgcagcaggccgccc

SEQ ID NO: 10148 - DNA, 201 bp, Homo sapiens
tgccttgggccccagaccctaaaattccaggcccagagccccccagctccttgagtccagattcctcctcctctgccatccatccgcccctgcctgttcarttgccccactctgagtgtggattctcccattttcatttgttagtctttgtttctcctcctcaatcaccagtaagagaacgtttttcattcaagaataaga

SEQ ID NO: 10149 - DNA, 201 bp, Homo sapiens
tatgaaaggtctgaaaatataaagcctgtgatgcacttaagatgacggaggaaagacagtgatactcattttaaccagtcagataagtcatgatgtttggsgagattatgcgttttctttgctctgaaggtgatctcaaatattctgctggcccatctacagggattatcatttccccaattctgccacacctcacacacc

SEQ ID NO: 10150 - DNA, 201 bp, Homo sapiens
caacaccctcatctgccacattgacaagttcttcccaccagtgctcaacgtcacgtggctgtgcaacggggagctggtcactgagggtgtcgctgagagcytcttcctgcccagaacagattacagcttccacaagttccattacctgacctttgtgccctcagcagaggacttctatgactgcagggtggagcactgggg

SEQ ID NO: 10151 - DNA, 201 bp, Homo sapiens
atagatgcaaatactttttagtattcttggtagaaattcctaatgagctcagctgtctcttcagggcttccctgcccagtctcttaacatttaaacatgtmatttaccttaaaaacataagtgcaaaccaactgataaaaaacaaccttgccttcagtctgcatcctgtcccagagacactttctttgtgtcctcacacgt

SEQ ID NO: 10152 - DNA, 201 bp, Homo sapiens
tcccaaggagcctgtggagctgggccagcccaacaccctcatctgccacattgacaagttcttcccaccagtgctcaacgtcacgtggctgtgcaacgggragctggtcactgagggtgtcgctgagagcctcttcctgcccagaacagattacagcttccacaagttccattacctgacctttgtgccctcagcagagga

SEQ ID NO: 10153 - DNA, 201 bp, Homo sapiens
ccagtgctgctccagcctcctctctccccagcctcacccctctgcagttcccagggctgagccgtcctgctggttagttctcagcacccttctgtgactayaagttcaagttctcctccccttcctggacaatgaacccaaggtaatagataagaggttttagggcttgaggggctgtattcaggagattccaaccttgct

SEQ ID NO: 10154 - DNA, 201 bp, Homo sapiens
aggtaatagataagaggttttagggcttgaggggctgtattcaggagattccaaccttgctaccctgaaagatgaggaggtgacatgatgtcagtaccttytaggtgtgtcctaggaggggtgtggagaggtctaggaggaagggtgtaagcaggaaaagtggaagtcagtggaaaactaaggtacctactttgcagtcct

SEQ ID NO: 10155 - DNA, 201 bp, Homo sapiens
ccaggaatgacaataactgtgtgtgttgctgcaggtgacaaaatatctgaacagaagaggacttaggagagatctgaactccagctgccctacaaactccrtctcagcttttcttctcacttcatgtgaaaactactccagtggctgactgaattgctgacccttcaagctctgtccttatccattacctcaaagcagtca

SEQ ID NO: 10156 - DNA, 201 bp, Homo sapiens
tatgaagtagtagggctagcttccaatccagaaagtctggatccaagactgtttatccactgtcctattcaccctattttgtgaaggaaaagaccaagttsaaattctccagagtccattgccaaataatggagtcagatctatatttctatacataattacaacacagtgtggtgggtgcctgtaactacttactgtctc

SEQ ID NO: 10157 - DNA, 201 bp, Homo sapiens
aataagataaaatattaacgtaatatatgtacttcatcattacattaaatagtaaatgttttgtgaccttctctatgagtatcaaataaatagctcaaaaytgaaatatttaaaatgagactagaaaagtatttcttaaatatggtaaagagaatataaaataaaaaattaacattacctgtaacagaaaaacattagaga

SEQ ID NO: 10158 - DNA, 201 bp, Homo sapiens
cagccacataacaacaacaacaccgataactaactgagtagttaatatggtcaggcgctattctgaggatttacatttattaactcactttattctcacamatagtctttgaggtaggtactattattttcactatttcacatgagagatacttacatctttttacatacacagagactttaagcactttgatcaagttcc

SEQ ID NO: 10159 - DNA, 201 bp, Homo sapiens
acctggtgctgtctccttccagatccccctgaggtgaccgtgtttcccaaggagcctgtggagctgggccagcccaacaccctcatctgccacattgacargttcttcccaccagtgctcaacgtcacgtggctgtgcaacggggagctggtcactgagggtgtcgctgagagcctcttcctgcccagaacagattacagc

SEQ ID NO: 10160 - DNA, 201 bp, Homo sapiens
ctgagtagttaatatggtcaggcgctattctgaggatttacatttattaactcactttattctcacacatagtctttgaggtaggtactattattttcacyatttcacatgagagatacttacatctttttacatacacagagactttaagcactttgatcaagttcccacagctatgaagtagtagggctagcttccaat

SEQ ID NO: 10161 - DNA, 201 bp, Homo sapiens
gtctggatccaagactgtttatccactgtcctattcaccctattttgtgaaggaaaagaccaagttcaaattctccagagtccattgccaaataatggagycagatctatatttctatacataattacaacacagtgtggtgggtgcctgtaactacttactgtctctacttggactcattccatggcaatgttcacacaa

SEQ ID NO: 10162 - DNA, 201 bp, Homo sapiens
agttgtgaattacctacaatttcttccccatagagcttctgggaaccatgaaatcagggggaatacttgggtatctgttttaaggtcccagaacattccaygagaggcatcttgctcaatattctttgacaggagcaggtcagcctggagccacatcagtgacctccagggtgcgctggagttaaggcctgatacccaatg

SEQ ID NO: 10163 - DNA, 201 bp, Homo sapiens
tgggctccccccatgaatccccaacccaaagtcccctttccgcccggcactaaggtcccttaggccaacccggctgctcctgcgccctgggcacgggcccrcggggctgccctgggaccgccggcccaaagccctcactcacctcggcgctgcagggtcatgggcccgcccagctcgtagttgtgtctgcacatcctgtcc

SEQ ID NO: 10164 - DNA, 201 bp, Homo sapiens
actcttaaaacatctcctacagttttaaatttcacatttactactttaattcatctgggattcatctttgtgtttgatggggatcatgttttatttttctytatataatgggccagtgtgttcccacaactactaaatagttcaccttttccccataggttagtagtgtctcctttgctatactgaaagctcccattatag

SEQ ID NO: 10165 - DNA, 201 bp, Homo sapiens
cggagctgctccccctacttaactccctgactgacatttccatcctgatgtcagtcctggttcaaatgccacctcctccaggaagccctcccttccttctytctcttttccatagctaagcgctctctcttctcgaccagtttcttgagaattcctcaacttgctcctgttgttttgcatgtaggagatgtagaaatatat

SEQ ID NO: 10166 - DNA, 201 bp, Homo sapiens
aactgtatttttgtttgtgtgtcttttttaaaagaagtcttccctatactgagatatcaaagatactcttaaaacatctcctacagttttaaatttcacayttactactttaattcatctgggattcatctttgtgtttgatggggatcatgttttatttttctttatataatgggccagtgtgttcccacaactactaaa

SEQ ID NO: 10167 - DNA, 201 bp, Homo sapiens
attttgaaaaaactgaagctcaaaaagatgaataagttttccaaggttacacagcagatcaacgagccaagtttgaagtccagacccagctctgagggtcrtacactgccttccccagattcctgcacacagtgacctactatcagggccctcctatctctctgggatccccagcctctatcttttgtggctgctttacag

SEQ ID NO: 10168 - DNA, 201 bp, Homo sapiens
tcttattgatttgcaggtgatccttatatagtcctgctagtagtcccttgtcagttttaggcattgcaaatgttttcctctaatctgacttctggcaactktctccttggtttcctttattgaagagaaatccttaatattttgtaatgaagtccatcaactgtatttttgtttgtgtgtcttttttaaaagaagtcttcc

SEQ ID NO: 10169 - DNA, 201 bp, Homo sapiens
aggtgaatcccagccatgctgattcctctccacccatttccagtgctagaggcccacagtttcagtctcatctgcctccactcggcctcagttcctcatcrctgttcctgtgctcacagtcatcaattatagaccccacaacatgcgccctgaagacagaatgttccatatcagagctgtgatcttgagagccctctcctt

SEQ ID NO: 10170 - DNA, 201 bp, Homo sapiens
aactgcttttctctccataatctcctggcatcctctattccaaagacctggtgtcctctgcaccagctttccgcactggctgggtctcagtcctctcctcrtcctaacatccaattaactggtccataaccttcaattcccacaaccatcccaggccatcaccaccctcactgcacctcctgaccctatctcttcattctt

SEQ ID NO: 10171 - DNA, 201 bp, Homo sapiens
tgagcgatctcagcacagtaagatttgttgcacatcagcagcactttcagctccttgaggctgtggaccagaaacttctggaagccactgggcagcatgtkttttttgttgttgttgttgctcccataagcaatgttgggcatcaagatctggcccttggaccttctacgaaccctactgttaagacctctgggtttccgc

SEQ ID NO: 10172 - DNA, 201 bp, Homo sapiens
cattaggagacgaagtgcaaagagtgtttctgtatcctccctctcttctaggaccctagggctcttcctgggtctttgtgggtggtcacaagctttcctcyctcaagacagcagggttgcatggtcttgatagccttgtgattcgggttctgagagattcaggactgcaagggaggcctagacttttgatagctgcaagga

SEQ ID NO: 10173 - DNA, 201 bp, Homo sapiens
atccccctgaggtgaccgtgtttcccaaggagcctgtggagctgggccagcccaacaccctcatctgccacattgacaagttcttcccaccagtgctcaaygtcacgtggctgtgcaacggggagctggtcactgagggtgtcgctgagagcctcttcctgcccagaacagattacagcttccacaagttccattacctga

SEQ ID NO: 10174 - DNA, 201 bp, Homo sapiens
tgggatccccagcctctatcttttgtggctgctttacaggaactccgagctatggactctgcattaggagacgaagtgcaaagagtgtttctgtatcctcyctctcttctaggaccctagggctcttcctgggtctttgtgggtggtcacaagctttcctctctcaagacagcagggttgcatggtcttgatagccttgtg

SEQ ID NO: 10175 - DNA, 201 bp, Homo sapiens
ctgaggtgaccgtgtttcccaaggagcctgtggagctgggccagcccaacaccctcatctgccacattgacaagttcttcccaccagtgctcaacgtcacrtggctgtgcaacggggagctggtcactgagggtgtcgctgagagcctcttcctgcccagaacagattacagcttccacaagttccattacctgacctttg

SEQ ID NO: 10176 - DNA, 201 bp, Homo sapiens
gacctactatcagggccctcctatctctctgggatccccagcctctatcttttgtggctgctttacaggaactccgagctatggactctgcattaggagasgaagtgcaaagagtgtttctgtatcctccctctcttctaggaccctagggctcttcctgggtctttgtgggtggtcacaagctttcctctctcaagacag

SEQ ID NO: 10177 - DNA, 201 bp, Homo sapiens
tgtttcccaaggagcctgtggagctgggccagcccaacaccctcatctgccacattgacaagttcttcccaccagtgctcaacgtcacgtggctgtgcaayggggagctggtcactgagggtgtcgctgagagcctcttcctgcccagaacagattacagcttccacaagttccattacctgacctttgtgccctcagcag

SEQ ID NO: 10178 - DNA, 201 bp, Homo sapiens
ctctgcagttcccagggctgagccgtcctgctggttagttctcagcacccttctgtgactacaagttcaagttctcctccccttcctggacaatgaacccraggtaatagataagaggttttagggcttgaggggctgtattcaggagattccaaccttgctaccctgaaagatgaggaggtgacatgatgtcagtacctt

SEQ ID NO: 10179 - DNA, 201 bp, Homo sapiens
tttagaggcattgatgtaattttttttggcagtttttatggttttatttacacacaaaacgtggacatgaactttctactcattttcttagctgtgcaccstggtactggggttggtgactctgatggccggctgggtgactctttccatgatgactttgcagttctggaggaaattttgtgagcgatctcagcacagtaa

SEQ ID NO: 10180 - DNA, 201 bp, Homo sapiens
tacaaacctcaacccagcctttgcctgtcctccctttcactgcccagcatcacatgcccccttctgctctctgctcccccacctctgggtttccttggtgrctcccaacactgtccctcatcccacatgacagctctgcctatgggatgggggcgctgcatccgtcacttcctcctgacactgttcagtgtcaccagtgct

SEQ ID NO: 10181 - DNA, 201 bp, Homo sapiens
ttcattgagccttttatcctctgttctcctttgaagaacccctcactgtcaccttcccgagaataccctaagaccaataaatacttcagtatttcagagcrgggagactctgagtcattcttactggaagtctaggaccaggtcacatgtgaatactatttcttgaaggtgtggtttcaacctctgttgccgatgtggtta

SEQ ID NO: 10182 - DNA, 201 bp, Homo sapiens
cctcatgaacttgttggtcctctttttgaggatcttatccttcatgaggagtctgagggaggccatgatgtggaggaagagatggctgccagctgcatagrcagcaccgaggaagacagcattgatgtaatttttacatgaacaattttggcagcctttcccacatgctgttcttcctagggagtgccatgagcagtgtct

SEQ ID NO: 10183 - DNA, 201 bp, Homo sapiens
gccaacccggctgctcctgcgccctgggcacgggcccgcggggctgccctgggaccgccggcccaaagccctcactcacctcggcgctgcagggtcatggscccgcccagctcgtagttgtgtctgcacatcctgtccggcactgcccgcttctcctccaggatgtccttctggctgttccagtactccgcagcaggccgc

SEQ ID NO: 10184 - DNA, 201 bp, Homo sapiens
agcttccaatccagaaagtctggatccaagactgtttatccactgtcctattcaccctattttgtgaaggaaaagaccaagttcaaattctccagagtccrttgccaaataatggagtcagatctatatttctatacataattacaacacagtgtggtgggtgcctgtaactacttactgtctctacttggactcattcca

SEQ ID NO: 10185 - DNA, 201 bp, Homo sapiens
taggccaacccggctgctcctgcgccctgggcacgggcccgcggggctgccctgggaccgccggcccaaagccctcactcacctcggcgctgcagggtcaygggcccgcccagctcgtagttgtgtctgcacatcctgtccggcactgcccgcttctcctccaggatgtccttctggctgttccagtactccgcagcaggc

SEQ ID NO: 10186 - DNA, 201 bp, Homo sapiens
cccttttatctccagtccttactcccatatctaacctcttacccctacctcataggtaaacattttaatgaatttgatgtttccttttatttgcatagatsctctgtaatatgtagtagtgtccagtgtacatgtatttttaattaaccaaaatggcattaaattatagatctaattttgtacatccagtttgtttcttcc

SEQ ID NO: 10187 - DNA, 201 bp, Homo sapiens
cccaacccaaagtcccctttccgcccggcactaaggtcccttaggccaacccggctgctcctgcgccctgggcacgggcccgcggggctgccctgggaccsccggcccaaagccctcactcacctcggcgctgcagggtcatgggcccgcccagctcgtagttgtgtctgcacatcctgtccggcactgcccgcttctcct

SEQ ID NO: 10188 - DNA, 201 bp, Homo sapiens
ccttttcctttgaggctcagggcgggctggctaacattgctatattgaacaacaacttgaataccttgatccagcgttccaaccacactcaggccaccaayggtacgccctatctttgcctcttcctctgtagcccaactggaagggatgagagggcctctctgccaccctcagactaggaagcctaagtgccccctgctg

SEQ ID NO: 10189 - DNA, 201 bp, Homo sapiens
taatggagtcagatctatatttctatacataattacaacacagtgtggtgggtgcctgtaactacttactgtctctacttggactcattccatggcaatgytcacacaaaaaatgcccctccagagatcttacaggtttctatttatcataacactcaccatgctttatatttttatatgttttgggaattctcttagcat

SEQ ID NO: 10190 - DNA, 201 bp, Homo sapiens
tttatctccagtccttactcccatatctaacctcttacccctacctcataggtaaacattttaatgaatttgatgtttccttttatttgcatagatcctcygtaatatgtagtagtgtccagtgtacatgtatttttaattaaccaaaatggcattaaattatagatctaattttgtacatccagtttgtttcttccaaat

SEQ ID NO: 10191 - DNA, 201 bp, Homo sapiens
tgtggtgggtgcctgtaactacttactgtctctacttggactcattccatggcaatgttcacacaaaaaatgcccctccagagatcttacaggtttctatytatcataacactcaccatgctttatatttttatatgttttgggaattctcttagcattagacagtgaacttccatgcagatgaccacatctaattcatta

SEQ ID NO: 10192 - DNA, 201 bp, Homo sapiens
ttatctccagtccttactcccatatctaacctcttacccctacctcataggtaaacattttaatgaatttgatgtttccttttatttgcatagatcctctstaatatgtagtagtgtccagtgtacatgtatttttaattaaccaaaatggcattaaattatagatctaattttgtacatccagtttgtttcttccaaatc

SEQ ID NO: 10193 - DNA, 201 bp, Homo sapiens
gatgggtccgggcttacagtactgaacccaggaatgacaataactgtgtgtgttgctgcaggtgacaaaatatctgaacagaagaggacttaggagagatytgaactccagctgccctacaaactccatctcagcttttcttctcacttcatgtgaaaactactccagtggctgactgaattgctgacccttcaagctctg

SEQ ID NO: 10194 - DNA, 201 bp, Homo sapiens
ggaatgacaataactgtgtgtgttgctgcaggtgacaaaatatctgaacagaagaggacttaggagagatctgaactccagctgccctacaaactccatcwcagcttttcttctcacttcatgtgaaaactactccagtggctgactgaattgctgacccttcaagctctgtccttatccattacctcaaagcagtcattc

SEQ ID NO: 10195 - DNA, 201 bp, Homo sapiens; identical to SEQ ID NO: 1487

SEQ ID NO: 10196 - DNA, 201 bp, Homo sapiens; identical to SEQ ID NO: 1492

SEQ ID NO: 10197 - DNA, 201 bp, Homo sapiens
ttttaaattattctttgcattttttaatggtaatagttgtcactatgatggattatgtataccagtaaacaaatgcttatggtaagctcaaaaccaatcgkggggtggtggtacttaaaagtactaaggcctattacttcctttattgaaaaatcccaatttttagactgtatagttagtgtgaaatacaccacaaaactc

SEQ ID NO: 10198 - DNA, 201 bp, Homo sapiens
tccttatttcttcttttaatgaaatgtttgatttgtttctcaatcaatgaagatccagctccaggtcccacaggggctcttcttccccacgaaaaagatcytattcaagttcatcatcttctcctgagaggaacagaaagagaagtcgttctagatcttcttcatctggtgatcgcaaaaaaagacgaacaagatcacggt

SEQ ID NO: 10199 - DNA, 201 bp, Homo sapiens; identical to SEQ ID NO: 1491

SEQ ID NO: 10200 - DNA, 201 bp, Homo sapiens; identical to SEQ ID NO: 1493

SEQ ID NO: 10201 - DNA, 201 bp, Homo sapiens
ttcagtggtaggattatctcatgattcctacttgtacagaatgattagttttgcttcttcacattttggagtttagatgttaagatttcacacagtcttgyttctctgcatttgtttctttgtaaaaaaaattactctgtttttgagtggaattcattctgttgctttcttaccacttctgcaaatttttatcttagccac

SEQ ID NO: 10202 - DNA, 201 bp, Homo sapiens
aattttatgtgtgtaagttcctatctcaatttttaatttttttgctagcatcatggtactgaattttgtatactttcacagtcttaagaatgaatgctgaratttagctctagcttactagaatgcctactctctccattatgtcttacagacgccacaggtcatcatctggatcatcccattctggttcccgttcaagtt

SEQ ID NO: 10203 - DNA, 201 bp, Homo sapiens
gccacagtaagtgaggattctgtttattctgccctgaatgtttgttactgggatttttttccccccatacacacatacaaatcttttgtttcacaatttayaaaataacagtgttagggacctttatcctaacaaggagggacataagaatactttcagaaatattctcctcctctccctttcactggtttgcatgtttgt

SEQ ID NO: 10204 - DNA, 201 bp, Homo sapiens
gatgtgtttattatttaaatcaattgtcatagggtaacaatttgtgccctcttttttaaggatatggtggtggttttaatgaaagagaaaatgttgaatayatagaaagagaagaatctgatggtgaatatgatgaggtaagctatattttggtgttcaggttgaatataaattagaaaaacagaaaaaattcttaaatgc

SEQ ID NO: 10205 - DNA, 201 bp, Homo sapiens
atttagtgctaatgactggcaatgtaaaacgtatgttttttaaattattgtctgctctttcttccaaaataatagatctggccactacttgtttatattayagctcttattagtgacattgacaagccagggtaaccttttaaatccaaggtattgttattcagtctcatctttaagtatagtataaagaagttttaaatt

SEQ ID NO: 10206 - DNA, 201 bp, Homo sapiens
aaacttttttttaagtgcaatttgagtcttcagcaactgatcattttcaggaaatcataaatatctaaaataattttttagaaaatgtattaagtttaatrcattatcagctgacaagcattttgaaattgtttttctctagtttggacgtaaaaagaaaaaatacagagggaaagcagttggtcctgcatctatattaaa

SEQ ID NO: 10207 - DNA, 201 bp, Homo sapiens
tgatcattttcaggaaatcataaatatctaaaataattttttagaaaatgtattaagtttaatgcattatcagctgacaagcattttgaaattgtttttcyctagtttggacgtaaaaagaaaaaatacagagggaaagcagttggtcctgcatctatattaaaggaagttgaagataaagaatcagagggagaagaagag

SEQ ID NO: 10208 - DNA, 201 bp, Homo sapiens
taatatttgtgtatactttgaaaagccttaaaaaaagtttaaattctattttgatatagtaagcagggttttaattacacatgatagaattttaaagagayaaaattaaaatgtttaagtagaatgttttcatggttgatccagaagtcttctgttgaataagcagtaagtattcttccttataaaattttcatagttgtt

SEQ ID NO: 10209 - DNA, 201 bp, Homo sapiens
aaaagtaaagtcttagcatgaaacttccttaacctattttagcctcatgcttttgactaaaatagacttaaaaactgaattaaatttttatatacacttayatttaattaatctaaagagatagcttacatatagaaattaagtaaaggggagatctgtattttcattcaagatgttaaaggctagcacagaaattttcta

SEQ ID NO: 10210 - DNA, 201 bp, Homo sapiens
ctaaatattgaaacgataattgtatcaccttcgagtaagagccacagtaagtgaggattctgtttattctgccctgaatgtttgttactgggatttttttycccccatacacacatacaaatcttttgtttcacaatttataaaataacagtgttagggacctttatcctaacaaggagggacataagaatactttcagaa

SEQ ID NO: 10211 - DNA, 201 bp, Homo sapiens
gacttgaaaattcttgggtgatgcataagtgtgacagaaaaagtgtgtatggcctccaggtttatgtctgtgcaatacctgagacaaagttgtcaagtctstatttgagatgagtttagtaggtgaattttagaattcagaattaatttgctgagatacctgtgatatatgcatatggaggtgctcagtacacctaactgt

SEQ ID NO: 10212 - DNA, 201 bp, Homo sapiens
tcaagggttagatttttattatctcttgtgttccgactttctacttttcaactttgaacttcaaaaaaacattactttgcttatcctttgtactttgatcrggttgtttagaattgtagatcaaaccattctttgatcattttattgtttaaatttttagttccatttataatttttatagccaactctcggttatttctg

SEQ ID NO: 10213 - DNA, 201 bp, Homo sapiens
taattcaaatcaacttttaaaataatttttcagcttagtaccatacagttgttgtccagtatttttagaaaagtaaagtcttagcatgaaacttccttaayctattttagcctcatgcttttgactaaaatagacttaaaaactgaattaaatttttatatacacttatatttaattaatctaaagagatagcttacatat

SEQ ID NO: 10214 - DNA, 201 bp, Homo sapiens
tgtttgttactgggatttttttccccccatacacacatacaaatcttttgtttcacaatttataaaataacagtgttagggacctttatcctaacaaggarggacataagaatactttcagaaatattctcctcctctccctttcactggtttgcatgtttgttattagtaatgatataatgataccatttttaaattctt

SEQ ID NO: 10215 - DNA, 201 bp, Homo sapiens
agtttcaggttgcatgtagtcacatctgtagagggaaacataatttgaaagatgctcttgcaggaaatttttctttgtttagtcaaaatatgctctctttktttttaagttaatttattatgacctaaaggcatctaaaaaataaataagaaaatgaaattccatatttgtggaaattcatattgaagtctaactgtggct

SEQ ID NO: 10216 - DNA, 201 bp, Homo sapiens
attttgtttttcttgacgaaataaactttcctttttattttaaaaatttaattcaaatcaacttttaaaataatttttcagcttagtaccatacagttgtygtccagtatttttagaaaagtaaagtcttagcatgaaacttccttaacctattttagcctcatgcttttgactaaaatagacttaaaaactgaattaaat

SEQ ID NO: 10217 - DNA, 201 bp, Homo sapiens
cctcaagttcaaggtctaggtccaggtaaacgggtacaggtcaagggtaacaccagtcaaaatgtcagtatctaacttttttatttataaattttgttttwcttgacgaaataaactttcctttttattttaaaaatttaattcaaatcaacttttaaaataatttttcagcttagtaccatacagttgttgtccagtatt

SEQ ID NO: 10218 - DNA, 201 bp, Homo sapiens
ggatgaagatgacgctgatctctcaaaatataatcttgatgccagtgaagaagaagatagtaataaaaagaaatctaatagacgaagtcgctcaaagtctsgatcttcacattcacgatcttcatcacgctcatcctccccctcaagttcaaggtctaggtccaggtaaacgggtacaggtcaagggtaacaccagtcaaa

SEQ ID NO: 10219 - DNA, 201 bp, Homo sapiens
aattttttggtaaaaatatagtgatctttttctacagggtattattataagggacaaattatagttgtaaattagattaatgaattttgtgagttttaaartttgtacgaaccatgtctcccttgtgtcatattttccaataatataattacctaacaatgacagaattatacattttccctttaattctctaagcattga

SEQ ID NO: 10220 - DNA, 201 bp, Homo sapiens
gaggggtggcgtgacctgtggatactgaggaagcgtcggtgacaggaagaggggtggtgtgacctgtggatgctgaggaagggctagtgacaggaagaggsgtggtgtcacctgtggatgctgaggaaaggctggtgacaggaagagaggtggcgtgacctgtggatactgaggaagcgtcggtgacatgaagaggggtgg

SEQ ID NO: 10221 - DNA, 201 bp, Homo sapiens
gatgaagctgatatgtcctgattagaggtccttgaagaagctgcagttgattgtccctctagtgtcgctgttgttgagcctgttgaggtgactggggcagsagttttacttccagttattaatgtgtcctctgtggttcctggagtgaaccaaaataggcaagcagagagctaaatcatgaatgaactcctattcacaatt

SEQ ID NO: 10222 - DNA, 201 bp, Homo sapiens
gtttgctttgccacatcctccccgtcgctttgactactgcggcagcctcctcactgcccctgctgactcgggttccgcacccctgctctcagcctccaccrcacccctgctctcagcctccaccgcacccctgtgggttgatcctcagctctgagggccaggagggagggttgctgctgctgtctccttagctcgaattgc

SEQ ID NO: 10223 - DNA, 201 bp, Homo sapiens
aaaaccaaacactgcatgttttcactcataagttggagttgaacaatgagaacacatggacacagagaggggaacaacacacactggcgcctgtcagggaygggacaaggggaggaagagcgtcaggataaatagctaatacatgcaggtgatgggttgataggtgcagtaaaccaccatggcacatatatacctgtgtaa

SEQ ID NO: 10224 - DNA, 201 bp, Homo sapiens
ggagacattgttcagttttgtagccggcagcttaaattcaaaatgcattttaaacatgttttcccctttctcttgggtttccaaatacaaccttgaggcarctgcaaaggccgttttcctcagcctaaaaatagacttcacgcccctcccttttctcacgatctgtacacactccctccctcttctcaccgtctgtacaca

SEQ ID NO: 10225 - DNA, 201 bp, Homo sapiens
tcaagatgaggaaagacactaactcaagatacccttggaataactgatctcttgtgatctccagagcctgaaacgagacttggcatacagcagtgacttcrtacacatctgtggaatacatcccaggccctgtggcctttgttgccttcagccgaggctggagagagggtgacgttgcctgtttctttatctttatctttt

SEQ ID NO: 10226 - DNA, 201 bp, Homo sapiens
gatgcacctcccctactctctggccattcgaaatgcagctctcagcacaccctgtacttttccacactgcatttaccacatgtgcagttgagaacatttcygtaattatttgatgtctgtctgcaccaagattttagtgccaagagactgggccacgtctgtttcactcttcactgtgtgcatccagtgctgtgtcctaga

SEQ ID NO: 10227 - DNA, 201 bp, Homo sapiens
ggcggggcggcatctctacagagagtcgatgtctgtcctctgtggtccctaaacacatacacggggagtggagctgcgggcaacccaggccagtgcccttyctccaagcagggccgccattgcaaggcctcacgtgcaacacaaatgcccagttcctgagacttcttcagaatctccaggaaaagggtgaaaaggcattta

SEQ ID NO: 10228 - DNA, 201 bp, Homo sapiens
ctgacatataaaccaatggaacagaatagataccttggaaataagaccacacatctacaaccatctgatctttgacaaacctgacaaaagcaggcaatggkgaaaggattctctattcaataaatggtgctgggaaaactggttagccatatgcagaaaactgaaactggaccccttccttacaccttatacaaaaattaa

SEQ ID NO: 10229 - DNA, 201 bp, Homo sapiens
ggtcatgcccggtcagatgtgtgggtgccatctcccagccacgaccatctcctctcctggcccagctccacttggtccccttagcgacgcaaaggactcagcgctccacgacatgcctagcttcttcgggtcgtcatggagacgcccttgcacaccaacagtccttcactccttctccgggtcacgcccccgtgcttttcc

SEQ ID NO: 10230 - DNA, 201 bp, Homo sapiens
agccacgaccatctcctctcctggcccagctccacttggtccccttagcgacgcaaaggactcagcgctccacgacatgcctagcttcttcgggtcgtcayggagacgcccttgcacaccaacagtccttcactccttctccgggtcacgcccccgtgcttttccacgcccaccccaggtcttgcccctctgcgctcctct

SEQ ID NO: 10231 - DNA, 201 bp, Homo sapiens
ccgttcaccactgctttttacacaggggaccggggccctggggagacacggggcagggcctggtcacaggggccagaacagttcacggcaaagacttggcmctggggctcctaaatccaagctgcctccccggcgccccaagccccagcctcgctctgggagtcatgattcccgtggagactccttcaaccacatctgcag

SEQ ID NO: 10232 - DNA, 201 bp, Homo sapiens
acttggtcctgaagccagagggacagcctggaaagtgtggggaagaggacgggggcccccgagggaacatctcccacaggcctggcatccctcccctcccrgctctgtacacggaggagcccaaggccaatgccggggctacgagccccaggcaaggccgtgacccaaatggaggcttttaaacccgagctcagaggtaag

SEQ ID NO: 10233 - DNA, 201 bp, Homo sapiens
aaaagtatgagagtacagaaatgtgattttgggtatggaagggatgaaacaagcctatggttatttgcagataacataattgtttacatagaaacttcccraacatatacattattagcaaagttctatatccataatcaaaattttaaaaataattgcattccagctgggtgtggtgattcatgcctgaatcccagtgct

SEQ ID NO: 10234 - DNA, 201 bp, Homo sapiens
aatcctaagcaaaaagaacaaagtgggaggctacctgacttcaaactatactacaaggctacagtaaccaaaacagcatggtactggtaccaaaactgacrtataaaccaatggaacagaatagataccttggaaataagaccacacatctacaaccatctgatctttgacaaacctgacaaaagcaggcaatggtgaaag

SEQ ID NO: 10235 - DNA, 201 bp, Homo sapiens
aagctttcttccttccttctgttcatgctaacaacagtcccccagacatccagcccagaaagctgtgggtcctctggatttctttctcttccttgtccccygtgtcctagtcagtactcgttgatcttcctcccaagtgttcaccccatcgcgtcctcttgtttgctttgccacatcctccccgtcgctttgactactgcg

SEQ ID NO: 10236 - DNA, 201 bp, Homo sapiens
tgaggaaaggctggtgacaggaagagaggtggcgtgacctgtggatactgaggaagcgtcggtgacatgaagaggggtggtgtcacctgtggatgctgagktagtgtcggtgacaggaagaggggtggtgtcacctgtggatactgaggaagcgtcggtgacaagaagagaggtggcgtgacctgtggacactgaggaagc

SEQ ID NO: 10237 - DNA, 201 bp, Homo sapiens
tcgctttgactactgcggcagcctcctcactgcccctgctgactcgggttccgcacccctgctctcagcctccaccacacccctgctctcagcctccaccrcacccctgtgggttgatcctcagctctgagggccaggagggagggttgctgctgctgtctccttagctcgaattgctttggaaaatggcctgccctgcct

SEQ ID NO: 10238 - DNA, 201 bp, Homo sapiens
gaggaaaggctggtgacaggaagagaggtggcgtgacctgtggatactgaggaagcgtcggtgacatgaagaggggtggtgtcacctgtggatgctgagtwagtgtcggtgacaggaagaggggtggtgtcacctgtggatactgaggaagcgtcggtgacaagaagagaggtggcgtgacctgtggacactgaggaagcg

SEQ ID NO: 10239 - DNA, 201 bp, Homo sapiens
agattagcattcgttacgacaaaactacagttattgcatttgtctttcaccatcatttaaacaatacctctgaagccactcctgcaatagattgattattyagctgtttaggaaaacaatttgcagataactcaatctactaagcttgagtaggttatttgtaggtaagaaatcctgtgttcaagtatgacctatctttac

SEQ ID NO: 10240 - DNA, 201 bp, Homo sapiens; identical to SEQ ID NO: 1521

SEQ ID NO: 10241 - DNA, 201 bp, Homo sapiens; identical to SEQ ID NO: 1523

SEQ ID NO: 10242 - DNA, 201 bp, Homo sapiens; identical to SEQ ID NO: 1524

SEQ ID NO: 10243 - DNA, 201 bp, Homo sapiens; identical to SEQ ID NO: 1513

SEQ ID NO: 10244 - DNA, 201 bp, Homo sapiens
gaatctccaggaaaagggtgaaaaggcatttaaacctctatgaagtagggccaggcacagtagctcacgcctataatcccagcactttgggagccgaggcragcggatcacctgaggtcaggagttcgagaccagcctggccaacatggtgaaaccccatctctactaaaaatacaaacattagccgctgtggtgttgggc

SEQ ID NO: 10245 - DNA, 201 bp, Homo sapiens; identical to SEQ ID NO: 1522

SEQ ID NO: 10246 - DNA, 201 bp, Homo sapiens
ccgtctctactaaaaatacaaaaaaattagccgggcgtggtggcgggcgcctgtagtcccagctactcgggaggctgaggcaggagaatggcgtgaacccggggaggcggagcttgcagtgagccgagattgcaccactgcactcctgcctgggtgacagagtgagactccgtctcaaaaaaaaaattaaaaattaaaaaa

SEQ ID NO: 10247 - DNA, 201 bp, Homo sapiens
ccttaatacatcttactttatgcccgttctgtgtgttgctagtatgtatgtgtgacactgtgtgtgtgtgtgtgtgtgtgtgtgtgtgtgtgtgtgtgtgwgagacactgtgtgtgtgtgtccctgcccttatagaacattggacatagcctttaaacatttttttttccagatggagtttcacttcttgttgcccaggct

SEQ ID NO: 10248 - DNA, 201 bp, Homo sapiens
taaagccctgatgactatcttcgtgtctaatgttttgtttacattatttcagctcatctccttaacataaatttctatcagtggaattgctggtttatgcygttataaaatttttcatgttattaatacagactgccaaatttctttgcagaaagcttatgccaatttacagacctgttggcagtgtgcaagagtgtgcct

SEQ ID NO: 10249 - DNA, 201 bp, Homo sapiens
gcgggtggatcatttgaggtcaggagttcaagaccagcctggccaacatgatgaaaccccatctctactaaaaatacaaaaattacccaggcatggtggcrtgcacctgtaatcccagctactcaggaggctgaggcaggagaatctctcaaacctgggaggtggaggttgcagtgagccgagatcgcgccactgcactcc

SEQ ID NO: 10250 - DNA, 201 bp, Homo sapiens
tgggggacagagagaaactctgtctcaaaaaacaaacaaacaaacccaaaaaaccaacaacaacagcaacaataaaaaaaccgtctatgaagaaatcgtckatgaggtgccaacagactcagttattttgactcaatttctcagaacatgctggggcgggaactcagcctagcagtaagaaagacgtatatttaaggtaaa

SEQ ID NO: 10251 - DNA, 201 bp, Homo sapiens
gggcatggtagctcatgcctaaaatcccagcacggacaggcagaggcgggaggattccttgaggccaggagtttgagaccagcctgggcaatagctcaagrccccttctctgaaaaaaaaaaaaaaaaaaaaagtggttctcaaaaggcagagggtgcatcagcattttaacacatgtccagagtgattctgatgcaggtg

SEQ ID NO: 10252 - DNA, 201 bp, Homo sapiens
taaaaaatactcatagccttgttcttgctgctcaagtgttggccagaatgaactgaccttggctctcaccaggatgcaagtcaggcccttcagattccgtsagattgtcagacaactgaaacttgttctcactctggccaaacgcataaacttggggagcagagagctgggagatttgcgcctaaagagttgatattggag

SEQ ID NO: 10253 - DNA, 201 bp, Homo sapiens
caaacgcataaacttggggagcagagagctgggagatttgcgcctaaagagttgatattggagagaaacaggtctctcctctctcttctctccccgtgacmctccattttctacttcactgaaagaaccaaagccgtgcccttcatctccttcaatgcccagagccttctccgcaccctccccggggccccggggctccct

SEQ ID NO: 10254 - DNA, 201 bp, Homo sapiens; identical to SEQ ID NO: 1516

SEQ ID NO: 10255 - DNA, 201 bp, Homo sapiens
gggctagtgacaggaagaggcgtggtgtcacctgtggatgctgaggaaaggctggtgacaggaagagaggtggcgtgacctgtggatactgaggaagcgtyggtgacatgaagaggggtggtgtcacctgtggatgctgagttagtgtcggtgacaggaagaggggtggtgtcacctgtggatactgaggaagcgtcggtg

SEQ ID NO: 10256 - DNA, 201 bp, Homo sapiens
tccctgggctgccaagggcgtcgctgatgctggacctctgagtttcagcccctgctcttccctgtgcaccttgctggtcgttggccaaaatttggctgatkttcctggcaggacctcttgtccagggatcctttccttttgagtgtcctggagcacagtggggtttcccagaggggcagaggggtctgtggagagttttgg

SEQ ID NO: 10257 - DNA, 201 bp, Homo sapiens
ccaggacggccaggcttccttctgagtcattcctgcctggggcgaccagtagacaccaaatttccatctgtccttgtctagcccacctctgtctgctgtgycttatcctttaacccttgagagccagggctgttccttaaggaaaccctcattgcggcagctcctttgtggaaaccctgtgtttttcctctggcctgggct

SEQ ID NO: 10258 - DNA, 201 bp, Homo sapiens
ctgtgccaatctggtaaaaaacccaaggggtaaatgcatatactcttgccctggtcacagactaccaagaagctaatattattgaccataaccactttttwaaaaaaaattatttcccaggcagaggccaggcatggtggctcatgtctgtaatcccagcattttgggaggccaaggtgggaggatcactcgaggccagga

SEQ ID NO: 10259 - DNA, 201 bp, Homo sapiens
agccaatggtcttctccagctcccgcctgtcttccttgtgaggaggaaggtgaggttagactagaatggtgaattaactgtgttaaactccatgggaagargcaaacagtacccctgctataagccgggttaactctctcaacttgaattatagcattatctttcttaaaaataaattaaatttctacttttctttttcgt

SEQ ID NO: 10260 - DNA, 201 bp, Homo sapiens
ctatgttgcctaggctggtgtcgaactcccggcctcaagcgatcctcctgcttcagactctcaaagtactgggattaaaggtgtgagccaccgctcccacyctttttttcaacctcagtgctcctagatagttggcaagatgatactcagagagacaaagtctcagggaagaattcagcttcaagtccactttctggaatt

SEQ ID NO: 10261 - DNA, 201 bp, Homo sapiens; identical to SEQ ID NO: 1520

SEQ ID NO: 10262 - DNA, 201 bp, Homo sapiens; identical to SEQ ID NO: 1519

SEQ ID NO: 10263 - DNA, 201 bp, Homo sapiens
tttttttaaagtaaagatttttgtagttctttataaaagtggcacagctccatttcagcaatatggaagaagagataagcctctaatagcaaaaccagccratgccagataaatacaggttataaatgtaataaatgttttctaatgcagaggtgagatgagaagaaagaaagggaaacactcaggagtgaagaagttaac

SEQ ID NO: 10264 - DNA, 201 bp, Homo sapiens
tgctgactgaaaggctgaaaaaggaaaggaagcaagaccctcggtcacgacactgaactgagtttccctgcaaaaagctggaaccgccagcaaaaaaggtrgactagaaagaccaggaagaaaaaagaaaaaggaagcagaatgaaggatatagtaacagaccagaactcactatagaaacaattaaaaatggaataaatg

SEQ ID NO: 10265 - DNA, 201 bp, Homo sapiens
agcagaatgaaggatatagtaacagaccagaactcactatagaaacaattaaaaatggaataaatgaagccaaagattagttctttgaaaataaaacaaayacctggcaagagaaagaaagtgggggggggtgtgggaggagggagagagagagacagaaaagacacagatatcaagattattagaaacaaaaaagggtac

SEQ ID NO: 10266 - DNA, 201 bp, Homo sapiens; identical to SEQ ID NO: 1514

SEQ ID NO: 10267 - DNA, 201 bp, Homo sapiens; identical to SEQ ID NO: 1518

SEQ ID NO: 10268 - DNA, 201 bp, Homo sapiens
atcactcgaggccaggagtttgagaccagcctgggcaagatagcgagaccctgtgtcttaaaaaataaaaataataataataataataaaaatagatattwaataaagaaaaatatttcccaggcagaatgtttaaatattggctttttttgtttaaaatatttcacagcacctgcactagccacataccatcttcgtgaa

SEQ ID NO: 10269 - DNA, 201 bp, Homo sapiens
gtgaaggctgttgacaccttaaggtgacaagatcactgtgagaagacacacgtgtgtcattgagtaaaacggatagtttttaagacattctctcagaggargagtctccatccagggacgaggagggcactggcgttggcactgaggtagagacgttccccacatctgagtccttgaaggctctgtcaagcctctgccatc

SEQ ID NO: 10270 - DNA, 201 bp, Homo sapiens
cagacgctgaaccgctggccccaccgcctttggcagggagctaatgctatttgtgtatcagcccagaatcaactgtgaccagggttgtgtccactgggtayttccctagaattcaagatgaggaaagacactaactcaagatacccttggaataactgatctcttgtgatctccagagcctgaaacgagacttggcataca

SEQ ID NO: 10271 - DNA, 201 bp, Homo sapiens
agcccagaatcaactgtgaccagggttgtgtccactgggtatttccctagaattcaagatgaggaaagacactaactcaagatacccttggaataactgayctcttgtgatctccagagcctgaaacgagacttggcatacagcagtgacttcatacacatctgtggaatacatcccaggccctgtggcctttgttgcctt

SEQ ID NO: 10272 - DNA, 201 bp, Homo sapiens
gaccagggttgtgtccactgggtatttccctagaattcaagatgaggaaagacactaactcaagatacccttggaataactgatctcttgtgatctccagmgcctgaaacgagacttggcatacagcagtgacttcatacacatctgtggaatacatcccaggccctgtggcctttgttgccttcagccgaggctggagag

SEQ ID NO: 10273 - DNA, 201 bp, Homo sapiens
ttcatacacatctgtggaatacatcccaggccctgtggcctttgttgccttcagccgaggctggagagagggtgacgttgcctgtttctttatctttatcttttttttttttttgagatggagtctcgctctgtcgcccaggcaggagtgcagtggtgcgatctcagctcactgtaacctccacctcccaggttcaagtcc

SEQ ID NO: 10274 - DNA, 201 bp, Homo sapiens
agctgcgggcaacccaggccagtgccctttctccaagcagggccgccattgcaaggcctcacgtgcaacacaaatgcccagttcctgagacttcttcagartctccaggaaaagggtgaaaaggcatttaaacctctatgaagtagggccaggcacagtagctcacgcctataatcccagcactttgggagccgaggcaag

SEQ ID NO: 10275 - DNA, 201 bp, Homo sapiens
tcatacacatctgtggaatacatcccaggccctgtggcctttgttgccttcagccgaggctggagagagggtgacgttgcctgtttctttatctttatcttttttttttttttgagatggagtctcgctctgtcgcccaggcaggagtgcagtggtgcgatctcagctcactgtaacctccacctcccaggttcaagtccc

SEQ ID NO: 10276 - DNA, 201 bp, Homo sapiens
ttacaggcgctcgccaccacgcccggcaaaattttttatttttagtggagacagggttggccaagctggtcttgaactcctgacctcaggtgatccacccrcctgggcctccaaaagtgctgggattacagcgtgagccaccgcgcccggccctttatgccttttctactttacaccagatgctgtctcgtttcatcctca

SEQ ID NO: 10277 - DNA, 201 bp, Homo sapiens
gcgcccggccctttatgccttttctactttacaccagatgctgtctcgtttcatcctcatgacaaccctacatagtagccccttccccctgggctcagttygccgatgaagagcctaagactccagagccaaaaggcgttgcctgtgttccctgggctgccaagggcgtcgctgatgctggacctctgagtttcagcccct

SEQ ID NO: 10278 - DNA, 201 bp, Homo sapiens
aaccattgtggaagacagtgtggcgattcctcaaggatctagaaccagaaataccatttgacccagcaatcccattactgggtatatgcccaaaggaatakaaatcattctgttataaagatacatgcacacgtatgtttactgcagcactatttacaatagtaaagacatgaaaccaacccaaatgtccatcagtgatag

SEQ ID NO: 10279 - DNA, 201 bp, Homo sapiens
acatttatagttgaaagatcaaaacccataatcttgctaccagacaatgcttccttccaggatgtttttatgctttaaaaaatatatagtttaggccaggmgtggtggctcacacctgtaatcccagcgctttgtgaggctgaggtgggcggatcatgaggtcaggagatcgagaccatcctggctaacagggcgaacccc

SEQ ID NO: 10280 - DNA, 201 bp, Homo sapiens
ggccaggagtggtggctcacacctgtaatcccagcgctttgtgaggctgaggtgggcggatcatgaggtcaggagatcgagaccatcctggctaacagggygaacccccgtctctactaaaaatacaaaaaaattagccgggcgtggtggcgggcgcctgtagtcccagctactcgggaggctgaggcaggagaatggcgt

SEQ ID NO: 10281 - DNA, 201 bp, Homo sapiens
tttattctaaaaaatactcatagccttgttcttgctgctcaagtgttggccagaatgaactgaccttggctctcaccaggatgcaagtcaggcccttcagrttccgtgagattgtcagacaactgaaacttgttctcactctggccaaacgcataaacttggggagcagagagctgggagatttgcgcctaaagagttgat

SEQ ID NO: 10282 - DNA, 201 bp, Homo sapiens
caacagcaaaaacgattttctccagtcctcacgcgtctcatcagttcggccccatccattcattcattcatgaatctgacagatgtgtattgcgccccccsctccacgtgctctccctggccggcggccccgtgccaccacccagcctcaccctcattgaagctgacgggtcctgctccaccgtccacgctcccgggccct

SEQ ID NO: 10283 - DNA, 201 bp, Homo sapiens
agggaaattgagatttgaagagaccgagtgatattatatgccttggaagtagcagggccgggggctcggggtaagagccattgctcggaagctgcgagctkttcagctctgggactgccaccgagtggatggagagctgaggcaaagatggagaaatggtcactgacctgccccaagttcttggactgccacatgcagagg

SEQ ID NO: 10284 - DNA, 201 bp, Homo sapiens
aaagtgctgggattacagcgtgagccaccgcgcccggccctttatgccttttctactttacaccagatgctgtctcgtttcatcctcatgacaaccctacrtagtagccccttccccctgggctcagttcgccgatgaagagcctaagactccagagccaaaaggcgttgcctgtgttccctgggctgccaagggcgtcgc

SEQ ID NO: 10285 - DNA, 201 bp, Homo sapiens
gggaaattgagatttgaagagaccgagtgatattatatgccttggaagtagcagggccgggggctcggggtaagagccattgctcggaagctgcgagcttytcagctctgggactgccaccgagtggatggagagctgaggcaaagatggagaaatggtcactgacctgccccaagttcttggactgccacatgcagaggg

SEQ ID NO: 10286 - DNA, 201 bp, Homo sapiens
atcagcccagaatcaactgtgaccagggttgtgtccactgggtatttccctagaattcaagatgaggaaagacactaactcaagatacccttggaataacwgatctcttgtgatctccagagcctgaaacgagacttggcatacagcagtgacttcatacacatctgtggaatacatcccaggccctgtggcctttgttgc

SEQ ID NO: 10287 - DNA, 201 bp, Homo sapiens; identical to SEQ ID NO: 1515

SEQ ID NO: 10288 - DNA, 201 bp, Homo sapiens
gtggtggcagtttcctttgccctcagcctagtcctgaaacatcccgaggtggaagggtccgcttcaccagcatggcttctcttgcagcctttaaacggcaytcgccttctgactcactcccaggaagctcctcaaatatgcgcccaagaaatattttccctcggcgactgttcttagcctgctgagaggcagggcaggagc

SEQ ID NO: 10289 - DNA, 201 bp, Homo sapiens; identical to SEQ ID NO: 1525

SEQ ID NO: 10290 - DNA, 201 bp, Homo sapiens
aacctatatacgtgtagcccagtatgcagcatttagactcctagggggctacatacaagtaaactcaatgagttcactaaataagaccacaagacttcttygtcgttggacttctgatgacgcttgggacaatcaaggtgtgtcattgtcaggacacagactagaatgaatgggaattctataagttgacctacatctctg

SEQ ID NO: 10291 - DNA, 201 bp, Homo sapiens
tgcgagaaagcacagtccactgtagctttgttgaggttgtgtgattctgctgccttacaccagttaccacagggccctccagctctctctcatgtggcagrtgccaggttctgacgtgacaagccagggttatggagctgttggtgtgcactgtggcatgaaggatgctggtgtggtttaccatagtcaggatgagagggt

SEQ ID NO: 10292 - DNA, 201 bp, Homo sapiens
aggcatgacattgcccaccctgtatctgggtcaccctccaaaccaaccacagagaaagccataaggctcaggtgcacacagcacccattcccttgtttggstgttctgtgacccatttgtgggaatggggacattatcttttgccagccacatctcatttttggcacagttgcataaggtcagttcccccagtatgacatt

SEQ ID NO: 10293 - DNA, 201 bp, Homo sapiens
agacacaaggaaccaccaatcagggaaactcaactgagtgctgggatccaagtaattattggggctccattacatagccataattggttggttgattcctrtgtggttatttagtcttttggtccactggttccctgtgacctaaagacctacattaaatcacatcgttattttttctgacatggggaatgccacctgcca

SEQ ID NO: 10294 - DNA, 201 bp, Homo sapiens
agcacttgtgttttttgaaccttcctgagggagtgaagggatgttgctgggctcccaaggcagtggccgtggaataaacagtatctatcggccattgcctrtggcaggtgtctcatcatttttcatgggaattcacttgtaggtgtaggacataaatctggagctagctgcacctccaggcaggtccccagtcagcctggg

SEQ ID NO: 10295 - DNA, 201 bp, Homo sapiens
tgtggtttgtgccttgcgagtacagaagacacactgcataactgtctcagggtaccatggagcaggttcactgtgcactgattaccaactcgtgtgagtcytgtgggacagaacacattcacacgcaacagattgcatgaagcagatttattactacagattggcagcaggcgagcccagaagcctagggtccagtatgag

SEQ ID NO: 10296 - DNA, 201 bp, Homo sapiens
agtcctgtgggacagaacacattcacacgcaacagattgcatgaagcagatttattactacagattggcagcaggcgagcccagaagcctagggtccagtrtgagctggccatccagggctcaagaaagctacctggagcagatggaatcttgactgtatgtgccccacttgcaccagagctgaggcaccccagaaggtaa

SEQ ID NO: 10297 - DNA, 201 bp, Homo sapiens
tgaaattaaatatttattatttagtgtagctaaaaatagatcatcagttccctggaatactatggaaccctgaaatagataatggtaataacagtaataartaataccagctaatgttcattaaacagtctgtgccgtagacttttcaaaataccgtatatttcttttcttaattcttgaaaaaactcttgtcatgtaaga

SEQ ID NO: 10298 - DNA, 201 bp, Homo sapiens
caatcaaggaacaggaatgttagccattctgctcaagtgaaagagagagacgagaagaaagaaaaattctccactgagggtctggtgacctgttgtgtggrtgtctggagtgctcccttgagtgatgacatccataggtggcgctgcttctccctgtcctgcgttggtgtgacctcttcttttccagacctggcacctact

SEQ ID NO: 10299 - DNA, 201 bp, Homo sapiens
caactgtgtgtccttgtttgtgacttccatctgttttacttctgtgcacgtccaactccattaccttcttctaaatggccaaacatctttgctggattatkataacctccttccagctagtggccctgctccgtgccttcccactctgacatctgttctcctcatggcagctaaagtgatccttaggacatggatgtcaga

SEQ ID NO: 10300 - DNA, 201 bp, Homo sapiens
gtgctaattgacaatatgagtccttgttggtgggtgacatccctggccaccctttcatgtctctttttctgtcttcatggcactttccaggcacaattctsctttccctggaactgtgtcattcaggactctgcaaattccctaaagtaggaggaaaaatgaccatgtccaaggtaagtaggacttgcctctcttactgtt

SEQ ID NO: 10301 - DNA, 201 bp, Homo sapiens
cccatactctccctcattctccatcttttctggccaccttgtcatccctcttatttctccatcctgccaaggacactgtatcacctgttgctggtacccartgaccacgaacttagatgattaaataagaagcatttattatttctctgttctttaggcctgaagtctgacacatctcactgggaaaaaatcaagctgtct

SEQ ID NO: 10302 - DNA, 201 bp, Homo sapiens
aatgtcaggccccaggagtggttttgtatcctagggtgttcaagtttgagtgtgcagtgggaacctaaatttccaataagtgttaccgtgatattatctaraatatgttgggattaagcatgtgacttttcctgtttacagggcatcaaccattccaccgagatactttccactttctaagggaggaaaagttttggatga

SEQ ID NO: 10303 - DNA, 201 bp, Homo sapiens
ggaaaagaagccttggcgaagagcagaggtttagaggtgcgagggcggggagggtgtttattgttcccgtcagcggagccttctggcgtcggggggctttkctcgcctcccggggggtgggattggggtggccttgtgtgccctgctctgagggtttccaggactttgacctcgctcagtccgcctccctacgtatgcagt

SEQ ID NO: 10304 - DNA, 201 bp, Homo sapiens
tgtgacttccatctgttttacttctgtgcacgtccaactccattaccttcttctaaatggccaaacatctttgctggattatgataacctccttccagctrgtggccctgctccgtgccttcccactctgacatctgttctcctcatggcagctaaagtgatccttaggacatggatgtcagattgtcattcctcagctta

SEQ ID NO: 10305 - DNA, 201 bp, Homo sapiens
ttctgtccctttacctgtaggagagctttttggttgtgtgcaatttggggttagtatgaataatgctgctgtgagcgttcatgtgctaattgacaatatgwgtccttgttggtgggtgacatccctggccaccctttcatgtctctttttctgtcttcatggcactttccaggcacaattctgctttccctggaactgtgt

SEQ ID NO: 10306 - DNA, 201 bp, Homo sapiens
tgtgacttttcctgtttacagggcatcaaccattccaccgagatactttccactttctaagggaggaaaagttttggatgatggatatagcaacccaaagrgaagggaattcaggtaagaagcacgcaactgtgtgtccttgtttgtgacttccatctgttttacttctgtgcacgtccaactccattaccttcttctaaa

SEQ ID NO: 10307 - DNA, 201 bp, Homo sapiens
taagtgttaccgtgatattatctagaatatgttgggattaagcatgtgacttttcctgtttacagggcatcaaccattccaccgagatactttccactttmtaagggaggaaaagttttggatgatggatatagcaacccaaagggaagggaattcaggtaagaagcacgcaactgtgtgtccttgtttgtgacttccatc

SEQ ID NO: 10308 - DNA, 201 bp, Homo sapiens
gcaaccacccgatgatcgatgatcgtctcaggggaaaagaagccttggcgaagagcagaggtttagaggtgcgagggcggggagggtgtttattgttcccktcagcggagccttctggcgtcggggggctttgctcgcctcccggggggtgggattggggtggccttgtgtgccctgctctgagggtttccaggactttga

SEQ ID NO: 10309 - DNA, 201 bp, Homo sapiens; identical to SEQ ID NO: 1530

SEQ ID NO: 10310 - DNA, 201 bp, Homo sapiens
gaacatgtcaaaattgatgaccactagaatgtcagccacatgtgtctttgtatttttgctgcatccttacattgcttgagtctggaagattgaggctgcastgacctatggtagtgctactgcactccagccagggcaacagagtgagaccctgtctccaaaaaaaaaaattaaataaatacctttctttgtttctagaca

SEQ ID NO: 10311 - DNA, 201 bp, Homo sapiens; identical to SEQ ID NO: 1532

SEQ ID NO: 10312 - DNA, 201 bp, Homo sapiens
ttatgcacgccccacagcagtgtccaagcatgttacaacccatgctgtttcagctctgccatctggggatggccaagtgccaatcagctcagtggagcatsagggtagcagcccctgccctcttggcacctgggttcttgtccagcatccaggaagaaccaggtcacatgaactgtgtgaaaggtgatgaacgcagaagac

SEQ ID NO: 10313 - DNA, 201 bp, Homo sapiens
ccttgcaggagggagtgtgcaagcgagcaagtgcaggaaccggagcaaatgaatgctggaattggctggtcgctcctctctggcgagagcaggctctgttrtgcacgccccacagcagtgtccaagcatgttacaacccatgctgtttcagctctgccatctggggatggccaagtgccaatcagctcagtggagcatcag

SEQ ID NO: 10314 - DNA, 201 bp, Homo sapiens
tttgtttcactcagcccaccgctgtcgattccttgcaggagggagtgtgcaagcgagcaagtgcaggaaccggagcaaatgaatgctggaattggctggtygctcctctctggcgagagcaggctctgttatgcacgccccacagcagtgtccaagcatgttacaacccatgctgtttcagctctgccatctggggatggc

SEQ ID NO: 10315 - DNA, 201 bp, Homo sapiens; identical to SEQ ID NO: 1526

SEQ ID NO: 10316 - DNA, 201 bp, Homo sapiens
gttgtgtgcaatttggggttagtatgaataatgctgctgtgagcgttcatgtgctaattgacaatatgagtccttgttggtgggtgacatccctggccacmctttcatgtctctttttctgtcttcatggcactttccaggcacaattctgctttccctggaactgtgtcattcaggactctgcaaattccctaaagtagg

SEQ ID NO: 10317 - DNA, 201 bp, Homo sapiens
tactaaaaggcaattgtaaaagaagaaatagagatcgccaataatcttgaaaagtggtgatactcatttataataataagtgagaatgatagaatgaattrttcttcctaatcagattacaaaaccatgggaatatttataaactgctcttggctatcataaggagaattagggtacttgtattctgttgaatgattagag

SEQ ID NO: 10318 - DNA, 201 bp, Homo sapiens
tatattgcagaacagattttttttttctctgtggatggctgcttatccattttcaactttcttaggtttccttgacatgattggttttatgtgtgtgcagytgacccatgtcctgtggaaacttctaagcatagcattttttttttcatgaccacactgagtaatatgccttccctgggacctaccctggagctttccata

SEQ ID NO: 10319 - DNA, 201 bp, Homo sapiens
aatattttccaagtttcaacctttggaacttaactctccatcagaaaaatttacctaattcaggacttggtaatatcctgacaaagttttgaacattttgwgagcatgaaccataataagaaacacctctttcagtataacctggacagttttcatgcatgtaggtgtatgtgagtgactttagctgacatttcatgtaac

SEQ ID NO: 10320 - DNA, 201 bp, Homo sapiens
gaactgctctcacttcactccaagtgcaaattcggcagtttttcaaaactaccttcacattcaataatttcctagaaagaccctcagaactcactggatgyatttattctcacagttactgatttttacaagcaaaagatgcatattatagttaaccaagggggaaaaaccaaataagacagagtccagtgaagtaccaaa

SEQ ID NO: 10321 - DNA, 201 bp, Homo sapiens; identical to SEQ ID NO: 1531

SEQ ID NO: 10322 - DNA, 201 bp, Homo sapiens; identical to SEQ ID NO: 1533

SEQ ID NO: 10323 - DNA, 201 bp, Homo sapiens
tcgcttgaacctgggaggtggagcttgcagtgagctgagatcataccactttactccagcctgggcaacagagcgagactccatctcaaaaaaaaaaaaaagtgtatgtcctacttttaaaattgctttaatgaggccaagcacagtggctcacacctctaatcacacccatttgggaggctgaggtgggaagattgctgg

SEQ ID NO: 10324 - DNA, 201 bp, Homo sapiens; identical to SEQ ID NO: 1569

SEQ ID NO: 10325 - DNA, 201 bp, Homo sapiens
gctttgctcatgttgcccaggctggagtgcagtggcgcgatcttggttcactgcaacctccgcctcccagcttcaagcaattctgctgcctcagcttcccragtagctgggattacaggtgcatgccaccatgcctggctaattttttgtattttcagtagagacagggtttcaccatgttggccaggctggtctcaaact

SEQ ID NO: 10326 - DNA, 201 bp, Homo sapiens; identical to SEQ ID NO: 1570

SEQ ID NO: 10327 - DNA, 201 bp, Homo sapiens; identical to SEQ ID NO: 1571

SEQ ID NO: 10328 - DNA, 201 bp, Homo sapiens; identical to SEQ ID NO: 1572

SEQ ID NO: 10329 - DNA, 201 bp, Homo sapiens; identical to SEQ ID NO: 1573

SEQ ID NO: 10330 - DNA, 201 bp, Homo sapiens; identical to SEQ ID NO: 1574

SEQ ID NO: 10331 - DNA, 201 bp, Homo sapiens
aaaaaaaaaaagaaaaaaatggaaaacatcctcatggccacaaaataaggtctaattcaataaattatagtacattaatgtaatataatattacatgccamtaaaaagaataaggtagctgtatatttcctggtatggaaaaaacatattaatatgttataaactattaggttggtgcaaaactaattgtggtttttgcca

SEQ ID NO: 10332 - DNA, 201 bp, Homo sapiens
ttaaaagtagatgtagaaaacttactcttaaatatataacagttcaaaaatccagcaggaactaagttaattaaatagaatattcacctgttttttctgayaattatcctgtgttatatttacatattaatgcagtataatattttagtatacattacactctagggagtcactgaaatgtcagcaaagaaaaatacggcc

SEQ ID NO: 10333 - DNA, 201 bp, Homo sapiens; identical to SEQ ID NO: 1575

SEQ ID NO: 10334 - DNA, 201 bp, Homo sapiens
gtggacaaagagggccatatgtggttgctgtaaagaagaggatggttaacaacctgtgagcatttggtttcttgataagctttctcccagaccacctacaytgagctattaattaggaataggatgcacttcgagttttatttcaattcttgtgaacttataactttcctaagaatatatttatacatgtaggcaaagtct

SEQ ID NO: 10335 - DNA, 201 bp, Homo sapiens; identical to SEQ ID NO: 1576

SEQ ID NO: 10336 - DNA, 201 bp, Homo sapiens; identical to SEQ ID NO: 1577

SEQ ID NO: 10337 - DNA, 201 bp, Homo sapiens
tccagcctggtgacagagcgagactccatctcaaaaaaaagaaaaaaaaaaaagaaaaaaatggaaaacatcctcatggccacaaaataaggtctaattcrataaattatagtacattaatgtaatataatattacatgccactaaaaagaataaggtagctgtatatttcctggtatggaaaaaacatattaatatgtta

SEQ ID NO: 10338 - DNA, 201 bp, Homo sapiens; identical to SEQ ID NO: 1579

SEQ ID NO: 10339 - DNA, 201 bp, Homo sapiens; identical to SEQ ID NO: 1580

SEQ ID NO: 10340 - DNA, 201 bp, Homo sapiens; identical to SEQ ID NO: 1581

SEQ ID NO: 10341 - DNA, 201 bp, Homo sapiens; identical to SEQ ID NO: 1582

SEQ ID NO: 10342 - DNA, 201 bp, Homo sapiens; identical to SEQ ID NO: 1583

SEQ ID NO: 10343 - DNA, 201 bp, Homo sapiens; identical to SEQ ID NO: 1584

SEQ ID NO: 10344 - DNA, 201 bp, Homo sapiens; identical to SEQ ID NO: 1585

SEQ ID NO: 10345 - DNA, 201 bp, Homo sapiens; identical to SEQ ID NO: 1586

SEQ ID NO: 10346 - DNA, 201 bp, Homo sapiens
ttgatatcaagtcaaaggctcacaatgtctggtaataaaacaaattactttcaattttcttgaaatcttcaggctatcaaaaggagatgtgagagagggtmttgagtctggcctgacaatgcagttcttaaaccaaaggtccattatgcttctcctctctgagaatcctgacttacctcaacaacggagacatggcacagt

SEQ ID NO: 10347 - DNA, 201 bp, Homo sapiens
tgaggacccacttgagatagggagtgggtctggtagtgcatcctgaagtcctgccaggggacaagcacaatgaaaaactcctgactgtgggtctggaagtygcctacacctgtacatctattcaacagccagctgctgagacactgccctccttcacagatgggggctctgagctgctggacaacactgcgttctggatgt

SEQ ID NO: 10348 - DNA, 201 bp, Homo sapiens
actcctgttgcaacatggggatggcaggcatccccgccctatttaccccagcctcactcttctcctgagtgctgcctctgtctgaccatcctttctccccscaacttcctcctccccacacaccacactcccggcacccactgagtgagaaaatgcaggcagtcaaccggcatcccctctgaatcactggggagcaaaaat

SEQ ID NO: 10349 - DNA, 201 bp, Homo sapiens
cctgttgcaacatggggatggcaggcatccccgccctatttaccccagcctcactcttctcctgagtgctgcctctgtctgaccatcctttctccccccarcttcctcctccccacacaccacactcccggcacccactgagtgagaaaatgcaggcagtcaaccggcatcccctctgaatcactggggagcaaaaattag

SEQ ID NO: 10350 - DNA, 201 bp, Homo sapiens
acgtggctcttctctctctcctcttctaggctctgtggtcatcccctctccctgctgcatgttctttgtttccaagagaattcctgagaaccgagtggtcrgctaccagctgtccagcaggagcacatgcctcaaggcaggagtgatgtaggtatccttcatgggcacgtggcaggagaggggtgggggcaggtgcaactc

SEQ ID NO: 10351 - DNA, 201 bp, Homo sapiens
ctgagaaccgagtggtcagctaccagctgtccagcaggagcacatgcctcaaggcaggagtgatgtaggtatccttcatgggcacgtggcaggagaggggygggggcaggtgcaactccagggtccctgagaagcaaggtcagccagccccagctctgtgcatccctggagaagtcacctcccctctctggtcctcaactt

SEQ ID NO: 10352 - DNA, 201 bp, Homo sapiens
cccggatatgctctgggacttttgggttctccgcgacacctgccccttggctcagcaccatggcctgggaggtgaggtttaagcagcagacatataagggktcccaatccagacctcaagagagggttcttggatctcacacaagaaggaattcagggtgagtccatagagtaaagtgaaagcaagtttattaagaaagta

SEQ ID NO: 10353 - DNA, 201 bp, Homo sapiens
acctggacgccaagcagaagaaggcttcccctagggccagggcagtggctgtcaagggccctgtccagagatatcctggcaaccaaaccacctgctaatcmccgcccagccctccagccctgagtttgggcctgagctgcttggcgggctactcggggcctggagaagccacagtgatggggggaagagctaattttcctg

SEQ ID NO: 10354 - DNA, 201 bp, Homo sapiens
acctccgacaggatgcagttccaagggcatggctgggatggcacagtggggggtgcaggactgaccagcctggggctggagggaagcgctggggaaagggyggcccagtgaatggactggcggtgtttggtgcagggttcaagctccagctctgaggcccagagccaaggggaggctgggaaaagacgtggctcttctctc

SEQ ID NO: 10355 - DNA, 201 bp, Homo sapiens
tggacgccaagcagaagaaggcttcccctagggccagggcagtggctgtcaagggccctgtccagagatatcctggcaaccaaaccacctgctaatccccrcccagccctccagccctgagtttgggcctgagctgcttggcgggctactcggggcctggagaagccacagtgatggggggaagagctaattttcctgttt

SEQ ID NO: 10356 - DNA, 201 bp, Homo sapiens
agggtggcccagtgaatggactggcggtgtttggtgcagggttcaagctccagctctgaggcccagagccaaggggaggctgggaaaagacgtggctcttytctctctcctcttctaggctctgtggtcatcccctctccctgctgcatgttctttgtttccaagagaattcctgagaaccgagtggtcagctaccagctg

SEQ ID NO: 10357 - DNA, 201 bp, Homo sapiens
tttggtgcagggttcaagctccagctctgaggcccagagccaaggggaggctgggaaaagacgtggctcttctctctctcctcttctaggctctgtggtcmtcccctctccctgctgcatgttctttgtttccaagagaattcctgagaaccgagtggtcagctaccagctgtccagcaggagcacatgcctcaaggcagg

SEQ ID NO: 10358 - DNA, 201 bp, Homo sapiens
ctcattttgtaaacagaggcatgaaatagaaatacaataagaaggccacgtgcagtggcttacatctgcaatctcagtgctttgggaggctgaggcaggarggttgcttaaggccaggagtttaagaccagcctaggcaacatagtgagactccgtttctgcaaaaaaataaaaaaaattagctgggcatggtggcatgtt

SEQ ID NO: 10359 - DNA, 201 bp, Homo sapiens
tataacaagtcactattcaggggcacaagacaatatcttatctaattctctcaacaattctatggggtagcgatgattgttcccattttacagaggacagmtgaggctcaggaaggtaacttgctcaaggtcacgtgggctgacatgtgtctgtcctccaaatagcttcataagtagtaactgtgaactcattttgtaaac

SEQ ID NO: 10360 - DNA, 201 bp, Homo sapiens
cagggttcaagctccagctctgaggcccagagccaaggggaggctgggaaaagacgtggctcttctctctctcctcttctaggctctgtggtcatcccctytccctgctgcatgttctttgtttccaagagaattcctgagaaccgagtggtcagctaccagctgtccagcaggagcacatgcctcaaggcaggagtgatg

SEQ ID NO: 10361 - DNA, 201 bp, Homo sapiens
tagtcccagctactcgggaggctgaggtgggaggatcacttgagcctgggaagcagaggttgcaatgagctgagatggcaccactgcactccagcctgggbgaccgggggcaaaaaaataataataataatgcagctgggcacactccaggagccagggtggggaagggagaggagaacattgagatggtataggtcattt

SEQ ID NO: 10362 - DNA, 201 bp, Homo sapiens
aaaccaagagggtttttttatccttccatggtttcaaaatctggaaggacaatttgtacagaccctgagatagaaggattcctcagctttaatttcatgawcgatttgcctttcattgattcttgaggatatgaatgttttagaaagcaacagtgtatgccttgattttaagaggcaatgagccttttccttccttcgttt

SEQ ID NO: 10363 - DNA, 201 bp, Homo sapiens
ccgaactggacatggctcgaggtgggtgaccattactgctgtggtggaaatgggttctgtacccttataccttgctcttcttcttcccaggatggcctgaycattcactcacccatccatccttccctccttccctccctccttctctccaacaagcatgtattgagtacgtaatagttattaagcactgggatacaccag

SEQ ID NO: 10364 - DNA, 201 bp, Homo sapiens
gttcacaccaaccctgaccggagatgcaccgaactggacatggctcgaggtgggtgaccattactgctgtggtggaaatgggttctgtacccttatacctwgctcttcttcttcccaggatggcctgatcattcactcacccatccatccttccctccttccctccctccttctctccaacaagcatgtattgagtacgta

SEQ ID NO: 10365 - DNA, 201 bp, Homo sapiens
tcataaagtcaaaaaactgttaagtcgaggtatggtaacttggggattatttgtacttgttagatcatcaaattcagagtcactatctttagtttagtgtwtatctttagtctttagtttttatattttatctttagccattatctttagttgaagtcattatctttacttaaggggatgacaaaaaccttgctaaattta

SEQ ID NO: 10366 - DNA, 201 bp, Homo sapiens
atcataaagtcaaaaaactgttaagtcgaggtatggtaacttggggattatttgtacttgttagatcatcaaattcagagtcactatctttagtttagtgwttatctttagtctttagtttttatattttatctttagccattatctttagttgaagtcattatctttacttaaggggatgacaaaaaccttgctaaattt

SEQ ID NO: 10367 - DNA, 201 bp, Homo sapiens
acggtgcagtaacccaaagacctgttaattgatggtctaaactccagcctcatatttgacttatacgggaggtcttaatgtttccggcttattgccatatyccatatgtaatttcctccattcctttcaaggggaaagccactgagtgttacccagctgccactgctgaccggttgcccacttcactgagggcctttgaag

SEQ ID NO: 10368 - DNA, 201 bp, Homo sapiens
tctcaaaaggctaactatgacttttgagacttataaagtctcaaaagactttataagaggttaaaagggcaattgaaatgtaggattattttaaagacctmcgtatttctagaacttcaactacagacctcttgttaactctgattcccatgtctacaacctaagaatgatacattatgtttagtgaatagtgattcggta

SEQ ID NO: 10369 - DNA, 201 bp, Homo sapiens
agctacaatgaagttctacaatctgttgttctcaattttcctggcaggaaaaaaaaaatcttttctgagtaggaaggtttgcctttttagaacaaacacgwtcttccctgcgtgattcttctgaatgcctggccttctgtcaactatcagtctgaaggggaatttccatagagcctcgccaccaaatttaaattaggcaaa

SEQ ID NO: 10370 - DNA, 201 bp, Homo sapiens
tgtttgaatgacttaaagagattacatccaaattgccaagacctagtaactgctctttaactatttaccacccccttctcctccataaagtgcagttggcrccaaggcctcagagacacgggagggtgtggcaaaccacgaggctgagagtggaggtgtgggagaggctggagggaagctatggccttggaattttattgc

SEQ ID NO: 10371 - DNA, 201 bp, Homo sapiens
aaacactgggtgttttaaaaacaagttgtttgaatgacttaaagagattacatccaaattgccaagacctagtaactgctctttaactatttaccaccccmttctcctccataaagtgcagttggcaccaaggcctcagagacacgggagggtgtggcaaaccacgaggctgagagtggaggtgtgggagaggctggaggg

SEQ ID NO: 10372 - DNA, 201 bp, Homo sapiens
gacttggagacctggagctggaatttgagggtcaagacagtctctgagccaagatgttgggtttgtggcagacccaagactatgcctgccttggcttccargccccccctggagaacttctgtggttcgttcttgtgatagcattgtcctttaggatgccatcattatgtgaatgtttcctgctatgattgtccaaaggga

SEQ ID NO: 10373 - DNA, 201 bp, Homo sapiens
ctcttcttcatcaacatgtggcagaaggtaaggagggcatccctgtaaaaagagcagttgttccatctggtgcgcttgctgactttcattattgcctggamtaggcaatgattctacaagcactaatcctttctgtggactatcatttagaatgattagaacttttttcttcctgggcttagaaaacatgttggtatagcc

SEQ ID NO: 10374 - DNA, 201 bp, Homo sapiens
tcacgtggttcccattgtgctgaattgcacactgctcctgaaagtgctgcccactccctaatcaccagaggcaggctcagtcaataggacagacagatgakgagtagacccccaagaatcacccaccagaggaggagcatcaacaccagggcagagaggcagcaaccgcaatcaaaagaactaataccagagggtgcagta

SEQ ID NO: 10375 - DNA, 201 bp, Homo sapiens
tggggatgggcggcccggctgcgccgaggggcgccgggaggctccgcgcgctgctgctggcgctggtggtcgcggggatccccgcgggcgcctacaacctygacccgcagcgccccgtgcacttccagggccccgctgactcgttcttcggctacgcagttctggagcatttccacgacaacacgcgctggtgagtgcccg

SEQ ID NO: 10376 - DNA, 201 bp, Homo sapiens
atgaggtggaggtgaaaggtcaggtaactgtgggggcccagctctgggtgaggtgtcctagaattcagcaaggaaggcagcctcttggctctgcacagttkggaaggtcagtcttcagatggaggaaagatgggcacttccaggacacagataccctccactcccatccaagctcagcagagggtgctggccaactctgtc

SEQ ID NO: 10377 - DNA, 201 bp, Homo sapiens
ggttcatagataaagtcaaacatccctttatactctaagggtgtgtttccccgataatcaggcttaaaggggatggtaactggagaattttgatatctcartataataaggcaatgcagaaaattattcatccccagcatgtttctgtcactttctctggcattcatatctcaatctttgcagtagaaagagaaatgtaga

SEQ ID NO: 10378 - DNA, 201 bp, Homo sapiens
ctgagcgcagaggagatgtgggtgcctcctcatgctgttcccgaccagtggctctttctggggccccatctagcatgagcctttcacagactgctaagcayaattagaatgaaggtctaggcttagccatagccccagaagtgttggggtaaagtggaagaggccggcagttggatggcatcttgtactgtaccttgtggg

SEQ ID NO: 10379 - DNA, 201 bp, Homo sapiens
actctgttaaaaaacatttttaaagaatgaagattaattttgatacacataagaatgagaactattctagaactctcaaaaagggcaaacgagtaatagtktctgtgtatgttcatttgacacatgcttattatgtatccacatgtgccaggcactggagatatagtcctgccctcatggagcttctaaagggagttacaa

SEQ ID NO: 10380 - DNA, 201 bp, Homo sapiens
gccacacctcaaatgttctaccttatttaatatgttcatccttcttggctgtctcattggcaatttctcttgatcttcaggtatattgaataagctcaackattaaacatatttattttatcattttttaaaaagagcttagaaatttcaacattgaatgaaaccataccataaaacttgggaactggttagtgagggagg

SEQ ID NO: 10381 - DNA, 201 bp, Homo sapiens
caggactttgggctccgctttggacttctgaatcagaatctgcattttcacaagagccccacaagattcctgtgcacatttaagtttgagaagcactgctstggagcacacatgtgtgcacacacgcccactcatgcagaaatatttacgtgagctagttcattcctcagccacacctcaaatgttctaccttatttaata

SEQ ID NO: 10382 - DNA, 201 bp, Homo sapiens
actcacagtgtagcccctggcctagcattgtcagcatcactgggaacttgttagaaatgcaggactttgggctccgctttggacttctgaatcagaatctkcattttcacaagagccccacaagattcctgtgcacatttaagtttgagaagcactgctctggagcacacatgtgtgcacacacgcccactcatgcagaaa

SEQ ID NO: 10383 - DNA, 201 bp, Homo sapiens
acagaggcttaggtttctaaaagaggggtgctgctttggcagctcagaattgaaaagaggcaggcattgtcctgacagctggtaactgtccctgccatttktctggctggggaaaatcaacttgctagcccagctctagagactggattaaaccccagaacaagatagaaccagtgttgattggaattcagagcacgtgat

SEQ ID NO: 10384 - DNA, 201 bp, Homo sapiens
aacacgttccaggagagattggtaatgagccaccaagtcagggctcaggatacccgtttagctggagtgggctagtgggatatttccgatgttccctgtcrctgttcctcccagctggttttgcaggcagcaggcacacaggctggacatcctttccctctgaggttcctccccttctatttcctgcttatcaacatgttt

SEQ ID NO: 10385 - DNA, 201 bp, Homo sapiens
tccatcaacatcacagcgcctcagtgtcacgacggacagcagcctgtgaactgcctgaacgtcaccacctgcttcagcttccatggcaaacacgttccagragagattggtaatgagccaccaagtcagggctcaggatacccgtttagctggagtgggctagtgggatatttccgatgttccctgtcgctgttcctccca

SEQ ID NO: 10386 - DNA, 201 bp, Homo sapiens
tgagggaatccctgagtatgcatctatttcttgaatcatggcatctgctataggaaatcctcttaaatgtattcttatctccctaataaaatggaaattgrtacttaattggtaaaattttaaataattacccagcatctggtggttcatttatggcttcaaccagatgcgttttattaacaacaaacttgcttttattat

SEQ ID NO: 10387 - DNA, 201 bp, Homo sapiens
cagcaaatgcttgagggaatccctgagtatgcatctatttcttgaatcatggcatctgctataggaaatcctcttaaatgtattcttatctccctaataawatggaaattggtacttaattggtaaaattttaaataattacccagcatctggtggttcatttatggcttcaaccagatgcgttttattaacaacaaactt

SEQ ID NO: 10388 - DNA, 201 bp, Homo sapiens
cactttgctattaccagctgggactccacttatcaagttcttttaggaaattacccaatgaattggtggaggtaaatgatgcaggaggtttgaccaactgsatggggctacaacattgcagttcatgctcataatggcagcaaatgcttgagggaatccctgagtatgcatctatttcttgaatcatggcatctgctatag

SEQ ID NO: 10389 - DNA, 201 bp, Homo sapiens
gatttactctttgtttttgtgggatgtccttggggagcccaaggactgtccattcatcaagcactgggagatggtccatggcagggaggagagtatggctwtttattgagtttcatttggtcataagactgggcaggttgatttcttctgccctgaagcactttgctattaccagctgggactccacttatcaagttcttt

SEQ ID NO: 10390 - DNA, 201 bp, Homo sapiens
tcaccccagatagtttccttgtgcctctgtctggtcatacccctctcctgatagacaaccactgttctgacttctatcaccatagatccatcttgcccatkctagaatttcacattggtgggaatatacagtatggactcttgtttctggcctcttttaatcagtgtgatgcatttgagattcgttcatgttggtgtgttg

SEQ ID NO: 10391 - DNA, 201 bp, Homo sapiens
atgactccatgagttttgaccactgcatacgctgtgtgactaccaccccaccacaataaagaatacttctgtcaccccagatagtttccttgtgcctctgkctggtcatacccctctcctgatagacaaccactgttctgacttctatcaccatagatccatcttgcccattctagaatttcacattggtgggaatataca

SEQ ID NO: 10392 - DNA, 201 bp, Homo sapiens
caggcgtgagccattgcgcctgacccaacaggccctcttaaaaccggggccatctggctgaaggtccatcatatagactctgctttctcatcattcttgtrttttttaatcttcctgctgtgagcttaatccaaagggtattttctttttctcttcttcatggtgagggacagccttctccaggagtttgctcacatatgg

SEQ ID NO: 10393 - DNA, 201 bp, Homo sapiens
tgactaataaatattttctgatttaaatgtaatgaaatattatcagcttttgaagaaggccctggggataattatcttcattttacagacagggataccaygagatactcaggtcacatagagtgaggggtggagggtgacaattccatgttcttcagaacctagagcattttccaagagtcactgaattctaggtatgtc

SEQ ID NO: 10394 - DNA, 201 bp, Homo sapiens
agaacagacataggctgtctttgcttgtgtagatgacaattacaagactcttttctttaatttatgccctaaatgctataattctggattgaaagcgaagytaaatttaggaaggcctaatgatgacacacaatgctctttcgcactcatgatacataacttacagggaaaggccctgactccctttttgcatagcgtcac

SEQ ID NO: 10395 - DNA, 201 bp, Homo sapiens
actcagtaggaaaacttacgaatatggaaactattttgccatgaggcatacatagtctgaggggcatttatctatccagaccatcctcttttcattagaartacataacaggagattaataaacttcggtgattcagcccacaaggcaggaggaagagagctttgggcacagtttgggggccacatctgagtcacaagagc

SEQ ID NO: 10396 - DNA, 201 bp, Homo sapiens
tcgggggagttgaatggtgagcctggagtccaggcagggtgcggtattgcttactgcttttcatgagtggtgttccccagaatctgtggttgaggtcaatktcagctgtttgtcatttccttgttagagcctgatgtaaagttgaggaaacgtgtgtggtctcatcgtggatagaataggggcctggcctgtcgtgaattc

SEQ ID NO: 10397 - DNA, 201 bp, Homo sapiens
acagtcatttcttgtctacaccctcctgaattatcaaaaagcaagcctttccggcgagaatctagtggcttttcttccatctgtgttcctgccctatcctytgttaaggctcttccccaaattaaccataacacgtattgtttaaggcattgccctcttgcctgcaggctctatcctcctctctctattttttttctttag

SEQ ID NO: 10398 - DNA, 201 bp, Homo sapiens
aacagtcatttcttgtctacaccctcctgaattatcaaaaagcaagcctttccggcgagaatctagtggcttttcttccatctgtgttcctgccctatccyttgttaaggctcttccccaaattaaccataacacgtattgtttaaggcattgccctcttgcctgcaggctctatcctcctctctctattttttttcttta

SEQ ID NO: 10399 - DNA, 201 bp, Homo sapiens
gcactgtccctcccttcagcctcagccctgagggtcgcaggcttggccctgttttatgtagtatgggctgaagggagaggggtgtgagcactgggggcggrgtggcgtggtgcggtaaaaacaagagctgttggttttaaaggtttttgaagacaggaattactttatcttaccctgtttataatgtttgagaggggatgc

SEQ ID NO: 10400 - DNA, 201 bp, Homo sapiens
ttaaaaaagatttcgatctttaatctttctggaatttgtgttgtatacattgtgtgatagaaactaactacattatttttctaaatatatagttggttgtyctgatactggtttgttaaacaacttttcctctccccattgaaatgccatcctgccgtgtggcgacttcactctcttcttccatctcagcaaacatttaga

SEQ ID NO: 10401 - DNA, 201 bp, Homo sapiens
tagcactttcataggttgtttttaaaaaagatttcgatctttaatctttctggaatttgtgttgtatacattgtgtgatagaaactaactacattattttyctaaatatatagttggttgttctgatactggtttgttaaacaacttttcctctccccattgaaatgccatcctgccgtgtggcgacttcactctcttctt

SEQ ID NO: 10402 - DNA, 201 bp, Homo sapiens
atttttaatagcactttcataggttgtttttaaaaaagatttcgatctttaatctttctggaatttgtgttgtatacattgtgtgatagaaactaactacrttatttttctaaatatatagttggttgttctgatactggtttgttaaacaacttttcctctccccattgaaatgccatcctgccgtgtggcgacttcact

SEQ ID NO: 10403 - DNA, 201 bp, Homo sapiens
cattgaggccgaatttaaagattgttctctcacctcactctcctacttctaagccaccttgcaagtcccaccacctcctatgccctcaaaacctctaacawtgacatccattgccctccacatcctctgccaccctacaaatctaagccatagttgtcttgcttccaacccactgcggaatccttctgccgtcttgcttcc

SEQ ID NO: 10404 - DNA, 201 bp, Homo sapiens
gaaactgctgtttaaatccaaagagaacatagacagttggcaatatagtgtctgatccagaaagcaagaaagaaaaggcagaaagtctgaagttttatttycactctcaaaccaataaataggagatgctaccctccaacccccattccgcaccctcagtgattcttacctcgctggagaatcatttttatgacagtcgac

SEQ ID NO: 10405 - DNA, 201 bp, Homo sapiens
gaagtttgaatagcttcatcctgccatcaactctccttgtttctgagcctttgatgctccatcatgctctaccatgttgatggggaaatgagtgaggagaraattagaaacccagacatcttctgcctgattatagcagcagctagattgacttttgagagtgtacgcgtgtgtgtgtgtgtgtgtgtgtgtgtgtgtgtg

SEQ ID NO: 10406 - DNA, 201 bp, Homo sapiens
aaggcagagagtgtagtcattggctaccatgacattctccttccctcaaaaatgcatctcaggctatgggagaccatcctgctaagcaggtaaaagggackcattttgccagcaggagagagaagtttgggttcctgtaattctgcccaggtgtttcctgtcaatgagtgtgctctagcagggcagcattcaaactctggt

SEQ ID NO: 10407 - DNA, 201 bp, Homo sapiens
cataggagcaatcagttgctggtgttcctctcctcttccccactacactgaaagaaagaaattaatgcatatttgtgttttggggtggaggtttcattcayccaagaaatcatctcaccttgactgttttcaaggtgtaaattgtgtttatagtgaaaaagaagacttggtcatgataaaagccagacactcgtgggatgg

SEQ ID NO: 10408 - DNA, 201 bp, Homo sapiens
gtagaaatggtaaaaatgcctacgtctagttcacagtgatgcgggtgcctctatgctaatgatagcagctttcttttctccctaattgcagaaaacacgayccagttttatagtttttccttcagatgattgtgatgaacttcatagtccctgtcaagtcttaagatgacccctccgcaaacccctctcactggctatctg

SEQ ID NO: 10409 - DNA, 201 bp, Homo sapiens
tctgtagaaatggtaaaaatgcctacgtctagttcacagtgatgcgggtgcctctatgctaatgatagcagctttcttttctccctaattgcagaaaacaygacccagttttatagtttttccttcagatgattgtgatgaacttcatagtccctgtcaagtcttaagatgacccctccgcaaacccctctcactggctat

SEQ ID NO: 10410 - DNA, 201 bp, Homo sapiens
gacaccagttctccgctggaaaaagggacaaaagattgcccaaaagaatcaggtcagaaccttaaagctcatactcagcacccaaggtggcagctgcacasagcagaaataatggcccaaaagttgagagagccgtgggcctggctgctcaggagaccgcagccaggacacacctcctctctgggtctcccttttctgatc

SEQ ID NO: 10411 - DNA, 201 bp, Homo sapiens
tcagtctcttcacatctttagtcctgataatcccgtctgtataatagattccataatgctgatgaatctggtgaaatctgtttttgttgcttagctggggmaaaaaaagttcttggtgtgaggaatttctcctttgttgtgactgtggttctcattgcattcccctcctcccctcctcacttccttctctgcttaccgttg

SEQ ID NO: 10412 - DNA, 201 bp, Homo sapiens
atcccgggcactcctgcccagctgctcatgccaacttgcagtacacagaggaaatatatggcttctcccaggcccacctacataccccggttcctctaggkgttctgctaataaatgcatcttgggaaaaagctgcattgcttattgatgggattccacaaatgtgatttaggtagtggtggcctttgcttagagaagctt

SEQ ID NO: 10413 - DNA, 201 bp, Homo sapiens
atggggtgtcagcatgtgctggctgtgctcatggtacagcaaagtggggacatggtgggtgtacagagtgtccggggagggtgggcagtggtgagtgggawggcagcccctctgggcgccactctgtcctctgaccccggcctgctgtctcctggctactttggactttggcctccgcttcagttcccaggcttttggcct

SEQ ID NO: 10414 - DNA, 201 bp, Homo sapiens
catttagattgtgtgacaactatggctgttgttcctccaacaggcctgtctagtattgtatgacttgagtcaataggcagtgggaaccactgtaagttcayaagcaggtgacacactggcagatggcagtgttgaaagaaaggctatttgagctgggtttgcccagaactttgggagtggaagggcctgaagggaggcctg

SEQ ID NO: 10415 - DNA, 201 bp, Homo sapiens
gatgaagggtgctctctggcttccaaagtgagggcccctcctgagtcaggagcaagactgcctaccttcctttcagaaactgctgtttaaatccaaagagracatagacagttggcaatatagtgtctgatccagaaagcaagaaagaaaaggcagaaagtctgaagttttattttcactctcaaaccaataaataggaga

SEQ ID NO: 10416 - DNA, 201 bp, Homo sapiens
caaaaaaagagtactttttacttctaattcatctgcagtcctgttgttttagcctccaaaacacatcccaaatatgacagcttttattactattacaatcrcctccattatcaccatcatgcttctagaaaggccaccaccatcacctggaggtacactggccctgattggtcttcttatgtctattatgcttttttaaaa

SEQ ID NO: 10417 - DNA, 201 bp, Homo sapiens
acctgtatttttagtagagacggggtttcgccatgttggccaggctggtcttgaacacctgacctcaggtgatctgccagtctcggcttcccaaagtgctrggattacaggctgagccaccacacccggcctgagagacttggttttacacacaactctaaccattccttttcccagattcagaaggacaggacacctgca

SEQ ID NO: 10418 - DNA, 201 bp, Homo sapiens
gtgagcatcccctcctagcagccttctctccttagtggagagacttgtttgtttttcgagacagagtcttgctatgtcactcaagctggagtgcagtggcrtgatctcggctcactgcaatctccgcctcctgggttcaagcaattctcttgccttagcctcccggttataggcgcccaccgccacacctgtatttttagt

SEQ ID NO: 10419 - DNA, 201 bp, Homo sapiens
gtctggtggattcctgagactttccttcctcaccccagtctggacagcatccctgggcccagcctgccgcggcactcgtgggaagtggctggctggctctsctggctccacgcacagctggcatacactgacatggctgtggtttgcttctctctccttccttgcccctagagtataagaagaagtacggagaggaacacg

SEQ ID NO: 10420 - DNA, 201 bp, Homo sapiens
gctggggcactgggcagcctcccttcccgatggcaccagagcctggatttttgaggtctggtggattcctgagactttccttcctcaccccagtctggacrgcatccctgggcccagcctgccgcggcactcgtgggaagtggctggctggctctgctggctccacgcacagctggcatacactgacatggctgtggtttg

SEQ ID NO: 10421 - DNA, 201 bp, Homo sapiens
tgctggggcactgggcagcctcccttcccgatggcaccagagcctggatttttgaggtctggtggattcctgagactttccttcctcaccccagtctggayagcatccctgggcccagcctgccgcggcactcgtgggaagtggctggctggctctgctggctccacgcacagctggcatacactgacatggctgtggttt

SEQ ID NO: 10422 - DNA, 201 bp, Homo sapiens
ggagtaaatgaaataattgtcactagcctcccacttaatgactgtggctattgctcctctttctcgcacacgaggggaggaagtctgctggggcactgggyagcctcccttcccgatggcaccagagcctggatttttgaggtctggtggattcctgagactttccttcctcaccccagtctggacagcatccctgggccc

SEQ ID NO: 10423 - DNA, 201 bp, Homo sapiens
tggtcaacccttgaagccaagggctttgctaagtccaaaaacttagcaaaaccaaaacataactgatttacccacaaattagataacaataagtgattcargtttgcgagccataagaattgagtcagaactttaaaaatcaattatttagcagtatggagtgattatttacttagtgatatattttttatagttctctgc

SEQ ID NO: 10424 - DNA, 201 bp, Homo sapiens
cacactgggatggccacatcattccatttctgggtcacgttttcagctccttgggcctgcaagggatctctgtcccttctggagtaaatgaaataattgtmactagcctcccacttaatgactgtggctattgctcctctttctcgcacacgaggggaggaagtctgctggggcactgggcagcctcccttcccgatggca

SEQ ID NO: 10425 - DNA, 201 bp, Homo sapiens
ccaggagactccacactgggatggccacatcattccatttctgggtcacgttttcagctccttgggcctgcaagggatctctgtcccttctggagtaaatraaataattgtcactagcctcccacttaatgactgtggctattgctcctctttctcgcacacgaggggaggaagtctgctggggcactgggcagcctccct

SEQ ID NO: 10426 - DNA, 201 bp, Homo sapiens
gttgtgagctgagggggtggaggagaaaagcttatctgttagttttctttccacctggagagatcttccccctttccttccacacagcaatagtgtaaccraatgccagagcagtcccttcttcttgcggtcctctgtggacggcttgtttctttttggatggtaggaggcatccaaagcctcttttagggaaggttggtc

SEQ ID NO: 10427 - DNA, 201 bp, Homo sapiens
ttttgtaggagtctgcttgactctgagacctggggaaggagtcgatttggggatgtgtgagtgagatgacattcagtcaggttgtgccccatcattggcgrctgtgcagatacatgaagcgtgtgagcatcccctcctagcagccttctctccttagtggagagacttgtttgtttttcgagacagagtcttgctatgtca

SEQ ID NO: 10428 - DNA, 201 bp, Homo sapiens
gaggctatttctacctgccaggagggcaccagctggccagagaccactgggcagaggaggtggggtggctcatctcgaggctacccctatttgatgatttytgtaggagtctgcttgactctgagacctggggaaggagtcgatttggggatgtgtgagtgagatgacattcagtcaggttgtgccccatcattggcgact

SEQ ID NO: 10429 - DNA, 201 bp, Homo sapiens
ttggcaacccttagaggtgggacttctggagtcccagatacttgagcctcgagggagcagattctggtcctcacaccagaggaggctatttctacctgccmggagggcaccagctggccagagaccactgggcagaggaggtggggtggctcatctcgaggctacccctatttgatgatttttgtaggagtctgcttgact

SEQ ID NO: 10430 - DNA, 201 bp, Homo sapiens
ctgccgcggcactcgtgggaagtggctggctggctctgctggctccacgcacagctggcatacactgacatggctgtggtttgcttctctctccttccttscccctagagtataagaagaagtacggagaggaacacggctcctgccaggctgggatagcgggcttcttcaccgaggtgggtgtctgctgtctgggcattt

SEQ ID NO: 10431 - DNA, 201 bp, Homo sapiens
gtaaccgaatgccagagcagtcccttcttcttgcggtcctctgtggacggcttgtttctttttggatggtaggaggcatccaaagcctcttttagggaagrttggtcttcttccaggagactccacactgggatggccacatcattccatttctgggtcacgttttcagctccttgggcctgcaagggatctctgtccctt

SEQ ID NO: 10432 - DNA, 201 bp, Homo sapiens
tctgcctcccagactcaagccatcctcccacctcagcctcctgagtagctgggactacaggtgtgcaccaccgcatccagctaatttttgtatttttgtasagatgggggtctcactttgttccccaggctgattttcaactcctggactcaagtgatctgcctgcctcggcctcccaaagtgctgggattacaggtgtca

SEQ ID NO: 10433 - DNA, 201 bp, Homo sapiens
gctgattttcaactcctggactcaagtgatctgcctgcctcggcctcccaaagtgctgggattacaggtgtcagccaccgtgctggccagcttccccaaakgtaagggttaggtttgttacagtgcctgtgagctgctgtcaggcaaagcctgcttttcccctgcttctttgaggtggataaatgttttgttcagtagtgg

SEQ ID NO: 10434 - DNA, 201 bp, Homo sapiens
tgccactctgttagaaacaaaatgcttgttcctcagtgccacaatgaaatagcacttgaacataaatttaattttctcagcaaggcaatttttacttctaytgaagcgtgcgacttgtggatggagtaatggtgagagcacacctggacaggggaggggcaggggttcttattcctgttgcaggtagcccctactgctgtg

SEQ ID NO: 10435 - DNA, 201 bp, Homo sapiens
tgtataattgcccttttttttttttttttttactagagctgtgtctgcccaaatgcattgtttcctgtattgtacaattatcagttatttagatttgccastctgttagaaacaaaatgcttgttcctcagtgccacaatgaaatagcacttgaacataaatttaattttctcagcaaggcaatttttacttctactgaag

SEQ ID NO: 10436 - DNA, 201 bp, Homo sapiens
ggcaggaagagttccacaacctggttccagctcctctaagtgacttctaagtccccttgttcaaccctatcttttgggtctcagatttggcttcccccccsctttttttttttttttttttgagaccgaatctggctctgttgcccaggctggagtgcagcggcatgatcgtggctcactgcaacctctgcctcccagact

SEQ ID NO: 10437 - DNA, 201 bp, Homo sapiens
tgactggcttgtttcacttagcataatgtcctcaaggtgtatccatattgtagcatctgtcagaattttcttcctttttaaaggaaggaatatttaataakattccattgtatgtgtgtgccccacatttatctattcatctgtttataaaacattttctttggatgataagaatgttttcactggaaatgtgctttgtga

SEQ ID NO: 10438 - DNA, 201 bp, Homo sapiens
tgtgataaaatcaagtacagagatttctttcatcctttgcccttgagaccactgaggcaagaagccggaacttagcaggagtgagactgcaaacaagttgyctttttattgtgaccgaaaaacctgatgagtgtggaatagtttgggagcagcatggcaaattaacaaagcctgttcaagattaaactctgagaaagaaat

SEQ ID NO: 10439 - DNA, 201 bp, Homo sapiens
gcatatccttcagtcagtttagtttgtgtttgtctgatgtgagaacatcattacctaccatatgttctttggttttatcagaatgtgtgagaaaacgagakctttggtgggacgatgtatagggaaaactacttgtaaattaaagggcaagcactataaaacattaattactattaaccaagctatgatattttaggactc

SEQ ID NO: 10440 - DNA, 201 bp, Homo sapiens
agctcccgagaaaactcaggtgaaagtgctcagcaaggccacccattgttctataactgtggcctcatggtaagtctccatatgggccagctgtgctcctwtacaacattggaaggtcggtttggttgcagagactctaaatatgtggggatctctccaaaatgtctcaagcttttgaattcttaaaaaattggtctctgg

SEQ ID NO: 10441 - DNA, 201 bp, Homo sapiens
tttagagtttgacaggacctttcagataccacctagaacagcctcctgtctttcatgaggtccagagaggtgatggcctgagtttttctttctaatctgtwattcacatgccacacaatggagaggcagagtagcttggtggccaatgcacagattctggacacagactgccggagttcaagtcccggctctgctacttcc

SEQ ID NO: 10442 - DNA, 201 bp, Homo sapiens
gggctcttgtctgtgctctgttggctttaggcatctccacctccctgttttgtggtttaaactagacctactatggcttttaaggccaccattatttcctyaatgtggagaaactcagtaatgcaagttctctgttccacgttaggggtcacattatggttaaagacaatgggaagattttagagtttgacaggacctttc

SEQ ID NO: 10443 - DNA, 201 bp, Homo sapiens
attttcttcctttttaaaggaaggaatatttaataatattccattgtatgtgtgtgccccacatttatctattcatctgtttataaaacattttctttggrtgataagaatgttttcactggaaatgtgctttgtgaagcataagggagtggcagaagcagatcagaagttgggagccttgctcttgggtcctgatgctga

SEQ ID NO: 10444 - DNA, 201 bp, Homo sapiens
gtcagaattttcttcctttttaaaggaaggaatatttaataatattccattgtatgtgtgtgccccacatttatctattcatctgtttataaaacattttstttggatgataagaatgttttcactggaaatgtgctttgtgaagcataagggagtggcagaagcagatcagaagttgggagccttgctcttgggtcctga

SEQ ID NO: 10445 - DNA, 201 bp, Homo sapiens
gcttgtttcacttagcataatgtcctcaaggtgtatccatattgtagcatctgtcagaattttcttcctttttaaaggaaggaatatttaataatattccrttgtatgtgtgtgccccacatttatctattcatctgtttataaaacattttctttggatgataagaatgttttcactggaaatgtgctttgtgaagcata

SEQ ID NO: 10446 - DNA, 201 bp, Homo sapiens
attgaattctgctcagttctgagctggggttctcactgaaatgtgactgtcccatgttcagggtcacttttttttttctgagagtagagcatgacataatrcatagtaagttgcatgtctatatatacattattatgtgcctgtattattacttgctgctgaagtagggagttggcaaaatgggttgctaagttctaggta

SEQ ID NO: 10447 - DNA, 201 bp, Homo sapiens
caaaattgaattctgctcagttctgagctggggttctcactgaaatgtgactgtcccatgttcagggtcacttttttttttctgagagtagagcatgacayaatgcatagtaagttgcatgtctatatatacattattatgtgcctgtattattacttgctgctgaagtagggagttggcaaaatgggttgctaagttcta

SEQ ID NO: 10448 - DNA, 201 bp, Homo sapiens
tttcagtatctgcacagcagtttgtctgtccatgctttggtgccagttatttcatgagtctttttatttttattttttggttatatagatcagaggtttcygtgttgcccaggctggcctcgaacgtctagcctcgccttcttatgcgccaggacaacaggcctgagccactgcagctccctatttcatgagtcttttagc

SEQ ID NO: 10449 - DNA, 201 bp, Homo sapiens
ggtttccttggagccaagaattttaatcttgggcaaacctgtctcctatacttcaaacgtgtttccatgtattacgtggaattatagactacctaaactgmatcttttgtttctctcagaaaaattcacagattcagattcacctaatatttattgagcacctacctggtgccaggggttgtgctaggtacttaacatttt

SEQ ID NO: 10450 - DNA, 201 bp, Homo sapiens
atcttatttaaataaatagagcaaattaaagagaagaggatgcagttgtacattatggccagttaaacagagagggattctgagggggaggaagggagggwggccccagaggacagccatggctgtaaggaggaggccagaggtctccagcagggcctctctggggctttccaggtttccttggagccaagaattttaatc

SEQ ID NO: 10451 - DNA, 201 bp, Homo sapiens
ctccctgttttgtggtttaaactagacctactatggcttttaaggccaccattatttcctcaatgtggagaaactcagtaatgcaagttctctgttccacrttaggggtcacattatggttaaagacaatgggaagattttagagtttgacaggacctttcagataccacctagaacagcctcctgtctttcatgaggtcc

SEQ ID NO: 10452 - DNA, 201 bp, Homo sapiens
gtgttgatctgaggtctttacacattctctcatctaatcttcccagaagctgtgaaaaatgtttgtttcttttttttcttgggtctgattacaggtatttwattttggaaattgttctagaagacaccagtgaggcagggggaagtaagaatgggaagggaaggcagcccatggaagatgtactcctcagcacgttacctg

SEQ ID NO: 10453 - DNA, 201 bp, Homo sapiens
agccacacagccaaatggaaatacaaataatagattgaggtcacattgactgtttcacgttgtacttagacatgctgattaaaacctgagttgcaagtgtrccatggaacataatctctccctctagtgttttggaacaatcacacacaaatgtttatatccacatacaggccccatatacaatgggggaaacagaacaga

SEQ ID NO: 10454 - DNA, 201 bp, Homo sapiens
ttatttggacagaagtctcactggcttatgtccacattgcctttgggcctccctgggttttcctaggtttcaaattttgtggacactaaaaaggattcatkagaaacactatatggacactgggacccttctgggtactgaggtgacacaggtagggtgctctgggaaacgtcccccacagaagagccagcaagatctctg

SEQ ID NO: 10455 - DNA, 201 bp, Homo sapiens
tcaggactagctacaattctcatttgttgatatatttatttcctgtctcctagtaggctcccagtggcttgttcctgttcatgcagttttctgatgcccaraaaagtgcctgttatgaaggtgtggctttctggtccctctgctcctctcttctcccacagaaagaaacatctggcactgacaggagtctgctttgtgatc

SEQ ID NO: 10456 - DNA, 201 bp, Homo sapiens
ccacttcccattgcagatctgctgaagtcacagccattcctacgtccccctgtggtccaaccttggccgcctctttgatcttatctccttcccaccatggkcactccagaccggcctttctttctcttgagcctctgagcctttctcacgatgtatcctttacattctgctatcctttgaatcctcccagaaccctcttcc

SEQ ID NO: 10457 - DNA, 201 bp, Homo sapiens
aaccagccactccctggcatgagggaactttctggtgagatggagatgttctgtgtcttgctagggccttggtgacatgagtgtgtacatttgtcaaagcycatttgtgcattttgctgtatgtaagtttccataaaaaaacaactctccacacacatttacttctagttaatgagatgcatgctgaagtgtttctgtggg

SEQ ID NO: 10458 - DNA, 201 bp, Homo sapiens
cctgcctcatggtgtcttgcgtggcttcgaccctagtgctgagaggctcctctggagagctggccaatgcatctgtccatcttcttcgccagtatgcggasctctcatgcaccccaagacccttggccatgaaccttccttcagctttctcctcagagaggccttccttgacctgcctggcaaaaccagccactccctggc

SEQ ID NO: 10459 - DNA, 201 bp, Homo sapiens
tcagtgtgcagctggctatcagacagcaccatgataaacatccgcctcttttcacagcccctccaactcagaaatacaataaaacatggtcaacccttgargccaagggctttgctaagtccaaaaacttagcaaaaccaaaacataactgatttacccacaaattagataacaataagtgattcaagtttgcgagccata

SEQ ID NO: 10460 - DNA, 201 bp, Homo sapiens
ttcctgttttgaggaaagattcggagccagctaaggttttctgagggcccgtcatgtctcagactgtcacacttattcctctgtcatgtatgcttaagtcygttttagatgaccccttgtaaagaaaggaagcctggcccctgaagcctcattgcgtgggataaggggactaacatattctgtggttgtaccagcaaatta

SEQ ID NO: 10461 - DNA, 201 bp, Homo sapiens
aataatttaagcttctagattatttttgtgcagaagcagtattctctggttctctttgtcatttcctttctaattatcagggctgtccttatctgttcagkgcttcccatctgtccatttttttttttcaaagccacagggtacatttttgcatttacttctgttgctctgtttcctgattttttttaaagtgaacttttt

SEQ ID NO: 10462 - DNA, 201 bp, Homo sapiens
tgtgttgttcaggtgcattttgagaacttgagaagtgcctgggggtgtaggcaagagaccagtatccccaaggagcacaatattggattccaaggttgggkttgaagagggagaggtgggctagctcttttgaaagtggtgtctggtgctgatagaaaacctaagaacaaatggagaatttgaaagctgcaatggggcgtg

SEQ ID NO: 10463 - DNA, 201 bp, Homo sapiens
tgttaagggttttctggaacaagctgagcatcttttgtgtcattaggaactcaacatcatcttattacttatattgtgtgtataatttattttgtggccayatgtccccttttatggaagccacttggggatagagaccaaatctacccactttcattctcagcatctggaggacatctctctaaggaatggcatctgaaa

SEQ ID NO: 10464 - DNA, 201 bp, Homo sapiens
tctcattttgcattacaatagcatctagtaacattcaagcctcaattaattgaaccaataattattatattaaaaatggtatgtatgccccagggcagagrttaggctatggtgggcatttgagaccttagggccatagaccccgaaacatgcattctccagaactgagtatgcaactgtttgctttcgaccttacagcac

SEQ ID NO: 10465 - DNA, 201 bp, Homo sapiens
tcacagactcccctaacgtccatgaagatcatcaccaggatttgagggaatgctgtggtgcatactttgtgttggacagttatgggggattgcttttgccrtctcagcatttcaccgctgtcctcggtatgagattatggtgatgttgaatgggggtcattagaaggctgtccacagaggggatcagcccccctcaatgac

SEQ ID NO: 10466 - DNA, 201 bp, Homo sapiens
ctacagacattttgagtactgttaagcataaacaatatttcaaggtgtctacaactataatatagtgtgtaatatctcagatttctatcgacggtagagtyacaggtctttctaatacttttgtggtttgatgcctacattttataatggaaggaaatgctaaatttcagttagaggttaataaaaataaagaaggaaaat

SEQ ID NO: 10467 - DNA, 201 bp, Homo sapiens
ggagtgctagggtgaccctagcactgtatccagctcttctcacctctttaggaattttaagcccacaaattaagtatggaatttattacatggtatcttgsatttcagaagcagaatctgagatggggatttttgccagagatttattgggggagtgctctcagaagtgaggaaaacagaaagggacagagaaaaaaatgt

SEQ ID NO: 10468 - DNA, 201 bp, Homo sapiens
gttccggcagccattgccaggaagcagcattcgcacccctacatgtccaaatgcattactcatccaaaataagatatgccacgactcaggtttccctcctyagccaccatggcttgaatggctgcatttagaaacagcccttacttcaagcccctatttcttaattatttgtcacttattcgcattcatccttgtgtgtga

SEQ ID NO: 10469 - DNA, 201 bp, Homo sapiens
cgactcaggtttccctccttagccaccatggcttgaatggctgcatttagaaacagcccttacttcaagcccctatttcttaattatttgtcacttattcscattcatccttgtgtgtgaaacatttttcccctcaccctatatgctgttatgtaaacaagtaattttttaggatgatgtcagaacctgatgtagttgggg

SEQ ID NO: 10470 - DNA, 201 bp, Homo sapiens
gggactctggaacaaaaattacaccaaagagttgtcctcaccttgaggcaagaggggcttcccttttgtgccccatatcattcagccattgactggctgtkggggggaagggaagtgtaaccctccttgaaaggagatcccctcagctgaggatggttctctagagaagaatgcagatgtgagccataagcagcctacaca

SEQ ID NO: 10471 - DNA, 201 bp, Homo sapiens
acagtccaggaataatttacaaagtgagatttagattagtgtgtaagaatttcactgcagaggccacttctggctgaggagaagatgttctatggagaaarggagaattggccagagccttaaaggtggagtaggatttgggtcctcagggaatggaggggctgatggatgctaaaggtctctcacgtggctgaatatcta

SEQ ID NO: 10472 - DNA, 201 bp, Homo sapiens
ggctgggaggatgccggccgtagtgagagggctcttgtctgtgctctgttggctttaggcatctccacctccctgttttgtggtttaaactagacctactwtggcttttaaggccaccattatttcctcaatgtggagaaactcagtaatgcaagttctctgttccacgttaggggtcacattatggttaaagacaatggg

SEQ ID NO: 10473 - DNA, 201 bp, Homo sapiens
tatccctcctcctcagctgagcataccaatggtgatgacagaggccctgtcttcaatccctgtacacagaatagcgctctgaaaattataactcttctcasgcttcatcagcaggcccccaaagagacctggctacagcagggcttccaggtctttcactgcggtaggcagaatggccccccaaagatgtccatgccctaa

SEQ ID NO: 10474 - DNA, 201 bp, Homo sapiens
gaaagtttctgtagttcttggccctgtaagaggagaggggtagaagatgctgagtatttttctagaagactggactggacgggtggggctgggaggatgcyggccgtagtgagagggctcttgtctgtgctctgttggctttaggcatctccacctccctgttttgtggtttaaactagacctactatggcttttaaggcc

SEQ ID NO: 10475 - DNA, 201 bp, Homo sapiens
ttgcccaagacttccatgatattttccctgataatcaaggaagggagtgttggctgggacacttttttcttttggaaatgtggcaggggaatatgaatttycataggcgaaattactctgtctggtcgagtctagactgttcgttggccagcacgtttgctggcgcccacactgacactctgaggtgctgcctggacttat

SEQ ID NO: 10476 - DNA, 201 bp, Homo sapiens
caatcttccttcccatgggcgcacacacacttttatatgctaacccattcattggcccagggtgggaaataagggatggatggggctggcatgtggagtaytggggtgtaagagcagccccttagaaaaatgggggactaaattgaaagtttctgtagttcttggccctgtaagaggagaggggtagaagatgctgagtat

SEQ ID NO: 10477 - DNA, 201 bp, Homo sapiens
tgattatgcccctgcccaatcttccttcccatgggcgcacacacacttttatatgctaacccattcattggcccagggtgggaaataagggatggatgggkctggcatgtggagtattggggtgtaagagcagccccttagaaaaatgggggactaaattgaaagtttctgtagttcttggccctgtaagaggagaggggt

SEQ ID NO: 10478 - DNA, 201 bp, Homo sapiens
cagctccaagtcagtcattaggctcccacacagcttctggctgcactgtggacagatgtcctgaggctggggggagaggagacccaggattcataaagcarcagctggacagaaacctgacactctgaactttcagcatttcatgacatttgaggtctgactttccttcccatgtggtcctgcagcccaggcagatgctgg

SEQ ID NO: 10479 - DNA, 201 bp, Homo sapiens
tcatggtgtcttgcgtggcttcgaccctagtgctgagaggctcctctggagagctggccaatgcatctgtccatcttcttcgccagtatgcggagctctcrtgcaccccaagacccttggccatgaaccttccttcagctttctcctcagagaggccttccttgacctgcctggcaaaaccagccactccctggcatgagg

SEQ ID NO: 10480 - DNA, 201 bp, Homo sapiens
tagttgccatcttttcttggtggctgattctaagtggctgaaggaaacaccaggaaacattctgtaaaatgttccttggaaatggcaggcaaaaacaagawacagtgagtgtccctatttacatttggaggtctcatagccatttgcttttttctttaatgtttcaaccctacctgtcagagctttctgggaggcaagtat

SEQ ID NO: 10481 - DNA, 201 bp, Homo sapiens
agttcctctgcccttggtgagtgaacaactattctgacataggctttctcttgcccttgacttttatcagaagctgtacgaagatttttgttataaaagcrtaagctcaagaggggaaagtaatactagctgccgcttatggagggcttcatttgggtcacatgctgcaaagctgagggtttcgtgtgtattttatcccag

SEQ ID NO: 10482 - DNA, 201 bp, Homo sapiens
tttcacgcatgtacacttatgcatccccattgccagtactccggaaggacccctgcaccctttcccagtcagttcctctgcccttggtgagtgaacaactrttctgacataggctttctcttgcccttgacttttatcagaagctgtacgaagatttttgttataaaagcgtaagctcaagaggggaaagtaatactagct

SEQ ID NO: 10483 - DNA, 201 bp, Homo sapiens
tgcagaggttttgtttttgtcaatttttcctttaagcttttctatgaggtataatactaaagcacttaacacacccagctgtgagtgcacagcccgatggkttttcacgcatgtacacttatgcatccccattgccagtactccggaaggacccctgcaccctttcccagtcagttcctctgcccttggtgagtgaacaac

SEQ ID NO: 10484 - DNA, 201 bp, Homo sapiens
tgtttaggtcctttgcccaattttaaattggattgtttggtttttattgttgttgagttatcctcatggcattttgcacatgggcagtcttgctaggaaakgcttgtcctaagtcccctctgcccctgccccactctgtcctcggcacttctctttcttcccctgtatgggctctgcctccttcgtgaagcctgttaaggg

SEQ ID NO: 10485 - DNA, 201 bp, Homo sapiens
atctgcttgttggtcattttatatcttttttggagaaatgtttaggtcctttgcccaattttaaattggattgtttggtttttattgttgttgagttatcstcatggcattttgcacatgggcagtcttgctaggaaaggcttgtcctaagtcccctctgcccctgccccactctgtcctcggcacttctctttcttcccc

SEQ ID NO: 10486 - DNA, 201 bp, Homo sapiens
catcatctgcttgttggtcattttatatcttttttggagaaatgtttaggtcctttgcccaattttaaattggattgtttggtttttattgttgttgagtyatcctcatggcattttgcacatgggcagtcttgctaggaaaggcttgtcctaagtcccctctgcccctgccccactctgtcctcggcacttctctttctt

SEQ ID NO: 10487 - DNA, 201 bp, Homo sapiens
aatattttattgtgattttggtttgcatctccctgatgattagtaacattgagcattgtttcatcatctgcttgttggtcattttatatcttttttggagraatgtttaggtcctttgcccaattttaaattggattgtttggtttttattgttgttgagttatcctcatggcattttgcacatgggcagtcttgctagga

SEQ ID NO: 10488 - DNA, 201 bp, Homo sapiens
taccaccttaaccattttgagtgtacagtagtggtaaatgtatggcacattgttgtacaacaaacctttaaactttatcttgcaaaacttacatccattgracaacactctcctttttctccttcccgtggttcctggcaacattgtatttctattaagagtttgactactttagatcttatgtgagtggagtgtggtgtt

SEQ ID NO: 10489 - DNA, 201 bp, Homo sapiens
tatgaagttattgcatcatccactcagtaagccactgtatatgggtgctgggcaaagaggagcatctgacaccatctgctttccttgtgccttttgtttgkttttctaattgtggccaaacacatgacataaaacttaccaccttaaccattttgagtgtacagtagtggtaaatgtatggcacattgttgtacaacaaac

SEQ ID NO: 10490 - DNA, 201 bp, Homo sapiens
taccacagatcagtatcacaaaggagtcatttctggggacagtgaacagcaatgaggaccacagggaagatttagcaaagggagccaagaaggcagcactrgagcatttgtggataatggtgccatggatagtcctgtctaattaattgcatgcaggactatttttttaatgttttatgaagttattgcatcatccactca

SEQ ID NO: 10491 - DNA, 201 bp, Homo sapiens
tggtggcctgaccctgactggacaaatgggccccagaggggctgaacccttgtctgccattctggggaaagaaagggaagaagctgactcatctgtaaatyaaagggtagcccaaggtcctgattcagaacaaaaaggaggtggtggccccgtggcagcataacacaagatgctcttaagggcatcgagcctagagtcaga

SEQ ID NO: 10492 - DNA, 201 bp, Homo sapiens
ggtcctgcacaggctccctgagcccgctgtttgccttggtttccagtcctttcatcactgtcatggctggccctggaccctctccaaacttccacattccyccaggcatggtggcctgaccctgactggacaaatgggccccagaggggctgaacccttgtctgccattctggggaaagaaagggaagaagctgactcatc

SEQ ID NO: 10493 - DNA, 201 bp, Homo sapiens
tataatactaaagcacttaacacacccagctgtgagtgcacagcccgatgggttttcacgcatgtacacttatgcatccccattgccagtactccggaagracccctgcaccctttcccagtcagttcctctgcccttggtgagtgaacaactattctgacataggctttctcttgcccttgacttttatcagaagctgta

SEQ ID NO: 10494 - DNA, 201 bp, Homo sapiens
atgcctacattttataatggaaggaaatgctaaatttcagttagaggttaataaaaataaagaaggaaaattcttttcctctatctaaatccacagatgcyctgaattctcttcgaggttaagaacttctggtttaagatatgcttttggttgacagtagtaaaacaagccaaaagaagttgaccatttatgtgatgtgca

SEQ ID NO: 10495 - DNA, 201 bp, Homo sapiens
ctgacaattcaatacagtcccattgctcaggcagaacctatttcatatataaatttcctgcatccccaaggcagagcaaatagggggaaatgaccaaactrtaatctgagagttctttactcaactggattatcattcatctaagagcatctgaaagacagtctcacacaagcaaagactgaaaggacatccaccaccacg

SEQ ID NO: 10496 - DNA, 201 bp, Homo sapiens
aattcaatacagtcccattgctcaggcagaacctatttcatatataaatttcctgcatccccaaggcagagcaaatagggggaaatgaccaaactataatytgagagttctttactcaactggattatcattcatctaagagcatctgaaagacagtctcacacaagcaaagactgaaaggacatccaccaccacgtacct

SEQ ID NO: 10497 - DNA, 201 bp, Homo sapiens
ggccttccacaaagtgttttagggaaaaaataacaagaaacaaaaatatatggatttgttttgtcttgaggcagactggaaatgctggaaatttattttgsatcgtagaaaaacttcatgtggtgggaaaatgttcacttgctccaaggtcaggtattaagttagcaaagtcctaatgcttttgctacccattagtggatg

SEQ ID NO: 10498 - DNA, 201 bp, Homo sapiens
cagcaggatatctgtaaagccagaatcatctggtggcaacatataattgtcctatggttgtaaccttgatagtgctgttaccatgggggttgggtggtggrgcgaagtgcatttcccaaaactgttggctagctgagggatgagagctccatccatgaaaaccagtcttccagaggaggatccccaaacccagagagctat

SEQ ID NO: 10499 - DNA, 201 bp, Homo sapiens
taatactgtttgtttacagatttcatgaaggcatttaccctggcattgtaccactaaaggctgatgttggcggcattattcttaggagacatagaaatgtkgtggttttgagaatgggcttttatattatttggcgtagattattaaagaacagttacctgtgtcatgaaggagaggcccccagactggcactttgaatgc

SEQ ID NO: 10500 - DNA, 201 bp, Homo sapiens
aagaacagttacctgtgtcatgaaggagaggcccccagactggcactttgaatgcaaattcttctgtgacaaatccaggggactttggaataactctcagrtatggcagtagacttaactgtaaaagctcccagcccacagaggtgagcagaggctgaggagtaaacaccataccaacattctgggacaaaatagcctgaa

SEQ ID NO: 10501 - DNA, 201 bp, Homo sapiens
ctgtgtctcactctaccccttccctactggtgttttatggaaccacctctggaataaacaacttgctttcaaacctgtctccagctctgcatctgggggcrcctgcactgacattctttattccctagatctgtgtggcttgctacttttttctcccaccacatcacaggtaatgaatgaggctcatttgcacaacataca

SEQ ID NO: 10502 - DNA, 201 bp, Homo sapiens
tctgtacattcatgggattcatactcgctttaggagacattctgtagcaagatgagttatatggggccaagttacagcacagagttttaagagattgtccrtagttcagactgtcatcaaagtgactgcatgccctgtctctctgcctccatcctttctcaacgaatctccacctccagagagagcagatctttctgagta

SEQ ID NO: 10503 - DNA, 201 bp, Homo sapiens
agcctgcccagcttaggggacagctgaaatgctcagagccaccaacagtagaggcactccaaaactttccaagaagtcatctcagattccctgctgcttcrtagcttttaggagctccagggttgagggaggccacaaaagcaatcaaggactgcaggaggggtgtgctttccatccactttctatattctaaaaattacc

SEQ ID NO: 10504 - DNA, 201 bp, Homo sapiens
cagtctcagctcattgcagcctcaacctcctgggctcaagcaatcctcccacctcagcctcctgagtagctgggactagagttacacaccaccacgcctasctaattttttttgtggagagggggtcgggttttagatacggggtttcaccacgttgcccagctggtctcaaacatgcctgcctcccaaggcttattttac

SEQ ID NO: 10505 - DNA, 201 bp, Homo sapiens
taagtggctcaataatcacaaatggttactggctactctattggaaagcagagagagagaatattttcatcatcacagaaagttttattagactcaacacraaaggaatttctaacactgcagaggttttgtttttgtcaatttttcctttaagcttttctatgaggtataatactaaagcacttaacacacccagctgtg

SEQ ID NO: 10506 - DNA, 201 bp, Homo sapiens
agcataccctgatacaatgatacaggtacaggtagtttatttgggggtgggcgatctcagtgttgagtttagacaggaaagagaggaaagacaggaaggcrtgcatttataagcaggttactgccgtaggcaccttgggcttgtcttcctcagaccctccaagagactgtgtgtaacaaacctcacatccacttcactcca

SEQ ID NO: 10507 - DNA, 201 bp, Homo sapiens
aggtggccaccagccctgtgtccttatttaaacttaaatttatccaaattaaactagaaattcaggtttttagtcatattagccacatttaagtggctcartaatcacaaatggttactggctactctattggaaagcagagagagagaatattttcatcatcacagaaagttttattagactcaacacgaaaggaatttc

SEQ ID NO: 10508 - DNA, 201 bp, Homo sapiens
tatttttctttggtaataataaaataagaaatgggcatttcagggctagtatgcacctgtgtggtacccacaggaaccccattccttctgtctttcctctmagcctgtcttcataggggttttcatctccatactccaaggctgggctttccctgatggtgctttttggtttccgcttccaacactacagctgcattccaa

SEQ ID NO: 10509 - DNA, 201 bp, Homo sapiens
cagcccctctcctgtaaaactcatgaataatccactccttttttagcatttaatcaagaaataaccattaaaataggcaagcagcagcccttggggctgtkttacctatggggtaaccaccttttatttctttactttcttaataaacttgctttcactttactctctgggcttcctcttgaattctttcctttaggaagc

SEQ ID NO: 10510 - DNA, 201 bp, Homo sapiens
tataatttacagtacacaaatcttaagattacagtcttgattttcacaattgtacacacctgtgtaaccatatgcccactgagatatagaatatttccatygtcccaaaagtctccgatgtccctttccagccaactcctctcacctgagacaaaccacagctgtgatttgtataatacattacttttgctttttctagaa

SEQ ID NO: 10511 - DNA, 201 bp, Homo sapiens
aagtctcctggggctgtgtttaagtgccgtgttcacaccaaccctgaccggagatgcaccgaactggacatggctcgaggtgggtgaccattactgctgtsgtggaaatgggttctgtacccttataccttgctcttcttcttcccaggatggcctgatcattcactcacccatccatccttccctccttccctccctcct

SEQ ID NO: 10512 - DNA, 201 bp, Homo sapiens
tcctgtcagatgagcagaggcattagattctcacaggaacatgaaccctacacatgtgagggatctagattgtgccgaaaccatcccgccccctccaccgyccgttcatggaaaaattatctttcacaaaactggtccctggtgccataaaggttggagaacactggtctaagggttctggcaggctctcagatgaacctc

SEQ ID NO: 10513 - DNA, 201 bp, Homo sapiens
aacacatttcatctcttgacaagagaagctgcaaagtcacactgaaaagagcagggatacaggaaggatggggaattgtggccactttgtaatatattacyggtggtgaaagcatcctggctgtccctgaattactgtgacagtctgaataaattcctgcccagcgcaccagaaaagggaacaaggttctattaacctaaa

SEQ ID NO: 10514 - DNA, 201 bp, Homo sapiens
accaccccaaaacttagtggcttaaatcaaccaccacctgtagcttattctctggttggcagcttaggttgggttcagctgggtggttcttctgttctctscaggactcactcatgcatctgtggtcaacttctgggttagctggttggctggctggcaaaggatggcttcagctgggagggcttatttttgctccatatg

SEQ ID NO: 10515 - DNA, 201 bp, Homo sapiens
gtttggacttagcgggaattagtgggcgatggaattaccacggtccagattccgtcagaagtggcatgccttagcttgatgacgtatctgttttctatcascacaatattgctgcatccctaacaaaccaccccaaaacttagtggcttaaatcaaccaccacctgtagcttattctctggttggcagcttaggttgggtt

SEQ ID NO: 10516 - DNA, 201 bp, Homo sapiens
agagaatattttcatcatcacagaaagttttattagactcaacacgaaaggaatttctaacactgcagaggttttgtttttgtcaatttttcctttaagcktttctatgaggtataatactaaagcacttaacacacccagctgtgagtgcacagcccgatgggttttcacgcatgtacacttatgcatccccattgccag

SEQ ID NO: 10517 - DNA, 201 bp, Homo sapiens
caataatcacaaatggttactggctactctattggaaagcagagagagagaatattttcatcatcacagaaagttttattagactcaacacgaaaggaatktctaacactgcagaggttttgtttttgtcaatttttcctttaagcttttctatgaggtataatactaaagcacttaacacacccagctgtgagtgcacag

SEQ ID NO: 10518 - DNA, 201 bp, Homo sapiens
tttctagaatttcatataaatggaatcctacagtatgtgctcttttatataagacttctttcactcaaaataatattttctgaaattaatccccattgtaygtatcagtagttcattcctgtttatctctacataatattacattttatgaaataaatgttatttttaactagttatttatcggacctccaaagcacctat

SEQ ID NO: 10519 - DNA, 201 bp, Homo sapiens
tcccaaaagtctccgatgtccctttccagccaactcctctcacctgagacaaaccacagctgtgatttgtataatacattacttttgctttttctagaatktcatataaatggaatcctacagtatgtgctcttttatataagacttctttcactcaaaataatattttctgaaattaatccccattgtacgtatcagtag

SEQ ID NO: 10520 - DNA, 201 bp, Homo sapiens
atatttccatcgtcccaaaagtctccgatgtccctttccagccaactcctctcacctgagacaaaccacagctgtgatttgtataatacattacttttgckttttctagaatttcatataaatggaatcctacagtatgtgctcttttatataagacttctttcactcaaaataatattttctgaaattaatccccattgt

SEQ ID NO: 10521 - DNA, 201 bp, Homo sapiens
ccatatgcccactgagatatagaatatttccatcgtcccaaaagtctccgatgtccctttccagccaactcctctcacctgagacaaaccacagctgtgakttgtataatacattacttttgctttttctagaatttcatataaatggaatcctacagtatgtgctcttttatataagacttctttcactcaaaataatat

SEQ ID NO: 10522 - DNA, 201 bp, Homo sapiens
tggagaaatgcttcccccacctggtgattgcatcttgctgtatgggatcaggcctgaaaagtgagttaagtctgttggtgctggaactcatcactgaggarcagcctatgtctgtgccttcaggggtgacagacagtggaccaaggccatgcctgcatattcctccctggacccctcattcaaagccagaatctctttcct

SEQ ID NO: 10523 - DNA, 201 bp, Homo sapiens
gggtgacagacagtggaccaaggccatgcctgcatattcctccctggacccctcattcaaagccagaatctctttcctgccagagcagtcctttgtccacrtgggtttctgcagtagcccaagtttgcaggcccttgatagggctggagtgtgagctgtaatcctatgggcttgaaataatctctgctatgggctctttaa

SEQ ID NO: 10524 - DNA, 201 bp, Homo sapiens
agtatacagcaaccattttatttttcttgtgcctcatgaattaatagggcagtgagaggaaagagcatgcatactgagcatctgagcttttttaaagcaaygattcacccagctttctagtataaaaaacttcctctggcccaccccgagcaaaccctcattcactgctcagtcctcccatttgttcatctggaaagaagg

SEQ ID NO: 10525 - DNA, 201 bp, Homo sapiens
gctctttcgcactcatgatacataacttacagggaaaggccctgactccctttttgcatagcgtcactgggaacttcttgttaaatggggttagggagtcrttgacttgccttttcccttctaactacaagttttttgcctggtagcatagacccaacaatccttctactctggggtgtttgctcctgtaggcacccagct

SEQ ID NO: 10526 - DNA, 201 bp, Homo sapiens
cctggcttctcttctttccggtagatgaacttgagcacatgatctcaccacttggagcctagtaaaatccatgctactgttctgcaattgttcttttattytttctctctactaatgttttcacctatggatgtcagttctacttctccttggggctttaactaaaaaggaagaattgtctgtggcttcttagaaagtggt

SEQ ID NO: 10527 - DNA, 201 bp, Homo sapiens
ggagcctagtaaaatccatgctactgttctgcaattgttcttttattctttctctctactaatgttttcacctatggatgtcagttctacttctccttggrgctttaactaaaaaggaagaattgtctgtggcttcttagaaagtggtgtgtggacaggcaagggctgccctgcccttggctggcagcacaggctctgcaa

SEQ ID NO: 10528 - DNA, 201 bp, Homo sapiens
gccttagttttcttcttcttttttttaatgctgcctcaattacagaacagatgcctaagttttcttatctgtgagactgagctaagaataatgttgacctyataaatttgttgcaaagattaaattagacattcatgtaaagcacttaggaccatacctgagacatagtagcctttagttatttttgtctaattcttcttt

SEQ ID NO: 10529 - DNA, 201 bp, Homo sapiens
ttgttattcccatcttacaggggtgacagcttagctcagaaagcttgcagtttgctccacgttacaaagctagtaagtagcagagctgagattggaacccycgtccgtctaatggcaatgcttcctcttttgctattctgcctcacaattaaatggagtaggacctgatccccgacatcgagaaactgacggtgttgtcaa

SEQ ID NO: 10530 - DNA, 201 bp, Homo sapiens
gccaagacctgagccccaggccagggcagcagcctctgacctttcactccctaacacacaagctggggaccaatgtcactccaaggttggaccctgccccygtgcctctgcttttcccagttgggcatggactccaccaatttcattctctgacttagcgttatgtggtgtggattgtactgctctccctccatttactgt

SEQ ID NO: 10531 - DNA, 201 bp, Homo sapiens
agtaggacctgatccccgacatcgagaaactgacggtgttgtcaagaaataaatatcccccccccacacacataaatagagaacaataaaagataacgtcrgaggatgaacccacgagcgtggtttgtgtgggaggatgtcttgatcctgggctcgcagggctgtccgctgaacatgacagttatcctggcttcacagtaa

SEQ ID NO: 10532 - DNA, 201 bp, Homo sapiens
cctggaagaccacttgctcagagtctgaaatgtttacactgcctctgactggcatctctataccagaaaggagaagagggggactagatgtttttgtgtgrtagtctctttcctgctatcttaggctgagttccctaaaacaaaatcctgagatgagacatcatgtaaaaataatttgttaggaagtgttctcaggggaat

SEQ ID NO: 10533 - DNA, 201 bp, Homo sapiens
gcccctctcctgtaaaactcatgaataatccactccttttttagcatttaatcaagaaataaccattaaaataggcaagcagcagcccttggggctgtgtwacctatggggtaaccaccttttatttctttactttcttaataaacttgctttcactttactctctgggcttcctcttgaattctttcctttaggaagcca

SEQ ID NO: 10534 - DNA, 201 bp, Homo sapiens
gggctcacttggtccaccaatgtctgttctgaccaaaaaggacttctgtgttgagtttaaattagcaacagtagcaacaataacaccaaaagcagcaacartgtatctgaatattcagtagatgtcaagtgctatctacattggtactcataccagctcatttaatgttcccaacagtcctttcagctggtagccatttgg

SEQ ID NO: 10535 - DNA, 201 bp, Homo sapiens
cctctcctgggacacatcaagacggctgtgcttaggcacagagcgagtgctcggaaatggaagatgtgctgggctttttgctttgttaaagttgtcagagygttgttcagtgaggaataggaggcaattccaagccaaggagaacatatccttgatttgcatgaaggttgagaattaaaagaacaagctagatagttctgg

SEQ ID NO: 10536 - DNA, 201 bp, Homo sapiens
gtgaaaagatgtgttgtctctagggaaagggagggagaagaatgtgctggaagtggtagggggagagcacagaccccaaagtcagcacggactctgcaggyggcagagtagagcgttcccatgttgagggacctgcgggtgtacatctcaaagcatgtgaatgtgctctgttggtggaactagcacttctctaatcccata

SEQ ID NO: 10537 - DNA, 201 bp, Homo sapiens
ttcaactgtggggttggttgattgacttggtaactgattgttggtcgcttactcctaagcagtacctgagccctggatcttctagtcctgcttgagggacrtgtcagtcattttcaattattcgtgattgcaaacagcagcaggggtaaacaacctttaacgaaacccttgaggacaatcttaattatttcctttgaataa

SEQ ID NO: 10538 - DNA, 201 bp, Homo sapiens
tagctgggactacaggcatgcacaatgcctggctcatttttttatttttttgtaaacatagggtctcactatgtttctcatactggtcctgaactcctggsctccagctatcctcccacctcagcctcccaaagtgctgggattataggtgtgaaccaacgcacctggcctggatttgatttattaatctgggaaaaacgt

SEQ ID NO: 10539 - DNA, 201 bp, Homo sapiens
gtagagtgtctgcagtctactcatccagtcccctgatactggaatttaggttgcttctgtttcacacttcttttaacagtgccacattaaatatccctggrgccaaatatttgcacaaatctttcattatgtcgttaggttgaaagcctagaaatagaattgccatcaaaaggagtgtatattttaagctttttaaaaatt

SEQ ID NO: 10540 - DNA, 201 bp, Homo sapiens
gcccctttcctgtagccgggggatgctcctgctggggatggcccaccctaggcagcttttcagttcaagatggaggatacagaggttcattcttgctcctstttgcatgcaaactgttctatttctgttttgcagtgggagagaggatacggtttataattccgcactgctgctattttttttcctatttgcccctaaatg

SEQ ID NO: 10541 - DNA, 201 bp, Homo sapiens
gtctctgagccaggttagtgacgatgtcctttgtgatatctgccagcctttgctggagtcccctttgagggcctcagacttctgttgtatgatgtagaggmcttgtttgtctgcccctttgcctagctggagtgttgcaggaggagcagcagcattccaagaccagggtgcagtgaatgactgagatcccaagatgaaggt

SEQ ID NO: 10542 - DNA, 201 bp, Homo sapiens
atcttttcagtggcttgttctgaactctgggccatggtaatctctgtatcccttgggatcagcctggtaaacagccagctgaattaacttcagaaaagacycactcatgggctggcctgcggtagtcttgctggatggtggcctaggtacagagcagtgctgggctgcggaggaagccacgatgttctgtaaacacataga

SEQ ID NO: 10543 - DNA, 201 bp, Homo sapiens
ctgtaaaatggggataatattagtacctcccgtagggttgctgtgaagagtaaatttgatcctgcccgcaatgagcctaacccagcacctgcacactctaygtgcctgctacatgctggttgccctaattagaagtttagagtcctgcattgatgagaggacctaaaaggcttatgaggccaggcatagtggctcaggctt

SEQ ID NO: 10544 - DNA, 201 bp, Homo sapiens
gagggggcactgggtacctgttggttcccttttcctcctttcaggctgatgtggggtgggtagaatagggcacgggtgatgtatttgactactggggtgcrtgctacagcttggcatcttaacatgaataaccatcttaacctcctctggccacctgcttccctatctgtaaaatggggataatattagtacctcccgtag

SEQ ID NO: 10545 - DNA, 201 bp, Homo sapiens
aagaagagcttatgaggcctttcaggtcccatggctccattgggcaagcattggtccctagtgagtcccctccctctggaaatgaagggtttggtgtggtyagaggtggctatcctggcaccagctcttcctttactcaagcctgggctgctttctgcccagtaagggatgcggacaattcctggggtttccccgtggtgg

SEQ ID NO: 10546 - DNA, 201 bp, Homo sapiens
agcagaacgaaaaaatggtatggaaagcaaggcacctgaaaaaattttcaaagggagaaaaagaatgagcaaaactatcctgtagaggagagagacattgmaaatgacatatacagacacagaaaaggttgctcagtcaacaacttctgcaggctcaaagcatgggaagtaatcagtaaatggccaatttatctctccctc

SEQ ID NO: 10547 - DNA, 201 bp, Homo sapiens
ttctctatcaccagcaaatctcccttttcaacaaagatggagtagaccttaggctcagaggcttccaaaggcaacagagttcagcattgctctgttttcaktgtgttcatttttacaactaccttctctttttggcaagtgatcctggattcccatctatgacagtgatataaattgttcttttaaaacaatctttaaact

SEQ ID NO: 10548 - DNA, 201 bp, Homo sapiens
ttgtaaaactgtcttgcccttgttctaattgcgtattgatcaccgaggttcttggcatcgggcttttctttgatgtgtgcatgatcagaacacactaagakacagcctgtgtgctccttcctgtcctcgtgggcatttcctaaagcttcagccctaagctggtatatgtttctctgttacatcaactgccaaggcaattac

SEQ ID NO: 10549 - DNA, 201 bp, Homo sapiens
ttccagcactgttatgcaaattggagagactcatgccaaggtgaagggcttggtgagagcagccaggtcttctatgcagtgatcagcctgcacagctgggygtggcatctctggctcccaggtggttccagtgcacacccccagttaagaaccaatgaagaatgttgcttgttaacaacctttgaaggctttttagcaaaa

SEQ ID NO: 10550 - DNA, 201 bp, Homo sapiens
tgcagatgctccttgaactatgttggggttatgtcctgataaacccatagttagttgaaaatatcataagttgaaaatgcatttaatacactcagcctacsaaacatcatagcttagcctagcctacttaaacatgcttagaacagttccattaacctacagttgggcagaatcatctggcaacacagccctccatagagt

SEQ ID NO: 10551 - DNA, 201 bp, Homo sapiens
gtgagtcctggaaattggaggacctctgtaccttctcttccaaaatctgtaaacatactgtttccgcttggcagtcttgatttgctttcagtgactctgaraagccctgtggtttgtgaagagcctcttggctttcctttgaccttggttggaagccatgtgcccaggtggaaagacagcagttccctacagcctttctct

SEQ ID NO: 10552 - DNA, 201 bp, Homo sapiens
tttagccgcttctttttactggtccacaagacttggttattttctattgacactattttcaagatcacataatttacatcacataaaacatgactgtgatytaatagaagcctatgcaaagcatagatagggtagacttcattcccattgcacaaaatccagaagggcttcagtggggaggtagcatttaaacagaggagt

SEQ ID NO: 10553 - DNA, 201 bp, Homo sapiens
cagatttttctatgcttttaaaaatcggttattcaacaagctacataattgtttaaaggctccactgccattgtacacaggagaaaggcagaaatactagycttgggcctgctttttacatttcatcatagtttttaaacagacacattaatttctcgacaataagaggcttttttggcatcaaaatttaaagcatttccc

SEQ ID NO: 10554 - DNA, 201 bp, Homo sapiens
ggcctaagccggccaaacaaacggcagggcaagacctggcaggatgctggggtgggggcgggagtgggccaggatggtgttaacccatccacaggggagtygcctttggcctgcccacagcagtgatcccaaggcttttgtcaccccttgggaaaggaaggacaaggaagtcaggctgtgtgggcacctgatcctgctgct

SEQ ID NO: 10555 - DNA, 201 bp, Homo sapiens
aaaaacaatggccaaaaataatgcagatattacacatgaacatttgcagagaatccagtataaagacatttgttaaaaataaagatggtaatacaagctcwcctgtcctcctggctctgatgagtgaaatagtgcaaatcagcatccttttcttcattgcttaccccattcatgcttgaaatgggatttcccagacatgcc

SEQ ID NO: 10556 - DNA, 201 bp, Homo sapiens
tggctaccctcttaaatattattaaccatgctgaccatgccacatttccccagcatctaggagtgttctcttcctagagcatgctttctgagttgttcacrtgaacatctacagtgttgcaggagcctttttttttcctatgggcaaaatcatctattgaccaaaacaagacatttaagtcactcagattctgaaggtacc

SEQ ID NO: 10557 - DNA, 201 bp, Homo sapiens
gtgaagaagagaacattccagatagaggaacagtcaccacttgtgagtgtatgatgagtatctgctgtgctgggagctacacccggttctccattctgttwgcctagctcttatacaaataggcaagagtaagtgttccgtatgccttctgcagatgtacagcagatagatattttggcagaatgacagagagtactgaac

SEQ ID NO: 10558 - DNA, 201 bp, Homo sapiens
ttcatttttatttaaaaggctgatttaataatagaaagaaaaactccaggcaaacaaaaacactaacggacctgaacctactgacgttcttagatattttkaatgtcatgagtgactccttttgctactcacagtgtagcccctggcctagcattgtcagcatcactgggaacttgttagaaatgcaggactttgggctcc

SEQ ID NO: 10559 - DNA, 201 bp, Homo sapiens
aggatctatgagctcttgggtgctgccaggagttagaactgggatgagttgagtgtcaaggtgtttgacctactactgcccagcagtctaacatttctttraacacctactttgtagcaggcactatgatgggtgttttataaacattcttttgcttaaaccttacaagaaaccttcttaggtacacttttattcctcctg

SEQ ID NO: 10560 - DNA, 201 bp, Homo sapiens
gtgggagccctgccttctcataacctcagtggtgagcatctttgcagagttcctctgtcctgtgccagactctaggggaaggtgtaggtccgcttcctcakttgaatttttctagggaaatggcattttcagacattgttcctggtcctcactcaccctacagagcctgctttctcaagctctcaagaaggaacaacacat

SEQ ID NO: 10561 - DNA, 201 bp, Homo sapiens
gctaaagacttgctgatcacattaggattactttttttttttctttcaacaactttaagaccaagtgtcctagggaagctggaataaagcagtcacagttsttatttgtgactgtggtcttttcctgtgactccatttccctattatctgtttcagaaactgtctgggcagaagataaatccagtgctccggatgtttggt

SEQ ID NO: 10562 - DNA, 201 bp, Homo sapiens
cactccgagattctcagtaaaaaaaaaaaaaaaaaaaaaaaaaaatcaaggaaatcttaatggccaaagccataggtccaaaacccggcgttccctcccamccaactttccaggccattttctccaatagcccctcatccctgaccttgtcttccagcctccctggaccatgaatgctgctgaaggctctcactttgtact

SEQ ID NO: 10563 - DNA, 201 bp, Homo sapiens
tgtggatttgcatgggccacaggtcaaagccacactgcctgggaaaggaatgggtagagacgagagcagatctgacagagaaaaggtgttcagcctacttkgatttaaaacggggatgaagaaaagctgtgtgacatgagcagatttggccagtgtgggaaaagacagtctggccttcagcttggtacccagggtaaatgg

SEQ ID NO: 10564 - DNA, 201 bp, Homo sapiens
gcgcctggaggcgggcgggggcgtccgggtgcctccctggggtcccagcccagagcgtggggggagagccgctagagttgtctcctccgccgcccagctaractcggcttcactctctgaatcgaaaagtaacttggctcctctgcctccgggcggccgccgctggcccagcgagcctcctgaacctcgcagggcctggag

SEQ ID NO: 10565 - DNA, 201 bp, Homo sapiens
tccggggcccgctaaggtcggggtcggcgcctggaggcgggcgggggcgtccgggtgcctccctggggtcccagcccagagcgtggggggagagccgctaragttgtctcctccgccgcccagctagactcggcttcactctctgaatcgaaaagtaacttggctcctctgcctccgggcggccgccgctggcccagcgag

SEQ ID NO: 10566 - DNA, 201 bp, Homo sapiens
aagaggggcaagggcacaggacaaaagccataagtcagctgagttgcctctcctttaagaaacctcctgagaagcctaccacccaaataacatgctcatayctcattggccagacactgcacatggccactctgtctgcaaaagagactgggaaacatagttttatttatttttaaagctaggcatattaacactccacta

SEQ ID NO: 10567 - DNA, 201 bp, Homo sapiens
aagacaagtaataataaaggagtgtgtggccttcaactgcctgctaaagacttgctgatcacattaggattactttttttttttctttcaacaactttaasaccaagtgtcctagggaagctggaataaagcagtcacagttcttatttgtgactgtggtcttttcctgtgactccatttccctattatctgtttcagaaa

SEQ ID NO: 10568 - DNA, 201 bp, Homo sapiens
catggtagtctaggtggatttttttcattaacacagaacttagaaaaaattttaaatgatgacgtttggccaagacaagtaataataaaggagtgtgtggycttcaactgcctgctaaagacttgctgatcacattaggattactttttttttttctttcaacaactttaagaccaagtgtcctagggaagctggaataaa

SEQ ID NO: 10569 - DNA, 201 bp, Homo sapiens
acatagccctggtacagaaaccagaaatggagagcgggcacactcacgcaaaaataggaagcagtgagccaaactcactttgaaaacagatacaaaagttytaaataaattgcaaattgagggccgggcgcggtggctcacgcctgtaatcccagcactttgggaggccgaggcgggtggatcatgaggtcaggagatcga

SEQ ID NO: 10570 - DNA, 201 bp, Homo sapiens
tagaagactgttgtagtcagctgtgcttgtcataaagttttgtttaaaattattttagaattttcttctttggctttaatttaaatttttgtttgtttacttttttttttttttttccccggctcactgcaagctccacctcccaggttcacaccattctcctgcctcagcctcccaagcagctgggactacaggcgcccg

SEQ ID NO: 10571 - DNA, 201 bp, Homo sapiens
ttcccagatgccttcacagatggccctgcctcagggcctttgcacctgcctttgctgagaacactgttccctccaatctttgcatagctggctccttcttmttatgcagatctgagcccagagttcactttctcaataagtcttccctgaacactttacctaaagttgcaaacccccattactctctatctcatttgtatg

SEQ ID NO: 10572 - DNA, 201 bp, Homo sapiens
tttgagatatccatccaggtgttcacgtaagtgctgagatttttaccaaggcatcgcattatctcccaaagcctctttcccatcatcctaagtggggttcyctagaagcagagcctgagaaagggaattgggaacacatggtctaatgatgctgtgctcttagggaaaacctgtaaaggaaaggcatgggggctcaaaatg

SEQ ID NO: 10573 - DNA, 201 bp, Homo sapiens
aaagaccatcattcttcagaaggatctcccaaagaatgccattgaaaactcctcattaccttcaaatggggtgatgcacacacgagtagcatgaaattagscatgttcatattaaggagcaatctaagatcattattgctgtttctctggccttatattaaatagtgtcattgcaattgaaaaattagagtaaatgaacag

SEQ ID NO: 10574 - DNA, 201 bp, Homo sapiens
agtaaatgaacagagcctgtgagcatccaccctttgtaggttatcctgagtctgcattattacagggtcttgaaatgaatggtgatacgtgaaagtatttktcctaggattcattaatattattatattttagtctttggtcaatatgaagaaatactcaatagtaaatcatagcaacatgatttaacatgagatataatt

SEQ ID NO: 10575 - DNA, 201 bp, Homo sapiens
cactcccgtgttctttgtttcaaagctgaaacaaaaggtacattgtcgttatctgttctgaatcaagaacatagtgtgtcctctaagtttttcagtacacktttgttcacttcatgatatttaaatcagggttgttgtcattacaaccctttcaagacctagggcttggatttcaagtgccttttcaggtgccagtgaaaa

SEQ ID NO: 10576 - DNA, 201 bp, Homo sapiens
gagagcagctttcaggctgacagctgtgggcagcaatcctgactctcacacttgcctgacatgaggccttaagggggctgcttaccttctgtgaccctcastttcttcctctgtaaaaaggagaccatcacctccagtttggtatgtagaggttatgcaaggaaaatgtttagcactgcgcttagcacacagaagccaggg

SEQ ID NO: 10577 - DNA, 201 bp, Homo sapiens
tagtgggggagaaagatgcaggatggtggtttaggggatactggggaggagactctcagaaaagaaaacaattaggcaggcaccccaaaggagttcgctcytgcaggatttcatcgttgttagtgctgctgctgcctgaattgcaggctgttgtatcataccagctagctatgctgcatacaaactgcccccaaattgaat

SEQ ID NO: 10578 - DNA, 201 bp, Homo sapiens
ggtcttaatgtttccggcttattgccatattccatatgtaatttcctccattcctttcaaggggaaagccactgagtgttacccagctgccactgctgacyggttgcccacttcactgagggcctttgaagacagcggttggcggggacagtgttgaagtcctcttccctttacagaaccgtggctcttgaatgtccttct

SEQ ID NO: 10579 - DNA, 201 bp, Homo sapiens
tcctccattcctttcaaggggaaagccactgagtgttacccagctgccactgctgaccggttgcccacttcactgagggcctttgaagacagcggttggcrgggacagtgttgaagtcctcttccctttacagaaccgtggctcttgaatgtccttctagagtagctcttggcattgctacctatggtcatttgctgctgc

SEQ ID NO: 10580 - DNA, 201 bp, Homo sapiens
agtagctcttggcattgctacctatggtcatttgctgctgccttgaggtccggagccaaaagtggttgttcccaaaagtgttgcataaacgtgaatcgtgwcatggtactgaaagctgagcagagcagctggccatgccgccgcattcacagcaccacacaagcctgaaggtctgcatgctttatgcttgcaagatggcca

SEQ ID NO: 10581 - DNA, 201 bp, Homo sapiens
ggagtgcagtggtgcagtcttggctcactgcaacctccgcctcccgggttcaagcaattctcctgcctcagcctcctgtgtagctaggattataggtgtgygccaccatgcctggctaatttttgtatttttagtagagacagggtttcaccatattggccaggctagtcttgagctcctggcctcaagtgatccacccac

SEQ ID NO: 10582 - DNA, 201 bp, Homo sapiens
gagcaacatgtcaaagggcatcccaactggttgtattatttaccttgaagtgaagtgtcaggatttgaactgtcagccctcagggagaagtgttccagctmccaggttttttttttttttttttttttttttttttttttttttttttttttttttttgagacggagtctcccgctgtcaccaaggctggagtgcagtggc

SEQ ID NO: 10583 - DNA, 201 bp, Homo sapiens
tgtccttgggtgctcctttgcttttatctcagaggctggcacatttgtaggcaggactgtgagacacagtctcccctgcccccaggagtgtggctggcccrctctgccctcaggaagtttgcttccctcagattagctccggggcaggtcctgtgtcagggtgataggcacacggtgctctcccattgaaggtcacaggaa

SEQ ID NO: 10584 - DNA, 201 bp, Homo sapiens
taagaaaaaaaaagcactgaaagcgcttgtggtgctgtccttgggtgctcctttgcttttatctcagaggctggcacatttgtaggcaggactgtgagacrcagtctcccctgcccccaggagtgtggctggcccactctgccctcaggaagtttgcttccctcagattagctccggggcaggtcctgtgtcagggtgata

SEQ ID NO: 10585 - DNA, 201 bp, Homo sapiens
gttgcaaacccccattactctctatctcatttgtatgttgttttcttcatagcacttgtcactatgtgaaattactctcttatcatcagtcttcttccacsagattaaaaacaccatgagagtaaagggcaaggtccttattttctgtgtatttgcagcatttggtgccgagaccatagtgagtggtcagacaaatgaaag

SEQ ID NO: 10586 - DNA, 201 bp, Homo sapiens
agtcttcttccacgagattaaaaacaccatgagagtaaagggcaaggtccttattttctgtgtatttgcagcatttggtgccgagaccatagtgagtggtsagacaaatgaaagaaatggctgcttccactctgttagtggcatcctcagacacacagtcaccccttgtatctcctggggattggctccaggacatccccc

SEQ ID NO: 10587 - DNA, 201 bp, Homo sapiens
aaagttacgatcttttcctttctgtgcttaagtgatactaggtcattctttaacttcttgctccacctgctctatccccagctctgcaggtttggagtggsctgtcatgtgattttgtttacccgtttcggttcaaagacagaactctttatttgaacactgaagctagcagggactgtccaaagccagagcccctcatat

SEQ ID NO: 10588 - DNA, 201 bp, Homo sapiens
atgatgacacacaatgctctttcgcactcatgatacataacttacagggaaaggccctgactccctttttgcatagcgtcactgggaacttcttgttaaayggggttagggagtcgttgacttgccttttcccttctaactacaagttttttgcctggtagcatagacccaacaatccttctactctggggtgtttgctcc

SEQ ID NO: 10589 - DNA, 201 bp, Homo sapiens
tggccagccctaaaggcccgggctgctctgcttacagccacacggctgtttctgagctgaggatgaccctccaggtggctgagattccctccaatcttttwatttctggttgggaaaccctacacagaccagtgtctgtctcacggtttaaaaggctgcatgcaaaacatttcctcccctggtagaaatgctgcattgagc

SEQ ID NO: 10590 - DNA, 201 bp, Homo sapiens
tatttaatggaaaagcttctgaggacagggctatactcacatacctccacacctggcacagtagatgagctcactatctgttgaataagttcgtgacagarcagaagttctactgcagccacaaaggcctattcacagtctttaagcctgatgaagttctgaataagtaaacccttagctacatcaggcagtttatgaatg

SEQ ID NO: 10591 - DNA, 201 bp, Homo sapiens
gcccatgacagctgggtttgcttcacgatttgtgtaggacacgtcttatatgtgcatgcactgttggcagcagactgcagagagtcttaagggttttccartatgacttgggaattgcaagctgatgataccatggtaccacaacctgcagtgtggcaagcctaccagcaccaggtcaagtgtgtgtctctgtttgatttc

SEQ ID NO: 10592 - DNA, 201 bp, Homo sapiens
cttcactgtttggtggtgatgactatgtgagaaaaactagacacttgtcttaccatatgtgaaaagttgtaagaccaaatgtaacatcaaagggcagggtyttttcagaactaagctagaggaaattgccatcctgggtcaggatgaaacgcccgttctaagtgagaatgtgctgctgactgtggtgcacagacagcacaa

SEQ ID NO: 10593 - DNA, 201 bp, Homo sapiens
tggtggtgatgactatgtgagaaaaactagacacttgtcttaccatatgtgaaaagttgtaagaccaaatgtaacatcaaagggcagggtcttttcagaaytaagctagaggaaattgccatcctgggtcaggatgaaacgcccgttctaagtgagaatgtgctgctgactgtggtgcacagacagcacaaattccatggg

SEQ ID NO: 10594 - DNA, 201 bp, Homo sapiens
tgtgaaaagttgtaagaccaaatgtaacatcaaagggcagggtcttttcagaactaagctagaggaaattgccatcctgggtcaggatgaaacgcccgttytaagtgagaatgtgctgctgactgtggtgcacagacagcacaaattccatgggtttgagagaaagatgtaaatgacagcaaggtagaatgcagacctgca

SEQ ID NO: 10595 - DNA, 201 bp, Homo sapiens
ttgacagtagatatattgtcagatgcactgtgctgcttagttttgagtgcagtgtgattttctgaaagggcaatgagatgatggatgtagcatgctcagcrctgacctggcccatagtgatcactcaataactgttaacagctatggctgctattcctactgatggataaccatctaataagacagaaaacatggggctaa

SEQ ID NO: 10596 - DNA, 201 bp, Homo sapiens
actataaatctagtgggtacttaatgaatattatataatgactaataaatattttctgatttaaatgtaatgaaatattatcagcttttgaagaaggcccyggggataattatcttcattttacagacagggataccatgagatactcaggtcacatagagtgaggggtggagggtgacaattccatgttcttcagaacct

SEQ ID NO: 10597 - DNA, 201 bp, Homo sapiens
agtgagtaatttcaagcattttaattccagtgcttcctggcttaacaaacctgccaccattactaatgctaattaaataggtttctctgaggttgcccaamctgttttcctaagccaggaaatggactcgacaaactcaaaagaatcaaaagatacaaatttaagaggaagaaaaatcactaattagtgaagtctgcttcc

SEQ ID NO: 10598 - DNA, 201 bp, Homo sapiens
cttccaaaggcaacagagttcagcattgctctgttttcattgtgttcatttttacaactaccttctctttttggcaagtgatcctggattcccatctatgwcagtgatataaattgttcttttaaaacaatctttaaactaaaagagtaaggcaacaaaaatatgaacaaatatcccaggtgatgtaatttgcagatgtgg

SEQ ID NO: 10599 - DNA, 201 bp, Homo sapiens
aatgacgggaagccttttgatgtttgacgtctttatctcaactcttcaacttagctcattctggagcagtcacacgatgacagatgagacggttgggcctragccggccaaacaaacggcagggcaagacctggcaggatgctggggtgggggcgggagtgggccaggatggtgttaacccatccacaggggagtcgcctt

SEQ ID NO: 10600 - DNA, 201 bp, Homo sapiens
gccatctgcccttggagaatgtagagattcaactctaaagtggaacagagaaagcccactgctggacagctagtgttggccagcgttcattcattctcctytctctgcacagtggcaacacggagcgctctgaatccctgcatgacaacaccctcgtgctgatggtgccactgatgcacgaggtggacacgtccatcaccg

SEQ ID NO: 10601 - DNA, 201 bp, Homo sapiens
ctcactttaaataaccattgcagcttggggaacctggcctgtctttaggtggaaacaagttttggaaattcctcctattgcagaaagcatttgatttgcaktttcctgaatgcgaggctccaagtgtagggaccgccacccaaggacgtttttctctgttgggcagactcaaagcactgaggggagcttttcagggcccac

SEQ ID NO: 10602 - DNA, 201 bp, Homo sapiens
ggcagaaagatgtgggaagcctttgacctggaggggcatggcttcaggtgaccagaactgtggctggttctggggaatgtgagcgaggtgctggccacatstgctatagtaaccatgagagcttcctgaaaagtagttatttactgataaactactcaagaatacaaaagtagttgaataaaaagtgtgccacagccaaat

SEQ ID NO: 10603 - DNA, 201 bp, Homo sapiens
acagggactgtgtttggctgctctgtttggggccctgtgggaggaaacctgtgtcctctctcttgctctgagtcaacagacaactcttagaagtgcctgaytgagcctacaacatggaaatgccatttcctccaagccgtttatctgaccacctcagcctggaaagtaacagctcttgacttcccttctccacctgggatc

SEQ ID NO: 10604 - DNA, 201 bp, Homo sapiens
ggggcgatggccacagagtccttagccagccaaggaaatgacattgttggtcattggccggggatgcttgggttgtctgcaacacatgaaaaaagcatcaygtccccttgactttgagcaaagagtgcggttaaaaccaagttgtgggaggatggatagtcagtaattgtttatctgtgtgatgagataaggtagtcccct

SEQ ID NO: 10605 - DNA, 201 bp, Homo sapiens
ctttggctgttttgttgagtgcccaggtcatcctggtagaagggagacagtgacccacgtgaaaaaggatggctacagatgcatggctgcatggctgtgcrtcatccaccctggagtatctgcttgccaaaaatagggctacctgcaaaatgctttgagcactgtggaaaccagccgttacaactccaaacgtttattttt

SEQ ID NO: 10606 - DNA, 201 bp, Homo sapiens
tattgaaatgatgttcttggtcacttctggttccagatggccaaccaagcacaaatgttgatgtctgtgccttggtaccccattgcaatgattataaatgagtagatcggaacagggaggacaacactgtgaaagaaagggcatcagctaataataagagtccagtaattttctggtatgagtgaagtaaatggaagagtg

SEQ ID NO: 10607 - DNA, 201 bp, Homo sapiens
tgaaatgatgttcttggtcacttctggttccagatggccaaccaagcacaaatgttgatgtctgtgccttggtaccccattgcaatgattataaatgagtagatcggaacagggaggacaacactgtgaaagaaagggcatcagctaataataagagtccagtaattttctggtatgagtgaagtaaatggaagagtgtta

SEQ ID NO: 10608 - DNA, 201 bp, Homo sapiens
gaaatgatgttcttggtcacttctggttccagatggccaaccaagcacaaatgttgatgtctgtgccttggtaccccattgcaatgattataaatgagtagatcggaacagggaggacaacactgtgaaagaaagggcatcagctaataataagagtccagtaattttctggtatgagtgaagtaaatggaagagtgttag

SEQ ID NO: 10609 - DNA, 201 bp, Homo sapiens
aatgatgttcttggtcacttctggttccagatggccaaccaagcacaaatgttgatgtctgtgccttggtaccccattgcaatgattataaatgagtagatcggaacagggaggacaacactgtgaaagaaagggcatcagctaataataagagtccagtaattttctggtatgagtgaagtaaatggaagagtgttagtg

SEQ ID NO: 10610 - DNA, 201 bp, Homo sapiens
tgatgttcttggtcacttctggttccagatggccaaccaagcacaaatgttgatgtctgtgccttggtaccccattgcaatgattataaatgagtagatcggaacagggaggacaacactgtgaaagaaagggcatcagctaataataagagtccagtaattttctggtatgagtgaagtaaatggaagagtgttagtggg

SEQ ID NO: 10611 - DNA, 201 bp, Homo sapiens
gatgttcttggtcacttctggttccagatggccaaccaagcacaaatgttgatgtctgtgccttggtaccccattgcaatgattataaatgagtagatcggaacagggaggacaacactgtgaaagaaagggcatcagctaataataagagtccagtaattttctggtatgagtgaagtaaatggaagagtgttagtgggt

SEQ ID NO: 10612 - DNA, 201 bp, Homo sapiens
atgttcttggtcacttctggttccagatggccaaccaagcacaaatgttgatgtctgtgccttggtaccccattgcaatgattataaatgagtagatcggaacagggaggacaacactgtgaaagaaagggcatcagctaataataagagtccagtaattttctggtatgagtgaagtaaatggaagagtgttagtgggtg

SEQ ID NO: 10613 - DNA, 201 bp, Homo sapiens
tgttcttggtcacttctggttccagatggccaaccaagcacaaatgttgatgtctgtgccttggtaccccattgcaatgattataaatgagtagatcggaacagggaggacaacactgtgaaagaaagggcatcagctaataataagagtccagtaattttctggtatgagtgaagtaaatggaagagtgttagtgggtga

SEQ ID NO: 10614 - DNA, 201 bp, Homo sapiens
attgtccccacccctacaggcttcaggcatgcagaatagcaagcagccaggcatcgccttctctaaagtgttaagtaaactgtttaagatagtgtgggcgrcctcgttctcagagaaaagaaagccttacttctggcatttgaagtcaccaacgtaagagctagctttctctcccacaatccacccaaacactttcacaga

SEQ ID NO: 10615 - DNA, 201 bp, Homo sapiens
gggcaaaagtcatctaacacaaagcttattttacaataaagtgttgaatatctcatgtaatgtattgaacactatactgaaaatgaaaaacaaaatggttktatgggtactcaccattaacacacacagctgaaagcacactggacctaaagaatatttgaactaaaattaactgctggattatggggctactagtgtaac

SEQ ID NO: 10616 - DNA, 201 bp, Homo sapiens
cagcagtgtagctttaaacaaaccacttgctctttctgagcaaaaatattccatttgtaaataaatggacagagttagagttattaggcattccctaaagrtcttttccccttttaaaatctttctttcatttaattctaagtttctggctttatgcactttgtgtttcatgcacaccatagcttagtcatcagttatttt

SEQ ID NO: 10617 - DNA, 201 bp, Homo sapiens
atcttgatccaaaaatgacgaggctgggtggttgccattggtgtcacacccacatcccttgctgtgcaggtgcactgctcccagctgctgtgctggctgcwagctgctcacagtggcccgtcctttggtctggaaagtcacccttgccctgcctgggagggtgacttgttagccaatggctggctgatttggggtgtggat

SEQ ID NO: 10618 - DNA, 201 bp, Homo sapiens
gaggtagtgcaggaaagtggtgataagcagatgtctgcagctgtgtgacgtgtgtcccagcccagttctgtggcctgctacctggggagcctctggttgtmattgggcctcctgttgcctctcagcttgcctccctctgtaaaatggggacagtaggccaggggctgtggctcacacctgtaatctcaacactttgggagg

SEQ ID NO: 10619 - DNA, 201 bp, Homo sapiens
ctgcagctgtgtgacgtgtgtcccagcccagttctgtggcctgctacctggggagcctctggttgtcattgggcctcctgttgcctctcagcttgcctccmtctgtaaaatggggacagtaggccaggggctgtggctcacacctgtaatctcaacactttgggaggccaaggcaggtggatctcctgaggtcaggagttc

SEQ ID NO: 10620 - DNA, 201 bp, Homo sapiens
cgtatagatgaaacatcatcaaggtatgtatacgcattttggaacctatcatataaaaaagaaaacttttgtaacttaaatttgggatttatgtttttggytttttgtttgtttgtttgttttgagatggagtcttgctctgtcgcccagggtggagtgcagtggcatgatctcggctcactgcagcttctgcctctcggg

SEQ ID NO: 10621 - DNA, 201 bp, Homo sapiens
cccctcccccaaccccacaaccgtccccggtgtgtgatgttccccttcctgtgtccatgtgttctcattgttcaattcccacctatgagtgagaacatgcrgtgtttggtttttttgtccttgcgatagtttgctgagaatgatggtttccagtttcatccatgtccctacaaaggacacgaagtcatcattttttatggc

SEQ ID NO: 10622 - DNA, 201 bp, Homo sapiens
aaaagaaaaaattgttcttagattgggaagattgtccaggagcctgagagaagttctgggagagcagttctttcttattgtccttttcctgattatggggaaaaaaaaaaaaaaaaaaaagataatcttccagatgttggctcagtttgaggaggaggaaagattctgagagtgaggcccactgcaggaagcagagctgat

SEQ ID NO: 10623 - DNA, 201 bp, Homo sapiens
ggggtgccatcggctgctctgcctgcctctgggtggtggtgggattacatgagggaaatgtgagaagcccggaaatgatgaggcagcactggatcctgctgttcccttcctgggaagccggcttcctggtgttgtgaggagaggatgaggccgtcatgggagcaggtctgacctgggctctgaggaagcaggtgctctgct

SEQ ID NO: 10624 - DNA, 201 bp, Homo sapiens
ggacacagggtttccccatgttgcccaggctggtcttgaactcctaggctcaaggaatcctcctgcctcagcctccctaagtgctgggattacaggcatgrgccaccgtgcatggccttagctgcctatttgattccttcgtgacatctaacagaacgtgttatttcgtctacttgttattgtatttacctctctagaatg

SEQ ID NO: 10625 - DNA, 201 bp, Homo sapiens
gacacagggtttccccatgttgcccaggctggtcttgaactcctaggctcaaggaatcctcctgcctcagcctccctaagtgctgggattacaggcatgarccaccgtgcatggccttagctgcctatttgattccttcgtgacatctaacagaacgtgttatttcgtctacttgttattgtatttacctctctagaatgg

SEQ ID NO: 10626 - DNA, 201 bp, Homo sapiens
cgggaaaggagaggggactcatcaaaggttagaccatgtcctgaagtgacctgttgaatttgcaaaacttctttttcagtgttatgttttatttttgcaatttttgtggggggaaaatgcattctaggcttctgaaaccctttttagaagaaaatcatggtttcctcaaactcttcaagcttattgagttttcttctgtat

SEQ ID NO: 10627 - DNA, 201 bp, Homo sapiens
gggaaaggagaggggactcatcaaaggttagaccatgtcctgaagtgacctgttgaatttgcaaaacttctttttcagtgttatgttttatttttgcaatttttgtggggggaaaatgcattctaggcttctgaaaccctttttagaagaaaatcatggtttcctcaaactcttcaagcttattgagttttcttctgtatt

SEQ ID NO: 10628 - DNA, 201 bp, Homo sapiens
cacttagcataatgtcctccagtttcatccatgttatcaaaaatggcaggatctcctttttaaaggctgaataatattccattgtatgtttatatatgtgtatatatatatatgtgtgtgtgtgtagtatatatacatatatacacaccacaatttctttatccattcacctgttgacaaacacttaggttgattccatgt

SEQ ID NO: 10629 - DNA, 201 bp, Homo sapiens
acttagcataatgtcctccagtttcatccatgttatcaaaaatggcaggatctcctttttaaaggctgaataatattccattgtatgtttatatatgtgtatatatatatatgtgtgtgtgtgtagtatatatacatatatacacaccacaatttctttatccattcacctgttgacaaacacttaggttgattccatgtc

SEQ ID NO: 10630 - DNA, 201 bp, Homo sapiens
tctagttcaatgataaaatttttgtctgggctacatggaatcatggaatttcagttctgcccagtccctctcaaggcccagccattatcatagaaaaatcytcaagtaagttgtgttgtttcttccacaggacagttcgtctgtcatccagttcatgtcccgcgccaaggtgaaggtggatcctgccctaagggtggtgga

SEQ ID NO: 10631 - DNA, 201 bp, Homo sapiens
ccctctctctcctgggttcaagcaattctcctgcctcagcctcccaagtagctgggattacaggcacccaccaccacacccggctaatttttgcatttttagtagagacagggtttcaccaagttggccaggctggtctcaaactcctgacttcaggtgatcacccgcctcagcctcccaaagtgctgggattacaggtgt

SEQ ID NO: 10632 - DNA, 201 bp, Homo sapiens
accatgcctggccccaccatccacacccagccccaccatccattaattaagcttcatggtgttcactcagtcacactgttgtcgctctcatttgccaatgttaaatagtgatgcacagtgcctaagacaaaatcgctatcactgcaagctcctacccctggctaaatgctaatctggatttatgggacagtgacgagtgct

SEQ ID NO: 10633 - DNA, 201 bp, Homo sapiens
gttttctgcatatggctaaccagttttcccaacaccatttattaagtagggaatcctttccccattgcttgtttttgtcaggtttgtcaaagatcagatgrttgtagatgtgtggtgttatttctaggcctctgttctgttccattggtctatatctctgttttggtaccagtaccatgctgttttggttactgtggcctt

SEQ ID NO: 10634 - DNA, 201 bp, Homo sapiens
gcgagggcatccttgtcttgtgccagttttcagagggaatgcttccagcttttgcccattcagtatgatattggctgtgggtttgtcataaacagctcttatttttttgagatatgttccatcaatacctggtttattgagagtttttagcatgaaggggtgttgaattttgttgaagcccttttctgcatctattgagat

SEQ ID NO: 10635 - DNA, 201 bp, Homo sapiens
ttggtggtaatatcccctttatcattttttgttgtttctgtttgattctctgttttcttctttattagtgtggctagtggtctcttttgttgatcttttcaaaaaaaaaaaaaccagctcctggatttgtttattttttttttgaagggtttttcatgtctctatctccttcagttctgttctgatcttaattatctcttg

SEQ ID NO: 10636 - DNA, 201 bp, Homo sapiens
tggtggtaatatcccctttatcattttttgttgtttctgtttgattctctgttttcttctttattagtgtggctagtggtctcttttgttgatcttttcaaaaaaaaaaaaaccagctcctggatttgtttattttttttttgaagggtttttcatgtctctatctccttcagttctgttctgatcttaattatctcttgt

SEQ ID NO: 10637 - DNA, 201 bp, Homo sapiens
ttttcaaaaaaaaaaaaaccagctcctggatttgtttattttttttttgaagggtttttcatgtctctatctccttcagttctgttctgatcttaattatytcttgtcttctgctagcttttgaatttgtttgctcttacttctctagttcttttaattatgaagttagggtgtcaattttagatctttcctgctttctcc

SEQ ID NO: 10638 - DNA, 201 bp, Homo sapiens
ttggagtgggacaaggccctccttcccctttcttatgattagttgaaatctgagtttgagcaagtcttgctgttttcagagaatgctctccttctcctgtycttccctcacagccgaactcatttggagagattgatggagttactaatgctttggagacagtccctaggaatttttttaaaatgtagtggtcagattgac

SEQ ID NO: 10639 - DNA, 201 bp, Homo sapiens
gggagaggctggagggaagctatggccttggaattttattgccttttattgttgttcttgcaggagcaggggggttgaggggggttcatcctgtatttgaygcccacactcagatcccaggggagtagaggaggagacagcagccgatgcacttcttttgccagtgagctgtgcaatgatgctacctgtctgcttcccttc

SEQ ID NO: 10640 - DNA, 201 bp, Homo sapiens
gtctgacctggaggccttgttcaatagcttttcctcctggagacacaagcaatctgtcctgctgggtcagtggcagtccttgcattgagtcagcacattcttttttttttttttttttttttagacggagtttcgctcttgttgcccaggctggcaatggcacaatctcagctcaccataacctccacctcccgggctcaa

SEQ ID NO: 10641 - DNA, 201 bp, Homo sapiens
taatatttggagtgggacaaggccctccttcccctttcttatgattagttgaaatctgagtttgagcaagtcttgctgttttcagagaatgctctccttcycctgttcttccctcacagccgaactcatttggagagattgatggagttactaatgctttggagacagtccctaggaatttttttaaaatgtagtggtcag

SEQ ID NO: 10642 - DNA, 201 bp, Homo sapiens
tctgacctggaggccttgttcaatagcttttcctcctggagacacaagcaatctgtcctgctgggtcagtggcagtccttgcattgagtcagcacattcttttttttttttttttttttttagacggagtttcgctcttgttgcccaggctggcaatggcacaatctcagctcaccataacctccacctcccgggctcaag

SEQ ID NO: 10643 - DNA, 201 bp, Homo sapiens
ttctaatatttggagtgggacaaggccctccttcccctttcttatgattagttgaaatctgagtttgagcaagtcttgctgttttcagagaatgctctccytctcctgttcttccctcacagccgaactcatttggagagattgatggagttactaatgctttggagacagtccctaggaatttttttaaaatgtagtggt

SEQ ID NO: 10644 - DNA, 201 bp, Homo sapiens
ggtttatgtttaatgaatgaaatgatgattaagataggacaattggacaaaaaggctgggccttcttaggtgggtattgagtgggaagtgattcaagaggscagacattctgtctggacattagctggaagtggggctggacaagatgaactagagccctcttgtggtcccatcattcaggcctgtagctttcatttgaga

SEQ ID NO: 10645 - DNA, 201 bp, Homo sapiens
agttttctgtgataatgagatttgaactggaagaaatgctgttctttcagttaacagttgtgttttttccaagaaaaaaaagaaatacaaatgttaaaacttttttttttttttctggtgctaaagaacaatttcacctcctaagccaagaaggaaaaaattctcatctaaaccgccaggcttaaaggtggctccttgtca

SEQ ID NO: 10646 - DNA, 201 bp, Homo sapiens
gataagtgctggggctcctatggtgggtgtgctgcagtcttcagcagagcttggctacagaggagaaagatctaaactggaccaatttcatatggtcattkcctctggcttgtggctgatcatcttgttctttggaattgactgtctcatgaaatagtgagtttcttgtcaccagagagatttaagcaagagccatggaat

SEQ ID NO: 10647 - DNA, 201 bp, Homo sapiens
cccgtgtgatgatggctaagtgcgcagaacatgtgaaatttaagtagatttgtggaaacagaaacacatttttatttagtcgtgagcgtcacttggagtakaaatagagccctttatgattcgtgtgctggtctttcttcctggagggcttcagtattatctcatgctgtcatctttatgttgtattggaaaaatctggga

SEQ ID NO: 10648 - DNA, 201 bp, Homo sapiens
atgtgccagtcacctagggctgagaaaggggagcaagcagagagggagaagaggaagaagccaaatgagatggttcgtaattgattagtggaagttaaatmatgttaaggataggaggcttgtcccctccatcatgatttagtatatcatccttcccaagagaagttttgagaacttgtcctctggtatccaggaaatggc

SEQ ID NO: 10649 - DNA, 201 bp, Homo sapiens
gtgatgtaaccagggactgcaacttctagggaaaggggaaaaatcactgttggccccaccctctagcattggaagcttaacagggctttggcccacagcasatggaagtttgagctgtgttttgtaattcttttttaaatgttcgccagagcatccattattcttcctcattttctcttctcctcttccctccttttcttc

SEQ ID NO: 10650 - DNA, 201 bp, Homo sapiens
aggtctgcacgttggctggggaagctgttctccatgtctcttatctttctagaaccagttggctactggggcaggttcttctcatggtgatggcaaaaatkcaagaggggcatgcagaaacatgtgagacctcttaaggggtaggctcagaactggcactatcacttctgccctcattccattggccagagcaagtcatga

SEQ ID NO: 10651 - DNA, 201 bp, Homo sapiens
ggcagctgataagtaatgcagtctagcctgtaatcccagcactttgggaggccaaggcaggtggatcatgaggtcaagagattgagaccatcctggccaaygcgatgaaaccccatctctactaaaaatacaaaatttatctgggcatggtggcatgtatctgtagtcccagctactcgggaggctgagtcaggagaattg

SEQ ID NO: 10652 - DNA, 201 bp, Homo sapiens
cttttagttgggttcagtcagaggggagcactggaaaaagagggtggaagagtggccagccatagtgaccatggctctctacggaaggccatagcttctgycaggtggttagttctaataacttaggggttccagtgaccactccccaccttgctccttccgacctagggcattaatggctccctgctttgccacaggggt

SEQ ID NO: 10653 - DNA, 201 bp, Homo sapiens
tgcccgttgggacaattagggagggattctttcaagtacaacattttctctagcaattatgggggttttatctcccagatgtgatttatgccatattacaytccaagaagggaacatgaagaatgtttgtggctaaaaaagtctcaacacaaggaaactacaggtgaaacgtaacaatagtaattgccttactttatttgc

SEQ ID NO: 10654 - DNA, 201 bp, Homo sapiens
ttgggcctgggaatctgttttcaacgtgtatcctgagtcatatttgggaagcactgggctctgcttatgattctcacgttctggtctgtgactgaggagaygtgccatgatgagagtgatgatggtgatggtggcagacaagagcatgtcacatttagaaatactgtaactggttgctgaggttttacatatattccttct

SEQ ID NO: 10655 - DNA, 201 bp, Homo sapiens
tatgttacgctttttttttcagcatttcacaatattcactaaagcattttataagcaagtgagttgtaggagctaaatatgatcaatttttaaaaactactttttttttttttttttttgagatggaatcttgctcttttgccagactggagtgcagtggtgtgatctcggctcactgcaatttctgcctcccgggttcca

SEQ ID NO: 10656 - DNA, 201 bp, Homo sapiens
ggagtgcagtggtgtgatctcggctcactgcaatttctgcctcccgggttccagccattctcctgcctcagcctcctaagtagctgggactacaggtgtgyaccaccacacccagctgatttttgtatttttagtagagacagggtttcaccatgttggccaggatggtctcaatctcttgatctcatgatccacccgcct

SEQ ID NO: 10657 - DNA, 201 bp, Homo sapiens
caaggactgcaggaggggtgtgctttccatccactttctatattctaaaaattaccgctggattaagcccagtcaagagagaaccaagtatctgtatggtycaagtatcgctggccacacacacagtatcttttacagaatcgcatgtgctgtgatgccatctccctgtgcagggtgggttggtaggtgggggaaaggggc

SEQ ID NO: 10658 - DNA, 201 bp, Homo sapiens
cacacacagtatcttttacagaatcgcatgtgctgtgatgccatctccctgtgcagggtgggttggtaggtgggggaaaggggcttccttggggatttgayctgtggaactcatctctgtggtaactgaaaagatgtaattggcaactggctcattacattacacagatttctctcactcaggacccatgcgagaaatttc

SEQ ID NO: 10659 - DNA, 201 bp, Homo sapiens
tgccatctccctgtgcagggtgggttggtaggtgggggaaaggggcttccttggggatttgatctgtggaactcatctctgtggtaactgaaaagatgtarttggcaactggctcattacattacacagatttctctcactcaggacccatgcgagaaatttccttccagcctcatttaagctatttccagacttagaaat

SEQ ID NO: 10660 - DNA, 201 bp, Homo sapiens
atttgttggtggctactctgctggctggcgtgtgctgtccagccagagcacagggtattatggccagcaactgggtttcctcaggggcaggcccagtgcaycgtgttgcctgccgggcaaggaaccagcaaagcctcactacagagtgacaattcctggggtgccctgtgggagcagtgagagggagctcctggggccggg

SEQ ID NO: 10661 - DNA, 201 bp, Homo sapiens
caggcccagtgcaccgtgttgcctgccgggcaaggaaccagcaaagcctcactacagagtgacaattcctggggtgccctgtgggagcagtgagagggagytcctggggccggggggtgctgcatggttaaaaaggagcataaggaagaatagataaccactgcatcacaccagggtcaccattcacactgggttccatgt

SEQ ID NO: 10662 - DNA, 201 bp, Homo sapiens
gggataagtgctggggctcctatggtgggtgtgctgcagtcttcagcagagcttggctacagaggagaaagatctaaactggaccaatttcatatggtcawtgcctctggcttgtggctgatcatcttgttctttggaattgactgtctcatgaaatagtgagtttcttgtcaccagagagatttaagcaagagccatgga

SEQ ID NO: 10663 - DNA, 201 bp, Homo sapiens
aggacagtcatgacctacacctggctaaatccagtagtcatttttcagtcttctttctggacccgtcagcatctattagtacaaataacgactacttctgttattattattattattattattattattattattattattatactttaagttctagggtacatgtgcacaacgtgcaggtttgttacataggtatacatg

SEQ ID NO: 10664 - DNA, 201 bp, Homo sapiens
tgaagcacatttcttatgtcaggttcccagtttcctcttctgtaaaatggaggcagcatgggattgtaatgaggattaatggagctcatttacctgaacgscccagagggtgcttagcaaatactttatgcttcttgtgggtccattactttcccttgcctgtttttttagggaccctggagtgttaccttggcttctgat

SEQ ID NO: 10665 - DNA, 201 bp, Homo sapiens
ggacagtcatgacctacacctggctaaatccagtagtcatttttcagtcttctttctggacccgtcagcatctattagtacaaataacgactacttctgttattattattattattattattattattattattattattatactttaagttctagggtacatgtgcacaacgtgcaggtttgttacataggtatacatgt

SEQ ID NO: 10666 - DNA, 201 bp, Homo sapiens
gtgaagcacatttcttatgtcaggttcccagtttcctcttctgtaaaatggaggcagcatgggattgtaatgaggattaatggagctcatttacctgaacsccccagagggtgcttagcaaatactttatgcttcttgtgggtccattactttcccttgcctgtttttttagggaccctggagtgttaccttggcttctga

SEQ ID NO: 10667 - DNA, 201 bp, Homo sapiens
gacagtcatgacctacacctggctaaatccagtagtcatttttcagtcttctttctggacccgtcagcatctattagtacaaataacgactacttctgttattattattattattattattattattattattattattatactttaagttctagggtacatgtgcacaacgtgcaggtttgttacataggtatacatgtg

SEQ ID NO: 10668 - DNA, 201 bp, Homo sapiens
atcttcctgctatcagtgaaaaagggagagggatcagctcttgtttcttggctttgctctttacagcctcttagaaacttgagttctatctggattcatcstgtcatttgatggtacaggagtacaaatggaggtccacttagcgaatatctaaatatttaaagattacaaatcaaggtaactgttcagtaaactgtgttc

SEQ ID NO: 10669 - DNA, 201 bp, Homo sapiens
agcctcatgctgtcctcaggccaccctagccccctgttctcctggctggctttatcccgctgagcagtgggacagaggacaggaagatgagaggaagataktccagagctgggtggagagtcagggtggagtagagctgtgtgagggtgtgcatgagggagccaacaggaaggagggctgggttcttgttctctgaccaat

SEQ ID NO: 10670 - DNA, 201 bp, Homo sapiens
aatgtccctggaatttatttgctggagcattttccattttcatattcagtttagaccttggctgaagtagggaggttatgtaactgggatggaacaaatcycattggcatctggggaccctagtgtaccccacccttagccattcctgcagtggactgagtgcccccctggctgtatattcaagtcgcctctgtggctgcc

SEQ ID NO: 10671 - DNA, 201 bp, Homo sapiens
aaattcatagatgctcaagtccctgatataaggtggcatcgtatttgtatataacctacatatatcctcctgtatactttaaattatctctagattacttrtaatacctacaacaatgtcaatgctatgtaaatagttgttatactgtattttgggttttttgttgtattgttatttttattgtttttttcctgaatattt

SEQ ID NO: 10672 - DNA, 201 bp, Homo sapiens
gctcaagtccctgatataaggtggcatcgtatttgtatataacctacatatatcctcctgtatactttaaattatctctagattacttataatacctacarcaatgtcaatgctatgtaaatagttgttatactgtattttgggttttttgttgtattgttatttttattgtttttttcctgaatatttttgatctgtggt

SEQ ID NO: 10673 - DNA, 201 bp, Homo sapiens
agccagctgagggtgacaccttgggctgcagccacaggccactttgccactgggctcacccacgctgctgctgccacacgtggggccaagggtgacaaggytgccagggagcctgggatcggagttccagggccatctgagctctgggtcagcagcagtcattggagcagggatctggggaggcttttcacgtgggggttg

SEQ ID NO: 10674 - DNA, 201 bp, Homo sapiens
gcataacagaggtgaagggcacagacttgggagccccatggccaggatttgaatctgaactcttaggcaggtccctgaactgctcagccctcagtttcccrtctgtaaatggtgataacagtaccttcctaaggtcattatgaggactaaatgagtaaacattgatacagtgctaacaacgcttaatagagtacttacaac

SEQ ID NO: 10675 - DNA, 201 bp, Homo sapiens
ttttgtttttgtttttgtttttttttgactttgagacaggatctcactctgacacccaggcgggagtgcagtggtacagtctccgctcactgcagcctcarcagcccaggcccaagtgatcctcccacctcagctttccaggtagctgggcagtgtcagcagctctcctatggccagctccaccaccaggtcagacagtac

SEQ ID NO: 10676 - DNA, 201 bp, Homo sapiens
cagctagctgttggttatctagactggcattggctggggtgactggggcaactcagcaccgctccatgcatatctcactgtccaacaggccagcctgggcrtattcacgtggagactgagaagcacgagaaggcagaattgggcccttgataagatcatcctaacacagaggcagatgtagatttgaaccctatttgcaac

SEQ ID NO: 10677 - DNA, 201 bp, Homo sapiens
atgggaggagctactgtatcatcttttcatgacacatatgtagggacaggtagaacattgtggtcatatgcagtggactgagcccatgggctttggagtcmcatggggctctcaagccatgattctttacttaaccttcatctataaaatgaaaacactgatagaatctatctcacaagatcattttgaggtaaatgcaca

SEQ ID NO: 10678 - DNA, 201 bp, Homo sapiens
cctttttatggctacatagtattccatggtgtatatgtgccacattttcttaatctagtctattattgatggacatttgggttggttccaagtttttgctrttggaaatagtgctgcaataaacatacgtgtgcatgttctttatagcagcatgatttataatcctttgggtatacacccaataatgggatggctgggtca

SEQ ID NO: 10679 - DNA, 201 bp, Homo sapiens
acaatggttgaactagttgacagtcccaccaacagtgtaaaagcattcctatttctccacatcctctccagcatctgtggtttcctgactttttaatgatygccattctaactggtgtgagatgatatcttattgtggttttgatttgcatttctctgatggccagtgatgatgagcattttttcatgtgtcttttggctg

SEQ ID NO: 10680 - DNA, 201 bp, Homo sapiens
atgtcctgaatgatattgcctaggttttcttctagggtttttatggttttaggtctaacatctaagtttttaatctatcttgaattaatttttgtataagrtgtaaggaagagatcccgttttccatcatatgaatatgccacaatatgttttctccattatcctgatgatggacattgaagttgtttctggttttatctt

SEQ ID NO: 10681 - DNA, 201 bp, Homo sapiens
acaggacagctccccacacaacaaggaattatccaacaatgcacaggacagctctccacacaacaaagaattatccaacaatgcacaggacagctccccayacaacaaagaattatccagccccaatgccaacagcattgaggctgagaaaccctggattatccctttttacacatgagatgagggtcttacaggtcttct

SEQ ID NO: 10682 - DNA, 201 bp, Homo sapiens
gctccccacacaacaaggaattatccaacaatgcacaggacagctctccacacaacaaagaattatccaacaatgcacaggacagctccccatacaacaargaattatccagccccaatgccaacagcattgaggctgagaaaccctggattatccctttttacacatgagatgagggtcttacaggtcttctaagtggtg

SEQ ID NO: 10683 - DNA, 201 bp, Homo sapiens
aagcatgggaagtaatcagtaaatggccaatttatctctccctcacagccaagccaactcctaacataattggaagtttaatatattccaacaagttcagracaagcatactagatcttaaggcaatctcatggccctgcagctcatcctttttttcaaagaaattaattttcaaaaaatgactctattgagattgaattt

SEQ ID NO: 10684 - DNA, 201 bp, Homo sapiens
ggtaggcacccatgttggagccagccatggtctgcagagttcatttctctgagtccctgccccagaggcacatgacataggaggctccagacaactgactyaaagacagagaggaccataataccagggttcctcagtcctcaccagcataagaatcccagagaaggcattttttttctcacatactctaggtctcaatct

SEQ ID NO: 10685 - DNA, 201 bp, Homo sapiens
ggaggctccagacaactgactcaaagacagagaggaccataataccagggttcctcagtcctcaccagcataagaatcccagagaaggcattttttttctyacatactctaggtctcaatctcttaacttcaaaaatggcagtggctacattagctcttgggaccagtgtttcaaaggctagtgtagaacacttgcctcag

SEQ ID NO: 10686 - DNA, 201 bp, Homo sapiens
agaggaccataataccagggttcctcagtcctcaccagcataagaatcccagagaaggcattttttttctcacatactctaggtctcaatctcttaacttyaaaaatggcagtggctacattagctcttgggaccagtgtttcaaaggctagtgtagaacacttgcctcagatgattcaagatccaggtttcctgactctg

SEQ ID NO: 10687 - DNA, 201 bp, Homo sapiens
gaatttcaatgcagtttcacttttgagggtttttaacttgattgtccatcagaaccacctggggagctttcagcaaatgcatgccgacgccacatgcattrattctgcggccacacagaggggcctgcatctgggtcttttttacaaagcttttcataggattgtcatcgtcacctttccagcactgttatgcaaattgga

SEQ ID NO: 10688 - DNA, 201 bp, Homo sapiens
gtagggacaggtagaacattgtggtcatatgcagtggactgagcccatgggctttggagtcacatggggctctcaagccatgattctttacttaaccttcrtctataaaatgaaaacactgatagaatctatctcacaagatcattttgaggtaaatgcacatgtacctaatgcatagtaaattctcagtagaaaataaca

SEQ ID NO: 10689 - DNA, 201 bp, Homo sapiens
atggggctctcaagccatgattctttacttaaccttcatctataaaatgaaaacactgatagaatctatctcacaagatcattttgaggtaaatgcacatrtacctaatgcatagtaaattctcagtagaaaataacattttatgtattttgcatgtttctcataaactgattgtgcattctaattatttagtttggaaaa

SEQ ID NO: 10690 - DNA, 201 bp, Homo sapiens
cactgatagaatctatctcacaagatcattttgaggtaaatgcacatgtacctaatgcatagtaaattctcagtagaaaataacattttatgtattttgcrtgtttctcataaactgattgtgcattctaattatttagtttggaaaatgtagtctctgtaggtttacccttccctgaggcagtaggggagatcatcacct

SEQ ID NO: 10691 - DNA, 201 bp, Homo sapiens
gatcattttgaggtaaatgcacatgtacctaatgcatagtaaattctcagtagaaaataacattttatgtattttgcatgtttctcataaactgattgtgyattctaattatttagtttggaaaatgtagtctctgtaggtttacccttccctgaggcagtaggggagatcatcacctctgtaatggtataatatgaactc

SEQ ID NO: 10692 - DNA, 201 bp, Homo sapiens
gtaaagcagtaaggaatgcatagtcagctatactggaaatttgggaaagggaaatggactatgtgggaaagcgggactcttatccttgcagaagtcactaygaaatgaggctttcagtaaacagaagatgggcatttcatcctttctcattactgagccttcctcaagacctccttaacatcctaacattataaatacaat

SEQ ID NO: 10693 - DNA, 201 bp, Homo sapiens
cattcttccaagcaggcccggagaaggaatgggctccacgatgcagggcccgcggtagagaacagccaggcagagcagggggcctggctggatgtggccascatctgcaggggttcagcattgagatatgacactgtcacctccatctcaagaagcccttacggatgcctcccttcccttcatgactcactgtgatctaca

SEQ ID NO: 10694 - DNA, 201 bp, Homo sapiens
atgatctccagaagcaacttacatgtagacatttttctgagaattccagaaagaatattgataattttcagacaccatggcttccacgcctcatcaacatragcagtattaggctttatctctgacatcaatcaaacttgaacaccatcagcatgggctttaatgaaattctcacatatgtatcagaacttgtattttttc

SEQ ID NO: 10695 - DNA, 201 bp, Homo sapiens
agcaacttacatgtagacatttttctgagaattccagaaagaatattgataattttcagacaccatggcttccacgcctcatcaacataagcagtattagkctttatctctgacatcaatcaaacttgaacaccatcagcatgggctttaatgaaattctcacatatgtatcagaacttgtattttttcctttagtcagtg

SEQ ID NO: 10696 - DNA, 201 bp, Homo sapiens
agtttttttaatttttattttttgcatttcttgatcatttcaaagtgaggtcagttacagagtgaatgggttcatcctgtcattgtaaataacagtttttygtttaataatggcattttgtattaccaagaccttgcttcacattaggtgttttgtatacattatctcatttaatcaaaaccagcactctatatcatgggt

SEQ ID NO: 10697 - DNA, 201 bp, Homo sapiens
ccccaccccaggccccgtctgatctattcttacatcacaactaaaaatattcttaaaaatgtgaatcagatggtatgactcccctgctcagaaccctccaktgccttccctctgtacttggaaccaagtccaaactcctgatgagcagcagggctccgcatggcctggcctttcatctgttgcttcccaaacgtgtggcct

SEQ ID NO: 10698 - DNA, 201 bp, Homo sapiens
agctcttcagtgagttagtaaacaaagtggttctcaaaatgtaaaattcttccttgactcactaagcaaccttctgattgcaactgctttccctttttggsctccaagacaggaattctctggccctgctgacaggagccccatgttgcacagggcaactatgtcactcattggaaattaacatgtctgccctctgacttc

SEQ ID NO: 10699 - DNA, 201 bp, Homo sapiens
tgggcaagtgatataacttcacattccagtttcctcctcataaaaatggaaataaagagaaggtgtacatagagtttttagataatggatttaaaacactrcctggcacacagtaaaccattactaagtagaggctatgtactccatcctacacgcatcagcagtggcagtccagcaatactcctataaggcacatgttat

SEQ ID NO: 10700 - DNA, 201 bp, Homo sapiens
attcttccaaccactgcacgttacaaacagggctgtagcctgggtctactggccaagcttccggggctgggacaggcaaggtatgtctggatgagagaagktctttgccaagacaagcatctcttgtgccaggcagaccagcaaatgagctgcttcttgcagccccttctttggcatctcccataagccaaggcctattca

SEQ ID NO: 10701 - DNA, 201 bp, Homo sapiens
ccaaccactgcacgttacaaacagggctgtagcctgggtctactggccaagcttccggggctgggacaggcaaggtatgtctggatgagagaaggtctttsccaagacaagcatctcttgtgccaggcagaccagcaaatgagctgcttcttgcagccccttctttggcatctcccataagccaaggcctattcatttaat

SEQ ID NO: 10702 - DNA, 201 bp, Homo sapiens
tagatgagctccgggccccttgtgtggcatgcactgtgcttagcactgggacacagacagacacagacttctcactccgactgtgggctcctccaggagcrggtttacaacgtatttcataaagcactttaaaataggagttcttcctgtccctaatagtattattcatcacttcattcttggcctgggaacagcctgtgg

SEQ ID NO: 10703 - DNA, 201 bp, Homo sapiens
attgtttaccctggtgatgatgtggctgacgaggtgctacagctcgctgcgctggccagcatcttgagagtattgtacagctttctaccactttccactgratacctattgtttttacaccatcagaaagttgaaaaatcttaagtagaaccatcataagtcagggactatctgtatggtagtagaaatttttaattgaat

SEQ ID NO: 10704 - DNA, 201 bp, Homo sapiens
ctagatgagctccgggccccttgtgtggcatgcactgtgcttagcactgggacacagacagacacagacttctcactccgactgtgggctcctccaggagmaggtttacaacgtatttcataaagcactttaaaataggagttcttcctgtccctaatagtattattcatcacttcattcttggcctgggaacagcctgtg

SEQ ID NO: 10705 - DNA, 201 bp, Homo sapiens
atctttacttcaagaacagacctttgacttaaaattaaagcttctctcctggtttgaaaggaattcccagtgaggtattgggcattacaagagaaactggraacagagttaggtaagcatgtaatatatgtatatgtgtatgtgtgagatacacacacacacatacacttatatatatttgcttatcctgggacactcttg

SEQ ID NO: 10706 - DNA, 201 bp, Homo sapiens
cctaccgtctgagcactgctctgaaggactcgattgccccgtggagcctgctcccacacacctgccttttgtgcagccggcccatctgttggtgctttttytttcaggaggagatgggcatctcctgtgagctgctggaatcggacttcctcaaatgcagcgtgggatttcctttcatgaggtcaaagtcaaaggtaaggg

SEQ ID NO: 10707 - DNA, 201 bp, Homo sapiens
ccttgggtgctcacagttttctgaagagaactctcaaaattctcaaaacataaatacctgtatcccacttcatttttaagaagagtaaagaaattaagtcmctttggtattggtatggagacagattttctaagttcaaatagtatactacagcatcttcagacattcatggaacattgtagtatgtgccatcattataag

SEQ ID NO: 10708 - DNA, 201 bp, Homo sapiens
gctccccacacaacaaggaattatccaacaatgcacaggacagctccccacacaacaaggaattatccaacaatgcacaggacagctctccacacaacaargaattatccaacaatgcacaggacagctccccatacaacaaagaattatccagccccaatgccaacagcattgaggctgagaaaccctggattatccctt

SEQ ID NO: 10709 - DNA, 201 bp, Homo sapiens
gttacagagtgaatgggttcatcctgtcattgtaaataacagtttttcgtttaataatggcattttgtattaccaagaccttgcttcacattaggtgtttygtatacattatctcatttaatcaaaaccagcactctatatcatgggtgccaccattcctctgatttttgctaaggaggaaactgaggttcaaaaagggta

SEQ ID NO: 10710 - DNA, 201 bp, Homo sapiens
gaactgtggggtgaaaatattccaaaaaaatggatggttgcatctgtactgaacatatacagacttttttcaatatttcctaaacaataaagtatagcaaygatttacatattatttacattgtattgggtattataagtaatctagagattaaagtatataggaggatgtgtgtatgttatatgcaaattctacaccatt

SEQ ID NO: 10711 - DNA, 201 bp, Homo sapiens
ggaggatgtgtgtatgttatatgcaaattctacaccattttacatcaaggacttgtgtgttcttggggtttggtgtcagggtggtcctggaaccagttccycatggacattgaggaatgactgtgcttcccctacccaacagaagtggttctcccgtcaggttataatagggaagggatgtgtgatctttcctgagaactg

SEQ ID NO: 10712 - DNA, 201 bp, Homo sapiens
ttacatcaaggacttgtgtgttcttggggtttggtgtcagggtggtcctggaaccagttccccatggacattgaggaatgactgtgcttcccctacccaayagaagtggttctcccgtcaggttataatagggaagggatgtgtgatctttcctgagaactgaggcatgctattaagctttaaatggagcatctctaagtt

SEQ ID NO: 10713 - DNA, 201 bp, Homo sapiens
taatcagacaaagggccatgtggcaagagctcttgcttcaccaaacacgtagtgatggacccccctatacccagtgtgccagacatcatcatgagatgtamctcctttcacatatctcttcccttgccagaggaaggaactgaggctcagaaaggttcaattcctcacccaaaggtttccaacccaaggtttctgacctgg

SEQ ID NO: 10714 - DNA, 201 bp, Homo sapiens
ttgaattatgattcacctttactgaatgtcccttctcttttctttactcactgtcgaacaggaacccaaaggatgtagtttttggcagatgtcctttgtarggttcagtatttctcactcacccctttaagaccctaaagggagagttattaatagtttcagaaagttgagggaaatcatgcagaggttctcagatgttca

SEQ ID NO: 10715 - DNA, 201 bp, Homo sapiens
caaatgcccatggtttggaggcaggaatggtgttccaagagtagtagggagcctcgggactagagtttggaggatgagcggggagagtgggaggagatagygggaaagtctgtggagccagttccctgaggggcctggtgggccatgctcagtgggggtttcatttgacgagccatgggaaggcttccagcaatgggggat

SEQ ID NO: 10716 - DNA, 201 bp, Homo sapiens
atgggggatgtggttttacttgtaccttaagaagatcacactgggtcttgtttggagaatggacaggaaaggagcaggagagcaagcagagagtctgaggkgcaagaaatgccctgtcctcccagcagactggagcgaattctaattctgcctctgctacttcattcctatgcaactttgggcaggtttcctaatctctct

SEQ ID NO: 10717 - DNA, 201 bp, Homo sapiens
aactgaaaaatgttcactggaacggagctgcaatggtggaaacgttctgtgtgtgccctgttcagtacagcagccactgcgcggctgctgagcccttgaawtgtggctatcagggtagaagaactgatttttaatatattgaattatgagtcatttaaatttaaagagcacagctgtattggacagcacagctgtagaagg

SEQ ID NO: 10718 - DNA, 201 bp, Homo sapiens
ggtgcaatagagtgatcatagttcactgtaacctcgaactccaggtctcaagggatcctcctgcctcagtctcctgagtaactggatctatacacatgtgyccccgtacctggctaatgtggcttcctttatgttcagcaaggaactctcagtgtttgtccatttccttaggaacatgagtgtttttggaaggcctttgat

SEQ ID NO: 10719 - DNA, 201 bp, Homo sapiens
actctcaaaattctcaaaacataaatacctgtatcccacttcatttttaagaagagtaaagaaattaagtcactttggtattggtatggagacagattttytaagttcaaatagtatactacagcatcttcagacattcatggaacattgtagtatgtgccatcattataaggagatacaaacataggtaaaaagatgtgg

SEQ ID NO: 10720 - DNA, 201 bp, Homo sapiens
tgcagtgctaaatgctgggcacatgagaaaatgacagtaacctactaaattcaagaacaccccctatgtacattaacagtgctgcatagcttcaggaagcmctaggatctgtagcttcaataatataaaaatttctagtttcttaaatcacaaatgttaagatgaccatattatcttctaagcacacaccagaatatttca

SEQ ID NO: 10721 - DNA, 201 bp, Homo sapiens
cattaacagtgctgcatagcttcaggaagccctaggatctgtagcttcaataatataaaaatttctagtttcttaaatcacaaatgttaagatgaccatawtatcttctaagcacacaccagaatatttcagatgctcatttcttttcaggcattggtgaagatatggtctgactgccccggagggcacccacacacagcg

SEQ ID NO: 10722 - DNA, 201 bp, Homo sapiens
tgctgcatagcttcaggaagccctaggatctgtagcttcaataatataaaaatttctagtttcttaaatcacaaatgttaagatgaccatattatcttctragcacacaccagaatatttcagatgctcatttcttttcaggcattggtgaagatatggtctgactgccccggagggcacccacacacagcgcttgactcc

SEQ ID NO: 10723 - DNA, 201 bp, Homo sapiens
tcagctaggaagactgactctgcctcacagagtccccgcgagactgggccctggctgccgacagcacgaccctcctgtatggcatgcctttattgtctccyttcctttgctctctcccttctccactctccagtcctactggcatttcctggggccacctctcgaataaactacttacactcaaatctttgtgtggaacac

SEQ ID NO: 10724 - DNA, 201 bp, Homo sapiens
gagaaagggaaggatggggttagagcttgtttttgagacagtagagtgattgctgtgaacagcacctctgcatttctgaattgcttctcagagttattttmtttttctcctttgcttttcgtaattgggtaggaaatagataaagacctgatgggtttatttcatcttagttgtttctactctttcctactcttatagttt

SEQ ID NO: 10725 - DNA, 201 bp, Homo sapiens
gagacagtagagtgattgctgtgaacagcacctctgcatttctgaattgcttctcagagttattttatttttctcctttgcttttcgtaattgggtaggamatagataaagacctgatgggtttatttcatcttagttgtttctactctttcctactcttatagttttgggggtgtcttgcaattaaagatgtagttcaga

SEQ ID NO: 10726 - DNA, 201 bp, Homo sapiens
tcaaaatttaaagcatttccccacctgaaaaacaatggccaaaaataatgcagatattacacatgaacatttgcagagaatccagtataaagacatttgtkaaaaataaagatggtaatacaagctctcctgtcctcctggctctgatgagtgaaatagtgcaaatcagcatccttttcttcattgcttaccccattcatg

SEQ ID NO: 10727 - DNA, 201 bp, Homo sapiens
agcatccttttcttcattgcttaccccattcatgcttgaaatgggatttcccagacatgccaggatgtttctttttaattctgtgcactcatgtttcactkcaaattagttatttcagctatggtcagatattccttccttttctatgtcttcaggttgtttggtgaatattgttcttttttgaatcaggagttggcaacc

SEQ ID NO: 10728 - DNA, 201 bp, Homo sapiens
ggtcagatattccttccttttctatgtcttcaggttgtttggtgaatattgttcttttttgaatcaggagttggcaacccactcatctgctctatcagttkttatctatttattctttgaagtggaaccaactattgcagaaaaccaaagacacagttttctagggaagagctagctggagctagatcttcatacatcctg

SEQ ID NO: 10729 - DNA, 201 bp, Homo sapiens
cacttctctatcaccagcaaatctcccttttcaacaaagatggagtagaccttaggctcagaggcttccaaaggcaacagagttcagcattgctctgtttwcattgtgttcatttttacaactaccttctctttttggcaagtgatcctggattcccatctatgacagtgatataaattgttcttttaaaacaatctttaa

SEQ ID NO: 10730 - DNA, 201 bp, Homo sapiens
gccatctgtcacagtaatgagttgtgcaaagcccaatgaaccttgtagaaacaacatcgtgcccagaaatagcctagacctcagagtgacatcagggggcrgggacctgatagatgtggtcctgcaaaaggaccgaaggttcttctttaacaattcaaattgaataggaaccatttttaatttgggggtaactccgtcttc

SEQ ID NO: 10731 - DNA, 201 bp, Homo sapiens
tagaggatttttgttgttgttgtttctttgaggttttctctgaaacttcagattaaggtagtccttgaagtggaggctattaagacctagtgttatctgtytcagggaggtgggggactaggtggactgatggaccccagaactccagattccttgcactggaagctggtgttttgtgtttggaagagcctctgccctctg

SEQ ID NO: 10732 - DNA, 201 bp, Homo sapiens
ttaagtggtgtcatactctgatccttcttccactgaacatcacattcttcatgagaatcacaccattgtcctctgtctgccctgcctgtgagacgggccaygctctatgcttgcccgcctcttccatcaggaacactcacacagtcattctcctcacataccccactctcatctgctgcccctcacacctgcccttctata

SEQ ID NO: 10733 - DNA, 201 bp, Homo sapiens
tgagaatcacaccattgtcctctgtctgccctgcctgtgagacgggccatgctctatgcttgcccgcctcttccatcaggaacactcacacagtcattctyctcacataccccactctcatctgctgcccctcacacctgcccttctatagaatgttctaccctttaatagggaagggtttcttcttcctatgaattttta

SEQ ID NO: 10734 - DNA, 201 bp, Homo sapiens
gaggacagagagagaatgtcccttggatccaatatggtggccattagtgaccttgttaaaaccagtaggaatggggtggcaagaaggagagtagaacagaytataagaaagaatgagttttgatgaaagtattggaattttgatgaccttttttattacaggtttgggagcaactactttcttcactctctaaactgcaaa

SEQ ID NO: 10735 - DNA, 201 bp, Homo sapiens
tctcttcctcagatgtctagtgtttattagacctccatagtatcttcaccaactgagaaggtgccccatcagcctgaggaactcccagggtcacccctctmcaaggattcttgacacttgcacttctacccactctgggtcagaagctattcttccctcattggattgccaccattcttgtaagggcaccttctctgcacc

SEQ ID NO: 10736 - DNA, 201 bp, Homo sapiens
actttataaattacccagttttgggtatgtctttatcagcagcatgagaacagactaatacaccaattgaggttcctccagagaattaacaaaatgtccakgcactctttcgttgttcccccatacccacagacctgccatccctggccctgcctggatgccggtacctggccactgctgctatattccatgcttttggac

SEQ ID NO: 10737 - DNA, 201 bp, Homo sapiens
tgttttacctttgaagagaaaaaagcatcagtggggttatgtgattttcatagatgaacaatttttgcaaatatgttaattgaagagtaattggtgctttyttgaccctcctgagcactgatgcttgccaaagggttatacatttcagactaatgatgatatccattactatatgtgcaattgcttataaactaatatata

SEQ ID NO: 10738 - DNA, 201 bp, Homo sapiens
ccattactatatgtgcaattgcttataaactaatatatagtcatattaaaatctctaatctgattgagaaattttcagaaacaaggtacactgattttctyaccacttatttcctgctctcatgacagaatttctggagttctttgaattcacctggtttttggagctctgtcaagtcaatatttataactgaactagttc

SEQ ID NO: 10739 - DNA, 201 bp, Homo sapiens
gaggcagggagaattgttcgaatccaggaggtggaagttgcagtgagccgaggttggcccactgcactccagcctgggcgacagagcaagactctgtcttaaaaaaaaaaaaaaaaaaaagaaggaagccaaacagaaagatacctgggtccaactgaagcaccagcctgcaccacccagagaagcacactttgtgagaac

SEQ ID NO: 10740 - DNA, 201 bp, Homo sapiens
aggcagggagaattgttcgaatccaggaggtggaagttgcagtgagccgaggttggcccactgcactccagcctgggcgacagagcaagactctgtcttaaaaaaaaaaaaaaaaaaaagaaggaagccaaacagaaagatacctgggtccaactgaagcaccagcctgcaccacccagagaagcacactttgtgagaacc

SEQ ID NO: 10741 - DNA, 201 bp, Homo sapiens
agagatctactcactttttttattcctctgcatattctgtttcttcctcgagtttcatgttcagctttttcctctccctccttgctcttactggtctctgygacctccatctttttcctcatttctcaggaaatgattgacttctgaagacagaaaatggagaaatgctagggaaaacaagagaggcaaagttttatagaa

SEQ ID NO: 10742 - DNA, 201 bp, Homo sapiens
aggattgtgaaagcattgctctctataggggcacgtgaaggacattcagccaaagggacagtttttccatagatagcttgaaaatcagggcagcaaggccmatatggagcaggtgaatatctgagccgagagttgaagaggacacagcccacagggtggaggttcagaaaacattgtgtgatggtgacagtaatttctggc

SEQ ID NO: 10743 - DNA, 201 bp, Homo sapiens
ggattgtgaaagcattgctctctataggggcacgtgaaggacattcagccaaagggacagtttttccatagatagcttgaaaatcagggcagcaaggcccwtatggagcaggtgaatatctgagccgagagttgaagaggacacagcccacagggtggaggttcagaaaacattgtgtgatggtgacagtaatttctggca

SEQ ID NO: 10744 - DNA, 201 bp, Homo sapiens
aaatattattaaccatgctgaccatgccacatttccccagcatctaggagtgttctcttcctagagcatgctttctgagttgttcacgtgaacatctacartgttgcaggagcctttttttttcctatgggcaaaatcatctattgaccaaaacaagacatttaagtcactcagattctgaaggtaccccaaaaccaggga

SEQ ID NO: 10745 - DNA, 201 bp, Homo sapiens
gagtccccagatacttgtttcagaggcccacagctggcacaccctctgccttaaagccctcggcaagggcctcctgtggctccgcccctcccttgctcagyagggcctgagaatgctcactgggtcaggtgtgattcagagctcatgacggtttccactttggccttatgggactttgaatggagcagggctttcattctg

SEQ ID NO: 10746 - DNA, 201 bp, Homo sapiens
aaactcccagccttggctcgtgatcttctttccttgtagctaatgtctctgagcccctctgctgtgcttgtatttaccttaaaaacagagccacggtggtsgcctgaggaaagactatcaattttcactgcttcccacccacgggggttgtgtggaccctactctgacttcccacagcacagaaaaaaaaggaaacaggtc

SEQ ID NO: 10747 - DNA, 201 bp, Homo sapiens
ctcccagccttggctcgtgatcttctttccttgtagctaatgtctctgagcccctctgctgtgcttgtatttaccttaaaaacagagccacggtggtggcytgaggaaagactatcaattttcactgcttcccacccacgggggttgtgtggaccctactctgacttcccacagcacagaaaaaaaaggaaacaggtcact

SEQ ID NO: 10748 - DNA, 201 bp, Homo sapiens
gaaacttggattttctgagaatgtattgcagaagaacaaaaaagccagttaaacttattcctttttttaaatagcaatctggaatgaaaatatcagatgakcataatataagagttagaagtcaagagagatggaaatgaaagcaagtcaagattcttgtcttggggggacaagtttatgtaccaattagctcaaggcttt

SEQ ID NO: 10749 - DNA, 201 bp, Homo sapiens
ctctccacacccttgggaccctcaaattgtttctccctctctaacagtgcccttggtgtctgtattgcctgtgatcatcatccatagagcataatgaggawgggcttactcgccctatgggccctgggctgtcaccctacctacggacccacgtgtggcacagttttctgacttggttcagaattcatttagaagtctctg

SEQ ID NO: 10750 - DNA, 201 bp, Homo sapiens
tctccacacccttgggaccctcaaattgtttctccctctctaacagtgcccttggtgtctgtattgcctgtgatcatcatccatagagcataatgaggatkggcttactcgccctatgggccctgggctgtcaccctacctacggacccacgtgtggcacagttttctgacttggttcagaattcatttagaagtctctgg

SEQ ID NO: 10751 - DNA, 201 bp, Homo sapiens
agccaagagctccagggctgaacagatgtgactgaaaatctttaccagccatgtgccctggggaactgagcctttcatttcccctttccttttctgtatawtggaggataacaagccttcactcacagggcgtgggtgtgtttctcatctccttgcagcacctagcacagtacctggcatctcatatgttcagggcatgtt

SEQ ID NO: 10752 - DNA, 201 bp, Homo sapiens
agaagggttagagttgacttttcaccattgtccccacccctacaggcttcaggcatgcagaatagcaagcagccaggcatcgccttctctaaagtgttaartaaactgtttaagatagtgtgggcgacctcgttctcagagaaaagaaagccttacttctggcatttgaagtcaccaacgtaagagctagctttctctccc

SEQ ID NO: 10753 - DNA, 201 bp, Homo sapiens
aaagaagggggagaaaattatgtaataatagaatagcatgtttcagagttaaagagggagactattttttaaaattggtgtaaacaacaatttacaatcamaataaaccaaaattatcatagacacatcattttgaaatgtcagtgcttcaaagacaaagggaaaattctaaatgtttcgagggcaaagaatgcaggaatg

SEQ ID NO: 10754 - DNA, 201 bp, Homo sapiens
ttccccatgttgcccaggctggtcttgaactcctaggctcaaggaatcctcctgcctcagcctccctaagtgctgggattacaggcatgagccaccgtgcrtggccttagctgcctatttgattccttcgtgacatctaacagaacgtgttatttcgtctacttgttattgtatttacctctctagaatggaagcccagtg

SEQ ID NO: 10755 - DNA, 201 bp, Homo sapiens
atcaatgtggcaaaactgcacttgtatcccatgaatatataccatgtttttaaaaatgttgcctttgggcagaggggataattctgcaaactgcagagccrtggagtaaaaaaaacacccaagatagcagaacttgtcatttctagtttttccacaggaccataaagcaaaattggtgccgggtttgtatttaaagggaaa

SEQ ID NO: 10756 - DNA, 201 bp, Homo sapiens
cctggccttggtgaccatggcactgtaagagaagcacagccagccccagcgtccttactctgactcagaggaaaatgcaacttgagctggattcattgaawtcttttttttcctggcctgaaggaaatgaagaaacatagccaaatattctaaaacaggattcaacaaacagcccataggccaaatccaccactgcctgtt

SEQ ID NO: 10757 - DNA, 201 bp, Homo sapiens
tcaaggctgcagtgagccatgttcacaccactgtactcaagccaggatgacagatcctgtctcaaaaaaacaaaaacaaaacaaaaaaatcttttcaattktattcacacaaagataaaatctgaataaaatatgcatgaggttaaaaaaaaagtccaactagactatcttagaaaaaaatgtaaaagtagacaaagacct

SEQ ID NO: 10758 - DNA, 201 bp, Homo sapiens
ttcacaccactgtactcaagccaggatgacagatcctgtctcaaaaaaacaaaaacaaaacaaaaaaatcttttcaattgtattcacacaaagataaaatytgaataaaatatgcatgaggttaaaaaaaaagtccaactagactatcttagaaaaaaatgtaaaagtagacaaagacctatatcttaaaaaaaatcaccg

SEQ ID NO: 10759 - DNA, 201 bp, Homo sapiens
aacatgtttctaatgtcacacaacctccagctctaggacaaataatgttggaccccaagcattctttttgcaaatatgagggctagactgaagcctcattkgaccacaggtcctatgggactggtggagatatagtgcccggagcctggcccttagggaacattcgagcagttagaaagcagaagtgacaggactttggag

SEQ ID NO: 10760 - DNA, 201 bp, Homo sapiens
aacaaaaacaaaacaaaaaaatcttttcaattgtattcacacaaagataaaatctgaataaaatatgcatgaggttaaaaaaaaagtccaactagactatyttagaaaaaaatgtaaaagtagacaaagacctatatcttaaaaaaaatcaccgacccagatagctatataggcagattctagtaggctttcaaggaatgg

SEQ ID NO: 10761 - DNA, 201 bp, Homo sapiens
acaattctatgtttaattattttgagaaatgttcatattgttttccaagcagccactcgattttacgttcctaccaacagtgcacaagggtttcaatttcyccacattcttgacaattcttgtcttctgtttttttgatagttgccatcctaatagtcatgaagtgggaaaaaatagtttttaaaaagtaacagatggata

SEQ ID NO: 10762 - DNA, 201 bp, Homo sapiens
ctcttctcctctttctccagggaagaatcggggcacgtcctgcggaaagacctgccgggaagaccgcgatgatgagtggatgggggtgagcctggcccgamagcccaaggctgatggccgtgtgttggtaagtccctcctgggggtgctgtgggaagggggtggcactctgagaatgaatgatctgttaggaaggctggat

SEQ ID NO: 10763 - DNA, 201 bp, Homo sapiens
aaaaaagtccaactagactatcttagaaaaaaatgtaaaagtagacaaagacctatatcttaaaaaaaatcaccgacccagatagctatataggcagattytagtaggctttcaaggaatggataattcttatgttaatataagctgttccagagagtagaaaaagataaagcaactcattccagaaaactaacatagccc

SEQ ID NO: 10764 - DNA, 201 bp, Homo sapiens
tgacaattctatgtttaattattttgagaaatgttcatattgttttccaagcagccactcgattttacgttcctaccaacagtgcacaagggtttcaattyctccacattcttgacaattcttgtcttctgtttttttgatagttgccatcctaatagtcatgaagtgggaaaaaatagtttttaaaaagtaacagatgga

SEQ ID NO: 10765 - DNA, 201 bp, Homo sapiens
atatatatacccacacacacacacacacacacacatatacccacatacatatatatgcatacatgcaatatatattttgccagcagaaacatcagaggctrcacactccaggaaaaacagactccagagactatgtctaggcaagtcactaaacaaacaaaacaaaaaaaaagtaacaactacccctcaatgggaggggta

SEQ ID NO: 10766 - DNA, 201 bp, Homo sapiens
cccaggaggcggaggttgcggtgagccgagatcacaccactgcacttcagcctgggcaaaagagtgagactctgtctcaatttaattaaaaaaaaaaaaaagcaaaacacctgaaatgaacaattcattagaggggctcaatagcatatttgagctgacacagaatcagtgaacttgaagctggattacagtacagatttt

SEQ ID NO: 10767 - DNA, 201 bp, Homo sapiens
attcgcagcccctctcctgtaaaactcatgaataatccactccttttttagcatttaatcaagaaataaccattaaaataggcaagcagcagcccttgggyctgtgttacctatggggtaaccaccttttatttctttactttcttaataaacttgctttcactttactctctgggcttcctcttgaattctttcctttag

SEQ ID NO: 10768 - DNA, 201 bp, Homo sapiens
ttcgcagcccctctcctgtaaaactcatgaataatccactccttttttagcatttaatcaagaaataaccattaaaataggcaagcagcagcccttggggktgtgttacctatggggtaaccaccttttatttctttactttcttaataaacttgctttcactttactctctgggcttcctcttgaattctttcctttagg

SEQ ID NO: 10769 - DNA, 201 bp, Homo sapiens
ttactatctgagaactttagtcctaataatttctctacaccaacttctagtcctaataatttatccgtataatgctcagaaacactccgagattctcagtaaaaaaaaaaaaaaaaaaaaaaaaaaatcaaggaaatcttaatggccaaagccataggtccaaaacccggcgttccctcccacccaactttccaggccatt

SEQ ID NO: 10770 - DNA, 201 bp, Homo sapiens
ctgaagctagcagggactgtccaaagccagagcccctcatattagcctagcttatgttgttgtgatcatcagactgtttctgttttttggatttttgtccwtaaataaacaccttggaaccactagctacacagaggggtaaatatcagaaaatccaaatttggtgcactaatgaacacggggtctcttttcacaaagcaa

SEQ ID NO: 10771 - DNA, 201 bp, Homo sapiens
atggtattgactgttatggcatgcatggaaacagacctggacatgaaaggataagcttcaagccaggtgcatgagggctcccagctgacttttgggtgcamacaggatgcaacagcttgccacagagtgatagaggaggccatgctaggagagaagggagaacaagcagggcaggcaccctggcccgactcttacacacag

SEQ ID NO: 10772 - DNA, 201 bp, Homo sapiens
ctttggcctgtgctttggattatttatttatttattttttgagacaagtctcgctctgtcacccaggctggagtgcagtgccacaatctcggctcactgcracctccacctcctgagttcaagtgatcctcccacctcatcctcccgagtagctgggactacaggtgtgcacctggctaatttttgtattttttggtagag

SEQ ID NO: 10773 - DNA, 201 bp, Homo sapiens
aaagaagtagagtaaggatttagtgagaagctggagaaaatattttcaaagacaactgtattctccagggaaacctgagatgaagaccaaggtgaggaagragccagcagagaaatcgagtccatgaggctgaggaggccactggatgtccagtcttcagctctctgaagcctgagacaggaaacagttgtctcccgagag

SEQ ID NO: 10774 - DNA, 201 bp, Homo sapiens
gatttagtgagaagctggagaaaatattttcaaagacaactgtattctccagggaaacctgagatgaagaccaaggtgaggaaggagccagcagagaaatygagtccatgaggctgaggaggccactggatgtccagtcttcagctctctgaagcctgagacaggaaacagttgtctcccgagagaaaggtttgaacctcc

SEQ ID NO: 10775 - DNA, 201 bp, Homo sapiens
acctcctttaactagggaggaataagagatgatggcttcttagatctgtttacatttgctggaaaaacttcttccagggaaataactagacagggctttgrccaactagcaggtgaagtctggagggaggtggaagagactgcttccaagctgggttccgatttgtctgattgaagcagccaagcttgtgtttgccagagg

SEQ ID NO: 10776 - DNA, 201 bp, Homo sapiens
aagcactggccacatctaaaatggttgaatagtgaaacctcatgttttcctttgtatttaaccacattcaaaggcttcttactcttgagagggaaaaagakcagcacccccaccgccccctgcccctactcttgaaataaaatgatggagaaagatttggagttaaaagaaaaccaagtcctcttgcgtgtggacaaagca

SEQ ID NO: 10777 - DNA, 201 bp, Homo sapiens
actgtgccgcagacctgcagcttcagggtaaactgctgctctccaggtatgtcggtgtttccttcagagcattgttctcaggctcctttttcttgaccccrggtcccaaacctgaatgtgcagatttccccactgaagaggataaacagagttgatgggttacagtaatattctgtggttttaaaaaaatgtatgttacaa

SEQ ID NO: 10778 - DNA, 201 bp, Homo sapiens
ttatatgacaattctatgtttaattattttgagaaatgttcatattgttttccaagcagccactcgattttacgttcctaccaacagtgcacaagggtttwaatttctccacattcttgacaattcttgtcttctgtttttttgatagttgccatcctaatagtcatgaagtgggaaaaaatagtttttaaaaagtaacag

SEQ ID NO: 10779 - DNA, 201 bp, Homo sapiens
gagaaaaagagggacaaaagaacaagacacatagaaaatagtcaccaaaatggcaatagtaaatctgtctctatatttactttaaatgtaaaaagactaamcttcccaataaaaagatacagcatgactgaatagattattaaaaaaaacaacaacaaccaggatcaaactgtatgctgtctacaagaagctcacttttag

SEQ ID NO: 10780 - DNA, 201 bp, Homo sapiens
agccaggcactgtgctaggcactggggactcgatggggaacaaaagagacatgatccgtgccctcccagagctggccgagggggcagcagtcagcaaggasgcaaacaagaattctatttccagttgaggttagtccccagggagtagcctgctttagattgggggtcgaggaatgtttctacaaggaagctgagactggc

SEQ ID NO: 10781 - DNA, 201 bp, Homo sapiens
agtgatagctggcatgagaaagccagggtgacagaggtgaggagggcacatgccagatctggcagcctgcatgtcaccagatggatttaggtcacatcctkttcttccgttctcacctctttcacctccatctccacctccacctctaccccttcacctctccatgcctcacaaagttggactgtcttgcctgtgagacag

SEQ ID NO: 10782 - DNA, 201 bp, Homo sapiens
agatggcaaagaaagagcaaatatattgaaatctcctggaaatttggctctctccttgaccccagtagtgtccaaaagaacacaggaatttcctctttttkcccaagacttccatgatattttccctgataatcaaggaagggagtgttggctgggacacttttttcttttggaaatgtggcaggggaatatgaattttca

SEQ ID NO: 10783 - DNA, 201 bp, Homo sapiens
gattgaggggaagactaacaagccctccatggaccgtagaagaaagccctaacccctctccaaatgctgctgctgatctcctggcaagcctccacagatargcccaggcccaggcacagccagcaagctctctggaaatatttgggttttgacatgccaagacttggccccagtaagggctgggtggggctttggctgttg

SEQ ID NO: 10784 - DNA, 201 bp, Homo sapiens
gctcttctcctctttctccagggaagaatcggggcacgtcctgcggaaagacctgccgggaagaccgcgatgatgagtggatgggggtgagcctggcccgrcagcccaaggctgatggccgtgtgttggtaagtccctcctgggggtgctgtgggaagggggtggcactctgagaatgaatgatctgttaggaaggctgga

SEQ ID NO: 10785 - DNA, 201 bp, Homo sapiens
cctttgtaggttatcctgagtctgcattattacagggtcttgaaatgaatggtgatacgtgaaagtatttgtcctaggattcattaatattattatatttwagtctttggtcaatatgaagaaatactcaatagtaaatcatagcaacatgatttaacatgagatataatttgaagggctctttaaggctgctaagcaacc

SEQ ID NO: 10786 - DNA, 201 bp, Homo sapiens
catcatcccagctactcgggaggctgaggcaggagaatcgcttgaacccggaaggcagaggttgtggtgagctgagattgcaccattgcactccagcctgrgcaataagagcaaaactctgtctcaaaaaaaaaaaaaaaaagctaaaaatatcacataccaaagctgcaaattatttctttaattttgagcgacgttaat

SEQ ID NO: 10787 - DNA, 201 bp, Homo sapiens
ctgtccccttcctttagacatggaccggttactcagctgcagggctgacaactgtaacaccctgtgatataaataaatgctgcctggctggcgtgcagccyccagagcggacgtctttcacaccccaccccgtcccctcctccttctctgccccagacgccctggagtccaaagtggttgggtgcactggcttcctttctg

SEQ ID NO: 10788 - DNA, 201 bp, Homo sapiens
atgtcctctttggggtaaaggggaggacagatgccaacagaaaaccctcagtacctgccttggtagaatacagccttgtcactgtgtcctgcatcctcctktccttgtttgggtgcctggtgaagtccttttgttcaaattctaatagccatggacctctgccagctcccagaggccctgagagataagcagccatgtcat

SEQ ID NO: 10789 - DNA, 201 bp, Homo sapiens
accagcctgaccaatatggtgaaaccccatctctactaaaaatccaaaaagcttagccaggcatggtggcgtgtgcctgtaattccagctactggggaggstgaggcaggagaattacttgaacccaggaggcagaggtttcagtgagccaagatcgcaccactgcactacagcctgggtaacagagcaagactccatctc

SEQ ID NO: 10790 - DNA, 201 bp, Homo sapiens
aataaagttttattggaacacatctatgcccattcccttatgtattatctatggctgcttttgctctacaacagcagagttgagtagtgtgactgagaccrtatagcctacaagcccaaaacatatactgtctcacccttttcagaaaaagttgccagccttgttctaaaagaagtagagtaaggatttagtgagaagctg

SEQ ID NO: 10791 - DNA, 201 bp, Homo sapiens
atccaagtgtgcatcttctgagattgatgggtttcatttctaagccacatttttagtcagcagtttaccagaatatatcatctacaatttgcctaatttakttgaaatgcagaacttcttgaatccatgttggtgctgaaatttgattggcacacaccaacgcccacttgcgtagcactgcagcagttgttttcctcattt

SEQ ID NO: 10792 - DNA, 201 bp, Homo sapiens
aactttcaacaattgaacccaaggaataattaccaaatcttcattaaagctcattgcctccttcccattgtttccctctcgtgacctctaaaatcgtccaracctgatgttgattgagatcatttcaggctagtgtgttttccccaaatgttgtcgttcaaataaagtaattgaggctgggtgcagtggctcatgcctata

SEQ ID NO: 10793 - DNA, 201 bp, Homo sapiens
gcctataatcccagtgctttggaaggccaagacaggcagattgcttgagctaaggagttcgagaccagcctgggtaatgtggcaaaactctatctctaccaaaaaaaaaaaaaagaaaccagcaaaaaacaaaacaaaacaaaaactagccatgtgtggtggcatgtgcctatagtcccagctactcaggaggctgaggaa

SEQ ID NO: 10794 - DNA, 201 bp, Homo sapiens
cctggtgcggtggctcatgcctgtaatcccagcactttgggaggccgaggcgggcggatcatgaggtcaggagatggagaccatcctggctaacacggtgaaccccatatctactaaaaatacaaaaaaaaattagccgggcatggtggcaggtgcctgttgtcccagctactcgggaggctgaggcaggagaatggcttg

SEQ ID NO: 10795 - DNA, 201 bp, Homo sapiens
ggaacagaaaaccaaatatcacatgatctcaatgataagtgggagctaaattatgagaactcatgaacacaaagaagggaacaacagacactggagtctayttgagaatggaggttggaaggagggagaggagtagaaaaaataactattgggtactaggcttagtacctgggtgatgaaataatctgtaccaaaaacctc

SEQ ID NO: 10796 - DNA, 201 bp, Homo sapiens
ctgtccagccttcagctacaaccagtgtgatatggtgatatataaagaagacttcatttttctaacagttcctcaatttaaacatcagaaagagtgctgtycttaaggaaatcatcaagaaagactaagcaccattgttttgtttctgatgttgctgtcactcagcaccgttgccattgctgtcagaagcaaaatcaaatc

SEQ ID NO: 10797 - DNA, 201 bp, Homo sapiens
ttcttattgctgctgtaacaaattactacaacatttgtggcttaaaacaacacaaatttgttatcttacagttctgaagaacagaagtccaaaatgggccycgctgggctaaaaccaaagtatcagggcctgtgttcttgccagaggcaccaggggaaaatccacttcttgcctttgccagcctctaagggctgcctgcat

SEQ ID NO: 10798 - DNA, 201 bp, Homo sapiens
ttcttctgcagaggcgagccgtgtagcatagcccctgagcacaggtctaagattgcaccaagataacacatctgtcacaagcttcatggcttatgaagggragagggtagtggtctttccaaagttaagttttactcacaatttctgaaggttcaatggaagagatgggagctttatctcagactgcaagcttcacttgat

SEQ ID NO: 10799 - DNA, 201 bp, Homo sapiens
ctaacagggagtgaagggctagaacttttattccaggtgaaagtactggatttttgaaagaactctagtgttagtccagaagagatataaaataaatatcrtaccattcattcctcctcctgcaaaaccaattgaaaatattggcctctctggcttgttgttttcttgctatggggcagtgattctaaagaactgacctga

SEQ ID NO: 10800 - DNA, 201 bp, Homo sapiens
ggcttgttgttttcttgctatggggcagtgattctaaagaactgacctgatttccaggaggtaaaattgtagggatgaatgataattttctaaggagatayatcaatgtctttgccatagggtaccattaggacattgacttcaatatggcatgaataccaacatctgttagaatattccaagttggtgccaggactcata

SEQ ID NO: 10801 - DNA, 201 bp, Homo sapiens
gccacagtctctgaccacaatgcaataaacttggaagctaaaaacaaaaggttaggcaaacaaccaaccaaaaacaaatccacttgggaaattttaaacamcattcaaattaactttttagaaaaaaaagaaatcaaagttgaagggatgaacaaattagaagtgaaagacagtgagcggttgttcatatcaaaaccaatg

SEQ ID NO: 10802 - DNA, 201 bp, Homo sapiens
attaactttttagaaaaaaaagaaatcaaagttgaagggatgaacaaattagaagtgaaagacagtgagcggttgttcatatcaaaaccaatgggatttaracaaaaccaacacagaggaaaatgccactacttacatgtggaaaatagggaagactgaaaataagtgaactaaattgacaacataaaaactagacaaggg

SEQ ID NO: 10803 - DNA, 201 bp, Homo sapiens
cacacacacacacacacacacacacacacacacacacactagtgtatgttttaacaagtaacatttctgtggcaggagagggctgaaggagaggggcaggytgccctgatccaagtgagcagatagtctccttattgtttcagggtttcctcccgcactacatgaatcccccaaggctaaaggtgaaccgtacagcggcct

SEQ ID NO: 10804 - DNA, 201 bp, Homo sapiens
ccgacccagatagctatataggcagattctagtaggctttcaaggaatggataattcttatgttaatataagctgttccagagagtagaaaaagataaagmaactcattccagaaaactaacatagccctggtacagaaaccagaaatggagagcgggcacactcacgcaaaaataggaagcagtgagccaaactcacttt

SEQ ID NO: 10805 - DNA, 201 bp, Homo sapiens
aataaattaaaataagtggaaattaaataaatgaataataaaatagatggaaattataagaaccaaggggaaattctggaattgaaagtaaaacatgggcygagcatggtggctcatgcctgtaatcccagcactttgggaggctgagttgggcatatcacctgaggtcaggagttggagaccagccaggccaacatggtg

SEQ ID NO: 10806 - DNA, 201 bp, Homo sapiens
acaggcatgaaccaccgcgcctggccgagtcagcacattctttatctatgtaggttgcattttctctccttggagagcctcagattcaatggtgagcttayggctggcatgccagcagtttcctaaaatgtaatatcatcactattattgttattatatgagggaaggtgaataggaactcatcagaaacctggaaaatgt

SEQ ID NO: 10807 - DNA, 201 bp, Homo sapiens
aaagcatttgatttgcagtttcctgaatgcgaggctccaagtgtagggaccgccacccaaggacgtttttctctgttgggcagactcaaagcactgagggragcttttcagggcccaccatacatgagcaacagatagctctccctacagataccatatttcagggacagccccttccctcctgagcagacactggctgag

SEQ ID NO: 10808 - DNA, 201 bp, Homo sapiens
cagcttcgactttctagatggtgagaggatggggatgctcagagggacagtgaaggcactgaggcagtaactgtggcaaccatagaagaggctggccacgwgctcatagcggccttcctcctgagacacccgggaaggctgagtctacctcacaggtgtgcctgataaaatttttttgggcagtgttttccttggcttcca

SEQ ID NO: 10809 - DNA, 201 bp, Homo sapiens
tctggttgaggctagattccccctgtgcccacagccttggtccactcctgccctgtccctgccccagcctggttccctggctcgccaacagatccctggawctctgccacaagctctggcttccagggaagggagcctatcctgagatgcggtagaacctcatgttttatttatctgctcttagatctcctgtccgggcag

SEQ ID NO: 10810 - DNA, 201 bp, Homo sapiens
gccactcaatcctgccctaaccttcctctcctgtctttctcacagactgtttttgaaaggaattgccgttcagaggactgtgccgcagacctgcagcttcrgggtaaactgctgctctccaggtatgtcggtgtttccttcagagcattgttctcaggctcctttttcttgaccccaggtcccaaacctgaatgtgcagat

SEQ ID NO: 10811 - DNA, 201 bp, Homo sapiens
tctgtccccttcctttagacatggaccggttactcagctgcagggctgacaactgtaacaccctgtgatataaataaatgctgcctggctggcgtgcagcytccagagcggacgtctttcacaccccaccccgtcccctcctccttctctgccccagacgccctggagtccaaagtggttgggtgcactggcttcctttct

SEQ ID NO: 10812 - DNA, 201 bp, Homo sapiens
acattcatccctccttcagagttatagcattagatttacctccagatctttttatttaatatgttttttttaaagcatattgctaaactacacatttgtgytctcccctttcccatagggctacctcacctcccaggagaaaagattcaaaatctaggagattcataatttcaatatattccattgcttgtgactatttat

SEQ ID NO: 10813 - DNA, 201 bp, Homo sapiens
atgaggcaattcatgtagaaggtctttgtaaactgtgaaatgctctacgactgtcagccaggattagtagttaatgcacgtatttgtttattgtttcagcrgagggtgcaggacgtcatcagcccgatcgtgtttgaagcagcctacagcctcagtgagcatgtgactggagaggaggagagggaactgccgcctctgaca

SEQ ID NO: 10814 - DNA, 201 bp, Homo sapiens
aaaaggagaagggccagatgcccagggtctactttgtgctgctgggagagaccatgggtcaggtcacagagaagctgcagctgacttacatggaggagacrtgtcgtcactatgtggcccatgtgaaggtcagtcctctcctcctttttatcctcaaactttgatctctgcagatgttcacttggagctggtggaaactat

SEQ ID NO: 10815 - DNA, 201 bp, Homo sapiens
agccttcatgtccgacagcgtggttcttctcaggtgagaggccccactcttgctccttgaattgtgctgttcagggtgagggatggagccattcaccattyatgggctctttcctctgtcctgttccttgtaggctggaggtgcttagtaagtggaaatgctaccttattttctcattctaattattctctatcccagagt

SEQ ID NO: 10816 - DNA, 201 bp, Homo sapiens
tccttcccgtggttcctggcaacattgtatttctattaagagtttgactactttagatcttatgtgagtggagtgtggtgttcgtccttttgtgacgaacktacttcatttagcataatgtcctcaaggttcatcatgttgtagcatgtgaccggatctccttcctttttaaaggcagaataatatttcattgtatgaatt

SEQ ID NO: 10817 - DNA, 201 bp, Homo sapiens; identical to SEQ ID NO: 1603

SEQ ID NO: 10818 - DNA, 201 bp, Homo sapiens
aaacagtatagtacatagtgatggagttgatttacattttgtggaaagttccttatttcctcatagggctgtggaccaccctttgaaagcagccagcagamcatcactcctcaacccaagtctggctcttctcctctttctccagggaagaatcggggcacgtcctgcggaaagacctgccgggaagaccgcgatgatgag

SEQ ID NO: 10819 - DNA, 201 bp, Homo sapiens
tcttgccttgtcattccagggacagagattcctgttctctcactttaaaaataacatatttccttgaatccccaaaacagttaaaaaataaaaagggttayggaggggatgacctctggcacagaaaagcagtaaaataggtgtattgacactgaagtcatatttctataatgaaatacatacctatctatttacttattg

SEQ ID NO: 10820 - DNA, 201 bp, Homo sapiens
atctctgcacttgtttggacctgctatccatgcattcaaaaaaatgggaggttttggtcaagtaatgtacaacatgcagcaagaacaagtgtggtgggaakagcctggcaccagagattaagggagtcctagattcagctgtttgatgggtggccctctggcctggagcaagtcttgttcccttttggggcctcagttccc

SEQ ID NO: 10821 - DNA, 201 bp, Homo sapiens
cactttgggaggctgagttgggcatatcacctgaggtcaggagttggagaccagccaggccaacatggtgaaaccctgtctgtactaaaaatacacaaaamttagccaggtgtcgtgggcaggtgcctgtaatcccagctactcgggaggctgaggcaggagaatcgcttgaacccgggaagcagagattgcagtaagccg

SEQ ID NO: 10822 - DNA, 201 bp, Homo sapiens
cctatggggtaaccaccttttatttctttactttcttaataaacttgctttcactttactctctgggcttcctcttgaattctttcctttaggaagccaamacccaccggccctcccaggccaaaccccaatttgggggttcatcctgccacaactgtacagtgtggggtcaaggggaacccttggtctttttcactgaaa

SEQ ID NO: 10823 - DNA, 201 bp, Homo sapiens
acggagtggtcagggacagtttcacggagacctttattcagaagttgcagggaccaaagctatcttacgggagtttgcaatgagaatttctttgcccatgragtccttgccaagtctatgtcttttctgagaattctctcccccttgatttcagccctgtttgatttctgacctttgaaatgccagcccccatgctgccgt

SEQ ID NO: 10824 - DNA, 201 bp, Homo sapiens
tcattttcctcattcagacaagaattgcttgtaaggatgttcttaagtgtgctttcaaaaccatggagtataaggcttattttactccttaagtcttcctrtttcctagtcacatctcatttgcatgttatatgccatctcatcaattattgggggacctaagatccacattttctattatttggccctgttgatgctaca

SEQ ID NO: 10825 - DNA, 201 bp, Homo sapiens
caaataaaaattcaaaactgagcagcaaatcctgtgcctcttcatccaacccctcctcatcatgaatcattatcactcaggaagtaaggacctggtttacyatctgagaactttagtcctaataatttctctacaccaacttctagtcctaataatttatccgtataatgctcagaaacactccgagattctcagtaaaaa

SEQ ID NO: 10826 - DNA, 201 bp, Homo sapiens
ccctgttgatgctacaacttctgcctttcagcttttcagccattgttctccacttcaaaatggacaaggaggaaaggtgaattggggttctaccactcctscctctacaataagaggctccagcatcatgattcattcttgagaatgactcctctgacaggcctcttttcatttgcaggtgggccaagagaagggaaactg

SEQ ID NO: 10827 - DNA, 201 bp, Homo sapiens
ttctctacaccaacttctagtcctaataatttatccgtataatgctcagaaacactccgagattctcagtaaaaaaaaaaaaaaaaaaaaaaaaaaatcarggaaatcttaatggccaaagccataggtccaaaacccggcgttccctcccacccaactttccaggccattttctccaatagcccctcatccctgaccttg

SEQ ID NO: 10828 - DNA, 201 bp, Homo sapiens
gcacacacgagtagcatgaaattagccatgttcatattaaggagcaatctaagatcattattgctgtttctctggccttatattaaatagtgtcattgcarttgaaaaattagagtaaatgaacagagcctgtgagcatccaccctttgtaggttatcctgagtctgcattattacagggtcttgaaatgaatggtgatac

SEQ ID NO: 10829 - DNA, 201 bp, Homo sapiens
gttacagtgagtgaacctgatttgttccagatgtcctaagatttagtgattccggaaactactcctaaagtcaaggctgatgaggatttgaattcctctgytagctgggaaccagcagttcttttcacagttaaacagatgaggcaggaggagggagactgagctgccttgagggacagggaggggcccactgactggctt

SEQ ID NO: 10830 - DNA, 201 bp, Homo sapiens
ggtcaatatgaagaaatactcaatagtaaatcatagcaacatgatttaacatgagatataatttgaagggctctttaaggctgctaagcaaccatgaatcrtggtttgcatttttctagatggataatatgaagctatcttatttatctttctagaactagacaccttaggtcaggctaatcaaccagctggtatcatttc

SEQ ID NO: 10831 - DNA, 201 bp, Homo sapiens
atttggcgtagattattaaagaacagttacctgtgtcatgaaggagaggcccccagactggcactttgaatgcaaattcttctgtgacaaatccaggggaytttggaataactctcagatatggcagtagacttaactgtaaaagctcccagcccacagaggtgagcagaggctgaggagtaaacaccataccaacattct

SEQ ID NO: 10832 - DNA, 201 bp, Homo sapiens
attcacacttcaaacccactacttcatgaagcaaggtcttgccagatcccctagagtgaacaggggattctttatcctctcacaggcctggcaccgtggtrgcttctgaccatgacagctcctttcactgaggctgacccagactctgccaccaagtgatggccactccttgggctcccacagccagggttcctgacagct

SEQ ID NO: 10833 - DNA, 201 bp, Homo sapiens
gagtaaacaccataccaacattctgggacaaaatagcctgaatgctgttgtaccttggaaatgcaatagcagctgccttcctaggtggggaagctgagagyagcctcttacaggagtgcatgccctatagacagaggctcatgaacttgtgcttgctgacatgtatatcttcttcagttggtccctagtgagtctacccaa

SEQ ID NO: 10834 - DNA, 201 bp, Homo sapiens
cacagtttcccagagctccccagcaagattaagttccaggtgctcagggagctgactggcttgatgttgctgcctttgctggttgcctgtccttctgtgtytcactctaccccttccctactggtgttttatggaaccacctctggaataaacaacttgctttcaaacctgtctccagctctgcatctgggggcgcctgca

SEQ ID NO: 10835 - DNA, 201 bp, Homo sapiens
ccatggacactttgggttgtgtctacccttggctactgtgaatagtgctgctatgaacatgggggaacaaatgtctctttgagttcctgctttcagttcaytgggtaataaacccaaaagtataatttttgggttatatgacaattctatgtttaattattttgagaaatgttcatattgttttccaagcagccactcgat

SEQ ID NO: 10836 - DNA, 201 bp, Homo sapiens
gagcaatatattttcagcaggctatatatatgctgtaagataagctttatagaagcagtacactttgtatcttatgttgactactaataatgattttcatwtaaaagcacagcaaagagatccatgtacaaagtaatataacccacttaaaagactgcacaagcaaattaaaataaatggggaaatttctcagggaataaa

SEQ ID NO: 10837 - DNA, 201 bp, Homo sapiens
attctagtaggggatagacagtcctcaaccaaaaagccccacaaacaaatgcataaccacaacttcgataagtgccatgaagggttgatggggcacatggkgggtggggggctcataatgggaggatttatttcacctaggcagggagatcaggaaggatcccctggggacatgatagtcagggggctggagaatgtgggt

SEQ ID NO: 10838 - DNA, 201 bp, Homo sapiens
tgtgaggtttcagaaggatgacatatttgacaacacccaatatcatgctggcacatcacattttcatttcatttctaaaaataactttggaagcagagatrtgctgttttagtcaaagacttttttagctttggagaaagaatgaaaccccagctttgagactcctctaaaaaaaatctgagttcacattctgccctggaa

SEQ ID NO: 10839 - DNA, 201 bp, Homo sapiens
aagaatgcagatgtgagccataagcagcctacacacacatcagccaggagatgggccacagttcacagtgcccactacacatcaaaacacaccctctgggraatgctgccaagaggttttgatttaaaacacgaaccttctttcacaacacaagtgccccaggagagtggcctgtaagtcccactggccattgatacttgg

SEQ ID NO: 10840 - DNA, 201 bp, Homo sapiens
gggcccccatgttttctgagatcagggatgagggacaggtcactgtctacatcaacagaggaaatgtgagtacaatactgggcaatgtgcggatgggtgtsggggagggacatttgtccagccagcagtggccgagcacccctctgggccggcactgggggcaatgttacccagaggagatgaaaatatgtgatatctgtc

SEQ ID NO: 10841 - DNA, 201 bp, Homo sapiens
agagggtctgccccctttctgctgatgtgccgccccacctatcttgagattcccccaaaacacgaggatgtcaggatgctgagtggccaaaaataacaacygttcattatacaaacccttatatccttaattacgtcttccattaactggttatccgattaaaactggccactcacatggatttattttgttcaaaggtcg

SEQ ID NO: 10842 - DNA, 201 bp, Homo sapiens
tactctgaggtgtggagaaggctagagaagagtagaagataaggtgaagaggcagggcaggaagctgatggcttctgccttgactgggaagtacagacctrggtcccctcctgacagggaagtggggagaagaggttggcctggggacacagtaaagcatggtattatggtaacttctacataattggtctctagttctag

SEQ ID NO: 10843 - DNA, 201 bp, Homo sapiens
cccaaaagtataatttttgggttatatgacaattctatgtttaattattttgagaaatgttcatattgttttccaagcagccactcgattttacgttcctmccaacagtgcacaagggtttcaatttctccacattcttgacaattcttgtcttctgtttttttgatagttgccatcctaatagtcatgaagtgggaaaaa

SEQ ID NO: 10844 - DNA, 201 bp, Homo sapiens
taaacccaaaagtataatttttgggttatatgacaattctatgtttaattattttgagaaatgttcatattgttttccaagcagccactcgattttacgtycctaccaacagtgcacaagggtttcaatttctccacattcttgacaattcttgtcttctgtttttttgatagttgccatcctaatagtcatgaagtggga

SEQ ID NO: 10845 - DNA, 201 bp, Homo sapiens
tgctggctccacgcacagctggcatacactgacatggctgtggtttgcttctctctccttccttgcccctagagtataagaagaagtacggagaggaacayggctcctgccaggctgggatagcgggcttcttcaccgaggtgggtgtctgctgtctgggcatttctgttctcttgtgggtgttcatttccttgcttatat

SEQ ID NO: 10846 - DNA, 201 bp, Homo sapiens
cagtctcccctgcccccaggagtgtggctggcccactctgccctcaggaagtttgcttccctcagattagctccggggcaggtcctgtgtcagggtgatargcacacggtgctctcccattgaaggtcacaggaagcgatcagagaggcctctgaaagatttctgggcttttcttcatccaaaaacaatacttggagttga

SEQ ID NO: 10847 - DNA, 201 bp, Homo sapiens
actttgtctctgaatttggatactctagacacctcatgtaagttgaatcatacagtatgtgcccttttgtgactggcttgtttcacttagcataatgtcckcaaggtgtatccatattgtagcatctgtcagaattttcttcctttttaaaggaaggaatatttaataatattccattgtatgtgtgtgccccacatttat

SEQ ID NO: 10848 - DNA, 201 bp, Homo sapiens
gggaacaaatgtctctttgagttcctgctttcagttcactgggtaataaacccaaaagtataatttttgggttatatgacaattctatgtttaattatttkgagaaatgttcatattgttttccaagcagccactcgattttacgttcctaccaacagtgcacaagggtttcaatttctccacattcttgacaattcttgt

SEQ ID NO: 10849 - DNA, 201 bp, Homo sapiens
ttcccgtggttcctggcaacattgtatttctattaagagtttgactactttagatcttatgtgagtggagtgtggtgttcgtccttttgtgacgaacttayttcatttagcataatgtcctcaaggttcatcatgttgtagcatgtgaccggatctccttcctttttaaaggcagaataatatttcattgtatgaattcac

SEQ ID NO: 10850 - DNA, 201 bp, Homo sapiens
gctgtggtttgcttctctctccttccttgcccctagagtataagaagaagtacggagaggaacacggctcctgccaggctgggatagcgggcttcttcacygaggtgggtgtctgctgtctgggcatttctgttctcttgtgggtgttcatttccttgcttatatgattttggcaacccttagaggtgggacttctggagt

SEQ ID NO: 10851 - DNA, 201 bp, Homo sapiens
atccgttctgaataccatgacttggcaagtgaagcattcccatgccttccagactcctggctctgcctgtgtgaaacgtactccatttccagagccagctrccgagctttttcccctgggctgactttccaccaccctgacctgcgattcctctctgctaaccctcctctcaccgttctccccagggtgggctgtgggcct

SEQ ID NO: 10852 - DNA, 201 bp, Homo sapiens
aaaagagctccttcagctgcaaagaacacagaggtcaggaggaataaagctaatgagagagcagagagtcctttgtctccccaggtgttattcccagaggscaactagggaaaatggagatggggtataaacatctgaattcactgttaaacactccatgaactgttgataattccctagaagcagcatattcctgaggta

SEQ ID NO: 10853 - DNA, 201 bp, Homo sapiens
atttcagggtcctctgtgcttatttgtttctgaattgacccagtgaggtagtcatctaccctgtccagcatcttgctagcctggacatactttccacagtkaacctatctctcattcctgcaagtctgtcagtggcacagatgtggactttctttagtgaaaagcatcttggaacctttactgacatttttagatttaagc

SEQ ID NO: 10854 - DNA, 201 bp, Homo sapiens
gccaggctgggatagcgggcttcttcaccgaggtgggtgtctgctgtctgggcatttctgttctcttgtgggtgttcatttccttgcttatatgattttgrcaacccttagaggtgggacttctggagtcccagatacttgagcctcgagggagcagattctggtcctcacaccagaggaggctatttctacctgccagga

SEQ ID NO: 10855 - DNA, 201 bp, Homo sapiens
cctgaggggctcaggggaggaattcccactgatttgcaagaaaggaattggccactgtgtactcgtttgccactcaatcctgccctaaccttcctctcctrtctttctcacagactgtttttgaaaggaattgccgttcagaggactgtgccgcagacctgcagcttcagggtaaactgctgctctccaggtatgtcggtg

SEQ ID NO: 10856 - DNA, 201 bp, Homo sapiens
cctgttactgctttcatcatcacctctcactctcattttctaataagcctgaaaagcatgatggagtcataaatcatgtctgtaaaatgaagatgtgtagrctttggtaagatctcacatgtgatgttaataacaataccttacatatctggcctcacacttcacttaaactgtcccatttaatccctgaagtggtctcat

SEQ ID NO: 10857 - DNA, 201 bp, Homo sapiens
taaggactacaatccttagtttcctacctactcaaggttatgttttgtagatgctaacagtgtacattctagagaaaatcagctggagggaggaaaatggyacagttctaaaattctttaagcctcgtttaattttttacctgttactgctttcatcatcacctctcactctcattttctaataagcctgaaaagcatgat

SEQ ID NO: 10858 - DNA, 201 bp, Homo sapiens
gtctttccctttgtttcttcgagggagcttgagtggcaggattattattaagagtactttttaagttcccaacaattagataggaaatgaactgaatgggrgttcacattttatcttcaggaaaatgaccgcaagaaggccttactgtggggtggttaagagcatggcctggctttggaatgcctggattgggaatccttg

SEQ ID NO: 10859 - DNA, 201 bp, Homo sapiens
tttcagcggaatccaaaccatgtgacatggaccattatcattcagctgccacctcctggatcctgccctgtaaacatgcccaggggtctctgaggatggaygcgtgtcattcacacaccaagtgtgttagagacaacagaaaaccttgtttttttcctgtgttctggtgaaagtcttttctgtctttccctttgtttcttc

SEQ ID NO: 10860 - DNA, 201 bp, Homo sapiens
atgtatttagggggtacaagtgcagacttcttatatgaatatattgtatcgtgatgaaatctgggcttttagtgtacccaatagtgaacatggtacccaayaggtaacttttcaaccctcacccccctcccacattttggagtctccaatgtctgttaattccactctttatgcctatgggtacccattacttagctccca

SEQ ID NO: 10861 - DNA, 201 bp, Homo sapiens
ctaccttcctgtttctttgagggtttaaccaaaggtggcatttaagtgtaagctccttgcatgacaggcaagctgggtagatgtaggtggggacaccacargacaccttgcctgtggagcccctcctgccccacaggtagaatgttgaatgcactagttctctgctatctgtttccacgacagaagccaggctgcccttct

SEQ ID NO: 10862 - DNA, 201 bp, Homo sapiens
tggtgtgtcttgcactatagtttcattcagctcatggggtctgaatttcctttttatgtttcattttttcaagagttacaattgggtgtttagtctctagrgtcagtgggatggatatgctttttgccagacttttcacatttaatatgtaactgtttgtttaggttgagacattttgatcctttttgccgttgtgctatt

SEQ ID NO: 10863 - DNA, 201 bp, Homo sapiens
tgtagatcagatgccttctgtggaatgccaggcctagatttgctctacacaattaaacagctttatttatcctcaactctttgtgaacatgtcaatatcartatccaaatatctggctctaactgcttggaaaccacagcacacatcttgcgtgtgttgattactggcaaactccatcatttcccaccatccaccatgatc

SEQ ID NO: 10864 - DNA, 201 bp, Homo sapiens
agaccccagcaattgttgcctgtcgtgttttcattaattgttgcctctctaatggatcattcccattagcttgcaaatatgctatgataattcccatcttrataaaaaagagcaaaaaaactccctggagcccacttcccccaccagctaccatccaatttctctgttctcctttagagaaaaactcctccaaatagttgt

SEQ ID NO: 10865 - DNA, 201 bp, Homo sapiens
taattattcccattgttctggcctgtctgccatattggacaaaattgatccttcctttcttgagactgtcctctgtgaccatgtggatgactcctctctcrattttcctcttccttctctagccatgcttttccagtcttgttggctgacacctcctcatcttcaactcctaaatgtgagtcctcatttctatctatactc

SEQ ID NO: 10866 - DNA, 201 bp, Homo sapiens
gggttggggtagcctaactcttaagcctaaggtaggggttggggtagcctaactcttaagcctaactcttaagctatttgcttttggccaagaaccttccrtaatgtgccataaaaatattttataatttcctgcgggtgctgggaagcactgttcattctgtctcttcatctgtacaccctgcatttgtacctccagtca

SEQ ID NO: 10867 - DNA, 201 bp, Homo sapiens
aattcctcttattctgtatttaggttattcccagtttctatattaagtaaaattgtgagaaatgtcttttatggagattagtaccagtaaatgatcatatycttagctctataacttttcagagggtgtgaagtcacatttttgaccacctactatacaccagggactttttgcatctcgtccgcatcccctcttcactgc

SEQ ID NO: 10868 - DNA, 201 bp, Homo sapiens
cataggctattacctcttccagtttggatttccccaaaagcataccctgatacaatgatacaggtacaggtagtttatttgggggtgggcgatctcagtgktgagtttagacaggaaagagaggaaagacaggaaggcgtgcatttataagcaggttactgccgtaggcaccttgggcttgtcttcctcagaccctccaag

SEQ ID NO: 10869 - DNA, 201 bp, Homo sapiens
gcaactcaggcagaaagatgtgggaagcctttgacctggaggggcatggcttcaggtgaccagaactgtggctggttctggggaatgtgagcgaggtgctrgccacatctgctatagtaaccatgagagcttcctgaaaagtagttatttactgataaactactcaagaatacaaaagtagttgaataaaaagtgtgccac

SEQ ID NO: 10870 - DNA, 201 bp, Homo sapiens
catttttgtttaatgaactactatgtccttaaatctcagcttagggagcccgtgtgcaggctcctcacctggctgcacaggatctgtccacagaatagatrgatggatggatggatgggtgggtgggtggctgaatggttagataggtaggtaggtagatgactggctgggtgactgggtggatgagtgggtggatagtta

SEQ ID NO: 10871 - DNA, 201 bp, Homo sapiens
taatgtatgtaaggtatataaaatgatgttttgatgtacatttacatagtgaaatggctactatggtcaagcaaatgaacatatccattgcctaacatagkttttttttttttttgatagtaagagcacttggaatctactttattgtcaaatttccagtatataatacaatattgtcaacatagtcatcacgctatacat

SEQ ID NO: 10872 - DNA, 201 bp, Homo sapiens
tgggcgcaccaaaggcagattccaaatacagcccttcagtgaagtctcctggggctgtgtttaagtgccgtgttcacaccaaccctgaccggagatgcacmgaactggacatggctcgaggtgggtgaccattactgctgtggtggaaatgggttctgtacccttataccttgctcttcttcttcccaggatggcctgatc

SEQ ID NO: 10873 - DNA, 201 bp, Homo sapiens
tggctgaatggttagataggtaggtaggtagatgactggctgggtgactgggtggatgagtgggtggatagttatgtggataggtgagtggggatggctgrctgggtggatgagtgggtatgtgggtggatgggcaggtgagtggatgactggctgggtggatgggtgtgtgagtggatggctggctgggtggatgagtgg

SEQ ID NO: 10874 - DNA, 201 bp, Homo sapiens
gggtgtttctcctcaactccactcactttaagcagcatctctggcagtagctacttctcctccaccgtcttagctccctcttggcagtcccagtcccagtyacaatcacaacacctcctccctcagtccctccaactctaagggtgtcagcagttgcttctgatctcagcttttccttatcttaccttgtttgctcttctg

SEQ ID NO: 10875 - DNA, 201 bp, Homo sapiens
ggacgcaggcgtggtgagtagcctcccaagcatgctggacaaggaggctctaggaagtcaaagacaatgtgcctgggaaggccacaggtacaagccattgrccactgtagctggccatgggaaaaatgggagcacatcattttgatctctttgccattgaattccagcaacctttgaaacctttgtcacaaggaaccctag

SEQ ID NO: 10876 - DNA, 201 bp, Homo sapiens
gtggaatgagtcagtttatttggctggtgaaggaggaacctaggttggagcagggatgagagggtagaagagagcaaaggaggaggggcaggagagaaccyggtaggatggaaagaggctgcccatgttgaacaaagggccagtaacatttctggtggcagggagatgtcaggacattttagaaatctgatgcctgctgtt

SEQ ID NO: 10877 - DNA, 201 bp, Homo sapiens
aagatgagaagacactactattcatgcctggtcagaaagcacagactggctatgtaacagccccagcagggaagcactgggtgcaagacactggattaaaytgagacaaatgtttgcttctcagaatggcagtgaccatgggtgcttgactgtgggtggggatgacagatttcatgctttcctctttcagaatcatgtctc

SEQ ID NO: 10878 - DNA, 201 bp, Homo sapiens
atgactaataaacacgttttcacgtgcccctcagccattgggacacttattttagcctgttcaagtcttctgcactcccttcttctggggatacttttctyctcctgtgctgtggtacactcctcaccccaattcttctcactcgccactccttttctgcttcctttgttggggtctccttatcttgccaacctttcaaca

SEQ ID NO: 10879 - DNA, 201 bp, Homo sapiens
ctgggagacaggctgggcgcttcctgcggcagtcggcagtgaggaagtggtggagaaacgcagatgtccatttcaaatcacaaggcggcttcagtattccrccgcggggctcagctttcacgtatatgaaaagcttcatttgtgtattcactgcgtttggaaggaaggctatgttttgctttagaaatgtcaacagagctg

SEQ ID NO: 10880 - DNA, 201 bp, Homo sapiens
ctatttggctattgtgtatcattctttaaatatctggctgggttcaacttgctaagattttatttagtatatttgtatctatagtcataaacaagatttcyctgtaattttctttcttgtcaggttttggtgtcagatttctgctagtgtttgcaaaaataagcagaaagcttgcacttttctctgttctctgaagacata

SEQ ID NO: 10881 - DNA, 201 bp, Homo sapiens
  misc_feature (1)...(201): n = A,T,C or G, or insertion/deletion polymorphism (see Tables 1-2)
ttcctgaaatgtgtccgcaggccaggctggaggactatgcctctgcatatgtacctgtcctgtttgtattcttcaaaaatggtgctgcagacagttttatngcctgtgccatacttgccactgtccatagagccctggtgacagcactggtggctgtaagccactctgatgtttcctttatcctcaacccagatggctgct

SEQ ID NO: 10882 - DNA, 201 bp, Homo sapiens
tttctctgtaattttctttcttgtcaggttttggtgtcagatttctgctagtgtttgcaaaaataagcagaaagcttgcacttttctctgttctctgaagrcatacaaccaacatagttgcaacagcaggcagtgagagctgacccttactgagagcttgtttatgtgccagaggctgctcaacactttttattaacgtgt

SEQ ID NO: 10883 - DNA, 201 bp, Homo sapiens
aaatatttcattatctgtggaaggaaaacatttttggtatgcatgtcaagtgctcagataacatatttatgtatcgctttttcactaaagagaatctgacsgcatctggaaattcttttgtgtcactgcctctctcagactacttcccatctgtatcgctttaactccaataaaaggccatccccatgcctgggaaatggg

SEQ ID NO: 10884 - DNA, 201 bp, Homo sapiens
tgcaaaaataagcagaaagcttgcacttttctctgttctctgaagacatacaaccaacatagttgcaacagcaggcagtgagagctgacccttactgagascttgtttatgtgccagaggctgctcaacactttttattaacgtgtttaaccctcacagcaacccagtgaggtatgtgcagttaccatctcagttttcctg

SEQ ID NO: 10885 - DNA, 201 bp, Homo sapiens
ggggaacaaatgtctctttgagttcctgctttcagttcactgggtaataaacccaaaagtataatttttgggttatatgacaattctatgtttaattattktgagaaatgttcatattgttttccaagcagccactcgattttacgttcctaccaacagtgcacaagggtttcaatttctccacattcttgacaattcttg

SEQ ID NO: 10886 - DNA, 201 bp, Homo sapiens
tggccctaaactttcttttctttttcttttgcattttcttctttctgcacatgtatgaatgcaagctgaatagtcaagttcctgaaatgggtcaggattakgtttgccttaaatctttttctcaacagaagccaaacacttaaaagaagggagatggctgattgaattctggaacaaaagttacattcctaggctcttggt

SEQ ID NO: 10887 - DNA, 201 bp, Homo sapiens
tggctactgtgaatagtgctgctatgaacatgggggaacaaatgtctctttgagttcctgctttcagttcactgggtaataaacccaaaagtataattttygggttatatgacaattctatgtttaattattttgagaaatgttcatattgttttccaagcagccactcgattttacgttcctaccaacagtgcacaaggg

SEQ ID NO: 10888 - DNA, 201 bp, Homo sapiens
agaatgaagattaattttgatacacataagaatgagaactattctagaactctcaaaaagggcaaacgagtaatagtgtctgtgtatgttcatttgacacrtgcttattatgtatccacatgtgccaggcactggagatatagtcctgccctcatggagcttctaaagggagttacaaagagtttctactattttggcctt

SEQ ID NO: 10889 - DNA, 201 bp, Homo sapiens
ggcagtaggggagatcatcacctctgtaatggtataatatgaactcaggagttgagattcgtaaagcagtaaggaatgcatagtcagctatactggaaatwtgggaaagggaaatggactatgtgggaaagcgggactcttatccttgcagaagtcactatgaaatgaggctttcagtaaacagaagatgggcatttcatc

SEQ ID NO: 10890 - DNA, 201 bp, Homo sapiens
agtaggggagatcatcacctctgtaatggtataatatgaactcaggagttgagattcgtaaagcagtaaggaatgcatagtcagctatactggaaatttgrgaaagggaaatggactatgtgggaaagcgggactcttatccttgcagaagtcactatgaaatgaggctttcagtaaacagaagatgggcatttcatcctt

SEQ ID NO: 10891 - DNA, 201 bp, Homo sapiens
attgtgtatcattctttaaatatctggctgggttcaacttgctaagattttatttagtatatttgtatctatagtcataaacaagatttctctgtaatttyctttcttgtcaggttttggtgtcagatttctgctagtgtttgcaaaaataagcagaaagcttgcacttttctctgttctctgaagacatacaaccaacat

SEQ ID NO: 10892 - DNA, 201 bp, Homo sapiens
gtgagtggtggggctgggattcaggcacaggcaggctggtacttaatctctctcctacaaataccagcttccttggtgagtattggggctggggttcaggsacaggcaggctgactccagtgtgctctaatgcatcttctttgcataaagaggcttatttacatgtcttttggggtatgctggctgctcacgtggctttgt

SEQ ID NO: 10893 - DNA, 201 bp, Homo sapiens
gttccatgtaaacgacacctccacagaatataatgtgagtggtgtccctggagatgtacagctctatggccctggagtcaaggtaaagcctcattttaatwttttgccctggagccgtttggcacaaaggactttggctcttcttgcctttgtcaaacagccatgaatttgtttggacagcagttgttgaatgcctgctaa

SEQ ID NO: 10894 - DNA, 201 bp, Homo sapiens
gcaggcggatcatctgagatcaggagttcaagaccaacatggcgaaacgctgtctctactaaaaaatataaaaattagccagtcgtggtggtaggctcttrtaatcccagctacttgggaactgaggcaggagaatcacttgaaacccggaggcggaggttgcagtgagccaagatcatgccactctgctccagcctgggc

SEQ ID NO: 10895 - DNA, 201 bp, Homo sapiens
tgggaagtagtgatgcctgtcttccctcagaagcacactgataaccccaatatacccacaattcacacttttttccttctctgaggtatgctgttttttgkcaaaacagaaaaaacacactactaggatatgaaaaacttcattctgggcctggttaggtcataaactacagaaccttaggtcatatattctcaccgggcg

SEQ ID NO: 10896 - DNA, 201 bp, Homo sapiens
acagaaccttaggtcatatattctcaccgggcgcttgtttctccactgcaaaaaataattcgtatttgcttggtcctttgtagtactttactgtttataartgtagtacatttatcttcatgatgacccttaaatttaagtaaggtagtattatgctcattttatagaagaaattcaatctcaaagaggatacagtctccc

SEQ ID NO: 10897 - DNA, 201 bp, Homo sapiens
tttatagaagaaattcaatctcaaagaggatacagtctcccaaagatcccacaagcagtaatatattaggcagagctaaactcacacactgtcactcaatwtcctaatattggtacatgccatgctaataagtgtgctaaaatggatgaagcggcaatttctcaggtcccttccaatgatcctgtcctctgcttctacttg

SEQ ID NO: 10898 - DNA, 201 bp, Homo sapiens
cagggagctcaatatatattaagagtatgcgctcagccaggcgcggtggctcacacctgtaatcctagcactttgggaggccaaggcgggtggaccacaargtcaggagatcgagaccatcctggctaacgtggtgtaaccctgtctctactaaaaaatacaaaaaaaaaaaaaaaatgagctgggtgtggtggcgggcgc

SEQ ID NO: 10899 - DNA, 201 bp, Homo sapiens
acaccagggcagagaggcagcaaccgcaatcaaaagaactaataccagagggtgcagtaacaaggccaacagaaggcttctgaataagcaagactgatgtyttcagagcaatgcaaaaagacagtgtttccatgaaacagaataaactagagatttgtaaattcaagatattgatcattcaaatgaaacttcaatataagc

SEQ ID NO: 10900 - DNA, 201 bp, Homo sapiens
atgaggcacaatgtgtgtgaattattggaggagcactctcaggagaagaggggcgagggagcagggaggggcaggggatgggctgggagggatgtgctgtygggtcaaagctagccttggtctgatttatgggctgggaagaggtggggaagccctggagcataaatcactctgcagaattgtccccccttgaagctgctg

SEQ ID NO: 10901 - DNA, 201 bp, Homo sapiens
aagtagagctgggtttgtaaccaggtctgactccaaagttcacgtggttcccattgtgctgaattgcacactgctcctgaaagtgctgcccactccctaawcaccagaggcaggctcagtcaataggacagacagatgatgagtagacccccaagaatcacccaccagaggaggagcatcaacaccagggcagagaggcag

SEQ ID NO: 10902 - DNA, 201 bp, Homo sapiens
gagttctcaccaagtgtaatagtctatgagtaaattcctatgcatgtaaaaagaaaagttttagcaggaagaagacaaaatgctgaaagagaatatggtartttcaaagtttgagatttttagatgcatgttagaagtgtttctattttgttgaaatttcccgtcattcagtagttcactttacttcaagttgtgaccttc

SEQ ID NO: 10903 - DNA, 201 bp, Homo sapiens
tatctggtcttagtgggttctgtacaatcccattaagttgaaggaataaacctgtagttggagaaataacagtgtgacttctccaagactgattggctgayttttggaccctctttgtcccatttctagtcaggaattatgtcttctactgttccacaacccacaaaagaagatgtctgttccacttctggcctaagcaat

SEQ ID NO: 10904 - DNA, 201 bp, Homo sapiens
tgtccatggacactttgggttgtgtctacccttggctactgtgaatagtgctgctatgaacatgggggaacaaatgtctctttgagttcctgctttcagtwcactgggtaataaacccaaaagtataatttttgggttatatgacaattctatgtttaattattttgagaaatgttcatattgttttccaagcagccactc

SEQ ID NO: 10905 - DNA, 201 bp, Homo sapiens
gttcagaaaattatttagaagggttcaagtaacacagaccatgtaatgaagagggtatgagtgttgaaagaaggaaaagaagaacaggggttgcacagaakataccaaatgttcttatcaccctctggggaacaaaagaaagaaatctgagggtatgcagcttatccttccagttgtttctctgaaggtaatttttacagt

SEQ ID NO: 10906 - DNA, 201 bp, Homo sapiens
cagggcatctcgtcccactggtgcctaccgtctgagcactgctctgaaggactcgattgccccgtggagcctgctcccacacacctgccttttgtgcagcyggcccatctgttggtgctttttctttcaggaggagatgggcatctcctgtgagctgctggaatcggacttcctcaaatgcagcgtgggatttcctttcat

SEQ ID NO: 10907 - DNA, 201 bp, Homo sapiens
tcaaggactgcaggaggggtgtgctttccatccactttctatattctaaaaattaccgctggattaagcccagtcaagagagaaccaagtatctgtatggwtcaagtatcgctggccacacacacagtatcttttacagaatcgcatgtgctgtgatgccatctccctgtgcagggtgggttggtaggtgggggaaagggg

SEQ ID NO: 10908 - DNA, 201 bp, Homo sapiens
gaggttagcttctaactcatcaggtctagggtggggcctgagaatctgcatttctaacagtgagcatgtccagggaccacactttgagtagcaagaccttsacagcttcaagttgcaaaccagttttgaatgagcagagtagaagggggtttgcaggtgagaaggaactcttcaccatgagtacatttctatgaagatttc

SEQ ID NO: 10909 - DNA, 201 bp, Homo sapiens
agagccaccaacagtagaggcactccaaaactttccaagaagtcatctcagattccctgctgcttcatagcttttaggagctccagggttgagggaggccmcaaaagcaatcaaggactgcaggaggggtgtgctttccatccactttctatattctaaaaattaccgctggattaagcccagtcaagagagaaccaagta

SEQ ID NO: 10910 - DNA, 201 bp, Homo sapiens
gcacatattctgtggcctcaatagtgttgacaggtttgtgccaagcctgcccagcttaggggacagctgaaatgctcagagccaccaacagtagaggcacyccaaaactttccaagaagtcatctcagattccctgctgcttcatagcttttaggagctccagggttgagggaggccacaaaagcaatcaaggactgcagg

SEQ ID NO: 10911 - DNA, 201 bp, Homo sapiens
cattttgctgaaattgcagtgagagggaaggtaccaggtagagaacctctagattttatgagcttgcttccctgactccattccaggtgatcttgatccamaaatgacgaggctgggtggttgccattggtgtcacacccacatcccttgctgtgcaggtgcactgctcccagctgctgtgctggctgctagctgctcaca

SEQ ID NO: 10912 - DNA, 201 bp, Homo sapiens
cctcaggtgaacaagaaggctgccctgtggctcttcacggatgaaaagccaaaggcagctgtggcttcgctttgtccccagtagtcactggccacggtgakacctgggtttaacatgacctgcccataaatcagtttgctgcaattgcagtgagagggaaggtaccttgtagaaaacctctagattttatgagcttgtttc

SEQ ID NO: 10913 - DNA, 201 bp, Homo sapiens
tcccaagtttgttctgagccacctgatataacctcaggtgaacaagaaggctgccctgtggctcttcacggatgaaaagccaaaggcagctgtggcttcgstttgtccccagtagtcactggccacggtgagacctgggtttaacatgacctgcccataaatcagtttgctgcaattgcagtgagagggaaggtaccttgt

SEQ ID NO: 10914 - DNA, 201 bp, Homo sapiens
ggagcatgcacacatgtcctgtgattctttatatcttttatttttatgccatggtacaagttgtgctttacagagcatttgggtgaataactagaaatatrccatagattcttgaggctttgcctggttcactaatgacaggctccagggcgtttctcagggagcgtgttagcatgtttctaggaccagccacatcagcca

SEQ ID NO: 10915 - DNA, 201 bp, Homo sapiens
ctttacagagcatttgggtgaataactagaaatatgccatagattcttgaggctttgcctggttcactaatgacaggctccagggcgtttctcagggagcrtgttagcatgtttctaggaccagccacatcagccagacctggctctgtacagacccaaacctgagaatgccatgtgagacctgtgtgactgcagaatcaa

SEQ ID NO: 10916 - DNA, 201 bp, Homo sapiens
aggtgccaattacatgttgaatttcatcttcaacccaactctacttacctttcagggagtgatgagtagggggcgagaggggaaaatgcagaaagtgttgyttgaggcccacagaaactataaagatgaagaacaggagaaacgtagttaatcatgccctggaaagctggcctgcagaaagaaaaggaatttatctctgag

SEQ ID NO: 10917 - DNA, 201 bp, Homo sapiens
cttacctttcagggagtgatgagtagggggcgagaggggaaaatgcagaaagtgttgtttgaggcccacagaaactataaagatgaagaacaggagaaacstagttaatcatgccctggaaagctggcctgcagaaagaaaaggaatttatctctgagaaggccttcagaaagaaaatgagtaggctccggagacgttcat

SEQ ID NO: 10918 - DNA, 201 bp, Homo sapiens
ctcaaccagagaggcatctttcaacatggcaagcaagattactccaaaaaaatgccacttaccattcctttggtgtactgcttctagaggcaaagtttacygcttttactgtcatgaaatagactgtgacttgttatttatcatttatgtgaccaattatagttacaatcatgttccatgtgacaatagaatctttccccc

SEQ ID NO: 10919 - DNA, 201 bp, Homo sapiens
tactgccattgtgatcatattctcaggccttgtggagacatgggcattgccagctgttacagtaggcatatttgcattgatcagaacataaaagtttccakaaacacagaagtgaatcaaatagtgtggtttaggttcacccactgcctcagactggaagctggcttctggccactccatgacaccagcttggcaacctca

SEQ ID NO: 10920 - DNA, 201 bp, Homo sapiens
gtgtgtgagccctccagccagggtccgcaccaggccatcagccatcccttcactggccagagctcctgccttccccagctcagcctgctacgaccctcacrgccactcccccaaaaccagcagacttctcctcctcctcagtcaatcttctcctttcacaccacctcctttcttactgaaagcgtggatctaacctgggga

SEQ ID NO: 10921 - DNA, 201 bp, Homo sapiens
tctcaggccccattctagactctaattcagaatctgcattttaatagagttcctcatgtgattcttatacacagtaaaatttgagaagcactggtggaggkcccaaattctgtaaagttacctattaacttacggaaggctgataagttataaatgactcttgccagtaaagataaaaatgatttctgtttgactgaaaat

SEQ ID NO: 10922 - DNA, 201 bp, Homo sapiens
tcctcaataataaattaaataaatctttgccacgtattcactatatatttgtatgagaatcatgtttttaactttttgaaaattatgctttgacaaccagstttctgtcatcatttttaatagttctgtggtattctattttgtgattgaccatagtttacttatctattgccctaatgttagacacttaggatattgcta

SEQ ID NO: 10923 - DNA, 201 bp, Homo sapiens
aaaaaagcataaactgacacagacaatattcaataagtgttagagagggatggaagccaggccctaaaaaggttaaataagcagtgctaggcattataacrtcagtattgtgcccagtcactgcttgggcttgagcaaggggctggaccagtgggcttcagcgatcagtgaggcttcttgacagaggattgaactaggttt

SEQ ID NO: 10924 - DNA, 201 bp, Homo sapiens
ccaaaagaatcaggtcagaaccttaaagctcatactcagcacccaaggtggcagctgcacagagcagaaataatggcccaaaagttgagagagccgtgggyctggctgctcaggagaccgcagccaggacacacctcctctctgggtctcccttttctgatctgcaaaatgataaaataaacagtcttaggggttacttgt

SEQ ID NO: 10925 - DNA, 201 bp, Homo sapiens
tctggtttatccacttgtctgtccatggacactttgggttgtgtctacccttggctactgtgaatagtgctgctatgaacatgggggaacaaatgtctctktgagttcctgctttcagttcactgggtaataaacccaaaagtataatttttgggttatatgacaattctatgtttaattattttgagaaatgttcatatt

SEQ ID NO: 10926 - DNA, 201 bp, Homo sapiens
cagagcactggggcaagtacaggtggtccacactcatcagattctgggatgtgcggctgtgtagagaagctttagtgcgatgggtgtatcactcgtatgargtaggagtgagcctgtgcctgattttgtgcagcagcgctggccagctctgaggcgtgcagcactgagtgcggtgcaggaatatgcaaggaatctgcaatc

SEQ ID NO: 10927 - DNA, 201 bp, Homo sapiens
gcttcacaatgtcctttttggtatgatttccatgattgagaaaactggggattgtatgtgtagtacatctggtttatccacttgtctgtccatggacactktgggttgtgtctacccttggctactgtgaatagtgctgctatgaacatgggggaacaaatgtctctttgagttcctgctttcagttcactgggtaataaa

SEQ ID NO: 10928 - DNA, 201 bp, Homo sapiens
ggcttgagctcctggcctcaagttgatccacccgccttggtctcccaaagtgctggaattacaggtgtgatccaccatacccaacctatttattttatttwattttattttggacggggtcttgctctgtcacccaggctggagcgcagtggcacagttacagctcacttcagcctcgatatcccatgctcaaatgatcct

SEQ ID NO: 10929 - DNA, 201 bp, Homo sapiens
aggtttaatggactcacagttccatgtggctggggaggcctcacaatcatggtagaaagcaaagacatgtcttacatgggtggcagcaggcaagagagagracttgtgctggggaactcctcattataaaaccattagatcacatgagacttattcactttcatgaagacagcacaggaaatacctgtccccatgattcag

SEQ ID NO: 10930 - DNA, 201 bp, Homo sapiens
tgctgatagacactgagactgggtaaattacacagaaaaagaggtttaatggactcacagttccatgtggctggggaggcctcacaatcatggtagaaagsaaagacatgtcttacatgggtggcagcaggcaagagagagaacttgtgctggggaactcctcattataaaaccattagatcacatgagacttattcactt

SEQ ID NO: 10931 - DNA, 201 bp, Homo sapiens
ggagggaggagggtctcaaattaaaaagacaagaaacaaacaatctccccaaataagcagaaagtctgagcgtggaactgagctggttggagctggggagsgggtgcgggaggtactttcagcactccctcgtgagatcatggaacagggcaggaaatctgaacctgctgccaaagaaaactcgctttgccttttgtaaaa

SEQ ID NO: 10932 - DNA, 201 bp, Homo sapiens
attagtccatttttacactgctgatagacactgagactgggtaaattacacagaaaaagaggtttaatggactcacagttccatgtggctggggaggcctyacaatcatggtagaaagcaaagacatgtcttacatgggtggcagcaggcaagagagagaacttgtgctggggaactcctcattataaaaccattagatca

SEQ ID NO: 10933 - DNA, 201 bp, Homo sapiens
ttaggtcagttctgaggctcccccagatgtgggacactcctcacggacaagttcagtgttgtatttacttttctggatttattttcacaaatattcagctyagaatgtgccagggaggggaggaacatacctcctatgcggcaggagctgtattgggcacagccacgagtgtcatcccagggaactcatgtgagccctgtg

SEQ ID NO: 10934 - DNA, 201 bp, Homo sapiens
ggcattataacatcagtattgtgcccagtcactgcttgggcttgagcaaggggctggaccagtgggcttcagcgatcagtgaggcttcttgacagaggatygaactaggtttagaaaagactttcccaaaggggaatggacattccaaagagatggcaaagcttggagaaagacctgtggttggccagcctgtctggagcc

SEQ ID NO: 10935 - DNA, 201 bp, Homo sapiens
acctgcaggcataatggagggtggtgagtgctgcgcagtaactgctctggaaactgagaagaaggtgccatgagtccccctcccttgcccccaaggaggasggaggattaaaaggtcacagagaacagtgtggtagatgagagcagctttcaggctgacagctgtgggcagcaatcctgactctcacacttgcctgacatg

SEQ ID NO: 10936 - DNA, 201 bp, Homo sapiens
tgctgcgcagtaactgctctggaaactgagaagaaggtgccatgagtccccctcccttgcccccaaggaggagggaggattaaaaggtcacagagaacagygtggtagatgagagcagctttcaggctgacagctgtgggcagcaatcctgactctcacacttgcctgacatgaggccttaagggggctgcttaccttctg

SEQ ID NO: 10937 - DNA, 201 bp, Homo sapiens
agatagtggtaccacacagtgagtgctaggtgggttactccagggctctggagcagcttccaagaggtggtgttgagaggaatgaggactcacgcattccwagcagagggaaaatgtgagcagaagtatggagaacaggactcccatgaagatctgcaggtgtctggaatgaaggaggcagtcaggagaacacagtgagag

SEQ ID NO: 10938 - DNA, 201 bp, Homo sapiens
gctaggaagacctgttctttatttattgacttgcatttattgagaactgttgggaataatattgtgcctctagggcatttagaagataacatgcttttttytggttcttgcaaattactttcggtgacttgttctcatgggttgcttattttgagtttttatttttagagaactgatattttttctgttcttgatgaggta

SEQ ID NO: 10939 - DNA, 201 bp, Homo sapiens
aacaagacactctactgccatctgttggaaaacagttataataaacttatacacatacatgatatctgtgatgtgagtggtatcccccagccccttaaatrcagtgtagcacctgcactactgtacctacaactccctagccatgagagtgcattatgttttaagaaatggtcttcagactctaaaaaaaggaagacatac

SEQ ID NO: 10940 - DNA, 201 bp, Homo sapiens
gattgaagctcagaacacaagactcttgccagttgttctaagaaagcttctgctctttcccagtcattcaaactgcaccaccttatcgacttcccctcacrgtgaatgctcaggatctccttggcaacgtgggtgaagatacctgctggctctcttgacagttctcgtctttggcttggccaataaaccccctttagggaa

SEQ ID NO: 10941 - DNA, 201 bp, Homo sapiens
cgacttcccctcacggtgaatgctcaggatctccttggcaacgtgggtgaagatacctgctggctctcttgacagttctcgtctttggcttggccaataawccccctttagggaagtagaaagatggtggcaacagacagctcctcagctccacctgccttcccttcttcaggggagcttatgaccatcagggtggctgtg

SEQ ID NO: 10942 - DNA, 201 bp, Homo sapiens; identical to SEQ ID NO: 1600

SEQ ID NO: 10943 - DNA, 201 bp, Homo sapiens
tgagggcatgctgcccctagttatgatattgctcctaggaagaataaaatctgcttcacaatgtcctttttggtatgatttccatgattgagaaaactggsgattgtatgtgtagtacatctggtttatccacttgtctgtccatggacactttgggttgtgtctacccttggctactgtgaatagtgctgctatgaacat

SEQ ID NO: 10944 - DNA, 201 bp, Homo sapiens
ccccctcccttgcccccaaggaggagggaggattaaaaggtcacagagaacagtgtggtagatgagagcagctttcaggctgacagctgtgggcagcaatsctgactctcacacttgcctgacatgaggccttaagggggctgcttaccttctgtgaccctcagtttcttcctctgtaaaaaggagaccatcacctccagt

SEQ ID NO: 10945 - DNA, 201 bp, Homo sapiens
gggaagcattgtttgtgatttcacattgcaggggctatttacatgtatgatttgcatcattgattttatgatacattgttgagagtatctgtgattttttkggaagctgaatccttactgagggcatgctgcccctagttatgatattgctcctaggaagaataaaatctgcttcacaatgtcctttttggtatgatttcc

SEQ ID NO: 10946 - DNA, 201 bp, Homo sapiens
ctccctaaacatctctatctccaacctcggagatgatgcctatgatgccaacgtgtccttcaatgtttcccgggagctcttcttcatcaacatgtggcagmaggtaaggagggcatccctgtaaaaagagcagttgttccatctggtgcgcttgctgactttcattattgcctggaataggcaatgattctacaagcacta

SEQ ID NO: 10947 - DNA, 201 bp, Homo sapiens
tattttgagaaatgttcatattgttttccaagcagccactcgattttacgttcctaccaacagtgcacaagggtttcaatttctccacattcttgacaatycttgtcttctgtttttttgatagttgccatcctaatagtcatgaagtgggaaaaaatagtttttaaaaagtaacagatggataaacaactaagagaaaga

SEQ ID NO: 10948 - DNA, 201 bp, Homo sapiens
catgtcaaaacctagtagcttaaaacaacattgattagccctcatagtgggttggggattccagagtggttctggctcgaggtctcttatgagactgcagycaggatgttggctggggatgcagttgtctgaaggctccactggaggatctgcttcccttgtggcccctcgcttggctggctgttggccacaggccacaga

SEQ ID NO: 10949 - DNA, 201 bp, Homo sapiens
agtagggaggtgaaacaatggtagggaggtgaagttatataggcaggaggcagtgaatgaaaagtgagctgttaaaccaactactacagtgggcaatgggscttattcctgcagggcaacactaggaagagtaagggagctgggggttttatactcctttccccaagtgtcaagaattgaggtctcctggggctatttata

SEQ ID NO: 10950 - DNA, 201 bp, Homo sapiens
tattagttatctgttgctgtgtcacaaatcacatgtcaaaacctagtagcttaaaacaacattgattagccctcatagtgggttggggattccagagtggytctggctcgaggtctcttatgagactgcagtcaggatgttggctggggatgcagttgtctgaaggctccactggaggatctgcttcccttgtggcccctc

SEQ ID NO: 10951 - DNA, 201 bp, Homo sapiens
atagcagccctaacacccactgtattagttatctgttgctgtgtcacaaatcacatgtcaaaacctagtagcttaaaacaacattgattagccctcatagygggttggggattccagagtggttctggctcgaggtctcttatgagactgcagtcaggatgttggctggggatgcagttgtctgaaggctccactggagga

SEQ ID NO: 10952 - DNA, 201 bp, Homo sapiens
taacactgccctcaccaaagatgcaagcctggtatctcaaccagagaggcatctttcaacatggcaagcaagattactccaaaaaaatgccacttaccatwcctttggtgtactgcttctagaggcaaagtttactgcttttactgtcatgaaatagactgtgacttgttatttatcatttatgtgaccaattatagttac

SEQ ID NO: 10953 - DNA, 201 bp, Homo sapiens
aaagatgcaagcctggtatctcaaccagagaggcatctttcaacatggcaagcaagattactccaaaaaaatgccacttaccattcctttggtgtactgcytctagaggcaaagtttactgcttttactgtcatgaaatagactgtgacttgttatttatcatttatgtgaccaattatagttacaatcatgttccatgtg

SEQ ID NO: 10954 - DNA, 201 bp, Homo sapiens
gccaggggagacacagggaaatgatgcaaaagaaatgatgcaaaggatctgagcagaacactgcccctccccaccccctgaatgtgtgagtgctgagttayggccttcagtatccaagctctctgtttgacagtagatatattgtcagatgcactgtgctgcttagttttgagtgcagtgtgattttctgaaagggcaatg

SEQ ID NO: 10955 - DNA, 201 bp, Homo sapiens
agaggggtgattgtgaactcagcagggagaacccagatcctctactcctgatcatgctctagcgcacagagcactgtaagctcgtgaggaatgtgcttcgyacctggcatcggttggccataagtcactgaatttggctaataagatgttgcattgtctctgatctccttgagagactgagatagatggataggccctagg

SEQ ID NO: 10956 - DNA, 201 bp, Homo sapiens
catgtcaccagggcatgtggtggtggaggtggggcaacccttgcccaggccagccatccagacgtctttgatacctcctaccactggctacagtgggcttyattttcctcccccttggcctcacttctgcagacacatgactttgttagaagcaagggaaaaaagttaggaagatctaggttttgttctaggagttgccag

SEQ ID NO: 10957 - DNA, 201 bp, Homo sapiens
ggatgagagggtagaagagagcaaaggaggaggggcaggagagaacccggtaggatggaaagaggctgcccatgttgaacaaagggccagtaacatttctkgtggcagggagatgtcaggacattttagaaatctgatgcctgctgttacaggcctgtcaggactttaccactcataggttctaagaaatctcccctcccc

SEQ ID NO: 10958 - DNA, 201 bp, Homo sapiens
ctttggctcttcttgcctttgtcaaacagccatgaatttgtttggacagcagttgttgaatgcctgctaaatgctagggactgttccagccacaaggagamacaaagatctagtccctgctcccagggagctcatggcctattggggccaaaggcatgtcagtaagcaattaaagcacaaggtgccagctgctctacagag

SEQ ID NO: 10959 - DNA, 201 bp, Homo sapiens
gggtcgtggtggtctaggagaccagtgatggtccctggctttgacttgttcttttgagaggtttctcatcctctcccctctatgaggcttggtagcctttycagaggagagccttggaagcatgtgcctctgggtctgcagtgatgctggatcacactgcacctgatgcctttctcagtggtctactacaaattagctcat

SEQ ID NO: 10960 - DNA, 201 bp, Homo sapiens
cttgtccccaaattaatgcttgaacaatcaacaaccaataatttctggtatccagggactcagacatgacaaccagaattagggaagctgcacttgtattrttaatgtggctttttaacccatagctgtttttttaccctcagatgtggccattggtgcacccaaggaggatgacttcgcaggggcggtctatatctatca

SEQ ID NO: 10961 - DNA, 201 bp, Homo sapiens
acttttttttttttttttttcctgctgagggatcttgtccccaaattaatgcttgaacaatcaacaaccaataatttctggtatccagggactcagacatracaaccagaattagggaagctgcacttgtattattaatgtggctttttaacccatagctgtttttttaccctcagatgtggccattggtgcacccaagga

SEQ ID NO: 10962 - DNA, 201 bp, Homo sapiens
ggagatcccctcagctgaggatggttctctagagaagaatgcagatgtgagccataagcagcctacacacacatcagccaggagatgggccacagttcacwgtgcccactacacatcaaaacacaccctctggggaatgctgccaagaggttttgatttaaaacacgaaccttctttcacaacacaagtgccccaggagag

SEQ ID NO: 10963 - DNA, 201 bp, Homo sapiens
agtgttagagtggggcatagagcttgcaaggctgtttcagccaggggtgggtgggggtgattttcaggcctaatgctgacaccactccactgagagaaagragcttgcttccgggtgcctgcaagagatgacagtgccttcaccttgttgttagcaagaattgcatacataaaaacttgagcacatgaaagccacatgtaa

SEQ ID NO: 10964 - DNA, 201 bp, Homo sapiens
cctccatccagcagaagcctgggtgagatgtactgccattgtgatcatattctcaggccttgtggagacatgggcattgccagctgttacagtaggcatayttgcattgatcagaacataaaagtttccagaaacacagaagtgaatcaaatagtgtggtttaggttcacccactgcctcagactggaagctggcttctgg

SEQ ID NO: 10965 - DNA, 201 bp, Homo sapiens
ccagctgttacagtaggcatatttgcattgatcagaacataaaagtttccagaaacacagaagtgaatcaaatagtgtggtttaggttcacccactgcctyagactggaagctggcttctggccactccatgacaccagcttggcaacctcaggtacgttaaattctacagaagcaggcagggtgccagtgtctggacctg

SEQ ID NO: 10966 - DNA, 201 bp, Homo sapiens
aggcagctgcggctcagtccttctctgtcacccgctctccagagaatttacctgcagattaccctcaaaacatgagacaggttcagagcgaggtgggcggytggaatggagccttcacagacagcttgaccacacacagggagctcaggaagcagctttgttggaaaaatgcagggcacttaaactgccacaccaggaggg

SEQ ID NO: 10967 - DNA, 201 bp, Homo sapiens
ttacagtaggcatatttgcattgatcagaacataaaagtttccagaaacacagaagtgaatcaaatagtgtggtttaggttcacccactgcctcagactgsaagctggcttctggccactccatgacaccagcttggcaacctcaggtacgttaaattctacagaagcaggcagggtgccagtgtctggacctgtctcaaa

SEQ ID NO: 10968 - DNA, 201 bp, Homo sapiens
gtgctcatcgctggaagaacatctactatgaagccgaccacatcctaccccatggcttctgctacatcatcccctccaacctccaggccaaaggcaggacrctgatcccttgctatgaaggtgagcatggattgatttttcctcatccccctacccacctcatgccctaagcccgccttcccacctctatgcaccaccagc

SEQ ID NO: 10969 - DNA, 201 bp, Homo sapiens
acccctgcaccctttcccagtcagttcctctgcccttggtgagtgaacaactattctgacataggctttctcttgcccttgacttttatcagaagctgtaygaagatttttgttataaaagcgtaagctcaagaggggaaagtaatactagctgccgcttatggagggcttcatttgggtcacatgctgcaaagctgaggg

SEQ ID NO: 10970 - DNA, 201 bp, Homo sapiens
gagctcctggcctcaagttgatccacccgccttggtctcccaaagtgctggaattacaggtgtgatccaccatacccaacctatttattttattttatttwattttggacggggtcttgctctgtcacccaggctggagcgcagtggcacagttacagctcacttcagcctcgatatcccatgctcaaatgatcctcctgc

SEQ ID NO: 10971 - DNA, 201 bp, Homo sapiens
cccgccttggtctcccaaagtgctggaattacaggtgtgatccaccatacccaacctatttattttattttattttattttggacggggtcttgctctgtmacccaggctggagcgcagtggcacagttacagctcacttcagcctcgatatcccatgctcaaatgatcctcctgcctcagctccccaaatagctgggacg

SEQ ID NO: 10972 - DNA, 201 bp, Homo sapiens
tcccatttgtcaattttggcttttgttgccattgcttttggtgttttagacatgaagtccttgcctatgcctatgtcctgaatgatattgcctaggttttmttctagggtttttatggttttaggtctaacatctaagtttttaatctatcttgaattaatttttgtataaggtgtaaggaagagatcccgttttccatca

SEQ ID NO: 10973 - DNA, 201 bp, Homo sapiens
tttaattagatcccatttgtcaattttggcttttgttgccattgcttttggtgttttagacatgaagtccttgcctatgcctatgtcctgaatgatattgyctaggttttcttctagggtttttatggttttaggtctaacatctaagtttttaatctatcttgaattaatttttgtataaggtgtaaggaagagatcccg

SEQ ID NO: 10974 - DNA, 201 bp, Homo sapiens
aggagatgggcatctcctgtgagctgctggaatcggacttcctcaaatgcagcgtgggatttcctttcatgaggtcaaagtcaaaggtaagggacacagaygggacccttcctcagcagcaggcccccagcccttccaccagccactgattccgccgcctccctgaggtgaggagtcctcccaccccctgcctcccatagc

SEQ ID NO: 10975 - DNA, 201 bp, Homo sapiens
gatggccagacacgagaaagccaagcagggattttcagttacaggtgagcatccgatctgcagccagggctttttctaccgggcacatctttgtgcgcagsctggtttgagctgatctgcacataaacaggcactctgggtgtggatgggggcatctgtgtactctttatggctatatttccagaatatgcttttaaagac

SEQ ID NO: 10976 - DNA, 201 bp, Homo sapiens
ggatggccagacacgagaaagccaagcagggattttcagttacaggtgagcatccgatctgcagccagggctttttctaccgggcacatctttgtgcgcascctggtttgagctgatctgcacataaacaggcactctgggtgtggatgggggcatctgtgtactctttatggctatatttccagaatatgcttttaaaga

SEQ ID NO: 10977 - DNA, 201 bp, Homo sapiens
cacactgggtcttgtttggagaatggacaggaaaggagcaggagagcaagcagagagtctgaggtgcaagaaatgccctgtcctcccagcagactggagcraattctaattctgcctctgctacttcattcctatgcaactttgggcaggtttcctaatctctctgcctctcaactgttcacccctcataaaatgaggaca

SEQ ID NO: 10978 - DNA, 201 bp, Homo sapiens
cccttttttttttttttttttttttaatggagacaagcagcaattaggtaggcttctaggtcaggtggccagttaggggtgccagggttcccaggtccagytttcttcgggtcatagagtgagggtgggaatcaagtcactcagatatttctcccgaattgaaatgcgtgtcttcctttggctgggcagatgaggtcccct

SEQ ID NO: 10979 - DNA, 201 bp, Homo sapiens
ggtaggcttctaggtcaggtggccagttaggggtgccagggttcccaggtccagctttcttcgggtcatagagtgagggtgggaatcaagtcactcagatwtttctcccgaattgaaatgcgtgtcttcctttggctgggcagatgaggtcccctcttctccatctctgctgctgggtcctggtgcaagcccttactctct

SEQ ID NO: 10980 - DNA, 201 bp, Homo sapiens
tcacggtgaatgctcaggatctccttggcaacgtgggtgaagatacctgctggctctcttgacagttctcgtctttggcttggccaataaaccccctttakggaagtagaaagatggtggcaacagacagctcctcagctccacctgccttcccttcttcaggggagcttatgaccatcagggtggctgtgatgcttccct

SEQ ID NO: 10981 - DNA, 201 bp, Homo sapiens
ttttatagttctctgcctcatatcatttcagtctatttagaaacctgctattttagcacaaaacaatatcaaggagaggagtgaatgtggtttgcagcagraaaaataacaatagattgttttctgtagtttaatgtcatacgacaagaggcagaatgtgggcaagctcaggttttgagagtcattctgagtgtgtcctct

SEQ ID NO: 10982 - DNA, 201 bp, Homo sapiens
aatcttaaaatcaaaattgatggctttatttttctaaaaatgggaaaatatctccaaaacattgttcaaaaacaaaacaaaacaaaaaaaaaatgtttgtycttatatcccatcagtttattcaactaacattcactgtggactttttataaggcagtaactgttttatgaataggagatataaaactgggtgaaacagtg

SEQ ID NO: 10983 - DNA, 201 bp, Homo sapiens
gcagtatggagtgattatttacttagtgatatattttttatagttctctgcctcatatcatttcagtctatttagaaacctgctattttagcacaaaacartatcaaggagaggagtgaatgtggtttgcagcagaaaaaataacaatagattgttttctgtagtttaatgtcatacgacaagaggcagaatgtgggcaag

SEQ ID NO: 10984 - DNA, 201 bp, Homo sapiens
gagatgtgccatgatgagagtgatgatggtgatggtggcagacaagagcatgtcacatttagaaatactgtaactggttgctgaggttttacatatattcyttctgagcttgttttgtctaatattgcctgtgccaacagtattttaccagaattgaatgaaaagaaaggtaccagcagatttttttagatgttctaattg

SEQ ID NO: 10985 - DNA, 201 bp, Homo sapiens
tgatttacccacaaattagataacaataagtgattcaagtttgcgagccataagaattgagtcagaactttaaaaatcaattatttagcagtatggagtgrttatttacttagtgatatattttttatagttctctgcctcatatcatttcagtctatttagaaacctgctattttagcacaaaacaatatcaaggagagg

SEQ ID NO: 10986 - DNA, 201 bp, Homo sapiens
ccttgtaaggtttagccatgtatagtcatgtgccagtcacctagggctgagaaaggggagcaagcagagagggagaagaggaagaagccaaatgagatggktcgtaattgattagtggaagttaaatcatgttaaggataggaggcttgtcccctccatcatgatttagtatatcatccttcccaagagaagttttgagaa

SEQ ID NO: 10987 - DNA, 201 bp, Homo sapiens
gatgactttgtccatggaatgcctggtgaatgagtgccagccctgggcaggccttccaggcacctctcaatgtctgcatatcttgggctgagtttgttatyaagacggctgcatttgggcagagcaatacacagatacctgtggtgggctaggtactgctgtcagaagtggtatcttctgtggtatttatctgctgctgtc

SEQ ID NO: 10988 - DNA, 201 bp, Homo sapiens
gaagtctcctggggctgtgtttaagtgccgtgttcacaccaaccctgaccggagatgcaccgaactggacatggctcgaggtgggtgaccattactgctgyggtggaaatgggttctgtacccttataccttgctcttcttcttcccaggatggcctgatcattcactcacccatccatccttccctccttccctccctcc

SEQ ID NO: 10989 - DNA, 201 bp, Homo sapiens
aacctgctagacaaattctaaaagagccataacactcagagcggggattttaacttcatcttctgcttcagggaccacattgttcccagtgtgtttaaacmcctggctggtttttcacttggggttctcattcagattcgtgattctgtttactgagagatgatgtcccagttactctagctctgtaacaaatgactccaa

SEQ ID NO: 10990 - DNA, 201 bp, Homo sapiens
aaacgacacctccacagaatataatgtgagtggtgtccctggagatgtacagctctatggccctggagtcaaggtaaagcctcattttaattttttgcccyggagccgtttggcacaaaggactttggctcttcttgcctttgtcaaacagccatgaatttgtttggacagcagttgttgaatgcctgctaaatgctaggg

SEQ ID NO: 10991 - DNA, 201 bp, Homo sapiens
ggcttattttactccttaagtcttcctatttcctagtcacatctcatttgcatgttatatgccatctcatcaattattgggggacctaagatccacatttyctattatttggccctgttgatgctacaacttctgcctttcagcttttcagccattgttctccacttcaaaatggacaaggaggaaaggtgaattggggtt

SEQ ID NO: 10992 - DNA, 201 bp, Homo sapiens
acacacttcagatttgttctatttactatatttgttacacctccatttttaaaaagtgcaggtattgaagatggaatgacaatgcttttccaaagcctccttttttttatctttggttacatttctctaagctccttatttcagccctggcacatctcacctttatcatttcctttctcattcttttctcctgttggagaa

SEQ ID NO: 10993 - DNA, 201 bp, Homo sapiens
gtgattttatagttacgactctgtctggctgaaaattttgccgtatagatgaaacatcatcaaggtatgtatacgcattttggaacctatcatataaaaamgaaaacttttgtaacttaaatttgggatttatgtttttggttttttgtttgtttgtttgttttgagatggagtcttgctctgtcgcccagggtggagtgc

SEQ ID NO: 10994 - DNA, 201 bp, Homo sapiens
tgccgtatagatgaaacatcatcaaggtatgtatacgcattttggaacctatcatataaaaaagaaaacttttgtaacttaaatttgggatttatgttttyggttttttgtttgtttgtttgttttgagatggagtcttgctctgtcgcccagggtggagtgcagtggcatgatctcggctcactgcagcttctgcctctc

SEQ ID NO: 10995 - DNA, 201 bp, Homo sapiens
agatggagtcttgctctgtcgcccagggtggagtgcagtggcatgatctcggctcactgcagcttctgcctctcgggttcatgcagttctcccgcctcagmctccccagcagctgggactacaggcggccaccactatgcctggctaacttctgtattttttgtagagacagggtttcaccatgttggccaaactggtctt

SEQ ID NO: 10996 - DNA, 201 bp, Homo sapiens
ttacaggcgtgagccactgcgcccagccgagatttacgtctctattgtaacttttgtgttttcttgaggaagtgtcacatgacttcttagccctcttattyacctacctaataaataggcatgaaagtatatttgccactacacaggtggaagtcacataatgtaggaaacgtgtctgtgttcaaaactcataagaatgct

SEQ ID NO: 10997 - DNA, 201 bp, Homo sapiens
atgaatgtgttttaaataaggtatatagtgagaaaagtgagcattggagtctatttcagttatgtgttacaataataatgctgcagaacaaactcaaaacytcagtggcatataatacaaagcatatagtttgtgcagctgggattagcagtggcttggctagctggctctgctgatttgggcagggcttgttcatatagc

SEQ ID NO: 10998 - DNA, 201 bp, Homo sapiens
aaaaaggtaagccctaatgaaccgcacttgtggatgcatttagaagcatttgaattgttgacatctgattttgggtaaaaaaaaggaaaaaggaaagcatytgaattggtgtcctcatgacaatctggctgcccccccttttggctgtctacaagagactgtttttatttttatgtatttagggggtacaagtgcagactt

SEQ ID NO: 10999 - DNA, 201 bp, Homo sapiens
taaataaggtatatagtgagaaaagtgagcattggagtctatttcagttatgtgttacaataataatgctgcagaacaaactcaaaacctcagtggcatayaatacaaagcatatagtttgtgcagctgggattagcagtggcttggctagctggctctgctgatttgggcagggcttgttcatatagctaggggtcagct

SEQ ID NO: 11000 - DNA, 201 bp, Homo sapiens
gtgggggcccatcctgtgccagactcctcgtctgcttggcctgtaacgttggcaattatcatcatcattatcgttattaatatccaagtttatttttattyattttaatgtttttatttaaaaaaatatttttagagacaggatcttgctctgtcacccagatgggagtacagtggctcaatcatagctcactgcagcctc

SEQ ID NO: 11001 - DNA, 201 bp, Homo sapiens
gaaacccggaggcggaggttgcagtgagccaagatcatgccactctgctccagcctgggcaacggagtaagactccgtctcaaaaaaacaaaaaacaaacaaacaaaaaaaaaaaaaccaatagtaataatgcttaggacctcaataaaacttcagtcctgtccgtttttggtgagcaagagatgagaacatcagggagtc

SEQ ID NO: 11002 - DNA, 201 bp, Homo sapiens
cggaggcggaggttgcagtgagccaagatcatgccactctgctccagcctgggcaacggagtaagactccgtctcaaaaaaacaaaaaacaaacaaacaamaaaaaaaaaaccaatagtaataatgcttaggacctcaataaaacttcagtcctgtccgtttttggtgagcaagagatgagaacatcagggagtctgggat

SEQ ID NO: 11003 - DNA, 201 bp, Homo sapiens
tgttgcctgccgggcaaggaaccagcaaagcctcactacagagtgacaattcctggggtgccctgtgggagcagtgagagggagctcctggggccgggggrtgctgcatggttaaaaaggagcataaggaagaatagataaccactgcatcacaccagggtcaccattcacactgggttccatgtaaacgacacctccaca

SEQ ID NO: 11004 - DNA, 201 bp, Homo sapiens
agaaaaagaacaaagcaataaaaaaggatgacatgaggactatattgtggaaggtagaaactggaaaacagcaaagagaaaatggttccagaataattggracagaagccattccttagacagcaaaggaggatctccatttcctgaaatgggtgcagcagacaccaggcaaaaatatttaaaacattttaatgtctacaa

SEQ ID NO: 11005 - DNA, 201 bp, Homo sapiens
cttccattataggactagactgtgggatccaggaaaatgttgcttaacatctcgttgttggattccaagtcatctgtactcccccaaaataccacttccawtaattactgttccattttgagcactatggtgatattttcattatcaagagttcttgggaagaggccgagaggttttttttagcactcctaagaaaaaatt

SEQ ID NO: 11006 - DNA, 201 bp, Homo sapiens
tattttttctctctttcaactagcattaacatccgaaactgtatatcatcaccacatttcatttaccatggttttttaatttaattattctttaaattttyctatttccatgttaaatccagagaaattgttactttttggaaagtttctactgctgcctgcctctgaaggccacgggacttacctgtttgtttgtcaaag

SEQ ID NO: 11007 - DNA, 201 bp, Homo sapiens
tctattcgtacttcttacctgtttgagagtaagtcggagacgcgatgcccccttatccctaacatcagggatatttcctgagaacaaggacattcttttaygtaaccatagcacaattattgaaataaggaaattaagtgatacattactgttagcttatctgcagaactcactcaaatatcaccagttatcttcatgtcc

SEQ ID NO: 11008 - DNA, 201 bp, Homo sapiens
agaaatgcccaacattttgtaaacactaatttttttataactgtaaagatgattattccatacttaaaaccaattcaaaataaaataaatcctcaatactycttattccctggggtagtaattttaattagattctattgattcattattttctcctgtgtgcctttatttgggaaatactgttagtttaccttgctatcg

SEQ ID NO: 11009 - DNA, 201 bp, Homo sapiens
ggtggctcacgcctgtaatcccagcactttgggatgctgaggcaggcagaccatctgaggtcgggagttcaagaccagcctggccaacatggtgaaacccygtttctactaaaattacaaaaattagctgggcatggtggtgggtgcctgtaatcccagctactctggaggctgagacaggagaattgtttgaatctggta

SEQ ID NO: 11010 - DNA, 201 bp, Homo sapiens
gaaaagtcagggagctcaatatatattaagagtatgcgctcagccaggcgcggtggctcacacctgtaatcctagcactttgggaggccaaggcgggtggrccacaaggtcaggagatcgagaccatcctggctaacgtggtgtaaccctgtctctactaaaaaatacaaaaaaaaaaaaaaaatgagctgggtgtggtgg

SEQ ID NO: 11011 - DNA, 201 bp, Homo sapiens
attttgactggatttattggatagtgtaattgtttccatttaaaacaatggaaaagatttcatttaaatttattgagatcttatttttcaccctcattccrtgcacatttgggattctgttcgccagcccctctgcactctgaagatgcacagcagcctctctgtactctgaagacgcatgaattgctgactgttgggctt

SEQ ID NO: 11012 - DNA, 201 bp, Homo sapiens
atcctagcactttgggaggccaaggcgggtggaccacaaggtcaggagatcgagaccatcctggctaacgtggtgtaaccctgtctctactaaaaaatacmaaaaaaaaaaaaaaatgagctgggtgtggtggcgggcgcctgtagtcccagctactcgggaggctgagacaggagaatggcgtgaacccagaaggcggag

SEQ ID NO: 11013 - DNA, 201 bp, Homo sapiens
tcgcatactggtgagtattgggcttctagcatgtttgttaataagttggtcatatcactcaagtcatgcctgatacacagatgtttgattatcagagtctkttttctttcttgtttcctgtggctttttaagttgatgaataataggaaagtaaatttgtggggtcagttaaaccaccagacgacagcttttatgtttgta

SEQ ID NO: 11014 - DNA, 201 bp, Homo sapiens
tcctagcactttgggaggccaaggcgggtggaccacaaggtcaggagatcgagaccatcctggctaacgtggtgtaaccctgtctctactaaaaaatacaaaaaaaaaaaaaaaatgagctgggtgtggtggcgggcgcctgtagtcccagctactcgggaggctgagacaggagaatggcgtgaacccagaaggcggagc

SEQ ID NO: 11015 - DNA, 201 bp, Homo sapiens
aggctttgcccgccttaagtccttttttgaaatggagctgatttaaatatgtaagtatggtcacagcattgacacttcagtggttatcgtaagcttatttstacagtatgtgagatgcagtttgtagcaattgctatgggtaaaatttttattttaagaggtgactttctatttacagttattcatttacactgggttcat

SEQ ID NO: 11016 - DNA, 201 bp, Homo sapiens
caaggtcaggagatcgagaccatcctggctaacgtggtgtaaccctgtctctactaaaaaatacaaaaaaaaaaaaaaaatgagctgggtgtggtggcggscgcctgtagtcccagctactcgggaggctgagacaggagaatggcgtgaacccagaaggcggagcttgcagtgagctgagatcacgccactgcactccag

SEQ ID NO: 11017 - DNA, 201 bp, Homo sapiens
ctttgtgcccttggcaggctctcctggtctgtaggtagcatagatggcctgaatgtttggtaaggggtgctggaaactagggcaagaaaagaggggaaggytgggatgcatagaactgatgtgtgggaaactaccttcatcatccagctcaggtgtgaagccgctgctcatgcgatatgctctgctcacacagatggcact

SEQ ID NO: 11018 - DNA, 201 bp, Homo sapiens
tgtctctactaaaaaatacaaaaaaaaaaaaaaaatgagctgggtgtggtggcgggcgcctgtagtcccagctactcgggaggctgagacaggagaatggygtgaacccagaaggcggagcttgcagtgagctgagatcacgccactgcactccagcctgggtgacagagtgagactccgtctcaaaaaaaaaaaaaaaaa

SEQ ID NO: 11019 - DNA, 201 bp, Homo sapiens
ttaaaacttaacagagtgcacacctaaaattagtgaatgttatgtatgtaaattatatctcaatcaaacttattttgttaaaaaaagtttcgtggagattrttccatattggtgcatatagagctttcctgttctttttcagtagttctttttcactattccttgatttatttaacctgtccaggtggtcttctatatgtc

SEQ ID NO: 11020 - DNA, 201 bp, Homo sapiens
tctcacaatgagagcattaaacatttggtaattaacataatttaatatgccaaaaatgagaaaatagtcaggatgagggatgaggagtacacataggaaakttttgtgattttcttcattttgattgtattgctttcttgtcttcaggagggaagattttgacttcaaaagtaacaaaatatttaagaagggaattcacat

SEQ ID NO: 11021 - DNA, 201 bp, Homo sapiens
ctaagatcgtggttgtagcggttgtatggttgcatttattaaaacttaacagagtgcacacctaaaattagtgaatgttatgtatgtaaattatatctcartcaaacttattttgttaaaaaaagtttcgtggagattgttccatattggtgcatatagagctttcctgttctttttcagtagttctttttcactattcct

SEQ ID NO: 11022 - DNA, 201 bp, Homo sapiens
aatcaacatacacatcttttagaaatggcagcagcttgtcatctttatgagcaatctctcccttaatttctggatagagactaatctgctctcacaggagkctgttggtagaggggtgcctgggagcaggagagggcttcatcttgctgatttcccattctgctcggttctctcggttggaatgcctgatcctgcgagtca

SEQ ID NO: 11023 - DNA, 201 bp, Homo sapiens
agcggccagggtttgggggaagggctgatgatgattgacttcaaagagggatgagacaactttctggggcgatgaacatattctaagatcgtggttgtagyggttgtatggttgcatttattaaaacttaacagagtgcacacctaaaattagtgaatgttatgtatgtaaattatatctcaatcaaacttattttgttaa

SEQ ID NO: 11024 - DNA, 201 bp, Homo sapiens
ttctttatctggaaaataacatgctaaatctccgggtcatcttgagaaatcaaagaaatagctaagaaaaaaacagttgcagggtttggcaaaaggggacrccaaccttagatatgaggtcttctgaaaacttttaaaatttgtttattttttgaatcagtagtgtgtatagttaaaatttttaaatggttataaaagttg

SEQ ID NO: 11025 - DNA, 201 bp, Homo sapiens
aggggccagatgcctctctcctcacactgaccgtgagagcgagtgctcctcatcaacaacgtggggccaggcttgagtcagcagcactgactttatgtgayctagtgcagctcgccagcccacgctgatgtgtgttaatggagggggtgccccttataggagggtggtgtgggctataatttcttctgcattctctgccta

SEQ ID NO: 11026 - DNA, 201 bp, Homo sapiens
agtgtgtttggggaaaagtgaggtataataatacaggaattagtattaaggaatgtagtaattaaactccttttgaaaatgattttaaaagaattcccatratattcaggtaatagcgataaaagcagctaacactaatcgagcatttagtatgtgctggttactgtgagtcactacatgtgagatagttactgtttttat

SEQ ID NO: 11027 - DNA, 201 bp, Homo sapiens
tcaaattttggaagcagcaagatttctctgcaatcctctctagtagataatagtgtgtttggggaaaagtgaggtataataatacaggaattagtattaargaatgtagtaattaaactccttttgaaaatgattttaaaagaattcccatgatattcaggtaatagcgataaaagcagctaacactaatcgagcatttag

SEQ ID NO: 11028 - DNA, 201 bp, Homo sapiens
atctgtttctggtttatgtgttcttacctggatgacagctgtgctcatcctctaatcctgtacaataccttgagagcacaggccttttgtgagatcaaatrcctatgcatgacaggcaaataagcaggctcttcaggaccagggaaacgatggcaacagttctgagtctgatgcagggatggcagagaagcccaggcagag

SEQ ID NO: 11029 - DNA, 201 bp, Homo sapiens
gaattggtgtgtgacacttgcacaggtgccagtgttttctgtgtgggagcactttcctgtatgcattattttcttcttaataatggcacctcctgagagtwtccaggtctcagatcccttctggtgacacagccttgccttgtaagtcaactgtttgctggcgttaaacaagttggggcagatggctctgctgactaggaa

SEQ ID NO: 11030 - DNA, 201 bp, Homo sapiens
atcttaaaaaatgaaggtttttgagcttagtggtctccaggattgcctcaaagctttgccagtctgaatctacccttttcttgctattgtccccattggarttggtgtgtgacacttgcacaggtgccagtgttttctgtgtgggagcactttcctgtatgcattattttcttcttaataatggcacctcctgagagtatc

SEQ ID NO: 11031 - DNA, 201 bp, Homo sapiens
gcaggctcagtcaataggacagacagatgatgagtagacccccaagaatcacccaccagaggaggagcatcaacaccagggcagagaggcagcaaccgcartcaaaagaactaataccagagggtgcagtaacaaggccaacagaaggcttctgaataagcaagactgatgtcttcagagcaatgcaaaaagacagtgttt

SEQ ID NO: 11032 - DNA, 201 bp, Homo sapiens
tttagacattgagagaggtgattatgaaagtacgatagcttgctcaccacctctctcctctgctcctgggagcacaggggagtttcaactctggggaaggygatcatttgggtcattagtagcgctttgagtaccatggtgtctgcagggagttcccagttcttactgctgtctgagaataaaacataatatctttggtct

SEQ ID NO: 11033 - DNA, 201 bp, Homo sapiens
ctgaagccagaaactcccccaaggcaaatcaagactttatggaatcagctctgttactgcaagacatcccctcaaactcccgtctcagtctgtgtgagaascgtgcatgaattcttgctattttcttgatattttcaaatagcagaatacatgataaacttgtaagtccacagatgagtcggtaagctgctgccatatgga

SEQ ID NO: 11034 - DNA, 201 bp, Homo sapiens
gatattttcaaatagcagaatacatgataaacttgtaagtccacagatgagtcggtaagctgctgccatatggagcatgcaccagactgaggtctttggtracagctggaaagactggctctgtctcatttcagcagaatcagaatggattcgaaggctatccagtggaagtgctcagaattgcgctggaaggctggagaa

SEQ ID NO: 11035 - DNA, 201 bp, Homo sapiens
ccattttcatatccaacaaaatgcgttgggaccatggcttcaatcacattacatgctgtgagtttagagtgttggatgctggttttcagaggtgatcaaamctttttttttttcttgtttaagaaacagatagttaagaaagggagattaagttggagttaataagaactctgagaaagaggagaaagaaaaacagcaaaa

SEQ ID NO: 11036 - DNA, 201 bp, Homo sapiens
aagattactccaaaaaaatgccacttaccattcctttggtgtactgcttctagaggcaaagtttactgcttttactgtcatgaaatagactgtgacttgtkatttatcatttatgtgaccaattatagttacaatcatgttccatgtgacaatagaatctttccccccttgaacctcacattatgctgagatgtaggatga

SEQ ID NO: 11037 - DNA, 201 bp, Homo sapiens
gatcataccctgggatctgcccaggtgttttggcctgtttccattttcatatccaacaaaatgcgttgggaccatggcttcaatcacattacatgctgtgrgtttagagtgttggatgctggttttcagaggtgatcaaacctttttttttttcttgtttaagaaacagatagttaagaaagggagattaagttggagtta

SEQ ID NO: 11038 - DNA, 201 bp, Homo sapiens
tctacaaggaagctgagactggcagatgagaaggaattcgcttgccaagcatgaggaagagtgtctcagttggggaggagagctgtatggagccccaaaargcttggcctcttcaaggcactgaaagaccaggtagcaggaagctggttagcagtgaagagaaccatggtagacctaggcagggtccatgccaggtaacac

SEQ ID NO: 11039 - DNA, 201 bp, Homo sapiens
ggtgggacatcaccctggccaccaggtctcctgagagatcataccctgggatctgcccaggtgttttggcctgtttccattttcatatccaacaaaatgcsttgggaccatggcttcaatcacattacatgctgtgagtttagagtgttggatgctggttttcagaggtgatcaaacctttttttttttcttgtttaagaa

SEQ ID NO: 11040 - DNA, 201 bp, Homo sapiens
aggctggcttgagctcctggcctcaagttgatccacccgccttggtctcccaaagtgctggaattacaggtgtgatccaccatacccaacctatttatttwattttattttattttggacggggtcttgctctgtcacccaggctggagcgcagtggcacagttacagctcacttcagcctcgatatcccatgctcaaatg

SEQ ID NO: 11041 - DNA, 201 bp, Homo sapiens
aagtggctgcagctccttccttgcttttgtgggcagatgctcatcctggcctggcgaagggtgggacatcaccctggccaccaggtctcctgagagatcayaccctgggatctgcccaggtgttttggcctgtttccattttcatatccaacaaaatgcgttgggaccatggcttcaatcacattacatgctgtgagttta

SEQ ID NO: 11042 - DNA, 201 bp, Homo sapiens
ttgggaaaacttgcctcattggaacatgggctccaattgctgtggctcccatgggaaactacagtacagcctctcgaacgagtttctccaatgtgctaggscctaccatgagacccaagacagactgtgtcctaactctagtggggtccacagtctactggggaaactggcattaatcaaataattcctctaagtgacaca

SEQ ID NO: 11043 - DNA, 201 bp, Homo sapiens
gctcttcaggaccagggaaacgatggcaacagttctgagtctgatgcagggatggcagagaagcccaggcagagtgcaggggcagtgatgtcattccctaytgtgaggatcagtgacaccctctagaggcatttagggaactttttttgaacagaaccatgtgtcagacactgtcaagaaggccaataacggtattattgt

SEQ ID NO: 11044 - DNA, 201 bp, Homo sapiens
caaaaaaagttgtaaaacaccaggagttcacatcccagaaataaccatgatgagcatagtattgcctcattttgacctttttctctgcatatatagatatmgaccaggcattctcataacatcaacttatttttgaatagtgtattagttaaattttacagtaatatactcagcatattttcaggtgaagtacctctaaat

SEQ ID NO: 11045 - DNA, 201 bp, Homo sapiens
ccctgggccccagctcttgtcatgacctgcccctttcctcctggaacctgctccttacacttctttgccttggttcttatgctcacagaagtcagaggccyggtttgtgtcatattcatgtagaaccatctaccacctgcatgatttttacatttttttggtcttaaactcatactgcctgtgatattttctttcatattt

SEQ ID NO: 11046 - DNA, 201 bp, Homo sapiens
ttgcacaaatctttcattatgtcgttaggttgaaagcctagaaatagaattgccatcaaaaggagtgtatattttaagctttttaaaaattatatttattwttttattttgagatggagttttgctcttgtctcccaggctggagtacagtggagtgatctcagctcactgcaacctccccctcccgggttcaagcaagtc

SEQ ID NO: 11047 - DNA, 201 bp, Homo sapiens
ttcttgctttggctgagaagttatcctttgttcctagttaccaagggtactggctatgagatgccacgtagagtggcaatagtgaagtgcaggccagaggmagggctgtttctatggtggccctgagggttactgggaaggatcagggttgcgcaaggggttggtcctgctactttctgatatctagggttgccagactta

SEQ ID NO: 11048 - DNA, 201 bp, Homo sapiens
aaaggagtgtatattttaagctttttaaaaattatatttatttttttattttgagatggagttttgctcttgtctcccaggctggagtacagtggagtgayctcagctcactgcaacctccccctcccgggttcaagcaagtctcctgcctcagcctcctgaatagttgggattacaggcgtctgtcaccacaaccagcta

SEQ ID NO: 11049 - DNA, 201 bp, Homo sapiens
agtctgctcagcagctgcctccaccacattggttcacccaactgtggcctctggcttgtcttccagcaatgtgtatctgtagccatgactttgcttaagcraacttggaaattcacttcatttaaatgtaatctttcttacttcagggcagttgttcagggaagttgtgatcagtagaaagtaaattggctagagttcagt

SEQ ID NO: 11050 - DNA, 201 bp, Homo sapiens
gctcacatttctcgaacgcttactttgccccagtccttgctttgcctggactaggcactgggatgcagcaataactgtgcccttccctgcacttgaccgcstcaccacctagcaatagacctgcaggcataatggagggtggtgagtgctgcgcagtaactgctctggaaactgagaagaaggtgccatgagtccccctcc

SEQ ID NO: 11051 - DNA, 201 bp, Homo sapiens
cctcaggagaagagatgcaggtactggcagttgcaatttgggccggacagcagagaaatggtaaaagccaagaggatatgggtgggggagcaataccatcmgttccatcttcctgtgttcctttccacccaggttttctctgagctcagctagttcatctctggtaagatagtccagtctcgctgttctctccattgtctc

SEQ ID NO: 11052 - DNA, 201 bp, Homo sapiens
cattttgcactcagacccagtgctcctgtgtttccatggttagcctgaaactcgggaaggagaatttgttagaatttcacagctgaaatcttgttctgacrgagagcaggaattaatcaaaacttgctgggagagaccagagctagagttgatgagagacagctggctccctcctggcccaggcccgtgcaggggggctcc

SEQ ID NO: 11053 - DNA, 201 bp, Homo sapiens
cactgtgggcagctggagctcagtcctgctggggaaccctggcagtcagtgtagaccgtgccccagaattaccccacatcaaggggcaagggagctggggmcctgcattatggagggctgctctggggacttgagttccctggcactcctggcttgccaggcacatggacagagccactagagaaagccctcaggagaaga

SEQ ID NO: 11054 - DNA, 201 bp, Homo sapiens
tcaaggttatacttcgggttaaccacttccttggggttatcagaacctatgagcttggagaaggggccctgcggagctaggacctgaacctctgaggaggrggctggtgctgctgatctctctgagggagtgcaatgaggctggctctgggagaatggggggaaaattgaaaactacaattaactgctgttggggccagct

SEQ ID NO: 11055 - DNA, 201 bp, Homo sapiens
aggtggggcccattcagcaccagtgtaccctcccattaatttctcttccctatcctccatctgccacatgggttcatagataaagtcaaacatccctttayactctaagggtgtgtttccccgataatcaggcttaaaggggatggtaactggagaattttgatatctcagtataataaggcaatgcagaaaattattcat

SEQ ID NO: 11056 - DNA, 201 bp, Homo sapiens
cccatctagcatgagcctttcacagactgctaagcacaattagaatgaaggtctaggcttagccatagccccagaagtgttggggtaaagtggaagaggcyggcagttggatggcatcttgtactgtaccttgtgggcaatgcgaagcaacctggcttatatctgacattaggtggggcccattcagcaccagtgtaccct

SEQ ID NO: 11057 - DNA, 201 bp, Homo sapiens
aaataatgttggaccccaagcattctttttgcaaatatgagggctagactgaagcctcattggaccacaggtcctatgggactggtggagatatagtgccyggagcctggcccttagggaacattcgagcagttagaaagcagaagtgacaggactttggaggctccttattgagcttgtagcatcagccagatgtcaggg

SEQ ID NO: 11058 - DNA, 201 bp, Homo sapiens
ggttcgttcttgtgatagcattgtcctttaggatgccatcattatgtgaatgtttcctgctatgattgtccaaagggaaaatggtctggaagtacacccaygtcaacagagttggatttccactgtggagccaggactatttatatctttcttagacctttcctaagacagaccacatctgccttacccgtcacattactc

SEQ ID NO: 11059 - DNA, 201 bp, Homo sapiens
ctggatggggctacaacattgcagttcatgctcataatggcagcaaatgcttgagggaatccctgagtatgcatctatttcttgaatcatggcatctgctmtaggaaatcctcttaaatgtattcttatctccctaataaaatggaaattggtacttaattggtaaaattttaaataattacccagcatctggtggttcat

SEQ ID NO: 11060 - DNA, 201 bp, Homo sapiens
acaacattttctctagcaattatgggggttttatctcccagatgtgatttatgccatattacactccaagaagggaacatgaagaatgtttgtggctaaaraagtctcaacacaaggaaactacaggtgaaacgtaacaatagtaattgccttactttatttgcgaaggggtggtgaacactaatatgcctgactccatag

SEQ ID NO: 11061 - DNA, 201 bp, Homo sapiens
tgccccttaatcttgttatgtcaccccagtggtgtgaaggccagggctccttagaggtaaaagggtctctttgtgaggcctggaggggagaaggttgagcrgtagcttaggtgaatgctgcctgagcagatgtctgcagtgggagcagaatggtgtgatttactctttgtttttgtgggatgtccttggggagcccaagga

SEQ ID NO: 11062 - DNA, 201 bp, Homo sapiens
ggaaagactaaggtgttggccttctttcaggcactgctattgtctgacttccgtttgtcctgtggccagatttgctctggaagtcccgcagttccactgcmtctgttatcactactctctgttgaccccatctcccagcatggtggcagcagtggagtcccctcaccctatctgtgcctcgtgtctcttcacttcctttgt

SEQ ID NO: 11063 - DNA, 201 bp, Homo sapiens
ggctaagtgcgcagaacatgtgaaatttaagtagatttgtggaaacagaaacacatttttatttagtcgtgagcgtcacttggagtataaatagagccctytatgattcgtgtgctggtctttcttcctggagggcttcagtattatctcatgctgtcatctttatgttgtattggaaaaatctgggattctttttccctt

SEQ ID NO: 11064 - DNA, 201 bp, Homo sapiens
gtatatttgtatctatagtcataaacaagatttctctgtaattttctttcttgtcaggttttggtgtcagatttctgctagtgtttgcaaaaataagcagraagcttgcacttttctctgttctctgaagacatacaaccaacatagttgcaacagcaggcagtgagagctgacccttactgagagcttgtttatgtgcca

SEQ ID NO: 11065 - DNA, 201 bp, Homo sapiens
tcagctggctatgttaagtaggggcttggctcagcctggcctaactgatgttagattttgagttactttaggttttgggtgggactagaaaagcagggagrgctaggagaccacgcatgtgcaagcacacatagatatatattgcccatcgttcctaaccctcctaagggcaggaggccagaggtatgtgggttaggaatg

SEQ ID NO: 11066 - DNA, 201 bp, Homo sapiens
cctgcaggatttcatcgttgttagtgctgctgctgcctgaattgcaggctgttgtatcataccagctagctatgctgcatacaaactgcccccaaattgartggcttttcacaaccattacatctgacaaatttctgggtcagggatccaggaagggtttggcggggtgattcttccgtcccacatgacattgagtgaggt

SEQ ID NO: 11067 - DNA, 201 bp, Homo sapiens
ggctgttgtatcataccagctagctatgctgcatacaaactgcccccaaattgaatggcttttcacaaccattacatctgacaaatttctgggtcagggayccaggaagggtttggcggggtgattcttccgtcccacatgacattgagtgaggtcacttagtggcatttacctggtggctaagctggtcttcagagttca

SEQ ID NO: 11068 - DNA, 201 bp, Homo sapiens
ctctggaggctgggaatcaagctggcagttctgggctttcaccagagtgtgaaacgaaaaccaggaaggggcgctctctgagtgattgcattttgcactcwgacccagtgctcctgtgtttccatggttagcctgaaactcgggaaggagaatttgttagaatttcacagctgaaatcttgttctgacagagagcaggaat

SEQ ID NO: 11069 - DNA, 201 bp, Homo sapiens
tgagtttttatttttagagaactgatattttttctgttcttgatgaggtaatcaggcagtctctatgttacatgagttaagagtcctagacttacttagcyagtcctcaattctgacacttattataagacatctgatccagagctgcatgttcaactccatcaagccttgcctactttcctcatcggtaaaattgacctt

SEQ ID NO: 11070 - DNA, 201 bp, Homo sapiens
cattcttggcctgggaacagcctgtggccccttggagcctcctggctagcataggtgaaggtggtgaatgctttgcccaaggggaccctgcccctcacccrtggacggtgcttgtacctactcactggccaggctgaagcctaaacttgcttgtcaatctctggaggctgggaatcaagctggcagttctgggctttcacc

SEQ ID NO: 11071 - DNA, 201 bp, Homo sapiens
gctgctaggaataggaagcagggaggaaggagcgagttcctttgccctctccagccttgcaggctccctccgatgctccatattagcagagcctcacagcragcctctggcaaaacaagtgaggtttgcagggtcccagctccagtgtcacagtgcagggtagagaagggtgggttggagctgaggacaacagcttcataa

SEQ ID NO: 11072 - DNA, 201 bp, Homo sapiens
gggataagctgctaggaataggaagcagggaggaaggagcgagttcctttgccctctccagccttgcaggctccctccgatgctccatattagcagagcckcacagcaagcctctggcaaaacaagtgaggtttgcagggtcccagctccagtgtcacagtgcagggtagagaagggtgggttggagctgaggacaacagc

SEQ ID NO: 11073 - DNA, 201 bp, Homo sapiens
agctgccgtgagaaactgttgctgggataagctgctaggaataggaagcagggaggaaggagcgagttcctttgccctctccagccttgcaggctccctcygatgctccatattagcagagcctcacagcaagcctctggcaaaacaagtgaggtttgcagggtcccagctccagtgtcacagtgcagggtagagaagggt

SEQ ID NO: 11074 - DNA, 201 bp, Homo sapiens
tgactttgtccatggaatgcctggtgaatgagtgccagccctgggcaggccttccaggcacctctcaatgtctgcatatcttgggctgagtttgttattargacggctgcatttgggcagagcaatacacagatacctgtggtgggctaggtactgctgtcagaagtggtatcttctgtggtatttatctgctgctgtctt

SEQ ID NO: 11075 - DNA, 201 bp, Homo sapiens
tgatgactttgtccatggaatgcctggtgaatgagtgccagccctgggcaggccttccaggcacctctcaatgtctgcatatcttgggctgagtttgttaktaagacggctgcatttgggcagagcaatacacagatacctgtggtgggctaggtactgctgtcagaagtggtatcttctgtggtatttatctgctgctgt

SEQ ID NO: 11076 - DNA, 201 bp, Homo sapiens
tcagatggaggaaagatgggcacttccaggacacagataccctccactcccatccaagctcagcagagggtgctggccaactctgtcatttccaggcctcygcctcaggaacccacagctgagacactgggttaccagccttcctactctttgtgctggcagctgcagaggaaccatgtggatgatgactttgtccatgga

SEQ ID NO: 11077 - DNA, 201 bp, Homo sapiens
aaggtcagtcttcagatggaggaaagatgggcacttccaggacacagataccctccactcccatccaagctcagcagagggtgctggccaactctgtcatytccaggcctccgcctcaggaacccacagctgagacactgggttaccagccttcctactctttgtgctggcagctgcagaggaaccatgtggatgatgact

SEQ ID NO: 11078 - DNA, 201 bp, Homo sapiens
aatgcaccaatttgagagtatgactccatgagttttgaccactgcatacgctgtgtgactaccaccccaccacaataaagaatacttctgtcaccccagakagtttccttgtgcctctgtctggtcatacccctctcctgatagacaaccactgttctgacttctatcaccatagatccatcttgcccattctagaatttc

SEQ ID NO: 11079 - DNA, 201 bp, Homo sapiens
attcagcaaggaaggcagcctcttggctctgcacagttgggaaggtcagtcttcagatggaggaaagatgggcacttccaggacacagataccctccactyccatccaagctcagcagagggtgctggccaactctgtcatttccaggcctccgcctcaggaacccacagctgagacactgggttaccagccttcctactc

SEQ ID NO: 11080 - DNA, 201 bp, Homo sapiens
cttctaagggaaccagcttgccccgggtaacattaaatcttgaattattaaagaggcagaagagccttgaggttgaatgtgaactcaggggccaggtggcygggttccagccctgactctgcccttactaggtgagtttcctgggcaagtcccctgacctttctgtttcaggattctcctctgttggccaggacagcaata

SEQ ID NO: 11081 - DNA, 201 bp, Homo sapiens
ttctctaaattttatagtcatcttgcttttgagaaatatttctttccactaaaatttaagaaaactaacgcagtcttgtatgaggacaccacattgtgtawttttgtacagataggagttttggaaattcctcaagacaacagagccaggaggaagtaagggaatagaaagaagtcagtgttgaagcttttgtcccaagaa

SEQ ID NO: 11082 - DNA, 201 bp, Homo sapiens
gaaagtcaaagtgagcccctagatagctgtaaacctggttctattgtactttgaaaacaaagcatttctcttgtcctccacagtgaggacatcaggaagtragcctcccctgggggaccatgcagataaaggcagaaggagtaggtcagaccccagaagatgggacttttctgattcaagaagttcagtatctttgtgagg

SEQ ID NO: 11083 - DNA, 201 bp, Homo sapiens
gcaggtaaatgcaagtacaacttctacatgaataattgtccttggcagatagagataaactagttaagggtggagggttggttggttgtcattcgtgcctyagatcccctctctactggcctcctgctgagctcagtgcctcacctgcaggagacagggctttgggaggcgctgcgaagaggagggactgttttttgggtg

SEQ ID NO: 11084 - DNA, 201 bp, Homo sapiens
agattgacttttgagagtgtacgcgtgtgtgtgtgtgtgtgtgtgtgtgtgtgtgtgtgtgtgtgtgtcttgggaggcatggaggcatatgtacctaatgyctaggtctgtttggacagcagtgttcctcacagcctcttggcctctctctctggcttgtttgagcctcttcacctcgctgcatacacagcatacagacgt

SEQ ID NO: 11085 - DNA, 201 bp, Homo sapiens
ctgcactccagcctgggctacacaatgagactctgtctctaaaaaaaataaaatatctgggagggaaggtgcttattggtacctgttgcaggaactcttgkcacctgcatacccactgacattccaggaagtcagggcagggtgcagggagaaatgaaggggacattaaataaatgagtgctgtgggcattcagtggtgcc

SEQ ID NO: 11086 - DNA, 201 bp, Homo sapiens
gagccgtgatcatgccactgtactccagcctgggtgacagagtgagaccttgtcaatcagttagtcaacaagccaacaagcaaggtgcagtggtggttgcytaggaggctgaggcgagaggatcccttgagcaccggagtttgaggtggtagtgagctatgattgcaccactgcactccagcctgggctacacaatgagac

SEQ ID NO: 11087 - DNA, 201 bp, Homo sapiens
tcagaaatatgccaaatacatagaaaatgtgaataacagctctctggatagatgtttagttttatctttatccaaatagtgagaatataatttcatatttwaaaaaatcgaagtgtactgttaagcagtggctgagatgctaggtatcccagttgggagagggcagaggtttagctataactaagtgggcagatgccagaa

SEQ ID NO: 11088 - DNA, 201 bp, Homo sapiens
tttgaaataaagtgtttattttctttctctttttcctcttttgggaggaagagcaatccttataccttgaaatgtgtcagattctaatatttggagtgggmcaaggccctccttcccctttcttatgattagttgaaatctgagtttgagcaagtcttgctgttttcagagaatgctctccttctcctgttcttccctcac

SEQ ID NO: 11089 - DNA, 201 bp, Homo sapiens
tgttggccaggctggtctcgaactcctggccttgtgatccacccgcctcccaaagtgctgggagtacaggcgtgagtcaccatgcccggccttcttctttwatttttttttaaagtagaggttgcaaactgacagcctttggaaagaatacagcctacaaatacttttgtttggcttgcacagtatttgtttattgttttt

SEQ ID NO: 11090 - DNA, 201 bp, Homo sapiens
gagacattcatgtctttctgacttctccattacctcctacaaaaggacatgaccccaggctttcaaaggatgcctttagatttatccctatgtccagagtyacatagacaggagggttctaactcagcaaaccaccggttcacttctgcttccgtttggctagaatttggtcagatagttctgtatcctggcttcctataa

SEQ ID NO: 11091 - DNA, 201 bp, Homo sapiens
gggagctgtgggggtaatttggaggtcttggtggaggccttagtgggatctgggaagaagcataggatgtctgggacatgggaggaggccatgtgcctccycaattctgttcctgccgagttagaactgctgtacgccagcctaggatccttccatgttgttctcccattcaagtagacctttttgcaattttaacaatcc

SEQ ID NO: 11092 - DNA, 201 bp, Homo sapiens
tgatcgtctttgcagtggcgatgcatagttcacatgaacatgctaaaggctctaaaaagttccacagtcaaagaatttacttaatgtttaactccacattycccaaatgaaactcatttttacccaggcagatcacatgactctaatattacgtgaaatcactttgggaaactgctttgtctacagtactcatctccacct

SEQ ID NO: 11093 - DNA, 201 bp, Homo sapiens
agacctcataatcttttaaaatattattaaattctgttttatttgtttctttcaaaaattaacagatttttaaaaattgaaaattgaattttcaaaaaatytctcaaaaatctttgagaaaaattgagatgggacaaagactctgtgccttgttcccccttagtgtgagtcctgagtacccagctgtgtggcccacagtct

SEQ ID NO: 11094 - DNA, 201 bp, Homo sapiens
agttaaatgtcagtgatcgtctttgcagtggcgatgcatagttcacatgaacatgctaaaggctctaaaaagttccacagtcaaagaatttacttaatgtytaactccacatttcccaaatgaaactcatttttacccaggcagatcacatgactctaatattacgtgaaatcactttgggaaactgctttgtctacagta

SEQ ID NO: 11095 - DNA, 201 bp, Homo sapiens
ttgatttaatggagctaggtccagtctcagatatctttgaggctttattcatgccccaaattattctcgtatttatttccccagtgtttgagaaggaacaytgggttcccaagactggttcagcccaaaggctggactggaaatatgtgggtctggctttccctaaactatagtatctgccaaaaaacccaccccctggat

SEQ ID NO: 11096 - DNA, 201 bp, Homo sapiens
gaacagacataggctgtctttgcttgtgtagatgacaattacaagactcttttctttaatttatgccctaaatgctataattctggattgaaagcgaagcwaaatttaggaaggcctaatgatgacacacaatgctctttcgcactcatgatacataacttacagggaaaggccctgactccctttttgcatagcgtcact

SEQ ID NO: 11097 - DNA, 201 bp, Homo sapiens
atagctggtagaagccactgcggtattaacactcgttgatggcttagcaggcatggtgttctgtagaaagctatcagttgtttaccctcctaatcctatarctgactgggacctgcagctcactcccactgcccagcatcacaggaagtattgtaccacatattgctaccctgggaaaagcttttgaaataaaaaatttga

SEQ ID NO: 11098 - DNA, 201 bp, Homo sapiens
cagctgtcttgcccagtggagaaccttccagggcaagaagacagtcttgtctcaaccagtcattaacggccctgagtgtgagagtgtgaagggccgggccmcagccagctctgattccctggtgacatgctgctgttcaggaaatggtctcctgataacttctattgtgatttgttcagggaaaatgttgtttttacattt

SEQ ID NO: 11099 - DNA, 201 bp, Homo sapiens
ccaccccaggctccagataagtctgggaggtagatctacagttccaggatgggatacttttttaaaaagtaaatgtaaatgtattgccatatttctcttgaaaaaaaattatcacaagaaaccaacaagaagatatcaaggctttttcttagatctgccagaagtctgtaatttgctctatcccttggattttagtgttca

SEQ ID NO: 11100 - DNA, 201 bp, Homo sapiens
ttttagtgttcacttgctgctttcagatgtggaaggaaaacctcagtccttttgccttgcctccttctccagttgcctcccctcagtgtgtctgccaagacctgagccccaggccagggcagcagcctctgacctttcactccctaacacacaagctggggaccaatgtcactccaaggttggaccctgcccccgtgcctc

SEQ ID NO: 11101 - DNA, 201 bp, Homo sapiens
aaaggagaagggccctgaaaggaaaagggcttcttcggagggcatttgtgtctgctcttggccttgcagataaaataccataatctactcttgcaaatcargccatcctggggtgcatggtcccccaaacactttcatctgccttttccttttgtgcctcatcactgccttgggagggggatcatgcatttgttattatcc

SEQ ID NO: 11102 - DNA, 201 bp, Homo sapiens
ataattatctttggatacaaggatcagtgacaagggtggcaccagtttgaggttggatagagagttgctaggtagatttcctcacagaaggtgtgagtgtgtgtgtgtgtgtgtgtgtgtgtgtgtgtgtgtaaggttgtgatggcctttgtgcaagattgtgtttttgcagatttttttgtgctagttcttgttatcagt

SEQ ID NO: 11103 - DNA, 201 bp, Homo sapiens
tgatccacccgcctcagcctcccaaagtgctgggattacaggcgtgagccaccgcgcccggccgctaccagcttcttaagaaaaaaaaagcactgaaagcrcttgtggtgctgtccttgggtgctcctttgcttttatctcagaggctggcacatttgtaggcaggactgtgagacacagtctcccctgcccccaggagtg

SEQ ID NO: 11104 - DNA, 201 bp, Homo sapiens
ggaggccagaggtatgtgggttaggaatgctatgggctgcagctaagagaaaacctggctgaggctttcaactatatgacctcaaattagctccctggagrtaggtggccccagggctggcttagtaacctaacaatggcaccagtggcaccaggggtgaaggctctttatctgtccttgccttgcagaaggccaaggcac

SEQ ID NO: 11105 - DNA, 201 bp, Homo sapiens
ttagatcttatgtgagtggagtgtggtgttcgtccttttgtgacgaacttacttcatttagcataatgtcctcaaggttcatcatgttgtagcatgtgacyggatctccttcctttttaaaggcagaataatatttcattgtatgaattcaccatgttttctttattcatctattgacggacatttaggttggttctatct

SEQ ID NO: 11106 - DNA, 201 bp, Homo sapiens
gcctaactgatgttagattttgagttactttaggttttgggtgggactagaaaagcagggagagctaggagaccacgcatgtgcaagcacacatagatatrtattgcccatcgttcctaaccctcctaagggcaggaggccagaggtatgtgggttaggaatgctatgggctgcagctaagagaaaacctggctgaggctt

SEQ ID NO: 11107 - DNA, 201 bp, Homo sapiens
ttttgtggtttaaactagacctactatggcttttaaggccaccattatttcctcaatgtggagaaactcagtaatgcaagttctctgttccacgttagggrtcacattatggttaaagacaatgggaagattttagagtttgacaggacctttcagataccacctagaacagcctcctgtctttcatgaggtccagagagg

SEQ ID NO: 11108 - DNA, 201 bp, Homo sapiens
taattatctttggatacaaggatcagtgacaagggtggcaccagtttgaggttggatagagagttgctaggtagatttcctcacagaaggtgtgagtgtgtgtgtgtgtgtgtgtgtgtgtgtgtgtgtgtaaggttgtgatggcctttgtgcaagattgtgtttttgcagatttttttgtgctagttcttgttatcagtt

SEQ ID NO: 11109 - DNA, 201 bp, Homo sapiens
aattatctttggatacaaggatcagtgacaagggtggcaccagtttgaggttggatagagagttgctaggtagatttcctcacagaaggtgtgagtgtgtgtgtgtgtgtgtgtgtgtgtgtgtgtgtgtaaggttgtgatggcctttgtgcaagattgtgtttttgcagatttttttgtgctagttcttgttatcagttg

SEQ ID NO: 11110 - DNA, 201 bp, Homo sapiens
attatctttggatacaaggatcagtgacaagggtggcaccagtttgaggttggatagagagttgctaggtagatttcctcacagaaggtgtgagtgtgtgtgtgtgtgtgtgtgtgtgtgtgtgtgtgtaaggttgtgatggcctttgtgcaagattgtgtttttgcagatttttttgtgctagttcttgttatcagttgt

SEQ ID NO: 11111 - DNA, 201 bp, Homo sapiens
ttatctttggatacaaggatcagtgacaagggtggcaccagtttgaggttggatagagagttgctaggtagatttcctcacagaaggtgtgagtgtgtgtktgtgtgtgtgtgtgtgtgtgtgtgtgtaaggttgtgatggcctttgtgcaagattgtgtttttgcagatttttttgtgctagttcttgttatcagttgtt

SEQ ID NO: 11112 - DNA, 201 bp, Homo sapiens
gattgtgtttttgcagatttttttgtgctagttcttgttatcagttgtttatgcatgaaaacctttccttcatggcgtcccacagctctatttgtcagggttttttttttttttttaaacataagtgactccattttgattctgacaacttttgcaattctaaggatctatgagctcttgggtgctgccaggagttagaac

SEQ ID NO: 11113 - DNA, 201 bp, Homo sapiens
cacctgaggtcagaagttcaagaccggccttaccaatatggtgaaaccccatctctactaaaaatataaaaattagcggggcgtggtggcgtgtgcctgtrgtacccagctactagggaggctgagacaagagaattgcttgaacccgggaggtggaggttgcagtgagcggagatcgccgcactgcactccagcctgggt

SEQ ID NO: 11114 - DNA, 201 bp, Homo sapiens
gtggtaggaggaggagagggagacagaagagaaatagcgtttctaaattttctatttgttactgaaatgtaacacatccaggaaagtgtccatatcatatrcagttatcacaaatttgtataatgtcactgaggttgaatgacaacattatccgcacccccagcaattcccctccctaattgcaaccctgctttctcctct

SEQ ID NO: 11115 - DNA, 201 bp, Homo sapiens
cccacctcggcctcccagtgctgcatagaattctgttgtattgctgtaccatgatttacctgtccactctagcactgatgggcctttaggtttcttcttgtttttttttttttttttttgatattacatatgcagctttgaacattttgcatgtctcctggtagaaatgtatgcatctctattaggtatagtcctagaaat

SEQ ID NO: 11116 - DNA, 201 bp, Homo sapiens
ccacctcggcctcccagtgctgcatagaattctgttgtattgctgtaccatgatttacctgtccactctagcactgatgggcctttaggtttcttcttgtttttttttttttttttttgatattacatatgcagctttgaacattttgcatgtctcctggtagaaatgtatgcatctctattaggtatagtcctagaaatg

SEQ ID NO: 11117 - DNA, 201 bp, Homo sapiens
aaatgcccatggtttggaggcaggaatggtgttccaagagtagtagggagcctcgggactagagtttggaggatgagcggggagagtgggaggagatagtrggaaagtctgtggagccagttccctgaggggcctggtgggccatgctcagtgggggtttcatttgacgagccatgggaaggcttccagcaatgggggatg

SEQ ID NO: 11118 - DNA, 201 bp, Homo sapiens
ttttgggtattacattttaactagggaaagatatgatcagatggatgtttttaaaagctcactttgcgctgggcatggtggctcatgactgtaatcccatyactttgggaggctgaggtgggcacattgcttgagcccagaagttcaagaccagcctgtgcaacatggtgaaagcctatctctactaaaaatacaaatatt

SEQ ID NO: 11119 - DNA, 201 bp, Homo sapiens
gtgtggtagtagcatgacttttggctggtagtacatttttagggactgttttcttgtgtcattcttacttactgtaagtttgcccttcgtatcagttcctyctctctcaaacactttcatgactgcctgctggcactgtctatccatgtggttgctcaggccaaaaaaagagtactttttacttctaattcatctgcagtc

SEQ ID NO: 11120 - DNA, 201 bp, Homo sapiens
gcttttattactattacaatcacctccattatcaccatcatgcttctagaaaggccaccaccatcacctggaggtacactggccctgattggtcttcttaygtctattatgcttttttaaaaattgtggtaaaagatgcataatataaaagtcaccactttaaagtgtgattcagtggcattagtgcattcacagtgttgt

SEQ ID NO: 11121 - DNA, 201 bp, Homo sapiens
gccttttacaccctcaccagcaatgtataagagtttgagttggtccccatccttgtatattcagtattgtcagtcatttttattttagccattctggtgtrtaattgtgtttctttgtgatttagagctgcatctcccatatgactaataaacacgttttcacgtgcccctcagccattgggacacttattttagcctgtt

SEQ ID NO: 11122 - DNA, 201 bp, Homo sapiens
tttgccgcagcagctggcaagtcaggcattgggctgagtggaggcagggagtggtaggaggaaccggcggggcaggagtgtggaggggaagtccaggtagytgtgcaagctcagggtgaccagaagaacagaagacctgctgaaatccaggctttgggatttagaacctgagggaaacatggggtgtcagcatgtgctggc

SEQ ID NO: 11123 - DNA, 201 bp, Homo sapiens
cgtgggctcgtctctgcagagggagatcaacctgaaaagatctgtttctgaaatatatgtgggtgaccaagggacggggtgcaggggaattctgaaggctyaggggaaggtcaggtgggtttcagcagtgagagacttgacctgcacagcatctgttatccccatgagccttcatgaccagtatctttggagttttgtcta

SEQ ID NO: 11124 - DNA, 201 bp, Homo sapiens
agtcagatctaaaaccagggaggtttgggaggcccaggtgggaggatcacttgaagccaggagttcaagaccagcctggccaacatggtgaaaccctgtcyctactaaaaacacacaaaaaaattagcctggtgtggtggtgcttgcctgtggtcccagctgaggctgaggtgggaggattgtttgagcccaggaggtgga

SEQ ID NO: 11125 - DNA, 201 bp, Homo sapiens
caggggcaggctgctgctagagttcttggacttcagagccaagagggtctgcttcaaaacgtggcttttaagaaatgtgcagacacacgtacatgtttgtktagacagagccatgtgggatgtagggctttgcctgttagtgtgaaacatttcttcagtgtttcctacagtgttctgatttgtactttggtgcttggacat

SEQ ID NO: 11126 - DNA, 201 bp, Homo sapiens
tgtagggctttgcctgttagtgtgaaacatttcttcagtgtttcctacagtgttctgatttgtactttggtgcttggacatttcctgttggatggcttaayggaggatggcaagcagccttctctgatcacttctaggagggttatttgcagttatcagctgctgggggtcagggggcatctctcgtgcctccatctgtag

SEQ ID NO: 11127 - DNA, 201 bp, Homo sapiens
aggataaggaaagaaagtcaaagtgagcccctagatagctgtaaacctggttctattgtactttgaaaacaaagcatttctcttgtcctccacagtgaggrcatcaggaagtaagcctcccctgggggaccatgcagataaaggcagaaggagtaggtcagaccccagaagatgggacttttctgattcaagaagttcagt

SEQ ID NO: 11128 - DNA, 201 bp, Homo sapiens
tcaatctttgcagtagaaagagaaatgtagaaatctgccagaaaatgtgctggcagtgaaatggagagtttggggagggaaaaatgggcaggccttatggwaatgtgataggaaatgaggtggaggtgaaaggtcaggtaactgtgggggcccagctctgggtgaggtgtcctagaattcagcaaggaaggcagcctcttg

SEQ ID NO: 11129 - DNA, 201 bp, Homo sapiens
ataacattcacaggttccacagatgaggacatggacatctttggggggcctgtcatgctgcctgtcctactccctattcttcctgctccccagccctaggsaaccgctaatctactttctgtctctagagatctactcactttttttattcctctgcatattctgtttcttcctcgagtttcatgttcagctttttcctct

SEQ ID NO: 11130 - DNA, 201 bp, Homo sapiens
ggcctagtagaccattgaaaggacttggcttttactcattgcaaagtacggaggggacaaatgacatgaccttctgcatctcctcccacgccttgggcccrcaggctgcctctgcactgttagtcctccctgacttcctgccccaggctcactgcccccatccatgttgcacacccctctctacctgcagccgccatcccc

SEQ ID NO: 11131 - DNA, 201 bp, Homo sapiens
gtggcttatgcctataaccccagcacttcgggaggttggggtgggcggatcacttgaggttaggagtttgagaccagcctggacaacatggtgaaaacccrtctctgctaaaaatatgaacattagtgggatgtggtggcgcacacctgtaatcccagctacttgggaggctgaggcagggcaatcgcttgaacctgggag

SEQ ID NO: 11132 - DNA, 201 bp, Homo sapiens
gcagaggttttgtttttgtcaatttttcctttaagcttttctatgaggtataatactaaagcacttaacacacccagctgtgagtgcacagcccgatgggttttcacgcatgtacacttatgcatccccattgccagtactccggaaggacccctgcaccctttcccagtcagttcctctgcccttggtgagtgaacaact

SEQ ID NO: 11133 - DNA, 201 bp, Homo sapiens
tgaaggaggtaaggggagagaaccatgtggagggatctgggagaagagcattccaggcagcggaaacagccggtgcaaaggccctgaggcaggagtgcctrttgttccagggacagtcaggaggccagtgtgtctagagcagaatgagggtgtaggtattaagagacgaggtcagagacatgacagaggcctgaccgtgta

SEQ ID NO: 11134 - DNA, 201 bp, Homo sapiens
tagggagttggcaaaatgggttgctaagttctaggtaaagggaacgctttaaagattacaaaactccttttttggtaatattaaaaaattattggccaggygtggtggctcatacctgtaatcccagcactttgggaggctgagactggcagatcacctgaagtcaggagttcgagaccagcctgaccaacatggtgaaac

SEQ ID NO: 11135 - DNA, 201 bp, Homo sapiens
gggaggggcaggggttcttattcctgttgcaggtagcccctactgctgtgtcgttcccctatttcctggggttcaactgcatagtctgagctaattccaaytggctgttttaaagagagcagactacgatcctgagtggcggggtgagtagtttggtgggaagggtggttacagaacaggtgactcaggatgatttgggtc

SEQ ID NO: 11136 - DNA, 201 bp, Homo sapiens
tcctgttgcaggtagcccctactgctgtgtcgttcccctatttcctggggttcaactgcatagtctgagctaattccaactggctgttttaaagagagcagactacgatcctgagtggcggggtgagtagtttggtgggaagggtggttacagaacaggtgactcaggatgatttgggtcagagcaagtgaccaggggtga

SEQ ID NO: 11137 - DNA, 201 bp, Homo sapiens
ctgttgcaggtagcccctactgctgtgtcgttcccctatttcctggggttcaactgcatagtctgagctaattccaactggctgttttaaagagagcagastacgatcctgagtggcggggtgagtagtttggtgggaagggtggttacagaacaggtgactcaggatgatttgggtcagagcaagtgaccaggggtgact

SEQ ID NO: 11138 - DNA, 201 bp, Homo sapiens
gatggagcaggtaaccagggtgacttaggttaaagcaggtgaccaggggaacagatctgaactactgattagaactggcgggaaagttgtttactgaaackagaggcaagggggccaaagagaaccaggaagttaaactttaaaatggaaaatcaaagaataagagagctgaacatattgacatactgattctttgaagag

SEQ ID NO: 11139 - DNA, 201 bp, Homo sapiens
cccagactcaagccatcctcccacctcagcctcctgagtagctgggactacaggtgtgcaccaccgcatccagctaatttttgtatttttgtagagatggsggtctcactttgttccccaggctgattttcaactcctggactcaagtgatctgcctgcctcggcctcccaaagtgctgggattacaggtgtcagccaccg

SEQ ID NO: 11140 - DNA, 201 bp, Homo sapiens
aggaatgggtttctaagtccaagctgaggtagaatcctggcattgccatttactagagctgtgtgaccttagacaattcacttaacctctctgagcctcartattcttacctgttaacaagtggggatatgggttcccagggatgagggaccggtgaaatgatatgcctggagacagctaacacaatgcctggaaaatgct

SEQ ID NO: 11141 - DNA, 201 bp, Homo sapiens
atgttttctgttttcagtggcatagaactagataaaaggtggcagtgcagaggatggaagtggtattgctcagtgggaaagggaaggcattttaggtttgrgacatattacaatattgccttttagcgtagaaaagccctccttcctgatgctcttgctagtgctgggtggaaagattccctttcaactcaacatgtgtga

SEQ ID NO: 11142 - DNA, 201 bp, Homo sapiens
cagtacttctgcagtgagatgaaactttggaggagtaaagttggtgtttgtaaattatctagcacagtgcttggcacacgttgcaggttgaatttatttgyttttccttacttaccctgtgttaatatgggttctccccaaaacagagcctgggtcaaggatctgagtgcatgtggttgatacacaaatgatcccaagagg

SEQ ID NO: 11143 - DNA, 201 bp, Homo sapiens
tgacatctagattggtgcttgaccagattctgggtactgtggcccagccaagttgacacataaaattagccatcagagcagccaaatagagggtgtcttaytgagcaggttaccactgtgggcagctggagctcagtcctgctggggaaccctggcagtcagtgtagaccgtgccccagaattaccccacatcaaggggca

SEQ ID NO: 11144 - DNA, 201 bp, Homo sapiens
cagcaggcgctggcagggtggaagacctggcagtgcctgatgctgcaggaatggccagacactgacccatgggcagggtcagagagcggaggaggtggaakaatgcacttaatccaggccacatggtgggtggaatgagcatgggttttggagacacatagatccagtgtgtatccagctggacacataattgtgacctct

SEQ ID NO: 11145 - DNA, 201 bp, Homo sapiens
cagactttgttccattcaccgtattggagggcacctccggagggtataggattttgtgataaggcacatcctcctgaggggagggcaggtactttctcacrgcctcactgtggtcagcagagctgaggcagctccagccacttccttggcttctctgcctcagagttcacacaccccggcttatcttccctcttccccgag

SEQ ID NO: 11146 - DNA, 201 bp, Homo sapiens
agttctttttcactattccttgatttatttaacctgtccaggtggtcttctatatgtcagttccagactaacctgatctgatgcttgtagactagttatcytagtttgcttctccagaagaggctcctcttctctcccctagatccatagtatcctggctgaggacccctgagagggcagcatggaggggccctggtgctc

SEQ ID NO: 11147 - DNA, 201 bp, Homo sapiens
cttggctttatgccttcatataccttttctctctactcatgtagaaactcttcttcagcttcatgttttaataatggaagaacttagtgatgtttcatatstagagatttttctctaggtccttctcatcgataagacctgtttcaagatatggcaagccctagttctgatctctggggtcctcaccatttatagacttcc

SEQ ID NO: 11148 - DNA, 201 bp, Homo sapiens
agagctgggatttttttttgtggaggaataggggagacttttctggtaaagaccagaaaacctgctagacaaattctaaaagagccataacactcagagckgggattttaacttcatcttctgcttcagggaccacattgttcccagtgtgtttaaacacctggctggtttttcacttggggttctcattcagattcgtga

SEQ ID NO: 11149 - DNA, 201 bp, Homo sapiens
atttcttttattggatgggtcagtggtttttcttacgagcataaggtagaaacttttttggaactaaattcttctcagtcagcttctatagttttcactgkacttttttttttttttttttttttttttgagatggagtctcactctgtttcccaggctggagtccagtggcacaatctcagctcactgcaacctccgctt

SEQ ID NO: 11150 - DNA, 201 bp, Homo sapiens
atcacttcacatgggaatcctaggactccatattatattcttatcctgttgaaaatttgaccttttaaagatttatttatatttagctcaggccttaaaarttccatgtactatctaaaaagggaaaagttcatcccagtcaatgtcctgtcttgcttatgtttaagttggataggaagaaaaaaatccacaccaggagaa

SEQ ID NO: 11151 - DNA, 201 bp, Homo sapiens
ctgggctacataggctaaactaagaagtttggattttatttacagtgctctgggaagcagggaagtgacctgatattgtagatattttcaaaaaatcactstgggcctgtggagtgaatggaggacaggagctggagtggaagcagatagcccagctaggaggcaagaacagtggacaagacggctggactagtgtggtca

SEQ ID NO: 11152 - DNA, 201 bp, Homo sapiens
ggggaggaagatggctaaatgtatatggtatttcttgttttctgctcttactcttcctacctccaaccccattccaaatttcctcttaagaaaaggaaggrgagtttgtttttctcagtagagtaagtagtgactgcctaggtggcaggattttggatggtagtggtgatgttacttattgatggcacatttgatgactgt

SEQ ID NO: 11153 - DNA, 201 bp, Homo sapiens
cttttttttttttttttttcctgctgagggatcttgtccccaaattaatgcttgaacaatcaacaaccaataatttctggtatccagggactcagacatgrcaaccagaattagggaagctgcacttgtattattaatgtggctttttaacccatagctgtttttttaccctcagatgtggccattggtgcacccaaggag

SEQ ID NO: 11154 - DNA, 201 bp, Homo sapiens
attttatccccattcatggaggggaagctgaggtacagaggcattattgcccaagttacatggctaatgagttgtcgagcacaggcctgtgcctttgcccmcccaggctgactgcctgtcaggaagtcaagaatccgagtttgggggcttcagggcgctcaaacatctgtcttgtgaagttctgttctgcctgctttcctg

SEQ ID NO: 11155 - DNA, 201 bp, Homo sapiens
tgcagaagataacaaatgggtgaatgtatctagcatggaaacaatctccctcttcccttcaaatgtacctgggtttgaaagcctaaaggtaaaggattcctttttttttttttttttgagacagagtctcactatggcatgatcttggttcactgtaacatctgcctcctggactcaagccatcctcctacctcagcctcc

SEQ ID NO: 11156 - DNA, 201 bp, Homo sapiens
ttttttttttttttgagacagagtctcactatggcatgatcttggttcactgtaacatctgcctcctggactcaagccatcctcctacctcagcctcccargtagctcggaccacagacatgtgccaccatgcccagcaaatttttgtatttttttttgtagagatggggtttcaccatgttgcccaggctggtctcagac

SEQ ID NO: 11157 - DNA, 201 bp, Homo sapiens
gtatagcctctccagcgccgctgcgcggggtggggctccccaggggcagggtgtctgggatccactggggcgcactggagcccagagccccggcgcccccsccccccccagctcctacaagaccctgggtggaagtggagcggagaagctcctaggatatagggaagaggaaggtgagggagcacttcccagtgacaccgc

SEQ ID NO: 11158 - DNA, 201 bp, Homo sapiens
ctgtaacatctgcctcctggactcaagccatcctcctacctcagcctcccaagtagctcggaccacagacatgtgccaccatgcccagcaaatttttgtatttttttttgtagagatggggtttcaccatgttgcccaggctggtctcagactcctgggctcaagggatccacccaccttggcctcccagagtgcgggatg

SEQ ID NO: 11159 - DNA, 201 bp, Homo sapiens
ctaccatgttgatggggaaatgagtgaggagagaattagaaacccagacatcttctgcctgattatagcagcagctagattgacttttgagagtgtacgcktgtgtgtgtgtgtgtgtgtgtgtgtgtgtgtgtgtgtgtgtgtcttgggaggcatggaggcatatgtacctaatgtctaggtctgtttggacagcagtgt

SEQ ID NO: 11160 - DNA, 201 bp, Homo sapiens
gttggccaggctggtcttaaactcttgacctcaggcgacctgcccgccttggcctgccaaagtgctgggattacaggcgtgagccaccacactggcctacttttttttttttttttttcctgctgagggatcttgtccccaaattaatgcttgaacaatcaacaaccaataatttctggtatccagggactcagacatgac

SEQ ID NO: 11161 - DNA, 201 bp, Homo sapiens
actcttgacctcaggcgacctgcccgccttggcctgccaaagtgctgggattacaggcgtgagccaccacactggcctacttttttttttttttttttccygctgagggatcttgtccccaaattaatgcttgaacaatcaacaaccaataatttctggtatccagggactcagacatgacaaccagaattagggaagctg

SEQ ID NO: 11162 - DNA, 201 bp, Homo sapiens
aaaaattttaaatgatgacgtttggccaagacaagtaataataaaggagtgtgtggccttcaactgcctgctaaagacttgctgatcacattaggattactttttttttttctttcaacaactttaagaccaagtgtcctagggaagctggaataaagcagtcacagttcttatttgtgactgtggtcttttcctgtgact

SEQ ID NO: 11163 - DNA, 201 bp, Homo sapiens
tcatctttgctctcttcattatcctgagcatcttactttggtttgtcaggattcttctcaaataaaacacactcctcaacttttacagttgaaaacaggctttttttttttcttcttttctttttttgagatggagtcttgctctgtcacccgggctggagtgcaatggtgtgatctcagctcaccacaacctccgcctcc

SEQ ID NO: 11164 - DNA, 201 bp, Homo sapiens
tcctcaacttttacagttgaaaacaggctttttttttttcttcttttctttttttgagatggagtcttgctctgtcacccgggctggagtgcaatggtgtratctcagctcaccacaacctccgcctcctgggttcaagtgattctcctgcctcagcctcctgagcagctgggatcacaggtgcacaccaccacacctggc

SEQ ID NO: 11165 - DNA, 201 bp, Homo sapiens
agtagtatgtaatggttccagtttgtccacatctagtccagcatttgttattgtttgtctttttgattgtagccattctaatgagtaggaagtagcatctytttgtggttttgatttagatttccctgaaggttaatgatgttgagcatcttttcatgtgattattggccatctgtatgtattttttggaaaaactattca

SEQ ID NO: 11166 - DNA, 201 bp, Homo sapiens
ggggccaggccacgtggggcctagcaggccagggcaatgtgctggaattttattctgtgtgtgagtggggaggccactgaaatcaattttgggtattacaktttaactagggaaagatatgatcagatggatgtttttaaaagctcactttgcgctgggcatggtggctcatgactgtaatcccatcactttgggaggctg

SEQ ID NO: 11167 - DNA, 201 bp, Homo sapiens
caggctggggccaggccacgtggggcctagcaggccagggcaatgtgctggaattttattctgtgtgtgagtggggaggccactgaaatcaattttgggtrttacattttaactagggaaagatatgatcagatggatgtttttaaaagctcactttgcgctgggcatggtggctcatgactgtaatcccatcactttggg

SEQ ID NO: 11168 - DNA, 201 bp, Homo sapiens
ccaatggccagttctaattattcccattgttctggcctgtctgccatattggacaaaattgatccttcctttcttgagactgtcctctgtgaccatgtggrtgactcctctctcgattttcctcttccttctctagccatgcttttccagtcttgttggctgacacctcctcatcttcaactcctaaatgtgagtcctcat

SEQ ID NO: 11169 - DNA, 201 bp, Homo sapiens
gcctgtgtcttactgatttcttttaccaaagctcagatggggagattggcaaggccactgaaatagtgactggcaactcggtttctttcctcctcaccctytgtgatttcaaccctttcctgctccgttctcctttgagaatgggtaatcagaggggaggaagatggccttggcatatcactggggaaggatttctgagcg

SEQ ID NO: 11170 - DNA, 201 bp, Homo sapiens
tgccatgtttaaatgttcttaaatttgggattgttgaagtctgaattttactgtgctttaaaattgtgatggaaaaacttcctatggattccaaagatttstgtaccactctattatcagggaatgactggcttttatttctagtgtgtgtttgcatttcctaggacagtgatcatttccagggaaggaaatagattaccc

SEQ ID NO: 11171 - DNA, 201 bp, Homo sapiens
ctgagacatagtagcctttagttatttttgtctaattcttctttccctgatacagtgcccaccataaatccccagtcatggtgctgacctggcatgtgaarctggctgggaggaaagagatttttctctcccagcaaagtagtaaacaggctctctcaagcattcatccatctggggagcttggcacacaggacagatcct

SEQ ID NO: 11172 - DNA, 201 bp, Homo sapiens
ggaaagagagacaaaggcagggagacaggcccagcagggccggcagagcctgtagtgacggaggggagcagccttatctccgggaacccgagcgccccgtscgcggcggggagggggcagttcggggcgccccggcgggtcccaggggctgactcccgcccgggaagtgcgcgcagggctcacggcccgcagggggcgctg

SEQ ID NO: 11173 - DNA, 201 bp, Homo sapiens
aggtgcacaccaccacacctggctaattttttaatatttttagtagagacaggtttcaccatgttgatcaggctggtctcgaactcctgacctcgtgatcygcccacctcagcctcccaaagtgctgggattacaggcgtgagccattgcgcctgacccaacaggccctcttaaaaccggggccatctggctgaaggtcca

SEQ ID NO: 11174 - DNA, 201 bp, Homo sapiens
ccctctcctgatagacaaccactgttctgacttctatcaccatagatccatcttgcccattctagaatttcacattggtgggaatatacagtatggactcttgtttctggcctcttttaatcagtgtgatgcatttgagattcgttcatgttggtgtgttgcttgtttttccccttactgagtagcactccattgactgaa

SEQ ID NO: 11175 - DNA, 201 bp, Homo sapiens
ctagatcagtgattaggccaagaacgtctttgagccattttctggtctcccaagtcccttaccctcttggaagagatcagaggtggtcaccctcagcttcrccctcatctatgtgaaccctgatgccctaaccctgtgcctacacccaagggtcctggagaggttgaagagacaagagggaggatgggaggctgctccagg

SEQ ID NO: 11176 - DNA, 201 bp, Homo sapiens
taattcccacatgctgtgggagggacctggtgggagataattgaatcatgggggtgattttccccatactgttcttatggtagtgaataagtctcatgagktctgatgcttttataaggggaaactcctttcacttggctctcattctctcttgtctgctgccatgtaagatgtgccttttgccttccaccatggttgtga

SEQ ID NO: 11177 - DNA, 201 bp, Homo sapiens
gccctcatctatgtgaaccctgatgccctaaccctgtgcctacacccaagggtcctggagaggttgaagagacaagagggaggatgggaggctgctccagrgatgagggatggggggatgaggttggtgagagtgatggaatctggtacatgggctgggggcgaggggccctcatcttctgagccaggccccaagatagga

SEQ ID NO: 11178 - DNA, 201 bp, Homo sapiens
ggctctttatctgtccttgccttgcagaaggccaaggcaccttgagcaacatgtcaaagggcatcccaactggttgtattatttaccttgaagtgaagtgwcaggatttgaactgtcagccctcagggagaagtgttccagctaccaggtttttttttttttttttttttttttttttttttttttttttttttttttttt

SEQ ID NO: 11179 - DNA, 201 bp, Homo sapiens
ctctttatctgtccttgccttgcagaaggccaaggcaccttgagcaacatgtcaaagggcatcccaactggttgtattatttaccttgaagtgaagtgtcrggatttgaactgtcagccctcagggagaagtgttccagctaccaggttttttttttttttttttttttttttttttttttttttttttttttttttttga

SEQ ID NO: 11180 - DNA, 201 bp, Homo sapiens
cccgcctcagcctcccaaagtgctgggattacaggcgtgagccaccgcgcccggccgctaccagcttcttaagaaaaaaaaagcactgaaagcgcttgtgrtgctgtccttgggtgctcctttgcttttatctcagaggctggcacatttgtaggcaggactgtgagacacagtctcccctgcccccaggagtgtggctgg

SEQ ID NO: 11181 - DNA, 201 bp, Homo sapiens
agtgttcaggaccagctcattagcgggacacaagctgctgtagcctctgtaaatactgtaggaaatacagactttctctgtaggaggtgaatctgccttgscctctgaaacaggcagagtccagtcaggaaaacaaaaaccataccagttattttaacagaggaaatttagcactgggaatgggttaaacaggtcatggac

SEQ ID NO: 11182 - DNA, 201 bp, Homo sapiens
acaattaactgctgttggggccagctgccgtgagaaactgttgctgggataagctgctaggaataggaagcagggaggaaggagcgagttcctttgccctytccagccttgcaggctccctccgatgctccatattagcagagcctcacagcaagcctctggcaaaacaagtgaggtttgcagggtcccagctccagtgtc

SEQ ID NO: 11183 - DNA, 201 bp, Homo sapiens
gttctagagatgaaatgcttccagaatgattgcacttggtgaattggataatgcggtatgtctgtgattgtatgttttaacattttagagaaatctgaaagtttaatgtgctggcatgcacacaccccgctggagaggagcagcagttgccttgtcctcagctcagtttctgtgaactgtgggttgtttctctcttccttg

SEQ ID NO: 11184 - DNA, 201 bp, Homo sapiens
gagagggagccaggagagtggagcacaggagggcagcaaggcaggctggggccaggccacgtggggcctagcaggccagggcaatgtgctggaattttatyctgtgtgtgagtggggaggccactgaaatcaattttgggtattacattttaactagggaaagatatgatcagatggatgtttttaaaagctcactttgcg

SEQ ID NO: 11185 - DNA, 201 bp, Homo sapiens
gttattaagcactgggatacaccagtgaacaaaaaaaacaaggatgctgccatccctagtcccataaattagtgggcaaaagagatattaagacaagtaaytgagagagaaaagaccagagggaaggtgagtatttgatttaatctagataggagggtcaagaaaggtctgggacctttcgacatgattagaaggatgcgt

SEQ ID NO: 11186 - DNA, 201 bp, Homo sapiens
ggaagaggaagttctcagcttcattgttactgctcagaggtaaggggggggtttaaacacttttttcaaagatgagagatttatgggaccaggaaaggatrtgtcctggttaagctttgatgaatcccaggatgctgaggaggaagaaatggttactcagtgataaagccttgagccgcaaagtggaattggatttcttgg

SEQ ID NO: 11187 - DNA, 201 bp, Homo sapiens
tctgactcagcaaaccattttgtgtcctggtaattaatggtaatttctgttagtttgttttttagggtttctaatttaaatgagaagtaaaagccagtcarcaaccctcacaaagcaagaaagggtgactgaactatcccaaaaatacaatggacttaatgatggttaaatggaactggtgaagaaattagcaaaatgatt

SEQ ID NO: 11188 - DNA, 201 bp, Homo sapiens
gtgtttgacctactactgcccagcagtctaacatttctttgaacacctactttgtagcaggcactatgatgggtgttttataaacattcttttgcttaaaycttacaagaaaccttcttaggtacacttttattcctcctgttttacagaagaggaaaactgaggcttggagtgtttaagacacttgtctaagagacacag

SEQ ID NO: 11189 - DNA, 201 bp, Homo sapiens
atttctccatgcagcttattgacgtaacctaagatgagaagacactactattcatgcctggtcagaaagcacagactggctatgtaacagccccagcaggraagcactgggtgcaagacactggattaaattgagacaaatgtttgcttctcagaatggcagtgaccatgggtgcttgactgtgggtggggatgacagatt

SEQ ID NO: 11190 - DNA, 201 bp, Homo sapiens
gctgctggccgtgctgctctggaaggtgagtctggtgattgcaggtccccctggggtccccactcatagatgcccagctctcctgcctttccagggaagamggagtatcctgttagagcttccttcatggcaccggtacagtgaaggacagtgacccttcaggcagggagtggaatcttggctccccttgaggccattcac

SEQ ID NO: 11191 - DNA, 201 bp, Homo sapiens
catagtattgcctcattttgacctttttctctgcatatatagatatagaccaggcattctcataacatcaacttatttttgaatagtgtattagttaaatyttacagtaatatactcagcatattttcaggtgaagtacctctaaatttaaaagcagtgggttcctttttttttttaagtatggggtcttgttctgtcacc

SEQ ID NO: 11192 - DNA, 201 bp, Homo sapiens
cagtctcgctgttctctccattgtctcccttcctgagggaaggcagccattcacctgggaaggaggctggtcaggggaccccgaggagagtctgctcagcrgctgcctccaccacattggttcacccaactgtggcctctggcttgtcttccagcaatgtgtatctgtagccatgactttgcttaagcaaacttggaaatt

SEQ ID NO: 11193 - DNA, 201 bp, Homo sapiens
tcttaatcttctgcatttggacacttgccacagaggacattgtgattagcaaaggaaggcacaaaaattctaatccaaaggctttgcccgccttaagtccktttttgaaatggagctgatttaaatatgtaagtatggtcacagcattgacacttcagtggttatcgtaagcttatttgtacagtatgtgagatgcagttt

SEQ ID NO: 11194 - DNA, 201 bp, Homo sapiens
ctaatcgagcatttagtatgtgctggttactgtgagtcactacatgtgagatagttactgtttttatcctcatcttactgtttcaaagacaaggcatagargagtgaagggacttgctcacaaccttacagttgacaagtagcagaggtaggatttaaacccgcaagtctggctcctaagacttgggtttaaaccactaca

SEQ ID NO: 11195 - DNA, 201 bp, Homo sapiens
ctgagacaggagaattgtttgaatctggtaggcggaggttgcagtgagccaagattgtgccactgcactccagcctaggagaccgagcaagactccatctaaaaaaaaaaaaaaaaaatctttattttgaaataatagcagtcttacaaaaaagtcattaggatagcacaaagaaataccgtaaattcttcacccagattc

SEQ ID NO: 11196 - DNA, 201 bp, Homo sapiens
tagagaagagagggggaccaagggctgagctgtggacactccaacactaagagcatcttttcctcctacccctaaaatggctctggggctccagccattgtatgtgtttttcatgcaggaagaagtgggacatgcaaaggggctctttataatctggtctgaggcccctgtaaagagcctccagtgacttctgcttataac

SEQ ID NO: 11197 - DNA, 201 bp, Homo sapiens
agagaagagagggggaccaagggctgagctgtggacactccaacactaagagcatcttttcctcctacccctaaaatggctctggggctccagccattgtatgtgtttttcatgcaggaagaagtgggacatgcaaaggggctctttataatctggtctgaggcccctgtaaagagcctccagtgacttctgcttataacg

SEQ ID NO: 11198 - DNA, 201 bp, Homo sapiens
acatggtctcaggcaagttgcttcacctttactgctgagcttcagtgtcctcagctgaaatggggagcagaatactgacttcttagtaggggtctggtaamcactgggccccttttcccttctgctctaccctgcaaatcttttcctctttctaactgcctctgcatttggaaggggtcaagactcgtttcatagtttttt

SEQ ID NO: 11199 - DNA, 201 bp, Homo sapiens
gttgcttcacctttactgctgagcttcagtgtcctcagctgaaatggggagcagaatactgacttcttagtaggggtctggtaaacactgggccccttttyccttctgctctaccctgcaaatcttttcctctttctaactgcctctgcatttggaaggggtcaagactcgtttcatagttttttgggggattaaaaaatg

SEQ ID NO: 11200 - DNA, 201 bp, Homo sapiens
catcaacaacgtggggccaggcttgagtcagcagcactgactttatgtgacctagtgcagctcgccagcccacgctgatgtgtgttaatggagggggtgcmccttataggagggtggtgtgggctataatttcttctgcattctctgcctattgcttgaaggacagtgttgtcagcagtcaactgactgagcttgactttt

SEQ ID NO: 11201 - DNA, 201 bp, Homo sapiens
tgtgctgatgtaaatttggagttggtgggaatttttggactctgctgtgtggccctggggtttttgagtggaagaggtattttatgctccccaggtcttaraacctgacctgtggaaaggctgaggatgtttcagcagtttagacagggcaaactgctaattcttctcacctgtgaaaacagctggtcttatgaagcgcaa

SEQ ID NO: 11202 - DNA, 201 bp, Homo sapiens
ttgctggatggtggcctaggtacagagcagtgctgggctgcggaggaagccacgatgttctgtaaacacatagatacaagcacattcccgcgtgccacctygtgagtgtcatgcatgtgtgtgcatgcccccttatctctagcctgattttccattgcacaggatttgggaaaaacctttcatctgaccagctgatcagaa

SEQ ID NO: 11203 - DNA, 201 bp, Homo sapiens
cccctgcaatcctcttgggacatcattttagcaggggagactaccattgaacatgtaatgataaaattgattagttatgattgagatgagcagtaggaggraaaagtgtgtggaactgtgagagctcacgatgggcctgaacttgcccagggactcagagaagtggtctggatttgcttgttgaagggtgagaggacatgt

SEQ ID NO: 11204 - DNA, 201 bp, Homo sapiens
aagagttaacgtattgaacttgaaaggagagatttttttccctcttgtaataaatcaaacttttctgaatctggaaaagtgatggatgaaactatgtgagmacacacacacacacacatatacaccccataaccattttgaggtcatttaataagggattgctttctggataatctcgctccttgggtataaatctaatgt

SEQ ID NO: 11205 - DNA, 201 bp, Homo sapiens
caacacagagctttggtgtccgagacacatccaagtgacaggcccaagagggcctctgaatgaagacggatgagccgtgtggacacagccacactatgttytcgtgaaggcataagaccatgggccaactttctgggcatccagggctggctgcagaggctggagtgagtggctttcaaggcaagactgataatgaaagtc

SEQ ID NO: 11206 - DNA, 201 bp, Homo sapiens
aagcattcatccatctggggagcttggcacacaggacagatcctttctcttaagtgtcccaaggccaaccctgaaccatggaagccttcatttaccatcastttttctttcaaaacttctgcaagggcataaaaatgggggactaaatagggaccaaataagtgagtccatgctttggaaatgatgacctgagagtgtgag

SEQ ID NO: 11207 - DNA, 201 bp, Homo sapiens
ctgtgtccaagtgatgtcattgttcaagtcccacctatgagtgagaacatgtagtgtttggttttctgtccttctgatggtttgctgagaatgatggtttycagcttcatccgtgtccctgcaaaggacatgaactcatccttttttatggctgcatagtattccatggtgtatatgtcccgcattttcttaatccagtct

SEQ ID NO: 11208 - DNA, 201 bp, Homo sapiens
gccatctctatcctccaacacagagctttggtgtccgagacacatccaagtgacaggcccaagagggcctctgaatgaagacggatgagccgtgtggacasagccacactatgttttcgtgaaggcataagaccatgggccaactttctgggcatccagggctggctgcagaggctggagtgagtggctttcaaggcaaga

SEQ ID NO: 11209 - DNA, 201 bp, Homo sapiens
aagtctttgctattgtgaagagtgctccaataaacatatgtgtgcatgtgtctttatagtagcatgatttataatcctttgggtatatacccagtaatggrattgctggatcaaatggtgattctagttctaggtccttgaggaattgccacactgtcttccacaatggttgaacgaatttacactcccgccaacagtgta

SEQ ID NO: 11210 - DNA, 201 bp, Homo sapiens
cctgggcccagcctgccgcggcactcgtgggaagtggctggctggctctgctggctccacgcacagctggcatacactgacatggctgtggtttgcttctmtctccttccttgcccctagagtataagaagaagtacggagaggaacacggctcctgccaggctgggatagcgggcttcttcaccgaggtgggtgtctgct

SEQ ID NO: 11211 - DNA, 201 bp, Homo sapiens
tgtatagtgtaagtgctgacctgagggcctgtggctctcctgtagtgagggaggatccaactggagtatgacttccacctctgcatggccagcctggtgaygtgaagcacatttcttatgtcaggttcccagtttcctcttctgtaaaatggaggcagcatgggattgtaatgaggattaatggagctcatttacctgaac

SEQ ID NO: 11212 - DNA, 201 bp, Homo sapiens
ctagtgtctgtccatcaggaagccaggttgtaatgatcatgaaaataatagaggggaagaatgacagacctttctagtctatctgaaatagcaaaattacyagtaacaaatcattcttgatttgttcacaaacactggctcagcaagtacctattacgtgccaggctccaaggagaggaataagtcccacatctgccccag

SEQ ID NO: 11213 - DNA, 201 bp, Homo sapiens
aggcaccattctaacctctttacccaagttgtctctgctagtcctcaccacagccctgggaagtgtgtgctgtcatatacccatgaagaaactgaggccakgaaaggaaagcagctctgcccaaggtgttataagcagagagcaccgagacaggacccaagcccaatttgtgttgactggggaatcagtactcagttctct

SEQ ID NO: 11214 - DNA, 201 bp, Homo sapiens
gaaaccttggtggaaatgaattctgtttttggtggagtgcgtgaagttatttccctccattagtttgtaggccagaggttgaaaactagtggcccgcaggmtgagtcttcctcaccgtcccactttgcttgcctggcaaagtgttaacctatacaattgccaatattggaaaactgggatactttgtttacaaatctttat

SEQ ID NO: 11215 - DNA, 201 bp, Homo sapiens
aatagtaattgccttactttatttgcgaaggggtggtgaacactaatatgcctgactccatagagcagtgtatttggttttcttaagcaggaagaaggggsccccccccaattttaatttactgaatgagtttaagaaccatggtgtatttcccaagcttcgctagtgaagatggtattttgttaaaaattgagattccca

SEQ ID NO: 11216 - DNA, 201 bp, Homo sapiens
ataaagaagagcgatgatgccaaaaaacaacactagaaatactttttaaagaagtaccatacttatatgaagatttaaaatttataacatcttttgagctgggcatggttggctcatgcctgtaatcccaggactttaggaggctaaggcaagaagatccttgagcctaggagttcaagaccagcccagacaaggaagtaa

SEQ ID NO: 11217 - DNA, 201 bp, Homo sapiens
atagtaattgccttactttatttgcgaaggggtggtgaacactaatatgcctgactccatagagcagtgtatttggttttcttaagcaggaagaagggggccccccccaattttaatttactgaatgagtttaagaaccatggtgtatttcccaagcttcgctagtgaagatggtattttgttaaaaattgagattcccat

SEQ ID NO: 11218 - DNA, 201 bp, Homo sapiens
gggaaagggaaggcagcagattggtgtcctggcccatccacttcaggtgagaaggatgcctgctgtcctcgtgtggacacaacttcctctgctctccttggccttgccttggcctctttgctttaggatatgatgcccagaagggctcgaaactggagtctgaccaggggcaagcaggctgcctcttgctcctccccagaa

SEQ ID NO: 11219 - DNA, 201 bp, Homo sapiens
ttcacagacagcttgaccacacacagggagctcaggaagcagctttgttggaaaaatgcagggcacttaaactgccacaccaggagggggtttggagaggytggaaagagcatgccattggacacagacactctgggttcaaatcccagctctgccacttactggtggtgtgacccaacatctctgaatggaaaacacatg

SEQ ID NO: 11220 - DNA, 201 bp, Homo sapiens
caagcctgggctgctttctgcccagtaagggatgcggacaattcctggggtttccccgtggtggacacacagtgaagaatttgactcatgtaaccaaaacrtgggtccctggggaagctttggctttgggatcaaatgctgaaagcaaacctaatgggtttaaagtttttaatccccagttgctgtccttgatctggctat

SEQ ID NO: 11221 - DNA, 201 bp, Homo sapiens
ggaaagggaaggcagcagattggtgtcctggcccatccacttcaggtgagaaggatgcctgctgtcctcgtgtggacacaacttcctctgctctccttggccttgccttggcctctttgctttaggatatgatgcccagaagggctcgaaactggagtctgaccaggggcaagcaggctgcctcttgctcctccccagaaa

SEQ ID NO: 11222 - DNA, 201 bp, Homo sapiens
gaaagggaaggcagcagattggtgtcctggcccatccacttcaggtgagaaggatgcctgctgtcctcgtgtggacacaacttcctctgctctccttggccttgccttggcctctttgctttaggatatgatgcccagaagggctcgaaactggagtctgaccaggggcaagcaggctgcctcttgctcctccccagaaag

SEQ ID NO: 11223 - DNA, 201 bp, Homo sapiens
aaagggaaggcagcagattggtgtcctggcccatccacttcaggtgagaaggatgcctgctgtcctcgtgtggacacaacttcctctgctctccttggccttgccttggcctctttgctttaggatatgatgcccagaagggctcgaaactggagtctgaccaggggcaagcaggctgcctcttgctcctccccagaaagg

SEQ ID NO: 11224 - DNA, 201 bp, Homo sapiens
aagggaaggcagcagattggtgtcctggcccatccacttcaggtgagaaggatgcctgctgtcctcgtgtggacacaacttcctctgctctccttggccttgccttggcctctttgctttaggatatgatgcccagaagggctcgaaactggagtctgaccaggggcaagcaggctgcctcttgctcctccccagaaaggg

SEQ ID NO: 11225 - DNA, 201 bp, Homo sapiens
gaaagcttcttagagcaaatttaaactctacaaactttggtcagggatttgaacacatatttccttccccctcagtttctctcacacagacactgctgatytcagtaatggccctaaactttcttttctttttcttttgcattttcttctttctgcacatgtatgaatgcaagctgaatagtcaagttcctgaaatgggtc

SEQ ID NO: 11226 - DNA, 201 bp, Homo sapiens
agggaaggcagcagattggtgtcctggcccatccacttcaggtgagaaggatgcctgctgtcctcgtgtggacacaacttcctctgctctccttggccttgccttggcctctttgctttaggatatgatgcccagaagggctcgaaactggagtctgaccaggggcaagcaggctgcctcttgctcctccccagaaaggga

SEQ ID NO: 11227 - DNA, 201 bp, Homo sapiens
ccatagcaattagaatcttaaaatcaaaattgatggctttatttttctaaaaatgggaaaatatctccaaaacattgttcaaaaacaaaacaaaacaaaamaaaaatgtttgttcttatatcccatcagtttattcaactaacattcactgtggactttttataaggcagtaactgttttatgaataggagatataaaact

SEQ ID NO: 11228 - DNA, 201 bp, Homo sapiens
gtcttatggttgttttaagaaaagaatgataattggtgcataactcccaagtcacatatacagaccagggtccctgtgtgccccaggaaggtctttgtggkttctttggcagagatgagcaaagggtacccttggaactgttttctgtggagtcctctaccttcctgtttctttgagggtttaaccaaaggtggcatttaa

SEQ ID NO: 11229 - DNA, 201 bp, Homo sapiens
attcagctatttctactaacagaaagtgagtttatgggataccaatgcaaacaaacatagatttagtggaaaatgactcaaccaagtaagatttacaaaamaaacaaaactgttttcatcatctttggttgtagttttataaagaatgctggttcatggactccagacacttcattgaaactgtgtgaatcattttaaaca

SEQ ID NO: 11230 - DNA, 201 bp, Homo sapiens
cagagctacttaatattgtatttaccccagaggaagattatttttttcattctctaaattgtttaattaaaactcatagttcatgttaaatttgttcaaastttccatctaatggtgaggtggtaaaggaaataaaacttaccaaaatagaagagggagaaatgaaaaggaaatatgatcaatgatttctgttctttttac

SEQ ID NO: 11231 - DNA, 201 bp, Homo sapiens
ttaatttgagcttggctagagggagaaagcgtgtgtgtttctgtgcacaagttacactcaacacacaccctctggaaggtgggggtaagcttcagtcccgrctgtccgtacagagtgtggttcagaggctgccctttaacctgtgtggccagagagaataaatcaagccagcagtgctgtctccctgctgactgaaggcgc

SEQ ID NO: 11232 - DNA, 201 bp, Homo sapiens
tttgatgaaagtattggaattttgatgaccttttttattacaggtttgggagcaactactttcttcactctctaaactgcaaatcattcagggtaattgtsctggttcagttagcccccaagctgagaagacaggcccactgtggtttgagtaacttggaaatcttgtggggtcagtgttttgactctcttcattttggtc

SEQ ID NO: 11233 - DNA, 201 bp, Homo sapiens
cggctgtccgtacagagtgtggttcagaggctgccctttaacctgtgtggccagagagaataaatcaagccagcagtgctgtctccctgctgactgaaggygcccggccttatcaaggagcccaaatgtcttgtgctcacagctgctgtgacatctggaagcattaacactttgttgccagcatgtaggctagttgaatgc

SEQ ID NO: 11234 - DNA, 201 bp, Homo sapiens
ttttgtgagtggctctaaaaatgggggcaaaacatgaccctgaggaggcctggggctgatctgagccttaagacttatttgtggagaccttgtgctgttctttttttttttttttaattatactttaagttttagggtacatgtgcacaacgtgcaggtttgttacatatgtattcatgtgccatgttggtgtgctgcacc

SEQ ID NO: 11235 - DNA, 201 bp, Homo sapiens
tggtacagagcttgtgcccaaccccagcagagaagcactaagggggggttggtgccctccttggccacatcctctggaccagagggtataaacagccacayagtggtcacttcttgataggagagagagttaggctgcgggaagttcccccgttcaaggtcgtgcctcatgggggcccaggtgacagccaggccggggttg

SEQ ID NO: 11236 - DNA, 201 bp, Homo sapiens
gccagatgcccagggtctactttgtgctgctgggagagaccatgggtcaggtcacagagaagctgcagctgacttacatggaggagacgtgtcgtcactaygtggcccatgtgaaggtcagtcctctcctcctttttatcctcaaactttgatctctgcagatgttcacttggagctggtggaaactatttttattatgta

SEQ ID NO: 11237 - DNA, 201 bp, Homo sapiens
ttgcttgttttcgtcaggtttgtcaaagatcagatagttgtagatatgcggcattatttctgagggctctgttctgttccattgatctatatctctgtttyggtaccagtaccatgctgttttggttactgtagccttgtagtatagtttgaagtcaggtagcgtgatgcctccggttttgttcttttggcttaggattga

SEQ ID NO: 11238 - DNA, 201 bp, Homo sapiens
tgtggtttttgtcgctggttctgtttatatgctggattatgtttattgatttgcgtatgttgaaccagccttgcatcccagggatgaagcccacttgatcrtggtggataaggcttttgatgtgctgctggattcggtttgccagtattttattgaggatttttacatcgatgttcatcagggatactggtctaaaattct

SEQ ID NO: 11239 - DNA, 201 bp, Homo sapiens
tcttttcttcattagtcttgctagcggtctatcaattttgttgatcttttcaaaaaaacagctcctggattcattgatttttttgaagggttttttgtgtytctgtttccttcagttctgctctgatcttggttatttcttgccttctgctagcttttgaatgtgtttgctcttgcttctctagttcttttaattgtgatg

SEQ ID NO: 11240 - DNA, 201 bp, Homo sapiens
gactctttatccaatttgccagtctgtcttttaattggagcatttagcccatttacatttaaggttaatattgttatgtgtgaatttgatcctgtcattakgatgttagctggttattttgctcattagttgatgcagtttcttcctagccttgatggtctttacaatttggcatgtttttgcagtggctggtaatggttg

SEQ ID NO: 11241 - DNA, 201 bp, Homo sapiens
ataaatattttccatccacaatgtactatatatgcctaaatatagggcaagccccaaatagcacatcctccatttccctaattagataaatttaactctcttttttttttttgccaacttaataggaatcagaactatgattgcctttgaggtggggggagtgggcagtgggaattgactggcaagggactggtgggaact

SEQ ID NO: 11242 - DNA, 201 bp, Homo sapiens
tatttcctgaatttgaatgttggcctgccttgctagactggggaagttctcctggataatatcctgcagagtgttttccaacttggttccattttccccgycactttcaggtacaccaatcagacgtagatttggtcttttcacatagtcccatatttcttggaggctttgttcgtttctttttattcttttttctctaaa

SEQ ID NO: 11243 - DNA, 201 bp, Homo sapiens
gggacatttaagtctgcagaggtttctgctgccttttgtttggctatcccctacccccagaggtggagtctacagaggcaggcagacctccttgagctccrgtaggctccactcagttcgagcttctcagccactttgttaacctactcaagccttggcgatggtgggcgcccctcccccagccttgctgctgccttgcag

SEQ ID NO: 11244 - DNA, 201 bp, Homo sapiens
gaaatgatgattaagataggacaattggacaaaaaggctgggccttcttaggtgggtattgagtgggaagtgattcaagaggccagacattctgtctggayattagctggaagtggggctggacaagatgaactagagccctcttgtggtcccatcattcaggcctgtagctttcatttgagaccagtggttcttaaactt

SEQ ID NO: 11245 - DNA, 201 bp, Homo sapiens
tccaggtgccatctgtcacccctttctttgactaggaaagggaatgccctgaccccttgtgcttcccaggtgaggtgatgcctcgccctgcttcggctcaygcttggtgtgctgcacccactgtcctgcacccactgtctgacactccccagtgaggtgaacccagtacctcagttggaaatgcagaaatcgcccgtcttc

SEQ ID NO: 11246 - DNA, 201 bp, Homo sapiens
ccttatgggaggcatctcagcagaggccctttttgggggcaggagggattgcatagcaatactgcctacccagagttgttgttcccaggctagggtccaamtcagggcagggagatctactggaggcagcgtatcacacactagttgtccaagagatggagagagagtgcaaaatctgagctgtgcttatgggaagctcgg

SEQ ID NO: 11247 - DNA, 201 bp, Homo sapiens
gcccaatcaaagccagagatggagggacagattagtattgaaatgatgttcttggtcacttctggttccagatggccaaccaagcacaaatgttgatgtctgtgccttggtaccccattgcaatgattataaatgagtagatcggaacagggaggacaacactgtgaaagaaagggcatcagctaataataagagtccagt

SEQ ID NO: 11248 - DNA, 201 bp, Homo sapiens
ttgctattcttaaatattgagtgtccaaaagattcgtgaactgcatctcagctgggtgggaccctttgggacaggagtaggggaataatgccgtcgttaaytgcaaagaggagttttgggaccaggttgtcttataggtttattttgaacaactgataggcttggtattgctggaagtggatagatttgggttgcctgtgt

SEQ ID NO: 11249 - DNA, 201 bp, Homo sapiens
cgacgcccgcattccgcccgtgtccaggcgcagagctcccgccccggggagcttcctggccgtcggcgggccccgcggcccgcgcgctcggcgccctgctygccgggcagaggggaaggcggcggccggctggggatgggcggcccggctgcgccgaggggcgccgggaggctccgcgcgctgctgctggcgctggtggtc

SEQ ID NO: 11250 - DNA, 201 bp, Homo sapiens
cccaatcaaagccagagatggagggacagattagtattgaaatgatgttcttggtcacttctggttccagatggccaaccaagcacaaatgttgatgtctgtgccttggtaccccattgcaatgattataaatgagtagatcggaacagggaggacaacactgtgaaagaaagggcatcagctaataataagagtccagta

SEQ ID NO: 11251 - DNA, 201 bp, Homo sapiens
tgcagctgccttgagaatgcatatcattgaataatgttagtgggaggttttaaactatctgaagatcacacaactgtgagagcccagctcccctgaaatgygtagggttggtcagtgattttgctatgcgccaaagcagctgccttgatccctcagagccccggcatttctgcccggggtttggccacccctggccttggc

SEQ ID NO: 11252 - DNA, 201 bp, Homo sapiens
aatcaaagccagagatggagggacagattagtattgaaatgatgttcttggtcacttctggttccagatggccaaccaagcacaaatgttgatgtctgtgccttggtaccccattgcaatgattataaatgagtagatcggaacagggaggacaacactgtgaaagaaagggcatcagctaataataagagtccagtaatt

SEQ ID NO: 11253 - DNA, 201 bp, Homo sapiens
ttatttcatgccccaaattatttcaaatattgtataaagttacctttataggtcatgtgtagaaggtgtatataaacataaatgaatatgaagtttagccyttagtcccatcctcaaagtatctctttattatatggagatatttcaaaatctgaaaaaatccaaaatctgaaagacttctggtcccttatatttcaatta

SEQ ID NO: 11254 - DNA, 201 bp, Homo sapiens
aagtcaaaatagtacaatagtccccccttatccattgggaatacattctaagacccctagtagatgcctgaaactgtgggtagtcctgaaccctttatctrctgttttttcaatctgataactgagacagctagtaagggattaatgggtagtagtgtaatagcatggatgtgccggacaaaggtgtgattcccatcctgg

SEQ ID NO: 11255 - DNA, 201 bp, Homo sapiens
tgatcactctgtgttctcaagacaagcaatgggtaagaagacaaggccacggaggtcaaagatacagaaagataattgccatatatgctatgcagccagtkcccctacctcatgtgattgtagagtggttcttacactagggtggcatagaatcacctgaagggcttgtttaaacagatcatgggtggtgggtacagcatt

SEQ ID NO: 11256 - DNA, 201 bp, Homo sapiens
cggtggcgggcccgacgcccgcattccgcccgtgtccaggcgcagagctcccgccccggggagcttcctggccgtcggcgggccccgcggcccgcgcgctsggcgccctgctcgccgggcagaggggaaggcggcggccggctggggatgggcggcccggctgcgccgaggggcgccgggaggctccgcgcgctgctgctg

SEQ ID NO: 11257 - DNA, 201 bp, Homo sapiens
ttgaagctgcagtgagctggactactgtacttcagcctgggagacagagaccctgtctccaaaaaaaaaacaaaaaacaaaaaacaaaatttccaaattaytagacacttaaattttaaaggacagtaagtcccaaactgtgagaaacttttataggcaacatcctcttttctaatagtttaacttgaggatataaacctt

SEQ ID NO: 11258 - DNA, 201 bp, Homo sapiens
gacacatcatcaagatggatatacttgcccctttaattcaacaggcacctgttgaatgcctgtgcatgcaaacatgatgctgggctgagccctggggcttmccctgaagagctttggagcccacagcagaactcccagccaggctcatccaccactacagccacaaccatccctacctggagaaaggggctaaaagaagcc

SEQ ID NO: 11259 - DNA, 201 bp, Homo sapiens
tcttcataccagcatttcccaaagcattttttcaaaggatagtaacgacttttatgtcaaaaaacaaaacaaaattttgaattcaaattaattttggaacrtaattgaatttaacgcaggctttttattgcaggacttcatggagctttagaagcccaggcacgcaaggaggatgcactgtttggcatttcctaaatgtac

SEQ ID NO: 11260 - DNA, 201 bp, Homo sapiens
atgttatcttttacatttagattagtgatccattttgagttaatttttgtgtgttgtccaggatagtttcaaacagttgtgcaaaacaattctgtttgttkgttatcatgggtagactaatacctgtcagatcatataacccgacagtcagctggaaacacttggtcacatgagattgcctatctacattttaaatttggc

SEQ ID NO: 11261 - DNA, 201 bp, Homo sapiens
gagcgtggcctcagcctgatgctgcaagggggatcagaggtgtgagttacgccaaggtactgttccatctccagcttaggaagctgagttttgttctcccrtaaacaccagtcattggttaagggccacttagggaggaataagtggtagaaagtggtcctaggcactttccacccaggggtgaagtgtagacagtggggc

SEQ ID NO: 11262 - DNA, 201 bp, Homo sapiens
ttggagccaaacgaagactgaagccacagtgtgcatgtaaagggagtccaaggagcattgggtggggcattgaaattgtttgctacagtcggtttaccttyaactggtttccttcttgttctgaaggatatattacaagcatattgacaaaagtctttgaactcttgaggtgtttgtatgatattctgtgtcagttgcaca

SEQ ID NO: 11263 - DNA, 201 bp, Homo sapiens
acctgagagaggtagtttgtgagtgtgtatccctgagatacgtagcagaactggggaaggactgcccagtgagtctactcccttcagtatttgtcagatcytgctcaattataagatgatctttatctgtccgccttatctatcttcactgacgtgtatttcttattttcacaaaatgaagccatttcaacgatgttgtca

SEQ ID NO: 11264 - DNA, 201 bp, Homo sapiens
gaaggcaaatatatagagtgggttttggagccctgaacttagtcatgggtggataggggtgggctgaggagggggtgcaacctctgccttccctccccacrcccccatattctgagatggtagagaaccctttcattcctccagcctgtctctttcatccctctatggactgagacatctccctttacaccagttttttac

SEQ ID NO: 11265 - DNA, 201 bp, Homo sapiens
agaccaaggacatgcagatcttattaatataaaagggaaggtgattccagatggtggtaggtgctgtgaggattctaaggcagggttacttggtcaggcartggtgtcaaagtcagcaggaagggccaagcagagtgaggcctgagacttgttggaggtggcagggggaggtcaggggtgcccttggctgtggtggctcta

SEQ ID NO: 11266 - DNA, 201 bp, Homo sapiens
attttagccattctggtgtgtaattgtgtttctttgtgatttagagctgcatctcccatatgactaataaacacgttttcacgtgcccctcagccattggracacttattttagcctgttcaagtcttctgcactcccttcttctggggatacttttcttctcctgtgctgtggtacactcctcaccccaattcttctcac

SEQ ID NO: 11267 - DNA, 201 bp, Homo sapiens
agtgcctggtttaactgcttaataaatcttagcaagtttgatgtaaattgggttaaatttgcctccctaaaattctgcttctcagtcttgtgtcttttatrtagcaaccctttagtatctgaagggggcaattgtgtcccccaagtggtgacttcactaagataaggcctccctggttcctgtaattatttcccatgtgac

SEQ ID NO: 11268 - DNA, 201 bp, Homo sapiens
ctcctcaattctgttcctgccgagttagaactgctgtacgccagcctaggatccttccatgttgttctcccattcaagtagacctttttgcaattttaacwatccgaataggtacacttagtgtataattgtcattatcttttgaataaaaaatgcatcaccaaacttggttttgcatttttcctcagaatggctctgcct

SEQ ID NO: 11269 - DNA, 201 bp, Homo sapiens
atcaaagccagagatggagggacagattagtattgaaatgatgttcttggtcacttctggttccagatggccaaccaagcacaaatgttgatgtctgtgccttggtaccccattgcaatgattataaatgagtagatcggaacagggaggacaacactgtgaaagaaagggcatcagctaataataagagtccagtaattt

SEQ ID NO: 11270 - DNA, 201 bp, Homo sapiens
tcaaagccagagatggagggacagattagtattgaaatgatgttcttggtcacttctggttccagatggccaaccaagcacaaatgttgatgtctgtgccttggtaccccattgcaatgattataaatgagtagatcggaacagggaggacaacactgtgaaagaaagggcatcagctaataataagagtccagtaatttt

SEQ ID NO: 11271 - DNA, 201 bp, Homo sapiens
caaagccagagatggagggacagattagtattgaaatgatgttcttggtcacttctggttccagatggccaaccaagcacaaatgttgatgtctgtgcctyggtaccccattgcaatgattataaatgagtagatcggaacagggaggacaacactgtgaaagaaagggcatcagctaataataagagtccagtaattttc

SEQ ID NO: 11272 - DNA, 201 bp, Homo sapiens
gactggtcagttatttttttggtagcaaaactctggctttagagttggaccatgagcagtcctgcttgctgctcattccctttctctagaaggacccctawggagttttacagcaccgtgggggctttctagaatggttgaaaacctctggcagcagatcatccatcaggcttggtcccaagttccagacctgggttcttg

SEQ ID NO: 11273 - DNA, 201 bp, Homo sapiens
aaagccagagatggagggacagattagtattgaaatgatgttcttggtcacttctggttccagatggccaaccaagcacaaatgttgatgtctgtgccttggtaccccattgcaatgattataaatgagtagatcggaacagggaggacaacactgtgaaagaaagggcatcagctaataataagagtccagtaattttct

SEQ ID NO: 11274 - DNA, 201 bp, Homo sapiens
aaaaattataaagacacacacttcagatttgttctatttactatatttgttacacctccatttttaaaaagtgcaggtattgaagatggaatgacaatgcttttccaaagcctccttttttttatctttggttacatttctctaagctccttatttcagccctggcacatctcacctttatcatttcctttctcattcttt

SEQ ID NO: 11275 - DNA, 201 bp, Homo sapiens
agccagagatggagggacagattagtattgaaatgatgttcttggtcacttctggttccagatggccaaccaagcacaaatgttgatgtctgtgccttggtaccccattgcaatgattataaatgagtagatcggaacagggaggacaacactgtgaaagaaagggcatcagctaataataagagtccagtaattttctgg

SEQ ID NO: 11276 - DNA, 201 bp, Homo sapiens
gccagagatggagggacagattagtattgaaatgatgttcttggtcacttctggttccagatggccaaccaagcacaaatgttgatgtctgtgccttggtaccccattgcaatgattataaatgagtagatcggaacagggaggacaacactgtgaaagaaagggcatcagctaataataagagtccagtaattttctggt

SEQ ID NO: 11277 - DNA, 201 bp, Homo sapiens
aaattcaaacccttgttttgctcctcatcagcgacagtggtagggaagatgcccacggcacggaggttcagtggttgttttcattctttcctgttagccaktttcctcaaattggtcagtataatcctacctcttggagcgatagctggctggattcttctgccattttggcagttatatattggtctggatttaaaagtg

SEQ ID NO: 11278 - DNA, 201 bp, Homo sapiens
ccagagatggagggacagattagtattgaaatgatgttcttggtcacttctggttccagatggccaaccaagcacaaatgttgatgtctgtgccttggtaccccattgcaatgattataaatgagtagatcggaacagggaggacaacactgtgaaagaaagggcatcagctaataataagagtccagtaattttctggta

SEQ ID NO: 11279 - DNA, 201 bp, Homo sapiens
tattcctctttagttgaccttttagatacttttctaaccatgccccctccccgctgccccgaaagatcagggaaaataagaagaaattcaaacccttgttktgctcctcatcagcgacagtggtagggaagatgcccacggcacggaggttcagtggttgttttcattctttcctgttagccagtttcctcaaattggtca

SEQ ID NO: 11280 - DNA, 201 bp, Homo sapiens
cagagatggagggacagattagtattgaaatgatgttcttggtcacttctggttccagatggccaaccaagcacaaatgttgatgtctgtgccttggtaccccattgcaatgattataaatgagtagatcggaacagggaggacaacactgtgaaagaaagggcatcagctaataataagagtccagtaattttctggtat

SEQ ID NO: 11281 - DNA, 201 bp, Homo sapiens
tagttcattttggaacttattccactattgaattatccgtattctttggttttatacctttattcctctttagttgaccttttagatacttttctaaccawgccccctccccgctgccccgaaagatcagggaaaataagaagaaattcaaacccttgttttgctcctcatcagcgacagtggtagggaagatgcccacgg

SEQ ID NO: 11282 - DNA, 201 bp, Homo sapiens
aatcttttgtagagataggatgtttccccaggctggacttgacctcctagcctcaagtgatcctcccacttcagtctctcaaagtgctgggattacaggcyttaaccatcgtgcctggcccaagattattgttattattcaagattgaaaatacagcatatcctgatacataaaaccccaactttataaaactgttaaatt

SEQ ID NO: 11283 - DNA, 201 bp, Homo sapiens
agatggagggacagattagtattgaaatgatgttcttggtcacttctggttccagatggccaaccaagcacaaatgttgatgtctgtgccttggtaccccattgcaatgattataaatgagtagatcggaacagggaggacaacactgtgaaagaaagggcatcagctaataataagagtccagtaattttctggtatgag

SEQ ID NO: 11284 - DNA, 201 bp, Homo sapiens
gtgttgaagtcagggaataagaatttcctctgtgccacaaataatgctccccacctgtatagaatgcctgggaaatgcaacactggccatccttcagctcytctgcttacagctgttgtgctggtgggtctcctcctattctcagagcagagagccacgaatggggcactcggggccgtgacaggcatcccttagctctgg

SEQ ID NO: 11285 - DNA, 201 bp, Homo sapiens
ggctggacttgacctcctagcctcaagtgatcctcccacttcagtctctcaaagtgctgggattacaggccttaaccatcgtgcctggcccaagattattrttattattcaagattgaaaatacagcatatcctgatacataaaaccccaactttataaaactgttaaattggtaaaagattatttgttgcttaaaattat

SEQ ID NO: 11286 - DNA, 201 bp, Homo sapiens
tggagggacagattagtattgaaatgatgttcttggtcacttctggttccagatggccaaccaagcacaaatgttgatgtctgtgccttggtaccccattgcaatgattataaatgagtagatcggaacagggaggacaacactgtgaaagaaagggcatcagctaataataagagtccagtaattttctggtatgagtga

SEQ ID NO: 11287 - DNA, 201 bp, Homo sapiens
gttctggaggttggaagtccaggatcaggtgtccacaggtttggtttctcctgaggcctctcttcttggcttgtagatgactgccttttccctgtgtcccygcatggtctttcctctgtactcatatctctggggtttctgtgtgtccacatttcctcctattctaaggactccggtcagattggattagggcacaccctg

SEQ ID NO: 11288 - DNA, 201 bp, Homo sapiens
ctctctgctaaccctcctctcaccgttctccccagggtgggctgtgggccttctggtgctgagctccctcacatctgagctgtcttagcaccttctttccrcctgtatttgtgttacttggatatttgtgttttatcttctgtaccagagcataggttattttaaagcagggagcttatggcattcaacactgtcaccctg

SEQ ID NO: 11289 - DNA, 201 bp, Homo sapiens
cagtactttggttttcccagaagatgacatgttgtgacagggacacatgatggtccctgatgattcctctatatataccacaagcacaaggacagccctcygaagagggaggtggagttcaatgtccatgtgtacgcaggtccacgaggctcataattctgcattactttctattaagtagctgtggatcatcagtaggcc

SEQ ID NO: 11290 - DNA, 201 bp, Homo sapiens
ctctatttcactctcaagtgttccgatttggatggcaccctatttattgagtgctcattgtgtgccagacactgtgctgggcccggggcagatggagactygtaagccataaccgctgcctcccaggagctagtctgctggggcatccgttctgaataccatgacttggcaagtgaagcattcccatgccttccagactcc

SEQ ID NO: 11291 - DNA, 201 bp, Homo sapiens
ttatatctgtattgtcccaaacagaagaagaacaaacttcatcttaaaaatagaggatgatataatcaatcaagagtggagggatcgttggtttcagaaaygcaaagcatgtgtcaagcctgggtttccactgccccagtttactcctcctttttcctaaggaagaaaaaggaaaagcctctggaacaaccggtggggcag

SEQ ID NO: 11292 - DNA, 201 bp, Homo sapiens
tgcagtgtcctatgtacaggtgtgcctgggacagtcctggtttatgcctgttgtcccagcataatcattaatagttctctatttcactctcaagtgttccratttggatggcaccctatttattgagtgctcattgtgtgccagacactgtgctgggcccggggcagatggagactcgtaagccataaccgctgcctccca

SEQ ID NO: 11293 - DNA, 201 bp, Homo sapiens
ttcggggcactgtcttacttggcctagtcccacacttgtccctcccaccccttgcttctctattttcaattcacttctgtttctacacacatcagtgatgyagtgtcctatgtacaggtgtgcctgggacagtcctggtttatgcctgttgtcccagcataatcattaatagttctctatttcactctcaagtgttccgat

SEQ ID NO: 11294 - DNA, 201 bp, Homo sapiens
tccctccttggcctcccaaagtgctgggatgacaggtgtgagccactgcacctagccggacatactatttgtttgttgctggttgtcttagtcctcctacyggaattaggttaggtttctacatataatatgcaatgacttttttgagacaaggtctcactctgttgcccaggatagagtgcagtgacatgatcttggctc

SEQ ID NO: 11295 - DNA, 201 bp, Homo sapiens
gacatgatcttggctcactgcaacctccacctcccaggctcaagcgatcctcccagcctccggagtagttgggaatacaggcatgcaccaccacacctggstaatttttgtattttctgtagagatgggggttttgccatgttgcccaggctggtcttgaactcctgagctcaagtgatccacccacctcagcctcccaaa

SEQ ID NO: 11296 - DNA, 201 bp, Homo sapiens
atgcacaggaaaagagctctgcctcccggaaggttccaggtgttggggtaaatagagatcctgctgctgcctctactcccttactggtctccctggggacrtatttgaacatattttactcataaattctcatctcagggtctgtttctaaccagacctaaaacagacaggtcccccccttttttaatcagtaactttggt

SEQ ID NO: 11297 - DNA, 201 bp, Homo sapiens
atcagaattttcacttataaaagtaccatttacacatttcgtcactgctgacagtcattagctagtggatagatccaagctttaaatctgaatcttgtcayaggaggatggaagctcaagttgttaaaggcctaaaaggttgcatgttacatatagaacaaggccctgggaaaggaaatggtctgttgaaagtcacaaggc

SEQ ID NO: 11298 - DNA, 201 bp, Homo sapiens
tgggtgcttggattttctgaaccatgactccctctatcaagataactcatatatgcactttgcaaaacagttttataaacttgtaccaaaaggcacaggaragaaaaaatagaaaaatgtatacccttttaaaacaacattggggaaaaagtgctatgccttaaggacgtggagagcacatgggggaaaggtgggtaggga

SEQ ID NO: 11299 - DNA, 201 bp, Homo sapiens
caaagtagtaaacaggctctctcaagcattcatccatctggggagcttggcacacaggacagatcctttctcttaagtgtcccaaggccaaccctgaaccwtggaagccttcatttaccatcagtttttctttcaaaacttctgcaagggcataaaaatgggggactaaatagggaccaaataagtgagtccatgctttgg

SEQ ID NO: 11300 - DNA, 201 bp, Homo sapiens
ggttgaggacggctctgctgcacttctgcccctttagcctcaggcctgtcacttggcctctcagtgggagtcgatgctgtgatgcctccactgcatttacygctttgggttatggtgaggagctcccgagaaaactcaggtgaaagtgctcagcaaggccacccattgttctataactgtggcctcatggtaagtctccat

SEQ ID NO: 11301 - DNA, 201 bp, Homo sapiens
accagcagctctggaagtgactggattaaaaccccaccaactgaagacagtggcgtgggatgatggctcgctgatgggagacagaatttctgtctctcctstcagaagccctttgaagaactcagctgtctggacaacaaaagtgggagcttttgttgtctagaagttcatgtgacctttcctttcaccttttagtgctgc

SEQ ID NO: 11302 - DNA, 201 bp, Homo sapiens
ggtcgtgcctcatgggggcccaggtgacagccaggccggggttgattttattgtgtattcaccagcctgagcgtccttaggggtggcaggcagggaggtcraggtcactgatgctggtgctctcagcatgtagttatgcaggagagtcactgctctgtattggacagaggctgatggaaaagggtggtttgtggatcgcag

SEQ ID NO: 11303 - DNA, 201 bp, Homo sapiens
caggacagtcacaggggtggaacaaatgcaggagccatggagccaaactgaactgggttggaatcccagtttcagccacttaatagttacatggatattgscaagtagcctgagttctcagaggcttgatatcctcatctgtaaggtgggaagtataagacctacctcacggtgtcagtgttaaataagacagggcaaaat

SEQ ID NO: 11304 - DNA, 201 bp, Homo sapiens
tgatgaaggtactctgtaaatgtatgtccattccttcctcctcctctgggttccttttcagcacttcctcaccacagcaccattcttaagttttctagccycatttattttagaaggggaactggaggcagcttggagggaggtaacatctggatgtcgcagtgacagctggtggctggtgaggagtccacaggtcagggg

SEQ ID NO: 11305 - DNA, 201 bp, Homo sapiens
gagatgagacatcatgtaaaaataatttgttaggaagtgttctcaggggaatgggaagtagagcttcaaagggaaggaggccaaacaaggatgtgatatcmagcaaagtccccaggagacagaaagaaggtgggtgactttggcaccgtctaaagtataggtcacatctcactgtcccaatcagggacaaaagagcatggc

SEQ ID NO: 11306 - DNA, 201 bp, Homo sapiens
gtggtttccttgctaagatttttgcagtttattctgtgtggctgtgtgtgttggtcccttgccaataatcctagactcacccatcccggcacaggcttgtwactgtgggccaagccaaattctgaagcagcgcagttgtttgttgtctgaactcagtcttccccaacacatacttttcttgttgtcctgcacacaccctct

SEQ ID NO: 11307 - DNA, 201 bp, Homo sapiens
gtgtggtttccttgctaagatttttgcagtttattctgtgtggctgtgtgtgttggtcccttgccaataatcctagactcacccatcccggcacaggcttkttactgtgggccaagccaaattctgaagcagcgcagttgtttgttgtctgaactcagtcttccccaacacatacttttcttgttgtcctgcacacaccct

SEQ ID NO: 11308 - DNA, 201 bp, Homo sapiens
tgagagctccatccatgaaaaccagtcttccagaggaggatccccaaacccagagagctatttagagtttgaaacaaattgttctccttctcaaaagtggbagaatggttagaatcatcaactgcacagcctaggtcagaagtgaagtttgtcctgttttatgaagggaaagacacccttgtttagtgagcactgaccaag

SEQ ID NO: 11309 - DNA, 201 bp, Homo sapiens
ttgaagtctggtccatgccttcagcccaccagcatgtgttgagtacctgttgggtacacagctctgtgtctggtggaggggaaacaaagattaaaaagacygggccctgtcctccaacagctcaggttatttcatgcctgcattcggggcactgtcttacttggcctagtcccacacttgtccctcccaccccttgcttct

SEQ ID NO: 11310 - DNA, 201 bp, Homo sapiens
cttccctgcctgtctgtggcctctgcagtttaaacaatgactgtcacttaaacctcttctgaagagcttgaagtctggtccatgccttcagcccaccagcrtgtgttgagtacctgttgggtacacagctctgtgtctggtggaggggaaacaaagattaaaaagactgggccctgtcctccaacagctcaggttatttca

SEQ ID NO: 11311 - DNA, 201 bp, Homo sapiens
ggacagacactggacagacaactcacagctcctgccacagtacagcatggagcctcccaaggcactagtcacacagatcaagccacacagccaaatggaawtacaaataatagattgaggtcacattgactgtttcacgttgtacttagacatgctgattaaaacctgagttgcaagtgtgccatggaacataatctctcc

SEQ ID NO: 11312 - DNA, 201 bp, Homo sapiens
taccagctagacatcttataaatcctatcactatagagttttgctctccagcagaactttctgtgatgaaggaaatgttccgtatcagcactgtccaatattggtggccagtgaccacatatgactgtgagcacttaaaatgtggctagtgccaataaggcattgactttttacttttctatacttttaattaatataaat

SEQ ID NO: 11313 - DNA, 201 bp, Homo sapiens
gcttataacgcattgaccatccatattttaaaagaggttggaagatgtctaagtaccagctagacatcttataaatcctatcactatagagttttgctctscagcagaactttctgtgatgaaggaaatgttccgtatcagcactgtccaatattggtggccagtgaccacatatgactgtgagcacttaaaatgtggcta

SEQ ID NO: 11314 - DNA, 201 bp, Homo sapiens
agtggtcaaattctgcgtgcattttgaagggggatcctacagcatttcctgagggtttgattgtcagttgtgagggaataagatatcaagggtcactccargcttttcagcctgagtacctaaaaggatggagttgtcactggtggtgttttcaacggaaggtgcaggtgagcaggttgaaagggggaagatctggagttt

SEQ ID NO: 11315 - DNA, 201 bp, Homo sapiens
ccaggcaaggtggagaccagctcttcatggtacttctgtccatctgtgaggctttggacactcgtggttttcagtctcctaggctggagtaaaatttgtayttatttaacaagggtgtttgcacatttattatgggaacgagaggatgaattcaccggatcccagcccttgcagggtgctgcaggatggtggggcaggttt

SEQ ID NO: 11316 - DNA, 201 bp, Homo sapiens
ccgcaaggaggaggagtcccagatcactggttgaccttcagcgggcatttaacagcatattccatcaggcctcacctactagtgttttgttgaggctgctrtgtaactttgactttctctgctgtctcctatttaagagtaaataaaggtagtgacagtcacaaaaatagcatcaatgatgacaactagcgtttactgagt

SEQ ID NO: 11317 - DNA, 201 bp, Homo sapiens
aatgttgcttgttaacaacctttgaaggctttttagcaaaaacaaagtgtcatattgggattcatctgtggcagtttgcagaacatatcaggggagagagstgtgtgcaaggcatccaccaggaggccgttttgtgctggtctaggtaagaggagattggagctgacctgttgaagcaacaaagagaaagggaggaaggat

SEQ ID NO: 11318 - DNA, 201 bp, Homo sapiens
ctgcacccgagtcaggagggctggaagtgcaggatagttaacgtccccagtacagttttctaccaaggagagaccggtgagatggatagatgccccagctktctcacccgttgatgacacacttcactaccctctcctggagctccctgagatcactgcccatacaaactaattgcaccccaatgcttgtcccaaagtctg

SEQ ID NO: 11319 - DNA, 201 bp, Homo sapiens
gagggcatcatgaggaaggtggtcttcgtggggtgaatatcatgtttcctccagggagggctcagtgacatggagcagtgcttctcaaatgtccatgttcrcagaggttagcttctaactcatcaggtctagggtggggcctgagaatctgcatttctaacagtgagcatgtccagggaccacactttgagtagcaagacc

SEQ ID NO: 11320 - DNA, 201 bp, Homo sapiens
ctaacagtgagcatgtccagggaccacactttgagtagcaagaccttcacagcttcaagttgcaaaccagttttgaatgagcagagtagaagggggtttgyaggtgagaaggaactcttcaccatgagtacatttctatgaagatttctggccaggattttagtaagtacctgagccccttcaaacatttgactcccgcat

SEQ ID NO: 11321 - DNA, 201 bp, Homo sapiens
tgtgtgctgctttctgagcaagtctctgcttggggctgcagtctcctgccatggaagggtaggtatcatatgagatgtgcatgtgatcctgtgacaaggamaagaggtggcctcatcacagtgtgtcggtcctttctgacattttgacctctcatttattggcaggcctgaattatgttctgatggctgacgtggccaaaa

SEQ ID NO: 11322 - DNA, 201 bp, Homo sapiens
tttgcaggtgagaaggaactcttcaccatgagtacatttctatgaagatttctggccaggattttagtaagtacctgagccccttcaaacatttgactccygcataaccttttcatccaaacaccattcatgagttgtttttatgccatgaggttaaattctttcctatcatttcaggggaggtccccacttgttgagttt

SEQ ID NO: 11323 - DNA, 201 bp, Homo sapiens
gctcacatcaaggaagggaatgccactcagcctctgggcacacagctgcaacttcccctggtgctgtctctcttggtgctaccctatactagccttgtccygaaacatctaccccattcatttcaccctctctgctactatgtcactgcctctcccatcacagtattccacccaaatgaggcaaattcttatcctttcaag

SEQ ID NO: 11324 - DNA, 201 bp, Homo sapiens
tgatttcttattgagcctttggaaagttccttgccgtttcacagccatttcccgtcagagtggggaatattgactgtgcaaaccacttaaggtcacaggcrccacagctgtgtttcttctttgcagaaggggggtttctttgggtggggctgtgctcagcccttccgggtggtgaaggtctgaggtcacactgggagagca

SEQ ID NO: 11325 - DNA, 201 bp, Homo sapiens
accacagccctgggaagtgtgtgctgtcatatacccatgaagaaactgaggccaagaaaggaaagcagctctgcccaaggtgttataagcagagagcaccragacaggacccaagcccaatttgtgttgactggggaatcagtactcagttctcttagtctttggctgttttgttgagtgcccaggtcatcctggtagaag

SEQ ID NO: 11326 - DNA, 201 bp, Homo sapiens
tgaaactctgtgacttcttcccgtgtgatgatggctaagtgcgcagaacatgtgaaatttaagtagatttgtggaaacagaaacacatttttatttagtcrtgagcgtcacttggagtataaatagagccctttatgattcgtgtgctggtctttcttcctggagggcttcagtattatctcatgctgtcatctttatgtt

SEQ ID NO: 11327 - DNA, 201 bp, Homo sapiens
ctattttctcattttgcattacaatagcatctagtaacattcaagcctcaattaattgaaccaataattattatattaaaaatggtatgtatgccccaggrcagaggttaggctatggtgggcatttgagaccttagggccatagaccccgaaacatgcattctccagaactgagtatgcaactgtttgctttcgacctta

SEQ ID NO: 11328 - DNA, 201 bp, Homo sapiens
agtagctgggattacaggcatctgcccaccacgcccagctaattttttgtatttttattagagacggagtttcaccatgttggccaggctggtctcaaacrcctgacctcaggtgatccacccacctcagcctcccaaattgctgggattacagtcgtgagccactgagcccggtcaaaatcccttcttacctgtcatttg

SEQ ID NO: 11329 - DNA, 201 bp, Homo sapiens
tgagaatgaatgatctgttaggaaggctggatggcatggtgacaagtgcatggctttgaggttgcttattctggactactgcttagacaaatgacttatcktcttattttctttatctgtcaaatgtgaataatgtctgtcccaaggtgctgagatgtgactattgaaaaataaaacatatgtgaaaagtgctttgtacat

SEQ ID NO: 11330 - DNA, 201 bp, Homo sapiens
tgggaaaaaatagtttttaaaaagtaacagatggataaacaactaagagaaagaaggaaggagtgaaggatggacggatggacagacttggctgccctatrctattatcctagtcatcattgttaaatatagttgtggttggtagatacaataccgataataataatgatggtgtaatgagaatttttttaatgcaaatat

SEQ ID NO: 11331 - DNA, 201 bp, Homo sapiens
gtgactcagccacacttctctttttcactcactcttctttctggtcctcactaagacaaaatacagaatacagagcagcagttcacgggctatagcatttraggagattaaatacaggcctccaaccacacaggccatctggaagctttggcctccagatgaggacataacgaggtcatctctgctttcagggagctctca

SEQ ID NO: 11332 - DNA, 201 bp, Homo sapiens
aatgtctgtgtgagacagtggcagcctctgatgggttcctgccgattggcaaggtggttagagctgtgtattgagaggtcttctccaaggtatcagttttyctctgggagggttaaagaaggaccttgcaaagcccatggcctttgaatagagagctctgttctgtttgcagtgactcccctcaaaaggcagaatgcaatt

SEQ ID NO: 11333 - DNA, 201 bp, Homo sapiens
tggtggggactcacaaatgggcatgctgcctgccagcaagggtctcctggccagccctaaaggcccgggctgctctgcttacagccacacggctgtttctragctgaggatgaccctccaggtggctgagattccctccaatctttttatttctggttgggaaaccctacacagaccagtgtctgtctcacggtttaaaag

SEQ ID NO: 11334 - DNA, 201 bp, Homo sapiens
ctcaataaatgacaacttttctcttctagttattgaatccaaaatccttgaagcagtccttgactcctcttttcctaacacccttcatccagtccatgagraaaatctgttggcatgacctttgaaatgtgtccagaatatgaccccttctcaccccctcagctgccatcaccctggccttcacgttcatcttctcacacc

SEQ ID NO: 11335 - DNA, 201 bp, Homo sapiens
gtctttcccatctcaataaatgacaacttttctcttctagttattgaatccaaaatccttgaagcagtccttgactcctcttttcctaacacccttcatcmagtccatgagaaaaatctgttggcatgacctttgaaatgtgtccagaatatgaccccttctcaccccctcagctgccatcaccctggccttcacgttcat

SEQ ID NO: 11336 - DNA, 201 bp, Homo sapiens
caatagtaattgccttactttatttgcgaaggggtggtgaacactaatatgcctgactccatagagcagtgtatttggttttcttaagcaggaagaagggsgccccccccaattttaatttactgaatgagtttaagaaccatggtgtatttcccaagcttcgctagtgaagatggtattttgttaaaaattgagattccc

SEQ ID NO: 11337 - DNA, 201 bp, Homo sapiens
atcagttcagcaagaggacataacaattgtaaatatatatgcacccaacaccagagaaactaaatatataaagcaaatattaatagatcttatgagagagwtagattgcagtacattaatattagggaatttcagtaccccactttctgcaatggacagatcatccagacagaaaatcaataaggaaacatcagacttaaa

SEQ ID NO: 11338 - DNA, 201 bp, Homo sapiens
gaaatgggttctgtacccttataccttgctcttcttcttcccaggatggcctgatcattcactcacccatccatccttccctccttccctccctccttctstccaacaagcatgtattgagtacgtaatagttattaagcactgggatacaccagtgaacaaaaaaaacaaggatgctgccatccctagtcccataaatta

SEQ ID NO: 11339 - DNA, 201 bp, Homo sapiens
cgctaagtcttgggagaggtgatgtaaccagggactgcaacttctagggaaaggggaaaaatcactgttggccccaccctctagcattggaagcttaacarggctttggcccacagcacatggaagtttgagctgtgttttgtaattcttttttaaatgttcgccagagcatccattattcttcctcattttctcttctcc

SEQ ID NO: 11340 - DNA, 201 bp, Homo sapiens
gctatgttggctattctctacttcccctctccagatccattctccaccattatccctcctgctttgtgcccttgggaggctgaccttcccctctgcctttwagttgggttcagtcagaggggagcactggaaaaagagggtggaagagtggccagccatagtgaccatggctctctacggaaggccatagcttctgtcagg

SEQ ID NO: 11341 - DNA, 201 bp, Homo sapiens
ccgctaagtcttgggagaggtgatgtaaccagggactgcaacttctagggaaaggggaaaaatcactgttggccccaccctctagcattggaagcttaacsgggctttggcccacagcacatggaagtttgagctgtgttttgtaattcttttttaaatgttcgccagagcatccattattcttcctcattttctcttctc

SEQ ID NO: 11342 - DNA, 201 bp, Homo sapiens
gtttgcttcctattccttgtaaggtttagccatgtatagtcatgtgccagtcacctagggctgagaaaggggagcaagcagagagggagaagaggaagaasccaaatgagatggttcgtaattgattagtggaagttaaatcatgttaaggataggaggcttgtcccctccatcatgatttagtatatcatccttcccaag

SEQ ID NO: 11343 - DNA, 201 bp, Homo sapiens
aggaaacattccccctgggctcactttttgcttagaaaagtcctgatggagaggttgaggtgggaagagagtgagggggaagactccatggagcatgacargcatgctgtgcctgccacagccaagcatggaggtcccaaccataatgtgtttttgagacaggatctggctctatcgcccaggctggaatgcagtggtgca

SEQ ID NO: 11344 - DNA, 201 bp, Homo sapiens
gtctttctcagcaccctcaaggttgcctcatggtctgagatgactaccagggaactagctatcatgtccacattccaagccaaaaatagaagaggacaaartgacatatgccccctcccttttaactattcttcctagaagttccatataacgctggccagaaattaattatgtatgtagatatacccacccactaaggag

SEQ ID NO: 11345 - DNA, 201 bp, Homo sapiens
ctgacctcaggtgatccacccacctcagcctcccaaattgctgggattacagtcgtgagccactgagcccggtcaaaatcccttcttacctgtcatttgtrttctccccattctgtgtctgacatcttgtaggtgtttgttagatgattggtgagtgaattaatgaatgtacagatggatgatgtataagtcctttcagag

SEQ ID NO: 11346 - DNA, 201 bp, Homo sapiens
ctctacctagcattgagcataagcaggtcactgaccacaaagatattctgttcccaaagagcaccatattcgtggtcaagtaaggccagagtctagactgrcatcaaatgcttgtatgattgggaggaaggagcccgaaggccaaagaggctcactaatttcattattcgattcttccaaccactgcacgttacaaacagg

SEQ ID NO: 11347 - DNA, 201 bp, Homo sapiens
cactgaatacctattgtttttacaccatcagaaagttgaaaaatcttaagtagaaccatcataagtcagggactatctgtatggtagtagaaatttttaaytgaatcttctgtaatcttcagcaagaaaccctgagaatattgaacgtctttgccagacaaggaaaagtgggactggggaaaaggccagttatgtgaatcc

SEQ ID NO: 11348 - DNA, 201 bp, Homo sapiens
aatatattagaataataagatatgtataattggataatttaagtagatatattatggtaaatgctcacatgtttttaccagttggacacaaaataaaaatrtttttcatccacctgtctagatgccttgaaatgttagtctgagctgagatgtgagtcctggaaattggaggacctctgtaccttctcttccaaaatctgt

SEQ ID NO: 11349 - DNA, 201 bp, Homo sapiens
tcacataacctgcaaagtgccctgagatctggttctgcatgaatcttctctaccctattgctgcctatcaacttgacttcccacctttgggagtcagatgmagtccgctggacagcccatgccctctccatgtggctataccacccctgccttgcccctgctctctgcctgatgtcctactgtcttttgactgtgcccagg

SEQ ID NO: 11350 - DNA, 201 bp, Homo sapiens
aaatgctcacatgtttttaccagttggacacaaaataaaaatgtttttcatccacctgtctagatgccttgaaatgttagtctgagctgagatgtgagtcytggaaattggaggacctctgtaccttctcttccaaaatctgtaaacatactgtttccgcttggcagtcttgatttgctttcagtgactctgagaagccct

SEQ ID NO: 11351 - DNA, 201 bp, Homo sapiens
ctgagatctggttctgcatgaatcttctctaccctattgctgcctatcaacttgacttcccacctttgggagtcagatgcagtccgctggacagcccatgscctctccatgtggctataccacccctgccttgcccctgctctctgcctgatgtcctactgtcttttgactgtgcccaggggcatttcctctgggaagcct

SEQ ID NO: 11352 - DNA, 201 bp, Homo sapiens
ttcatccacctgtctagatgccttgaaatgttagtctgagctgagatgtgagtcctggaaattggaggacctctgtaccttctcttccaaaatctgtaaayatactgtttccgcttggcagtcttgatttgctttcagtgactctgagaagccctgtggtttgtgaagagcctcttggctttcctttgaccttggttggaa

SEQ ID NO: 11353 - DNA, 201 bp, Homo sapiens
ttgagaggctctgagaattcagagaaaaagaacaaagcaataaaaaaggatgacatgaggactatattgtggaaggtagaaactggaaaacagcaaagagraaatggttccagaataattggaacagaagccattccttagacagcaaaggaggatctccatttcctgaaatgggtgcagcagacaccaggcaaaaatatt

SEQ ID NO: 11354 - DNA, 201 bp, Homo sapiens
tttgggggctgtgaagaacatctccctaaacatctctatctccaacctcggagatgatgcctatgatgccaacgtgtccttcaatgtttcccgggagctcytcttcatcaacatgtggcagaaggtaaggagggcatccctgtaaaaagagcagttgttccatctggtgcgcttgctgactttcattattgcctggaatag

SEQ ID NO: 11355 - DNA, 201 bp, Homo sapiens
caggaaacattccccctgggctcactttttgcttagaaaagtcctgatggagaggttgaggtgggaagagagtgagggggaagactccatggagcatgacmggcatgctgtgcctgccacagccaagcatggaggtcccaaccataatgtgtttttgagacaggatctggctctatcgcccaggctggaatgcagtggtgc

SEQ ID NO: 11356 - DNA, 201 bp, Homo sapiens
cctgtatctagctttgggggctgtgaagaacatctccctaaacatctctatctccaacctcggagatgatgcctatgatgccaacgtgtccttcaatgttycccgggagctcttcttcatcaacatgtggcagaaggtaaggagggcatccctgtaaaaagagcagttgttccatctggtgcgcttgctgactttcattat

SEQ ID NO: 11357 - DNA, 201 bp, Homo sapiens
agagcaggtggtttagggctgaggctgtaaaccacaggggattacctatgtttatctggggcaagttgcaggataaccacaggacaagactagtagttggmcagaaataccaatttttattattctagaatagattaaaatataaaataaaattagattttctctaatatatttagaattgaacctttttgggtacaatat

SEQ ID NO: 11358 - DNA, 201 bp, Homo sapiens
tcaggaaacattccccctgggctcactttttgcttagaaaagtcctgatggagaggttgaggtgggaagagagtgagggggaagactccatggagcatgamaggcatgctgtgcctgccacagccaagcatggaggtcccaaccataatgtgtttttgagacaggatctggctctatcgcccaggctggaatgcagtggtg

SEQ ID NO: 11359 - DNA, 201 bp, Homo sapiens
caggcaccattctaacctctttacccaagttgtctctgctagtcctcaccacagccctgggaagtgtgtgctgtcatatacccatgaagaaactgaggccwagaaaggaaagcagctctgcccaaggtgttataagcagagagcaccgagacaggacccaagcccaatttgtgttgactggggaatcagtactcagttctc

SEQ ID NO: 11360 - DNA, 201 bp, Homo sapiens
gtggacaaaagtcgactctgctctacccagtgttgctctaactgctgatagctgttcagctgggactgcttgcagctttttaatatttacagcattgaacrgggttgccttgttctttatgttaaaatggaaccaaaatcactttctgtggaaaaccttcactctgcccaccgatgagcactgggcatacattgagcaggt

SEQ ID NO: 11361 - DNA, 201 bp, Homo sapiens
ggacacagacgggacccttcctcagcagcaggcccccagcccttccaccagccactgattccgccgcctccctgaggtgaggagtcctcccaccccctgcytcccatagcagctggggcggccactgaagccctgacatgctcctgtccctggctgtgtacaccggggtatactccggaggggctgcatcatatggtcttt

SEQ ID NO: 11362 - DNA, 201 bp, Homo sapiens
gttagggtcaatgttgttcagtgctgtgttcacatatcacccaagataatctcatgaaccacctaaaataatcttagtgtaccactcccagtgtgaacatmctgtgatttgggtaacactgccccaaacaaatggtgttcaccatatacatatcaggcacgtgtgggaatgtgggaggaacccctgggtaggggttatagg

SEQ ID NO: 11363 - DNA, 201 bp, Homo sapiens
gggttatacatttcagactaatgatgatatccattactatatgtgcaattgcttataaactaatatatagtcatattaaaatctctaatctgattgagaarttttcagaaacaaggtacactgattttctcaccacttatttcctgctctcatgacagaatttctggagttctttgaattcacctggtttttggagctctg

SEQ ID NO: 11364 - DNA, 201 bp, Homo sapiens
tttttaacccatagctgtttttttaccctcagatgtggccattggtgcacccaaggaggatgacttcgcaggggcggtctatatctatcatggtgatgccrgtgggatagtccctcagtactcaatggtaattagtgtgagagtgatatggcaactgttcatacattcattcagcaaacatgtatggaaccttcattatgc

SEQ ID NO: 11365 - DNA, 201 bp, Homo sapiens
ttaactggaaaacttgcaacagtttccatttcattttaaactccagcctatatcacatatcagacctaagatgtgtctttctctctctagtggagtgttamattttgtcaaatttttgtttgtttgagagggagtctctctctgtcgcccaggctggagtgcagtggcgcaatcttggctcactgcaacctccgcctccca

SEQ ID NO: 11366 - DNA, 201 bp, Homo sapiens
ccctctgaggttcctccccttctatttcctgcttatcaacatgtttctaatgtcacacaacctccagctctaggacaaataatgttggaccccaagcattstttttgcaaatatgagggctagactgaagcctcattggaccacaggtcctatgggactggtggagatatagtgcccggagcctggcccttagggaacatt

SEQ ID NO: 11367 - DNA, 201 bp, Homo sapiens
tctaatctgattgagaaattttcagaaacaaggtacactgattttctcaccacttatttcctgctctcatgacagaatttctggagttctttgaattcacmtggtttttggagctctgtcaagtcaatatttataactgaactagttcaaacagttcaagcattgtctcttcctttctggttgaagttctgtcttagaaga

SEQ ID NO: 11368 - DNA, 201 bp, Homo sapiens
gatctcctcccagtgctgactctacaccagtcaagaccctgcctctctcttccttcttgtcctcttcccgccctgtctccatgcctgccccccaccccacwgtaagctgaccagtcccacagcaacagaaatttctgtctagaaagagatgtccatgttcactgtagatgatggtccattgtaatggaccaatgtccgttg

SEQ ID NO: 11369 - DNA, 201 bp, Homo sapiens
gacccctggatggagctccatgatgtgggatttacatcccgcccatactctgctgtgagagagatggtatgcagccagtccagccatctgaagcagaacgraaaaatggtatggaaagcaaggcacctgaaaaaattttcaaagggagaaaaagaatgagcaaaactatcctgtagaggagagagacattgaaaatgacat

SEQ ID NO: 11370 - DNA, 201 bp, Homo sapiens
tacactagataattttagatggttcatgaaattatcgtgggtgatacgtggacgcagcactgaacaacattgaccctaacagtgacccttttcaccttagycagttcagtcatctataacaaattaccctgggctgggtggtttaaacaacagacatgtatttctcacagttcttaaggctgagaagttcaaggtcatggt

SEQ ID NO: 11371 - DNA, 201 bp, Homo sapiens
tagtcagttcagtcatctataacaaattaccctgggctgggtggtttaaacaacagacatgtatttctcacagttcttaaggctgagaagttcaaggtcawggtcccggcagattcagttcctggcgagagttctcttcctggttcataaacagaaccttctctatgtgtgcccatctggctttcccttggtgtgtgtgca

SEQ ID NO: 11372 - DNA, 201 bp, Homo sapiens
aacacttctctatcaccagcaaatctcccttttcaacaaagatggagtagaccttaggctcagaggcttccaaaggcaacagagttcagcattgctctgtkttcattgtgttcatttttacaactaccttctctttttggcaagtgatcctggattcccatctatgacagtgatataaattgttcttttaaaacaatcttt

SEQ ID NO: 11373 - DNA, 201 bp, Homo sapiens
tcctttttcactagtatgaattcagcgtgatctttgatacaagccacctgtctggggaagaggaagttctcagcttcattgttactgctcagaggtaaggsgggggtttaaacacttttttcaaagatgagagatttatgggaccaggaaaggatgtgtcctggttaagctttgatgaatcccaggatgctgaggaggaag

SEQ ID NO: 11374 - DNA, 201 bp, Homo sapiens
tttatgggaccaggaaaggatgtgtcctggttaagctttgatgaatcccaggatgctgaggaggaagaaatggttactcagtgataaagccttgagccgcwaagtggaattggatttcttggggatggtggttgcctagtgctgcttgcatagccgccactgcagattgaactgagaggaactgggcatcagccactcaga

SEQ ID NO: 11375 - DNA, 201 bp, Homo sapiens
gtttatgttctgattatgccagttatcccaataatgtctttttagccgcttctttttactggtccacaagacttggttattttctattgacactattttcragatcacataatttacatcacataaaacatgactgtgatctaatagaagcctatgcaaagcatagatagggtagacttcattcccattgcacaaaatcca

SEQ ID NO: 11376 - DNA, 201 bp, Homo sapiens
aacatttctgtggcaggagagggctgaaggagaggggcaggctgccctgatccaagtgagcagatagtctccttattgtttcagggtttcctcccgcactrcatgaatcccccaaggctaaaggtgaaccgtacagcggccttctgtttcctctttgccaaccttttattttagacttcatttaggatgaaggtgctggtc

SEQ ID NO: 11377 - DNA, 201 bp, Homo sapiens
tcctattattaaataaaggtttatgccctcctgcctccacacacacacacacacacacacacacacacacacacacacactagtgtatgttttaacaagtwacatttctgtggcaggagagggctgaaggagaggggcaggctgccctgatccaagtgagcagatagtctccttattgtttcagggtttcctcccgcacta

SEQ ID NO: 11378 - DNA, 201 bp, Homo sapiens
tgattcatcctattattaaataaaggtttatgccctcctgcctccacacacacacacacacacacacacacacacacacacacacactagtgtatgttttwacaagtaacatttctgtggcaggagagggctgaaggagaggggcaggctgccctgatccaagtgagcagatagtctccttattgtttcagggtttcctcc

SEQ ID NO: 11379 - DNA, 201 bp, Homo sapiens
atgaaaaagtgggcagctggaagggggctggagacggcctggtcagggcatctcgtcccactggtgcctaccgtctgagcactgctctgaaggactcgatygccccgtggagcctgctcccacacacctgccttttgtgcagccggcccatctgttggtgctttttctttcaggaggagatgggcatctcctgtgagctgc

SEQ ID NO: 11380 - DNA, 201 bp, Homo sapiens
gtgggcagctggaagggggctggagacggcctggtcagggcatctcgtcccactggtgcctaccgtctgagcactgctctgaaggactcgattgccccgtrgagcctgctcccacacacctgccttttgtgcagccggcccatctgttggtgctttttctttcaggaggagatgggcatctcctgtgagctgctggaatcg

SEQ ID NO: 11381 - DNA, 201 bp, Homo sapiens
ttgatgtttgacgtctttatctcaactcttcaacttagctcattctggagcagtcacacgatgacagatgagacggttgggcctaagccggccaaacaaayggcagggcaagacctggcaggatgctggggtgggggcgggagtgggccaggatggtgttaacccatccacaggggagtcgcctttggcctgcccacagca

SEQ ID NO: 11382 - DNA, 201 bp, Homo sapiens
gaatccccgttctgtgctttctcacccggaggccttatgtggatgtattttagaatcacctggggagctttcaaaaatatcgatgcctgatctacccccakagacttgctatagccagggtctatagcgagagcttccatgatgtttatagtggtaggtttggtcagggcctctttcctgggcttggctgtccatggatga

SEQ ID NO: 11383 - DNA, 201 bp, Homo sapiens
ggcacctgatcctgctgcttttgcaaactgtggatgcccctgagggactgatgtcaccccatgtaggaagacagatgaggagccagggcagagactgtggscctatggggtcagcgtcacacagcaccattgtttcagaacaataggagggagaaggagaggggatgtgagagctatttaagtgctgttgccattcagcac

SEQ ID NO: 11384 - DNA, 201 bp, Homo sapiens
acaggaggaccactttctgattagctccacaggcagtgctggctttgcttgtttctgttaactccctctgcagagccagaggtggcttttcctgatgtctrtaatggtctggaatgggcagggaaccatcccatcggccacactgtctgtctgggtcaagtccacggtcattcagtgccgctggcattgttggaaagcagg

SEQ ID NO: 11385 - DNA, 201 bp, Homo sapiens
tcaaaggcacagcaagaatatacccagaaccaagccctatccttggggacaaagagaaaacattctccccaccacccccagacacttgatcatgtaatcaktccttagaggaccttgttgggaggtgttaacagcccctgatgaagccatcagttaaacaaatgagtcaacctctgatctctccaggaacctaaaacagct

SEQ ID NO: 11386 - DNA, 201 bp, Homo sapiens
taaaataaaattagattttctctaatatatttagaattgaacctttttgggtacaatattcttttttagtatttcttggtgatttttttttttacaacaamaaatagagcaatacctttcttggttagtaaaataaatccctaaatatttgccacaatctctagaatcttctaaatcaggaaattttaatgattttcacag

SEQ ID NO: 11387 - DNA, 201 bp, Homo sapiens
ccatttggtaatgctgggaactcactaccttactaaaataatgcactaaacattgaaaatggatgagttgttgtctattcggacttagtctcaaaaatctkccattgttgtgtttaggtgagtgagtggcctccagcatctagaagtcgatatttgtctgggagtgtcagtcagagctttgtttcttctcaggaatgtgtt

SEQ ID NO: 11388 - DNA, 201 bp, Homo sapiens
ttctcacctcttatgtagcctccgaaatccaagggaaaatgctatcaatgaacggattcagctttcaaatgcctaacttctagtcatcttggcagtctgayaaatttaagttttttaagtgaatttgtcatagagtggggtttaggatgccaaatacataactcatttatatttattttttaaaagcttatgatcatcttc

SEQ ID NO: 11389 - DNA, 201 bp, Homo sapiens
tcgatgcctggtactctgctgtgcaggcccctctgctttttcaggatttggaaggacaggtccacgtcatgaatgccagttttccccaagaagccctctgygtggtggaggcctcagccaatgtcccagcccagatgaccccatgaggacccctttctgttctccatcattccccaccttctgggcagggctgcctcagag

SEQ ID NO: 11390 - DNA, 201 bp, Homo sapiens
tcctcctgagattttcttgccagctcatccaggagcccactcctcctgcaggggaacagcctttcggaagggcagttttataagaacagaggagtgtgagyccctgtgagcccccacgggaggcacgctgctccctcactgagccatggctggcttgcccaggcacacaggcatcatttccagcaagtccacttggtgtag

SEQ ID NO: 11391 - DNA, 201 bp, Homo sapiens
gcggatcacctgaggtcaggagtttgagaccaacctggccaacatggtgaaatcccgtctctactaaaatacaaaaattagccggggatggtggcagccayctgtaatcccagctactcaggaggctgaggcagggagaattgttcgaatccaggaggtggaagttgcagtgagccgaggttggcccactgcactccagcc

SEQ ID NO: 11392 - DNA, 201 bp, Homo sapiens
gactcaaccaagtaagatttacaaaacaaacaaaactgttttcatcatctttggttgtagttttataaagaatgctggttcatggactccagacacttcaytgaaactgtgtgaatcattttaaacaggtttgtccttgggccccagatagtacattggcatttgtgaatcattttagatgagtttgtcctcagtacaaat

SEQ ID NO: 11393 - DNA, 201 bp, Homo sapiens
gtacatttccactgaggaattttggtgggtggggggaggttgtgctgcctcacaatgtcacgtgtattaaagtctaagcagtcacttctgattcacttgcmctgtttgggaaatgtcaggtttacaaaaacatacatgtttggaataaaaaatggctgcaaacaattcagaagttcaatctgtaatttacttgctaataag

SEQ ID NO: 11394 - DNA, 201 bp, Homo sapiens
ctgatgcatccatgtacatttccactgaggaattttggtgggtggggggaggttgtgctgcctcacaatgtcacgtgtattaaagtctaagcagtcacttytgattcacttgcactgtttgggaaatgtcaggtttacaaaaacatacatgtttggaataaaaaatggctgcaaacaattcagaagttcaatctgtaattt

SEQ ID NO: 11395 - DNA, 201 bp, Homo sapiens
ctgctggaatcggacttcctcaaatgcagcgtgggatttcctttcatgaggtcaaagtcaaaggtaagggacacagacgggacccttcctcagcagcaggyccccagcccttccaccagccactgattccgccgcctccctgaggtgaggagtcctcccaccccctgcctcccatagcagctggggcggccactgaagccc

SEQ ID NO: 11396 - DNA, 201 bp, Homo sapiens
ggatttcctttcatgaggtcaaagtcaaaggtaagggacacagacgggacccttcctcagcagcaggcccccagcccttccaccagccactgattccgccrcctccctgaggtgaggagtcctcccaccccctgcctcccatagcagctggggcggccactgaagccctgacatgctcctgtccctggctgtgtacaccgg

SEQ ID NO: 11397 - DNA, 201 bp, Homo sapiens
ttcccttcttcaggggagcttatgaccatcagggtggctgtgatgcttccctggatgtttggctcacagtgaagaagcatgaggacaaatacacagacaayaaaaacatttgatgtgcccatgacagctgggtttgcttcacgatttgtgtaggacacgtcttatatgtgcatgcactgttggcagcagactgcagagagt

SEQ ID NO: 11398 - DNA, 201 bp, Homo sapiens
tgaattcaaagacctcataatcttttaaaatattattaaattctgttttatttgtttctttcaaaaattaacagatttttaaaaattgaaaattgaatttycaaaaaatttctcaaaaatctttgagaaaaattgagatgggacaaagactctgtgccttgttcccccttagtgtgagtcctgagtacccagctgtgtggc

SEQ ID NO: 11399 - DNA, 201 bp, Homo sapiens
ggatcccccagtgctactgcgtccatactctgtaagccctcagagaggagagcacaatcttgtttggggttggggagttggggaaagccaagaggagggaraaacaggagttcctgctcctggtctgatggggataggggaccccatgacagagttccagacattgatacttgagtcaagctggggaagaaactagtctga

SEQ ID NO: 11400 - DNA, 201 bp, Homo sapiens
caactgcttttccttctggatctcacattctcatccctttcttggatgccatctcctacctcttggtctctcttgcctacagccttggctcctttgggatrtcccggaccccagcaccctcagcaggcagcaacgcagggtctacgcccgaggcccccacttcctcaccagccacgccagccacatcttctccaacagggg

SEQ ID NO: 11401 - DNA, 201 bp, Homo sapiens
gtagctgggactacagggcgcccaccaccacacccagcgaattttttgtatttttagtagagatggggtttcgccgtgttagccaggatggtctcgatctyctgacctcgtgatccgcccgcctcagcctcctaaagtgctgggattacaggcgtgagccaccgtacccggccattacacagttatttaggacttgggacc

SEQ ID NO: 11402 - DNA, 201 bp, Homo sapiens
cgacggggctgtcgggggaggatttccctgtgcccagatccttcccactctttcaaatcgacgtggttacatttggttctcagctcttctgagatttacamggtgtgcagtaggtgctcaataaaatcttgttgaatgacggactgttgcctgtgttcgccaccccctgtggccgctccataatttcacataggcggggct

SEQ ID NO: 11403 - DNA, 201 bp, Homo sapiens
tgagaggccacatgtgcacatgcatgcacacacacatgcatgcacacacacagatgcacacgcacacgcacttgcacacacatacacacacacacacacactccttcgtcactcttcagcaagaggaggctgggcctgctcaacccctcccccagctcccacctgggctaatagaaagggagaagaggagacggtggtcaa

SEQ ID NO: 11404 - DNA, 201 bp, Homo sapiens
ccaagactcaaacccaggcattccacctccagaatttacactataccatttctgcttatatcaaaggatccttttgataattaaagcagcccccatctctragactctggggagggggattctgcgaggtaaccaaagccctgggaaagtcaaggccaggggctggcaggaggggcagggatgacctacctcgagtgagcc

SEQ ID NO: 11405 - DNA, 201 bp, Homo sapiens
caggaagttcagcggaaaagcttttggccacagccctgaacatggggttctgagcccaggttccagcctcagcacagccacctactaaccatgttactctrggaaacttagtctctcagaaattcagtttttctttctgtaatccctacctcatcccagttggtgagggtgctaataccatgaaatttcatatctgccaac

SEQ ID NO: 11406 - DNA, 201 bp, Homo sapiens
gtgagaggccacatgtgcacatgcatgcacacacacatgcatgcacacacacagatgcacacgcacacgcacttgcacacacatacacacacacacacacactccttcgtcactcttcagcaagaggaggctgggcctgctcaacccctcccccagctcccacctgggctaatagaaagggagaagaggagacggtggtca

SEQ ID NO: 11407 - DNA, 201 bp, Homo sapiens
aggatttccctgtgcccagatccttcccactctttcaaatcgacgtggttacatttggttctcagctcttctgagatttacacggtgtgcagtaggtgctyaataaaatcttgttgaatgacggactgttgcctgtgttcgccaccccctgtggccgctccataatttcacataggcggggcttaagataggccatctggt

SEQ ID NO: 11408 - DNA, 201 bp, Homo sapiens
atggaaggagcttagtggggtcaccagggcagcccctctgtcccaggactgaatggggttcatactgctccaggattttgaagacagaggtgagactatcraggccacagagggggctctgccgtctgggatagtggccgggtgagggctggttctggccatgtcctgatatccctaggagtgacctaagtaatagctcat

SEQ ID NO: 11409 - DNA, 201 bp, Homo sapiens
cttcccgtagtcccgttggcctgctccgggacgccctgggagttgtagtttcttcgcctggctattgtggttccgactcaaccccgccccaccgcgggggkctctgggaatcgtagttctttgtggcctcgcgaggcaccctgggaattatagttcgcctttccaagccgaccacgcggttgttggggggcggaaaagaac

SEQ ID NO: 11410 - DNA, 201 bp, Homo sapiens
agtgagctgagatcgtgccactgcactccaacctgggtgacagagcgagactccatctcaaaaaaaaaaaaaaaaaaagaagaagttcctataccaagtgygtttaagagcatatgagtattgaaaggatattaggaaggactaataagaatcgagtggctaactgggaggtggttcttttgtgtgtgaactcttgagcca

SEQ ID NO: 11411 - DNA, 201 bp, Homo sapiens
atttgagattgtcttcattaaacgcttggttcccgttccggtcgtaggcggcccagatgttactggctatggcagcggtgacccgggcgtcagtgtccccrtaaccagagtaggccagcagtgatccctcgttattcagcagcctggtgaggggcggggagggatagcgatgtgctcagagcggggagtaaaacgtctggg

SEQ ID NO: 11412 - DNA, 201 bp, Homo sapiens
ggttctcagctcttctgagatttacacggtgtgcagtaggtgctcaataaaatcttgttgaatgacggactgttgcctgtgttcgccaccccctgtggccrctccataatttcacataggcggggcttaagataggccatctggttggaagagagggatctggaagcagcctctgcttaacaagtgcactgtttttactta

SEQ ID NO: 11413 - DNA, 201 bp, Homo sapiens
gcagcatgatgcagacgcttgcccagaaccccgactttgctgctcaggtatgaaaccagcatgaggagagtattgttggggagagagttcctcttggttgrgggcagtttcttgtggtcaaaacactgtggagccagactgcctgggtttgcatcccaagctctgctgcttcccagctgtgtgagttaagcaagttattta

SEQ ID NO: 11414 - DNA, 201 bp, Homo sapiens
tcaagtgattcttctgcctcagcctcccaagtagttgggactacaggcatgcgccaccacacctgggtaattttttgtgtttttagtagacatggggtttygccatgttggccagcctggtcttgaactcctgacctcaggcaaactgcccatcttggcctcccaaagtgctgggattataggcatgagccactatgccca

SEQ ID NO: 11415 - DNA, 201 bp, Homo sapiens
ccccagcaccctcagcaggcagcaacgcagggtctacgcccgaggcccccacttcctcaccagccacgccagccacatcttctccaacaggggcttccagygcccagcagcaactcatgcagcagatgatccagcttttggctggaagtggaaactcacaggtacatgaggcagtgggggcaggtgctgggagcaccactt

SEQ ID NO: 11416 - DNA, 201 bp, Homo sapiens
ggatctcacattctcatccctttcttggatgccatctcctacctcttggtctctcttgcctacagccttggctcctttgggatgtcccggaccccagcacmctcagcaggcagcaacgcagggtctacgcccgaggcccccacttcctcaccagccacgccagccacatcttctccaacaggggcttccagcgcccagcag

SEQ ID NO: 11417 - DNA, 201 bp, Homo sapiens
gggcccccatttgcagctcatcttccctgccctcctgattgactctgaggatattagagaagacctgctggtcttagaaacccttaattcaaatagggccyccaagattggtcctgtgcccacttcacaaggcctgtcccctccaggtgcagacgccagaagtgagatttcagcagcagctggagcagctcaactccatgg

SEQ ID NO: 11418 - DNA, 201 bp, Homo sapiens
caccctgggaattatagttcgcctttccaagccgaccacgcggttgttggggggcggaaaagaacgggagtgaaaggacagcagcagcgctggaaggacayttaaccccttcggggagaaaggaatcaacgtgtccgcttggcagtccacgattcaataattatactacatcctcatatttgtcaggcacgcctttggtta

SEQ ID NO: 11419 - DNA, 201 bp, Homo sapiens; identical to SEQ ID NO: 1631

SEQ ID NO: 11420 - DNA, 201 bp, Homo sapiens
gaggatttccctgtgcccagatccttcccactctttcaaatcgacgtggttacatttggttctcagctcttctgagatttacacggtgtgcagtaggtgcwcaataaaatcttgttgaatgacggactgttgcctgtgttcgccaccccctgtggccgctccataatttcacataggcggggcttaagataggccatctgg

SEQ ID NO: 11421 - DNA, 201 bp, Homo sapiens; identical to SEQ ID NO: 1630

SEQ ID NO: 11422 - DNA, 201 bp, Homo sapiens
acaaaggtaagcatggatgtctcacttattgggatacttgagagactgtgttgactgtgaaaaaagacagcacaaaaacttaaatgcttttattttaatgyaattttgctactcttaagtatatacaataataaacattaaccccacaaacattatcacaaactgaatccataaatcctgaattatactctctgttatact

SEQ ID NO: 11423 - DNA, 201 bp, Homo sapiens
cttcctccttagggaaataaaaataataggatttcccacatgacagtagaaaactaaaatgtatgtatgtgattccacaaatttcttcgttctccataatrttatttttttccatgtttataaaatttaaaagtatggaagtattatatagttatgaaagataactaatcctgattccctgtctctaggattcttcttttt

SEQ ID NO: 11424 - DNA, 201 bp, Homo sapiens; identical to SEQ ID NO: 1650

SEQ ID NO: 11425 - DNA, 201 bp, Homo sapiens; identical to SEQ ID NO: 1651

SEQ ID NO: 11426 - DNA, 201 bp, Homo sapiens
tgctaacagaaccggcttcagctgaagaaagagaggaatgaagcgccttctgcttctgtttttgttctttataacattttcttctgcatttcccttagtcyggatgatggaaaatgaagaaaatgtgcaactggctcaggtactgtcttaataaatgatatcgatgactattgataaaaagcttattttattgattctctt

SEQ ID NO: 11427 - DNA, 201 bp, Homo sapiens
ttatggcaagtgtccctttctgttattaattaaatgatgatacaagccaattcatgccacgtctcactattattttctaaattctgtgctaacagaaccgkcttcagctgaagaaagagaggaatgaagcgccttctgcttctgtttttgttctttataacattttcttctgcatttcccttagtccggatgatggaaaat

SEQ ID NO: 11428 - DNA, 201 bp, Homo sapiens; identical to SEQ ID NO: 1656

SEQ ID NO: 11429 - DNA, 201 bp, Homo sapiens
caggtgtggggtgcctgatgtgggccagtatggctacaccctccctgggtggagaaaatacaacctcacctacaggtaatgcttctgccagcttatttccrcctaatccaaaggaacataaagataatttccaaggaacagaataatattcattcaattgactgagcacttcctgtgtgcacagcacatcttaggctccat

SEQ ID NO: 11430 - DNA, 201 bp, Homo sapiens
aattgcactcatttttgcttatgggcagttactttttcctggatatatattcttaaaaattgacctgtaggagaggacaagattcaactataaaaataatyctatttcaaattcagtggaaaatctaaaaacacagttttcaaagcatatatgttgaatattagaattatattaaagatttataactcaaaaagtaggtga

SEQ ID NO: 11431 - DNA, 201 bp, Homo sapiens
cacttcctgtgtgcacagcacatcttaggctccatttacggtatcttcccaacaaacctgtgctgtaggctctgctgctaccaccatcttaaatacagagraactgaaacaaaagtttatttaccgtggctgaggttacacagctcttactggctccagcagacatgctctcatctctagcctctgccaccatcatataag

SEQ ID NO: 11432 - DNA, 201 bp, Homo sapiens
ttatctcaggagatttgaggaagctgatcttttttcctcgcataaattgtatctcagtccatggtcggtgtcctcgctattttgatggtcccttgggagtkcttggccatgcctttcctcctggtccgggtctgggtggtgacactcattttgatgaggatgaaaactggaccaaggatggagcaggtgagtctaattttc

SEQ ID NO: 11433 - DNA, 201 bp, Homo sapiens
ttttgttaatttttaagaataataaactatactccggatatggcacgagctgctgtggatgaggctatccaagaaggtttagaagtgtggagcaaagtcaytccactaaaattcaccaagatttcaaaggggattgcagacatcatgattgcctttaggactcgaggtaaggttttcaacagagagcaaagctatttttat

SEQ ID NO: 11434 - DNA, 201 bp, Homo sapiens
aatttttgtactttttgtagagatggagtttcaccatgattctcagtctggtctcgaactcctgggctcaagcgatccacccacctcggcctctcaaagtrctgggattacaggcatgagtcgccacgcccagcccatagtcttcttaaagtgaataatgaaggcagtggatgacatttatcaagccgaaagagatctcaa

SEQ ID NO: 11435 - DNA, 201 bp, Homo sapiens
gattgctttagcccggagttcaagatcagcctgggcaacatagtgagacccccatctctacaaaaataaataagaaaattagctggacatggtggcatgcwcctgtagtcccagctgcacaggaggctgagggaggaggattgtccaagcctaggagtttgaagctgcagtgagctgtaatcacaccactccagcctgggc

SEQ ID NO: 11436 - DNA, 201 bp, Homo sapiens
actgaactgaactcacaatcacctaaatttactggggaaaattatgctaattatctcaattatttgaggaagataccaaccaattagctaaaaggcaagcytaagattacaaaattctcattgacatggaaataggctgcatgtgtaaagtgttttttgtttaacacaggcacctatggaggatctattatgatatcacgg

SEQ ID NO: 11437 - DNA, 201 bp, Homo sapiens
gtagcttaagtgtctagtgtttatatagtctacataatgtactgtaagtcctaggccttcacattcactcaccactcactcactgactcacccagagcaayttccagtcctgcaagctccattcatggtaagtgtcctacatagctgtactattttttatcttttataccatatttttactgtaccttctccatgttcaga

SEQ ID NO: 11438 - DNA, 201 bp, Homo sapiens
gtaatcacaccactccagcctgggcaacagagcaagaccctgcctcaaaaaaaaaatttataaagtaaaaaagttactgtaagcaaaagttaatttattaytgaagaaaaatatttttaatttggtgtagcttaagtgtctagtgtttatatagtctacataatgtactgtaagtcctaggccttcacattcactcaccac

SEQ ID NO: 11439 - DNA, 201 bp, Homo sapiens
ggagtttgaagctgcagtgagctgtaatcacaccactccagcctgggcaacagagcaagaccctgcctcaaaaaaaaaatttataaagtaaaaaagttacwgtaagcaaaagttaatttattattgaagaaaaatatttttaatttggtgtagcttaagtgtctagtgtttatatagtctacataatgtactgtaagtcct

SEQ ID NO: 11440 - DNA, 201 bp, Homo sapiens
ttgcccctgaagactttccagtgggacaagatgtggaggtggaagacagtaatacggatgaccctgatcaaaggaaggaaatatttttgtacagctgtacracaagtttgtgttttaagctaagtcacaataaagtccaaaattttaaaaatttaaaagtttaggccaggtatggtggctcacacctgtaatcccagcact

SEQ ID NO: 11441 - DNA, 201 bp, Homo sapiens
caagtcaagtaattttcttactctctatttctttgcctgtaaaagagtaatgatgctcttcttttaggagggtgaaataaattacccttaccctaactagrttaataaaggtgaaaacccctttcagagcagttgtccatagtgaacactcagaaagtgcttgacatcaaagattctgttgacaattgttagtattgatga

SEQ ID NO: 11442 - DNA, 201 bp, Homo sapiens
agacttttgtcatcttttacctacagcgtcatatggccaataacagtgttgtcacatgagaaatactctacaaatcattggtaaataaagtcactcaatgrtcatttattgaacatccactatgactaaggctctgtcataaaaatgaaatatacccttgtatataggacacagaagctgccctccagggcttcacagtct

SEQ ID NO: 11443 - DNA, 201 bp, Homo sapiens
tattccaagatgaccttgatggaagtgttcaatacaccctcataaagtggctacttctactatgatcagagcagtcttcattatttatacattcattcatrcacccataatgtctgaggggccactgtgtgcccggaactatacaaggtgtcctatggaccccaaagttgtactagaaaagtgtaagccttcagaggttca

SEQ ID NO: 11444 - DNA, 201 bp, Homo sapiens
gtcatatggccaataacagtgttgtcacatgagaaatactctacaaatcattggtaaataaagtcactcaatggtcatttattgaacatccactatgactmaggctctgtcataaaaatgaaatatacccttgtatataggacacagaagctgccctccagggcttcacagtctaagggacacatagacaattaaatggca

SEQ ID NO: 11445 - DNA, 201 bp, Homo sapiens
tttctgagacaccggtttcaagccattttcttaccctaggctatatttttccatgatgtgactagtaccaattaaagttatgtgccatttaatcatatttkggtcaactatggactatggatatgacagtggtcccattcgattatgatggagctgaaaatttcctatcacctagtgatgtcacagcacaacacattactc

SEQ ID NO: 11446 - DNA, 201 bp, Homo sapiens
aatggtcatttattgaacatccactatgactaaggctctgtcataaaaatgaaatatacccttgtatataggacacagaagctgccctccagggcttcacwgtctaagggacacatagacaattaaatggcaactaaaatcagtaggatcagtactgagataaaggaaactatggcaatgtaataggtcctcacagaagaa

SEQ ID NO: 11447 - DNA, 201 bp, Homo sapiens
tgtgccctttttccctgatcatttcttgtttggaagattctataaatgattcaaccaaacataatctttactgtatttttattattgatccaattagttttcctctactatgcctatgtattccccacatccctgcttgactctaagttgtgcggtagacaaattaagctccccaaaccaaagatccgctggtatcctttc

SEQ ID NO: 11448 - DNA, 201 bp, Homo sapiens
ttgaggattgaaagaagactctagggaggtggtaattttgagttagcaattaaaggacagtatatggattcatagcccatagaggctctaattcaaagcaygaacttcctcttctaactcttgcccagctgcaaaggaatcagaccttaatccttatatttgacttatttcttcaaaccaagtaagtttattttatttttc

SEQ ID NO: 11449 - DNA, 201 bp, Homo sapiens
gtagaccatgaccatatttttatagcaaaataccaagacatacaccattgacaaagatataggggcaaaaggaaagaatatttgaaattggactcctttcwcccatgaatatatcgcgttacaatcacatgttatcaccaccattctctgaccagcagaggccaagagctacccaccatgaatgtcacagaggagtggcct

SEQ ID NO: 11450 - DNA, 201 bp, Homo sapiens
tgtatataggacacagaagctgccctccagggcttcacagtctaagggacacatagacaattaaatggcaactaaaatcagtaggatcagtactgagatamaggaaactatggcaatgtaataggtcctcacagaagaaagtccaacccagacccacaggtcagcagaggaagctatgtcaagcctgagaactggaggctc

SEQ ID NO: 11451 - DNA, 201 bp, Homo sapiens
agtatttcatttaaataaagtgctaatgcaactgtaagataattgcaccacaccaaagttactgcagcacattattgataagctagaaatgttttttgtarttatgtgtgtatattcatgcatgaataagccagaaattgacatatttttgttaatttttaagaataataaactatactccggatatggcacgagctgctg

SEQ ID NO: 11452 - DNA, 201 bp, Homo sapiens
ttcctccttagggaaataaaaataataggatttcccacatgacagtagaaaactaaaatgtatgtatgtgattccacaaatttcttcgttctccataatgytatttttttccatgtttataaaatttaaaagtatggaagtattatatagttatgaaagataactaatcctgattccctgtctctaggattcttctttttc

SEQ ID NO: 11453 - DNA, 201 bp, Homo sapiens
tcctggtccgggtctgggtggtgacactcattttgatgaggatgaaaactggaccaaggatggagcaggtgagtctaattttctttatgaacaaaatcttrttattctaaagaatccctgaaaagaatagctttgtaactagctgctttttaactgtaaagttcccaatgtccccacaattttccatattccaagatgacc

SEQ ID NO: 11454 - DNA, 201 bp, Homo sapiens
ttatgctaattatctcaattatttgaggaagataccaaccaattagctaaaaggcaagcctaagattacaaaattctcattgacatggaaataggctgcawgtgtaaagtgttttttgtttaacacaggcacctatggaggatctattatgatatcacggatgttgagtttgaattaattgcttcattctggccatctctg

SEQ ID NO: 11455 - DNA, 201 bp, Homo sapiens
catggatgtctcacttattgggatacttgagagactgtgttgactgtgaaaaaagacagcacaaaaacttaaatgcttttattttaatgcaattttgctaytcttaagtatatacaataataaacattaaccccacaaacattatcacaaactgaatccataaatcctgaattatactctctgttatactatctcaaatct

SEQ ID NO: 11456 - DNA, 201 bp, Homo sapiens
aaccaattagctaaaaggcaagcctaagattacaaaattctcattgacatggaaataggctgcatgtgtaaagtgttttttgtttaacacaggcacctatkgaggatctattatgatatcacggatgttgagtttgaattaattgcttcattctggccatctctgccagctgatctgcaagctgcatacgagaaccccaga

SEQ ID NO: 11457 - DNA, 201 bp, Homo sapiens
acaggcacctatggaggatctattatgatatcacggatgttgagtttgaattaattgcttcattctggccatctctgccagctgatctgcaagctgcataygagaaccccagagataagattctggtttttaaaggtaacctggcccatcccgattcctcttctccctctggctgcctgaactaaccagtggatattttgg

SEQ ID NO: 11458 - DNA, 201 bp, Homo sapiens
taaagaaagtggtaggaatgaatgtggacataagattattaaatctctaagcactgaagctaaaaggaactaggtatctaatgatttttaaatttcttgasatacctatttctccctctagaaaataaataatcactcctctcttcctagatgaaaacttctggatgatcagaggatatgctgtcttgccagattatccca

SEQ ID NO: 11459 - DNA, 201 bp, Homo sapiens
tagcattgcaatacctcccagataaatggtggtacatatgagaattatctgctgtatagcaagcctttatttcattccccttagttactttctaatctcasatgcagccattctctttttgattaagtcatgtgctcgtgttttccctgttattatcaaggattcaacttgtttcttgtggctgctcatgaatttggtcat

SEQ ID NO: 11460 - DNA, 201 bp, Homo sapiens
ggaatgaatgtggacataagattattaaatctctaagcactgaagctaaaaggaactaggtatctaatgatttttaaatttcttgagatacctatttctcyctctagaaaataaataatcactcctctcttcctagatgaaaacttctggatgatcagaggatatgctgtcttgccagattatcccaaatccatccataca

SEQ ID NO: 11461 - DNA, 201 bp, Homo sapiens
atctctaagcactgaagctaaaaggaactaggtatctaatgatttttaaatttcttgagatacctatttctccctctagaaaataaataatcactcctctyttcctagatgaaaacttctggatgatcagaggatatgctgtcttgccagattatcccaaatccatccatacattaggttttccaggacgtgtgaagaaaa

SEQ ID NO: 11462 - DNA, 201 bp, Homo sapiens
tgtactcctacttgtacaaaaaaaaagaaagaaagaaagaataggtaactgtaaaacagcctcaggcaggcccttcaggagggattccagaagaaggcatygttatcctaggagatgacagctccatgcctgttattgcccctgaagactttccagtgggacaagatgtggaggtggaagacagtaatacggatgaccctg

SEQ ID NO: 11463 - DNA, 201 bp, Homo sapiens
tatagcaatacagaacctctgaagaatagaagtaggagcaacatgatcacatatactgtagtctagcaacaaccccaaactggtggcttctttttttttttaatattatccatttctgagacaccggtttcaagccattttcttaccctaggctatatttttccatgatgtgactagtaccaattaaagttatgtgccatt

SEQ ID NO: 11464 - DNA, 201 bp, Homo sapiens
tctcactctgtcacccaggctggagtgcagtggtgcgatctcggctcactacaacctatgcctattggactcaagcaattctcctacctcagcctcccaartagcttggactacaggcacaggtcaccttgcctggctaattttttttttctttagtagagacagggtttctccatgttacccaggctgctcttgaactcc

SEQ ID NO: 11465 - DNA, 201 bp, Homo sapiens
aagaaagagaggaatgaagcgccttctgcttctgtttttgttctttataacattttcttctgcatttcccttagtccggatgatggaaaatgaagaaaatrtgcaactggctcaggtactgtcttaataaatgatatcgatgactattgataaaaagcttattttattgattctcttgggacctaaaaagaaaacacattc

SEQ ID NO: 11466 - DNA, 201 bp, Homo sapiens
ggtctcactctgtcacccaggctggagtgcagtggtgcgatctcggctcactacaacctatgcctattggactcaagcaattctcctacctcagcctcccraatagcttggactacaggcacaggtcaccttgcctggctaattttttttttctttagtagagacagggtttctccatgttacccaggctgctcttgaact

SEQ ID NO: 11467 - DNA, 201 bp, Homo sapiens
atcactaggcaaatttccatcagggaagctgaggttttccttaggctccatgcacttagttgcaaagccagggatggactttatgtatgtatgtatgtatktatttatttattttttgagaccgggtctcactctgtcacccaggctggagtgcagtggtgcgatctcggctcactacaacctatgcctattggactcaag

SEQ ID NO: 11468 - DNA, 201 bp, Homo sapiens
ccttttgtctcttaaatccaatgctaagtagcagttactcttacccatactgctttaagccctctgccaagggggacatgtggggtaagttatttttttttaagtccgatgtatctgggttccacatcggtaaggctcgcttgagcaaggcaagagataaatacagtcctcaaccaagttctgggtgggcaaccaggcagc

SEQ ID NO: 11469 - DNA, 201 bp, Homo sapiens
aaaaatttataaagtaaaaaagttactgtaagcaaaagttaatttattattgaagaaaaatatttttaatttggtgtagcttaagtgtctagtgtttatayagtctacataatgtactgtaagtcctaggccttcacattcactcaccactcactcactgactcacccagagcaacttccagtcctgcaagctccattcat

SEQ ID NO: 11470 - DNA, 201 bp, Homo sapiens
gactccccttgctcagccaggctttactttcatagctagaggcagagatcaaagatttcactatccttttgtctcttaaatccaatgctaagtagcagttmctcttacccatactgctttaagccctctgccaagggggacatgtggggtaagttatttttttttaagtccgatgtatctgggttccacatcggtaaggct

SEQ ID NO: 11471 - DNA, 201 bp, Homo sapiens
agagaggaaaggaatgaaccatgcctgttgtgtatcttctgctgagacatgtttcaatatttctttggtattagtctgaagacactgcgggtgtgtttcaycaaacagttacaggaaatatcctagcacttgccaaaatcagaatgactccccttgctcagccaggctttactttcatagctagaggcagagatcaaagat

SEQ ID NO: 11472 - DNA, 201 bp, Homo sapiens
tttaactcaacctggataagacctggagggataagggaagttacatgaaggaaataactttagaggggagtcctggggaataaataggatagttaagccargagaaagtggaagagatatgttattagcaaagagacaaaggtatgaagacatagagattagaaagaacctgacacagatgaaaaatgccagcgatttaac

SEQ ID NO: 11473 - DNA, 201 bp, Homo sapiens
gctgccattgccacatgacttagcatcacaagcagacaagaaattgaaggaggtaagataacattgtcacccaagcaagagaggaaaggaatgaaccatgyctgttgtgtatcttctgctgagacatgtttcaatatttctttggtattagtctgaagacactgcgggtgtgtttcatcaaacagttacaggaaatatcct

SEQ ID NO: 11474 - DNA, 201 bp, Homo sapiens
aggaaggaaatatttttgtacagctgtacaacaagtttgtgttttaagctaagtcacaataaagtccaaaattttaaaaatttaaaagtttaggccaggtrtggtggctcacacctgtaatcccagcacttcgaaagaccaagccggaggattgctttagcccggagttcaagatcagcctgggcaacatagtgagacccc

SEQ ID NO: 11475 - DNA, 201 bp, Homo sapiens
tttgtcatcttttacctacagcgtcatatggccaataacagtgttgtcacatgagaaatactctacaaatcattggtaaataaagtcactcaatggtcatktattgaacatccactatgactaaggctctgtcataaaaatgaaatatacccttgtatataggacacagaagctgccctccagggcttcacagtctaaggg

SEQ ID NO: 11476 - DNA, 201 bp, Homo sapiens
agtccaaaattttaaaaatttaaaagtttaggccaggtatggtggctcacacctgtaatcccagcacttcgaaagaccaagccggaggattgctttagccyggagttcaagatcagcctgggcaacatagtgagacccccatctctacaaaaataaataagaaaattagctggacatggtggcatgcacctgtagtcccag

SEQ ID NO: 11477 - DNA, 201 bp, Homo sapiens
tataccatatttttactgtaccttctccatgttcagatatgtttagatagacaaatgcttaccattgcgctaaataattgcttaccattgtgctacaattrcctataatattcagtacagtaacgtgcaatacaggtttgtagcctgggagcaagaggctataccatgtaaccttggtgtgtagtgggctgtgccatctag

SEQ ID NO: 11478 - DNA, 201 bp, Homo sapiens
aacccactataccccatgcctgtgaccctgacttgacttttgacgctatcacaactttccgcagagaagtaatgttctttaaaggcaggtaaactcatttmtctaaacacctcaacttcctatgaagatttttcttttcaagagatttgaggataaagaggtagtcatggggctagtgaaaatgtgtgccttttatcttca

SEQ ID NO: 11479 - DNA, 201 bp, Homo sapiens
ttgaggataaagaggtagtcatggggctagtgaaaatgtgtgccttttatcttcattttataactgcctatactgtttgaatgctttaccatatgtgtgtmtcttgtagttgtttgataaatttttaaatgtctttaaggaattttaaaaattgccattgcataagaaagggaaatagagtccactttcagtgactttttg

SEQ ID NO: 11480 - DNA, 201 bp, Homo sapiens
tgaaaaatgccagcgatttaacatagttagcttgcagaatatgaaaataaaatataaggctgaaaataggcagggactagaccatggaaggtcatgtgaakgtgtttggactttatcctatagcaatacagaacctctgaagaatagaagtaggagcaacatgatcacatatactgtagtctagcaacaaccccaaactgg

SEQ ID NO: 11481 - DNA, 201 bp, Homo sapiens
agaagacaaagtagggtgaagagggtgaataggagtgttctgaacagaatagctcaatccaacataaggaatagaattgtagaagacaaggctaaaatggygaataggattcagattacagagggtcttgaaagccagaataaagatctggacttcatttagaaaatctgagcttgaattatttttcccaacagtcatttt

SEQ ID NO: 11482 - DNA, 201 bp, Homo sapiens
tttttatagcaaaataccaagacatacaccattgacaaagatataggggcaaaaggaaagaatatttgaaattggactcctttcacccatgaatatatcgygttacaatcacatgttatcaccaccattctctgaccagcagaggccaagagctacccaccatgaatgtcacagaggagtggcctgtatgtggagggaaat

SEQ ID NO: 11483 - DNA, 201 bp, Homo sapiens
ttgagcaaggcaagagataaatacagtcctcaaccaagttctgggtgggcaaccaggcagcagttccaaaaaggattgtcttctgaccactttatttcagyccctcagagtagaaattgtgggccctctgtgatccaattgtataactcttagttcactgacattaaaggggaaaataccttcctcttctccaatggaaac

SEQ ID NO: 11484 - DNA, 201 bp, Homo sapiens
accttaatccttatatttgacttatttcttcaaaccaagtaagtttattttatttttctcaatgggtctgcctggcattcaaggtgttttactactgttcygacaaaaatatcaaactgtactatattaacaggtagcaatgtaggcctcaaagaaaagagcaagctcaatagatttttgggtcccccattcttttgttct

SEQ ID NO: 11485 - DNA, 201 bp, Homo sapiens
aaaatgattctcagttctttttaagaatgtctttataatactttcatatacaagccaacacgtacatgagataaatgctgtcttgggatgtgatcttagtraagtcatttaacctctttcagcctcctttgttgaagtgttaatactactgattcatagggaagataaaggaatttaattctatagtatatgtaagagtat

SEQ ID NO: 11486 - DNA, 201 bp, Homo sapiens
gaggcagaggttgcagtgagccgaggtcgcgccactgcactccagcctgggggacagagcgagactctgtctcaaaaaaaaaaaagttcttaatatatggyacatgcacaagactgatttctacaagccattcaaaaaaatgattctcagttctttttaagaatgtctttataatactttcatatacaagccaacacgtac

SEQ ID NO: 11487 - DNA, 201 bp, Homo sapiens
caagaaaaacctacttctttgtgggcatttggtgctggaggtaagtttacagacaattgacactttgttttattatggagaaaaatattcacaatagcatmactttgacacagacaaaattaaaatgaatccataatattttttatttttttattttttttgagatggagtcttgctctgtctcccaggctagagtgtagt

SEQ ID NO: 11488 - DNA, 201 bp, Homo sapiens
gctagagtgtagtgctgcaatctctgctcactgcagcctcgacctcctgctttcaagagatcctcctgtctcagcaacccccaagtaactgatactacagkcatgtgccaccacgcctggctaatttttgtactttttgtagagatggagtttcaccatgattctcagtctggtctcgaactcctgggctcaagcgatcca

SEQ ID NO: 11489 - DNA, 201 bp, Homo sapiens
aaagtgaataatgaaggcagtggatgacatttatcaagccgaaagagatctcaatgagtctaatgactttccttcaatttaaaaaaaaagataagataaartaaaaagttggtgatcccaaccaaattgccaatgacacaaacatatctagtgaaaaattttgaaagctccaagctcagccttcaatctgatgtaacgatt

SEQ ID NO: 11490 - DNA, 201 bp, Homo sapiens
tgcggtagacaaattaagctccccaaaccaaagatccgctggtatcctttcatattcttgtatgcaggtttgatgaaatgacccaaaccatggacaaaggrttcccgcagagagtggtaaaacactttcctggaatcagtatccgtgttgatgctgctttccagtacaaaggtaagcatggatgtctcacttattgggata

SEQ ID NO: 11491 - DNA, 201 bp, Homo sapiens
gcgaagtgactaagcacatgaacaaaacaatgattctcaaactttaatgtatgtaccttaatgtacatagcttggggtttgtgtgtgaaacaaagtatttkaggcagaattgtgagtgatacctaagaatctgcagttttaaaagaacctcaggcaatgtaatgaatacaatccagcaactatatcatccaagacaatgac

SEQ ID NO: 11492 - DNA, 201 bp, Homo sapiens
tcttctgaccactttatttcagtccctcagagtagaaattgtgggccctctgtgatccaattgtataactcttagttcactgacattaaaggggaaaataycttcctcttctccaatggaaacataaaatatcaagcaaacgtaatctccaacaaaattgcaatttttaaaaaataggcaattcagcaataacctatatga

SEQ ID NO: 11493 - DNA, 201 bp, Homo sapiens
aaatatccacttaggtaagacccttgtgtaggcatatttcttcatgccctcttaattcattgtggtattttttttctcatcaaaggaggtctgcctaaggwacctgctaagccaaaggaacccactataccccatgcctgtgaccctgacttgacttttgacgctatcacaactttccgcagagaagtaatgttctttaaa

SEQ ID NO: 11494 - DNA, 201 bp, Homo sapiens
cactctacagcctttctgatagttcttctttcatcttactgagtgctaggacttgagataaaaatgaatttagcaagataggcaacataaacgagaaaaawcttttcctgagcaattcttgtggttctcatgtaagattcttaatatatggactgggtgtggtggctcatgcctgtaatcccagcactttgggaggctgag

SEQ ID NO: 11495 - DNA, 201 bp, Homo sapiens
taggacactataaatttcagataaacaacaaataattttttggtatatatatatatcccttaaaatattttgtatttatttataccaaaagttagtcattstttacttgaaatcaaatttaactgacattttctgtttaatgatcatgatcttatcagattactagcctttgagagcacttgggggctgaaacttaggaga

SEQ ID NO: 11496 - DNA, 201 bp, Homo sapiens
gaaattgaaagagcagggtgactcgttattttcctctttgtgtccttcctttcttctttcctccttcactcctcactttctctcattacttcttttttttyccctttcctattgccagaaggaattttaggcaattttgctttatcctgagatggagatttgctctcctgtagtctgtgcctcttttttttttttcttatc

SEQ ID NO: 11497 - DNA, 201 bp, Homo sapiens
gcaatagttaccttgggtctggtgtctagcttccagagtcacaggaaagcacaggttgtagtggtcctgatggatagtatacaaggacacagatcattccygaccatgtatctccagataatcggtctagatcagctttgcactttctgtgaaactaaaagtctgtcacacaaaatggtccatggccactcactgctcagt

SEQ ID NO: 11498 - DNA, 201 bp, Homo sapiens
aaggatggagcaggtgagtctaattttctttatgaacaaaatcttattattctaaagaatccctgaaaagaatagctttgtaactagctgctttttaactvtaaagttcccaatgtccccacaattttccatattccaagatgaccttgatggaagtgttcaatacaccctcataaagtggctacttctactatgatcaga

SEQ ID NO: 11499 - DNA, 201 bp, Homo sapiens
aaattagctgggcctggtggcacgcgcctgtagtcccagctactcaggaggctgaggcatgagaatcacttgaacctgggaggcagaggttgcagtgagcygaggtcgcgccactgcactccagcctgggggacagagcgagactctgtctcaaaaaaaaaaaagttcttaatatatggtacatgcacaagactgatttct

SEQ ID NO: 11500 - DNA, 201 bp, Homo sapiens
acactttcctggaatcagtatccgtgttgatgctgctttccagtacaaaggtaagcatggatgtctcacttattgggatacttgagagactgtgttgactrtgaaaaaagacagcacaaaaacttaaatgcttttattttaatgcaattttgctactcttaagtatatacaataataaacattaaccccacaaacattatc

SEQ ID NO: 11501 - DNA, 201 bp, Homo sapiens
gtaactagctgctttttaactgtaaagttcccaatgtccccacaattttccatattccaagatgaccttgatggaagtgttcaatacaccctcataaagtkgctacttctactatgatcagagcagtcttcattatttatacattcattcatacacccataatgtctgaggggccactgtgtgcccggaactatacaaggt

SEQ ID NO: 11502 - DNA, 201 bp, Homo sapiens
aaagtatggaagtattatatagttatgaaagataactaatcctgattccctgtctctaggattcttctttttcagccgtggatcaaagcaatttgaatacracattaagacaaagaatattacccgaatcatgagaactaatacttggtttcaatgcaaagaaccaaagaactcctcatttggttttgatatcaacaagga

SEQ ID NO: 11503 - DNA, 201 bp, Homo sapiens
aaaaaaaagcaaatcatgacacactttatggcaagtgtccctttctgttattaattaaatgatgatacaagccaattcatgccacgtctcactattatttkctaaattctgtgctaacagaaccggcttcagctgaagaaagagaggaatgaagcgccttctgcttctgtttttgttctttataacattttcttctgcatt

SEQ ID NO: 11504 - DNA, 201 bp, Homo sapiens
agaaccggcttcagctgaagaaagagaggaatgaagcgccttctgcttctgtttttgttctttataacattttcttctgcatttcccttagtccggatgayggaaaatgaagaaaatgtgcaactggctcaggtactgtcttaataaatgatatcgatgactattgataaaaagcttattttattgattctcttgggacct

SEQ ID NO: 11505 - DNA, 201 bp, Homo sapiens
gcttatttccgcctaatccaaaggaacataaagataatttccaaggaacagaataatattcattcaattgactgagcacttcctgtgtgcacagcacatcwtaggctccatttacggtatcttcccaacaaacctgtgctgtaggctctgctgctaccaccatcttaaatacagagaaactgaaacaaaagtttatttacc

SEQ ID NO: 11506 - DNA, 201 bp, Homo sapiens
ttcaattgactgagcacttcctgtgtgcacagcacatcttaggctccatttacggtatcttcccaacaaacctgtgctgtaggctctgctgctaccaccaycttaaatacagagaaactgaaacaaaagtttatttaccgtggctgaggttacacagctcttactggctccagcagacatgctctcatctctagcctctgc

SEQ ID NO: 11507 - DNA, 201 bp, Homo sapiens
cttcttcctcccccttctcctcttcttcttcctcctccttctcctcttcttcttcttcttcttcttcttcctcttcttcttcttcctcctcctcctcctcytcttcttcttcctcttcctcttcctcttcctcttcttcctcttcctcttattcttcttcgtcgtcttcgtcttctttttattttcaaagtgaaagcaagt

SEQ ID NO: 11508 - DNA, 201 bp, Homo sapiens
tgagtgtgtgggaggggaggctgggctcctccttgtactctctgaggtgctctggaaggaggggcagctccaccctgggagggactgtggcccaggtactrcccgggtgctactttatgggcagcagctcagttgagttagagtctggaagacctcagaagacctcctgtcctatgaggccctccccatggctttaggtaa

SEQ ID NO: 11509 - DNA, 201 bp, Homo sapiens
aggaggggcagctccaccctgggagggactgtggcccaggtactgcccgggtgctactttatgggcagcagctcagttgagttagagtctggaagacctcrgaagacctcctgtcctatgaggccctccccatggctttaggtaagctccttccactctcattttttcacctgagaaatgagagaggaaaatgtctacaat

SEQ ID NO: 11510 - DNA, 201 bp, Homo sapiens
tcctgtgtcaagtctggtgatgagaccagactccagctggaggtaaaaacatgctttggatctcaaatcaccccaaaacccagtggcttgaaacaaccaawattttttcttatgattctgtgggttgaccaggattagctgggtagttctgttccatgtggtggaacatgctggggtcactttggaagctgcattcagcag

SEQ ID NO: 11511 - DNA, 201 bp, Homo sapiens; identical to SEQ ID NO: 1664

SEQ ID NO: 11512 - DNA, 201 bp, Homo sapiens
tgggagggactgtggcccaggtactgcccgggtgctactttatgggcagcagctcagttgagttagagtctggaagacctcagaagacctcctgtcctatsaggccctccccatggctttaggtaagctccttccactctcattttttcacctgagaaatgagagaggaaaatgtctacaattggtgtttatcaaatgctt

SEQ ID NO: 11513 - DNA, 201 bp, Homo sapiens
gggaaagtgagggaaatatggacatcacatggaacaacatccaggagactcaggcctctaggagtaactgggtagtgtgcttggtttaatcttctatttasctgcagaccaggaagatgagacctctctgcccttctgacctcgggattttagttttgtggggaccaggggagatagaaaaatacccggggtctcttcatt

SEQ ID NO: 11514 - DNA, 201 bp, Homo sapiens
gagggaaatatggacatcacatggaacaacatccaggagactcaggcctctaggagtaactgggtagtgtgcatcctggggaaagtgagggaaatatggamatcacatggaacaacatccaggagactcaggcctctaggagtaactgggtagtgtgcatcctggggaaagtgagggaaatatggacatcacatggaacaa

SEQ ID NO: 11515 - DNA, 201 bp, Homo sapiens
cttcacccactctgttcctcagctttcccttcagtgggatgatatcaactggacaacaggatgtgcgattcttttagttccagccttccaggatgttttcrctcccctgtttgttgttgtaggatggtattacctccaccttcccaccttccctatgccctggttctgtctcctgtgcctcgctctgaaagtggatgagac

SEQ ID NO: 11516 - DNA, 201 bp, Homo sapiens
ttgttcaaaccctaactcaatcccaaattaatccaccatgtataaggttgagctatgtctcttattcctggacaccatactcagccatattctggtccacrcattaaacaagctggatgaccttgaagaagcttcacccactctgttcctcagctttcccttcagtgggatgatatcaactggacaacaggatgtgcgatt

SEQ ID NO: 11517 - DNA, 201 bp, Homo sapiens
gatttacagtcatcagaattgtaaaactgatcccatgtattttcaaacctcaaatcccttgctctgaccttgtgtgtctaagctagaaggaagcaggatgsacctctcccctggctggaatgaagggattcacccaagctctcagtcttctcacggcatccagggcccccctgcttgtgtgtggtctagatttccattccc

SEQ ID NO: 11518 - DNA, 201 bp, Homo sapiens
ccttggtttccccgtctgtgacatctgtgacatgagagtcacgataactccttgtgtgccttacagggttgttgtgaaaattaaatgcacagataatagcrtaacagtattccgtgcattgtaaagagcctgaaaaccattatgatttgaaaatggaatcggctttgtgagaccatcactattgtaaagatgtgatgctga

SEQ ID NO: 11519 - DNA, 201 bp, Homo sapiens
taaacttttaccagcacaacactgccctgccttcagagtcaatgaccctatccaagtttaatccatctgtccactgtctccaacacgatctttataaaacwcacctgacaacattacccttttattcagttttttaaaagataagtttccagctcatcggggtggctttaaaggccatttctcctctggacctcacccaac

SEQ ID NO: 11520 - DNA, 201 bp, Homo sapiens
aacttttaccagcacaacactgccctgccttcagagtcaatgaccctatccaagtttaatccatctgtccactgtctccaacacgatctttataaaacacwcctgacaacattacccttttattcagttttttaaaagataagtttccagctcatcggggtggctttaaaggccatttctcctctggacctcacccaactt

SEQ ID NO: 11521 - DNA, 201 bp, Homo sapiens
gcatgccctctgcagtgtgacattccagcagtgaaatcatgttggggtgacttctcccccactctgacctttatgtttgtctgggccgaggctgcaagtcrggctctgtgggtgtatgagtgacaagtctctcccttccagatatggggactgtctgcttccctaggttgcctctccctgctctgatcagctagaagctcc

SEQ ID NO: 11522 - DNA, 201 bp, Homo sapiens
gtctttgtattcaagtttgaagctgggagggcctggctactgaagggcacatatgagggcagcctgaagagggtgtggagaggtagagtctaggtcagagktcagtgcctataggcacagtggtcccagggccacagctgggaagggcaaataccagaaggcaaggttgaccattcccttcctcaagtgcctattaaggct

SEQ ID NO: 11523 - DNA, 201 bp, Homo sapiens
ccaaggctgtaaggaactgcctgagcccagagaggtggagcccagcactggtgccctttactcctggggacatgtgctggtttcaaaaacttcagctgagyttttgagcattcatggaacttggtgggggagatgaaatttgtaccttaaatcctgcctacagggagggtccctgataatccccacccaatttggaaatct

SEQ ID NO: 11524 - DNA, 201 bp, Homo sapiens
tcgagcatgtgggctcttcagagccacctgatgaggtgggtacagttagccacacttcacaggtgaggaggtgaggcacaggtcccaggtcaggctggccrgagctctgtttattacgtctcacagctttgagtcctgctctcaaccagagaggccctttaccaagaagaaaggattgggacccagaatcaggtcactggc

SEQ ID NO: 11525 - DNA, 201 bp, Homo sapiens
tctgcagcagcatggcctgcctgcacaaaccctaggtgcaatgtcctaatccttgttgggtctttgtattcaagtttgaagctgggagggcctggctactraagggcacatatgagggcagcctgaagagggtgtggagaggtagagtctaggtcagaggtcagtgcctataggcacagtggtcccagggccacagctggg

SEQ ID NO: 11526 - DNA, 201 bp, Homo sapiens
atgtgagtggccatactgtggcactgtcccatccctcaccagggacactgttctggagggtgactgcctgttctgtgaggagtggggatggctaggacatkgcatggaacacaccaccaccccatcttctcagagctcaaaccctgacagaacaccagctccacaggccttggcttctgctgatggtgccgtgtatttacc

SEQ ID NO: 11527 - DNA, 201 bp, Homo sapiens
tgcaagatgacctgtgtatcagggagaaataggcaataaattgagatccagcagggatttgaatcatggatttgaatcaggggcagccttcgaaagaactrtggagaatatactcagatttaaaacataagattggaatttttggcagagaactaacaactgtacaaaaaaggaaccaaatggaaatcctagaactgaaag

SEQ ID NO: 11528 - DNA, 201 bp, Homo sapiens
ctcacagctttgagtcctgctctcaaccagagaggccctttaccaagaagaaaggattgggacccagaatcaggtcactggctgaggtagagaggaagccrggttgttcccaagggtagctgctcctgcaggactctgagcaggtcaccagctaatggaggaaaggctctagggaaagacccttctggtctcagactcaga

SEQ ID NO: 11529 - DNA, 201 bp, Homo sapiens
agggaggttccaggagccccgagcgtcttttctccaggagaatactctctgaattcagactggggtcagagaaacatttacccaggagccgcagtgtgggyggggctttttacttgaaacgctgtctgaaggcagtggccaggatggaactctccaccctaccttggcaagccacttctcttctgcaatctgtaaggacat

SEQ ID NO: 11530 - DNA, 201 bp, Homo sapiens
agagactcaggaacccagtgagtaatagatgcatgccaaggagtgggactgcgattcaggcctagttgaatgtgctgacagagaagcagagaggggcaccrggggcacagcccgaaggcccagactgatatgggcaaggcctgtctgtgctgacatgtcggagggtcccactctccagggaccttggtttccccgtctgtg

SEQ ID NO: 11531 - DNA, 201 bp, Homo sapiens
ggcggctgacttccaaaagggattattccaaaaagagcctcaacatgcaggcgcttattatgacttctgcttgcatcatcctattggccaaagccagtcaygtggctaagtctagccccctgtgagaggagactgcataagagtgtgaacaccaggagacacggtcactgggggccaccactgtaaccatctaccacagga

SEQ ID NO: 11532 - DNA, 201 bp, Homo sapiens
taataagacttttgaaaagtagattatgggctgggcacagtggctcacacctgtaatcccagcactttgggaggccaagatgggtggatcacctgaggtcrggagttcgagaccagcctgactaacatagtgaaaccctgtctctactaaaaatacaaaattagttgggggtggtggcacaagcctgtaatcccagctact

SEQ ID NO: 11533 - DNA, 201 bp, Homo sapiens
tttacgaagtttccaggtttacaaatctagtttctgattctttagtcagcaggaatttctctacaaaagctgcttcgaaaatttccagccaaaccttacayaccttggcattacatcttggtgagccaaggcggaagagaacaggaagtgaaggccccatgggaagtccctgcggtcgggagcacccaggcggggcggggg

SEQ ID NO: 11534 - DNA, 201 bp, Homo sapiens
caggttggtcttgaactcctgacctcaggtgatccgcccacctcagcctccccaagtgctgggattacaggtgtgagccaccgtgcccagcccagccatcrtttttgaaacacgtttgagaaatagtgtcttcctttgagggccaaggagacattttttttgtttatttgtttgtttttgtgaggactagctgaagggggt

SEQ ID NO: 11535 - DNA, 201 bp, Homo sapiens
ctcaggtgatccgcccacctcagcctccccaagtgctgggattacaggtgtgagccaccgtgcccagcccagccatcatttttgaaacacgtttgagaaayagtgtcttcctttgagggccaaggagacattttttttgtttatttgtttgtttttgtgaggactagctgaagggggtgatgtatattaacctgcctactt

SEQ ID NO: 11536 - DNA, 201 bp, Homo sapiens
tctcttcaactttttcctacccataaaataggagcatgcttacctttttcctaatgttccaggccccgggtctagaatattgtaagtaaggaagttaatgygtatcagagcccattatgggccagaagttctcctcttccttcctacacctgcttcctccctccctccctccctctttcccttccttccttccatccattt

SEQ ID NO: 11537 - DNA, 201 bp, Homo sapiens; identical to SEQ ID NO: 1669

SEQ ID NO: 11538 - DNA, 201 bp, Homo sapiens
gaggaggtctagaggaagctggacaactcttagcttgtagtaagcacagtggaagtgtcagctcttaatgggtcatggacacgttacaagctaggcgccgygctgagcactttacatggtttatcccactgaaccctctcaataaccctatgaggaagggctattattgctcacattttcagaagaggaaatggatataga

SEQ ID NO: 11539 - DNA, 201 bp, Homo sapiens
aactttttcctacccataaaataggagcatgcttacctttttcctaatgttccaggccccgggtctagaatattgtaagtaaggaagttaatgtgtatcasagcccattatgggccagaagttctcctcttccttcctacacctgcttcctccctccctccctccctctttcccttccttccttccatccatttgtgaaga

SEQ ID NO: 11540 - DNA, 201 bp, Homo sapiens
ataacatgagagcaaatctctctgcaaaaaagatatggggcagcactgtccacaacagcctctactggaaacaacccaagcacccatcacagaatgaattmgtacatcatgtatctgcacacaacacagtgctccttggcaaagaaaatgaatgaattacagccagctgcacctcacaagacagataatcttacaaacatc

SEQ ID NO: 11541 - DNA, 201 bp, Homo sapiens; identical to SEQ ID NO: 1671

SEQ ID NO: 11542 - DNA, 201 bp, Homo sapiens
gaagacatgatcaccctcattctgagagtgaagagacagaggctcaactaatgaaatgatttgttcaaggtcacacgggtggcacaaggcaagtggcagargttgaatttagacccattcctgtccaaatgctgagtttatgtcatcgtcccgagaccataactttaaagatgtaagatagtgggaaaagagttgatttca

SEQ ID NO: 11543 - DNA, 201 bp, Homo sapiens
gaaggtgagtggttgccaggaaagccaatgtatgtgggcatcacgtcactttgcccgtctgtctgcagcagcatggcctgcctgcacaaaccctaggtgcmatgtcctaatccttgttgggtctttgtattcaagtttgaagctgggagggcctggctactgaagggcacatatgagggcagcctgaagagggtgtggaga

SEQ ID NO: 11544 - DNA, 201 bp, Homo sapiens
ttacagggttgttgtgaaaattaaatgcacagataatagcgtaacagtattccgtgcattgtaaagagcctgaaaaccattatgatttgaaaatggaatcrgctttgtgagaccatcactattgtaaagatgtgatgctgatagaaatgacaggactgcttgtgcatgccctctgcagtgtgacattccagcagtgaaatc

SEQ ID NO: 11545 - DNA, 201 bp, Homo sapiens
ctcaatgagaaatactaatagaatgtggcactgagccacaaggtctgagggttgattgataaggaagggtggggactgtggagaattaagggcttggcacwggtcagttccaccagttgtcacaagagaatgcaggctcaggtggccagaacttctcgcttttccagaagagtccgatattctgatttcattatatatagt

SEQ ID NO: 11546 - DNA, 201 bp, Homo sapiens
accaactagttgctggatacttgcaaggaccaaatgtcaatttagaaggtgagtggttgccaggaaagccaatgtatgtgggcatcacgtcactttgcccstctgtctgcagcagcatggcctgcctgcacaaaccctaggtgcaatgtcctaatccttgttgggtctttgtattcaagtttgaagctgggagggcctggc

SEQ ID NO: 11547 - DNA, 201 bp, Homo sapiens
tactaatagaatgtggcactgagccacaaggtctgagggttgattgataaggaagggtggggactgtggagaattaagggcttggcacaggtcagttccascagttgtcacaagagaatgcaggctcaggtggccagaacttctcgcttttccagaagagtccgatattctgatttcattatatatagtattctgattaaa

SEQ ID NO: 11548 - DNA, 201 bp, Homo sapiens; identical to SEQ ID NO: 1668

SEQ ID NO: 11549 - DNA, 201 bp, Homo sapiens
agaccttctatctgaggaacaaccaactagttgctggatacttgcaaggaccaaatgtcaatttagaaggtgagtggttgccaggaaagccaatgtatgtrggcatcacgtcactttgcccgtctgtctgcagcagcatggcctgcctgcacaaaccctaggtgcaatgtcctaatccttgttgggtctttgtattcaagt

SEQ ID NO: 11550 - DNA, 201 bp, Homo sapiens
gaatcagttacaacactccattgcgacacttagtggggttgaaagtgacaacagcaagggtttctctttttggaaatgcgaggagggtatttccgcttctygcagtggggcagggtggcagacgcctagcttgggtgagtgactatttctttataaaccacaactctgggcccgcaatggcagtccactgccttgctgcag

SEQ ID NO: 11551 - DNA, 201 bp, Homo sapiens
tgttaaccagaagaccttctatctgaggaacaaccaactagttgctggatacttgcaaggaccaaatgtcaatttagaaggtgagtggttgccaggaaagycaatgtatgtgggcatcacgtcactttgcccgtctgtctgcagcagcatggcctgcctgcacaaaccctaggtgcaatgtcctaatccttgttgggtctt

SEQ ID NO: 11552 - DNA, 201 bp, Homo sapiens
atggcagtccactgccttgctgcagtcacagaatggaaatctgcagaggcctccgcagtcacctaatcactctcctcctcttcctgttccattcagagacratctgccgaccctctgggagaaaatccagcaagatgcaagccttcaggtaaggctaccccaaggaggagaaggtgagggtggatcagctggagactggaa

SEQ ID NO: 11553 - DNA, 201 bp, Homo sapiens
gcaagatgcaagccttcaggtaaggctaccccaaggaggagaaggtgagggtggatcagctggagactggaaacatatcacagctgccaggggctgccagsccccagagggcctgagaactgggtttgggctggagaggatgtccattattcaagaaagaggctgttacatgcatgggcttcaggacttgtgtttcaaaat

SEQ ID NO: 11554 - DNA, 201 bp, Homo sapiens
ctgcctgttctgtgaggagtggggatggctaggacattgcatggaacacaccaccaccccatcttctcagagctcaaaccctgacagaacaccagctccaraggccttggcttctgctgatggtgccgtgtatttaccagacttagtggtccaaggccagagtggccagatttcccaaagtcaaggtgtgacagtgggaca

SEQ ID NO: 11555 - DNA, 201 bp, Homo sapiens
agcagctcagttgagttagagtctggaagacctcagaagacctcctgtcctatgaggccctccccatggctttaggtaagctccttccactctcatttttycacctgagaaatgagagaggaaaatgtctacaattggtgtttatcaaatgctttcaggctctggtgagcaagcgtccaggaaaatgtcaagcgcatggag

SEQ ID NO: 11556 - DNA, 201 bp, Homo sapiens
tcctggggaaagtgagggaaatatggacatcacatggaacaacatccaggagactcaggcctctaggagtaactgggtagtgtgcttggtttaatcttctrtttacctgcagaccaggaagatgagacctctctgcccttctgacctcgggattttagttttgtggggaccaggggagatagaaaaatacccggggtctct

SEQ ID NO: 11557 - DNA, 201 bp, Homo sapiens
tattgtatacttaaaattgctaagagggtatatcttatatgttcttaccaataataataataatggtaataattaaggggcaggaggacacttcaaaaggtgatggatatgtttatggccttgatggtggtgatggtttcatgagagtatacttatccccaaactaattgagatgtaaatattaaatatgtacagcttttt

SEQ ID NO: 11558 - DNA, 201 bp, Homo sapiens
ctctcacctgcccatcttttgatttccaggcagttaacatcactgacctgagcgagaacagaaagcaggacaagcgcttcgccttcatccgctcagacagyggccccaccaccagttttgagtctgccgcctgccccggttggttcctctgcacagcgatggaagctgaccagcccgtcagcctcaccaatatgcctgacg

SEQ ID NO: 11559 - DNA, 201 bp, Homo sapiens
ggcacatggtggctgtgcactacagctgagtccttttccttttcagaatctgggatgttaaccagaagaccttctatctgaggaacaaccaactagttgcyggatacttgcaaggaccaaatgtcaatttagaaggtgagtggttgccaggaaagccaatgtatgtgggcatcacgtcactttgcccgtctgtctgcagca

SEQ ID NO: 11560 - DNA, 201 bp, Homo sapiens
tggctatttaaatttatacttaaatgaatgaaaatagaagaaaatttaaaatccagacccttggtcacactatccacatttaaagaggtcaatagccacaygtggttagtggccaccctattgggcagtgcagctacagaacatttttgcatcccagaaagttcttttggatgttgctgctctacagcatgctttgctgaa

SEQ ID NO: 11561 - DNA, 201 bp, Homo sapiens
gctaggacattgcatggaacacaccaccaccccatcttctcagagctcaaaccctgacagaacaccagctccacaggccttggcttctgctgatggtgccrtgtatttaccagacttagtggtccaaggccagagtggccagatttcccaaagtcaaggtgtgacagtgggacagcctctttgtgtctttgctgtcctaag

SEQ ID NO: 11562 - DNA, 201 bp, Homo sapiens
tgcaaagcactttggtttgcctggccacccctcgtcgagcatgtgggctcttcagagccacctgatgaggtgggtacagttagccacacttcacaggtgargaggtgaggcacaggtcccaggtcaggctggccggagctctgtttattacgtctcacagctttgagtcctgctctcaaccagagaggccctttaccaaga

SEQ ID NO: 11563 - DNA, 201 bp, Homo sapiens
gttaagaggaggtctagaggaagctggacaactcttagcttgtagtaagcacagtggaagtgtcagctcttaatgggtcatggacacgttacaagctaggmgccgtgctgagcactttacatggtttatcccactgaaccctctcaataaccctatgaggaagggctattattgctcacattttcagaagaggaaatggat

SEQ ID NO: 11564 - DNA, 201 bp, Homo sapiens
agaggaggtctagaggaagctggacaactcttagcttgtagtaagcacagtggaagtgtcagctcttaatgggtcatggacacgttacaagctaggcgccktgctgagcactttacatggtttatcccactgaaccctctcaataaccctatgaggaagggctattattgctcacattttcagaagaggaaatggatatag

SEQ ID NO: 11565 - DNA, 201 bp, Homo sapiens
ttcttcttcctcccccttctcctcttcttcttcctcctccttctcctcttcttcttcttcttcttcttcttcctcttcttcttcttcctcctcctcctcctcctcttcttcttcctcttcctcttcctcttcctcttcttcctcttcctcttattcttcttcgtcgtcttcgtcttctttttattttcaaagtgaaagcaa

SEQ ID NO: 11566 - DNA, 201 bp, Homo sapiens
tcttcttcctcccccttctcctcttcttcttcctcctccttctcctcttcttcttcttcttcttcttcttcctcttcttcttcttcctcctcctcctcctcctcttcttcttcctcttcctcttcctcttcctcttcttcctcttcctcttattcttcttcgtcgtcttcgtcttctttttattttcaaagtgaaagcaag

SEQ ID NO: 11567 - DNA, 201 bp, Homo sapiens
ttctgattctttagtcagcaggaatttctctacaaaagctgcttcgaaaatttccagccaaaccttacacaccttggcattacatcttggtgagccaaggyggaagagaacaggaagtgaaggccccatgggaagtccctgcggtcgggagcacccaggcggggcggggggtggggggctttcctgtggccggctccctgc

SEQ ID NO: 11568 - DNA, 201 bp, Homo sapiens
ttcttcttcttcctcttcttcttcttcctcctcctcctcctcctcttcttcttcctcttcctcttcctcttcctcttcttcctcttcctcttattcttctrcgtcgtcttcgtcttctttttattttcaaagtgaaagcaagtttattaagaaagtaaaggaataaaagaatggccactccatagacagagtagcctgaac

SEQ ID NO: 11569 - DNA, 201 bp, Homo sapiens
ttagaaggtgagtggttgccaggaaagccaatgtatgtgggcatcacgtcactttgcccgtctgtctgcagcagcatggcctgcctgcacaaaccctaggkgcaatgtcctaatccttgttgggtctttgtattcaagtttgaagctgggagggcctggctactgaagggcacatatgagggcagcctgaagagggtgtgg

SEQ ID NO: 11570 - DNA, 201 bp, Homo sapiens
cttttgcaaagaaagttgtagtggaacacagctaggcttattgatttatggattgccaacgtccttttgtgaaacagacagctgagctgagtaatcgtggygcacaaaacctaaaatatttactatctcgtcctttacagaatgtttgccaatctatggtccggagtccaaggctgtccatttttcaaagaacacaaagtg

SEQ ID NO: 11571 - DNA, 201 bp, Homo sapiens
gacgaaaccaagagtggacttgtggccagaagcgtgaggaagagggagagagcttcccttgtcccctttcttcctctccctaagccacagtgattgacagccccccccctttggagtcagagcaggcttgagactggactgggaaaggagggtgggtcaggatacagagcaggaaggctgggagtgcagggcaggagcaag

SEQ ID NO: 11572 - DNA, 201 bp, Homo sapiens
ccaagagtggacttgtggccagaagcgtgaggaagagggagagagcttcccttgtcccctttcttcctctccctaagccacagtgattgacagcccccccsctttggagtcagagcaggcttgagactggactgggaaaggagggtgggtcaggatacagagcaggaaggctgggagtgcagggcaggagcaaggggctgg

SEQ ID NO: 11573 - DNA, 201 bp, Homo sapiens
tggcacaggtcagttccaccagttgtcacaagagaatgcaggctcaggtggccagaacttctcgcttttccagaagagtccgatattctgatttcattatrtatagtattctgattaaaccagacaataaagcaagcagataaaatatttaaattataagctgccagtttgcaacctccggttaggatttgtgtggggcaa

SEQ ID NO: 11574 - DNA, 201 bp, Homo sapiens
agttgtcacaagagaatgcaggctcaggtggccagaacttctcgcttttccagaagagtccgatattctgatttcattatatatagtattctgattaaacmagacaataaagcaagcagataaaatatttaaattataagctgccagtttgcaacctccggttaggatttgtgtggggcaaagaaaaaaactctcaggatc

SEQ ID NO: 11575 - DNA, 201 bp, Homo sapiens
tggagccccactcatggccttgttcattttccctgcccctcagcaacactcctattgacctggagcacaggtatcctggggaaagtgagggaaatatggamatcacatggaacaacatccaggagactcaggcctctaggagtaactgggtagtgtgcatcctggggaaagtgagggaaatatggacatcacatggaacaa

SEQ ID NO: 11576 - DNA, 201 bp, Homo sapiens
agaacttctcgcttttccagaagagtccgatattctgatttcattatatatagtattctgattaaaccagacaataaagcaagcagataaaatatttaaaktataagctgccagtttgcaacctccggttaggatttgtgtggggcaaagaaaaaaactctcaggatcattggtatgtagactctaattttaagtttctaa

SEQ ID NO: 11577 - DNA, 201 bp, Homo sapiens
cccctgaggctgggcgtggtggctcacacctgtaatcccagcattttgggaggccaaggtgggtggatctcttgaggtcaagagttcaaggcctgcctggycaacatggtgaaaccctgtctctattaaaaatacaaaaattagctgggcatggtggtgcatgtctgcaatcttagctacttgggtagctaaggcaggaga

SEQ ID NO: 11578 - DNA, 201 bp, Homo sapiens
taagttaaccatgtagatctgagaggagagtagcttcttgtagataacagttggattatataccatgtcctgatccccttcatcatccaggagagcagagrtggtcaccctgatagcagcaagcctgggggctgcagcttggtgggtagaggtactcaggggtacagatgtctccaaacctgtcctgctgccttagggagc

SEQ ID NO: 11579 - DNA, 201 bp, Homo sapiens
tggatctcttgaggtcaagagttcaaggcctgcctggccaacatggtgaaaccctgtctctattaaaaatacaaaaattagctgggcatggtggtgcatgyctgcaatcttagctacttgggtagctaaggcaggagaattgctggaacccgggaggtagaggttgcagtgaatggagatcacaccactgcactccagtct

SEQ ID NO: 11580 - DNA, 201 bp, Homo sapiens
gaggtcaagagttcaaggcctgcctggccaacatggtgaaaccctgtctctattaaaaatacaaaaattagctgggcatggtggtgcatgtctgcaatctyagctacttgggtagctaaggcaggagaattgctggaacccgggaggtagaggttgcagtgaatggagatcacaccactgcactccagtctgggcaataga

SEQ ID NO: 11581 - DNA, 201 bp, Homo sapiens
ccctgtctctattaaaaatacaaaaattagctgggcatggtggtgcatgtctgcaatcttagctacttgggtagctaaggcaggagaattgctggaacccrggaggtagaggttgcagtgaatggagatcacaccactgcactccagtctgggcaatagagagagacgctctctctaaaaaaaaatatgtaaagataaata

SEQ ID NO: 11582 - DNA, 201 bp, Homo sapiens
agacgctctctctaaaaaaaaatatgtaaagataaataaaatgaaataaaataggcctctaatgagcaggccattctcctttctgggtcttactttccttrcactcctttctgggtgttaagaggaggtctagaggaagctggacaactcttagcttgtagtaagcacagtggaagtgtcagctcttaatgggtcatggac

SEQ ID NO: 11583 - DNA, 201 bp, Homo sapiens
aatcttctatttacctgcagaccaggaagatgagacctctctgcccttctgacctcgggattttagttttgtggggaccaggggagatagaaaaatacccrgggtctcttcattattgctgcttcctcttctattaacctgaccctcccctctgttcttccccagaaaagatagatgtggtacccattgagcctcatgctc

SEQ ID NO: 11584 - DNA, 201 bp, Homo sapiens
cctttctgggtcttactttccttgcactcctttctgggtgttaagaggaggtctagaggaagctggacaactcttagcttgtagtaagcacagtggaagtrtcagctcttaatgggtcatggacacgttacaagctaggcgccgtgctgagcactttacatggtttatcccactgaaccctctcaataaccctatgaggaa

SEQ ID NO: 11585 - DNA, 201 bp, Homo sapiens
caggaagatgagacctctctgcccttctgacctcgggattttagttttgtggggaccaggggagatagaaaaatacccggggtctcttcattattgctgcytcctcttctattaacctgaccctcccctctgttcttccccagaaaagatagatgtggtacccattgagcctcatgctctgttcttgggaatccatggagg

SEQ ID NO: 11586 - DNA, 201 bp, Homo sapiens
atagagagattagataatttgcccatggccagacagctagtataagaggaggaggtggattgactgcagacattctgtcttcaaaccactacactatgctrtgggggcacagagacttaatgaaatcatggagaggggaattgctttgtcaaccacaagcagttattccgggggcagcagatcctcccctgtcccccagtg

SEQ ID NO: 11587 - DNA, 201 bp, Homo sapiens
ctctgaggcaggggctgcaagcctagtgcctgctggggcagcaggtgaacagagaggtgtaactgctgtgacagaagtcatggagtccttggagtgtgagrgtcattttccactgttgatagaatagggaaattggtgaaatagccctgttaaatgagagaaagaacagtgtgagctcaatgagaaatactaatagaatgt

SEQ ID NO: 11588 - DNA, 201 bp, Homo sapiens
aaagatatggggcagcactgtccacaacagcctctactggaaacaacccaagcacccatcacagaatgaattagtacatcatgtatctgcacacaacacartgctccttggcaaagaaaatgaatgaattacagccagctgcacctcacaagacagataatcttacaaacatcatgtgggtacaagaatcacaaaagcatg

SEQ ID NO: 11589 - DNA, 201 bp, Homo sapiens
aaacacaagataactgcataagtaatgactttcagtgcagattcatagctaacccataaactgctggggcaaaaatcatcttggaaggctctgaacctcaraaaggattcacagtaagttaaccatgtagatctgagaggagagtagcttcttgtagataacagttggattatataccatgtcctgatccccttcatcatc

SEQ ID NO: 11590 - DNA, 201 bp, Homo sapiens
gttaatgggtttcccagccctgggaaaacatggctttgtctcaggggcttgctggatgcaaccttaacctcaatgtgagtggccatactgtggcactgtcmcatccctcaccagggacactgttctggagggtgactgcctgttctgtgaggagtggggatggctaggacattgcatggaacacaccaccaccccatcttc

SEQ ID NO: 11591 - DNA, 201 bp, Homo sapiens
cagagatttcctgtgggcagaaatcataaggacgccaactgtttgggtgagataagacgaaaccaagagtggacttgtggccagaagcgtgaggaagaggragagagcttcccttgtcccctttcttcctctccctaagccacagtgattgacagccccccccctttggagtcagagcaggcttgagactggactgggaaa

SEQ ID NO: 11592 - DNA, 201 bp, Homo sapiens
gctccacccagagccctgtgctcctttatctcatgtaatgttaatgggtttcccagccctgggaaaacatggctttgtctcaggggcttgctggatgcaascttaacctcaatgtgagtggccatactgtggcactgtcccatccctcaccagggacactgttctggagggtgactgcctgttctgtgaggagtggggatg

SEQ ID NO: 11593 - DNA, 201 bp, Homo sapiens
acaaagtgacatgagactgtcccatgtgcagggagccctatcattttattatgaaaaaacggcctttctgctcaaatctgttttttaaaaagtcaacaaasagactctgggtacctgtcaggaacagtagggagtttggtttccattgtgctcttcttcccaggaactcaatgaaggggaaatagaaatcttaattttggg

SEQ ID NO: 11594 - DNA, 201 bp, Homo sapiens
gagcctcaacatgcaggcgcttattatgacttctgcttgcatcatcctattggccaaagccagtcacgtggctaagtctagccccctgtgagaggagactrcataagagtgtgaacaccaggagacacggtcactgggggccaccactgtaaccatctaccacaggacctgaatctctgtgtgctactcccttgctcaagg

SEQ ID NO: 11595 - DNA, 201 bp, Homo sapiens
ccgcagtcacctaatcactctcctcctcttcctgttccattcagagacgatctgccgaccctctgggagaaaatccagcaagatgcaagccttcaggtaargctaccccaaggaggagaaggtgagggtggatcagctggagactggaaacatatcacagctgccaggggctgccaggccccagagggcctgagaactggg

SEQ ID NO: 11596 - DNA, 201 bp, Homo sapiens
ggattattccaaaaagagcctcaacatgcaggcgcttattatgacttctgcttgcatcatcctattggccaaagccagtcacgtggctaagtctagccccytgtgagaggagactgcataagagtgtgaacaccaggagacacggtcactgggggccaccactgtaaccatctaccacaggacctgaatctctgtgtgcta

SEQ ID NO: 11597 - DNA, 201 bp, Homo sapiens
ctcagtgtttaagagttagttggagcttccttacagcatggcggctgacttccaaaagggattattccaaaaagagcctcaacatgcaggcgcttattatracttctgcttgcatcatcctattggccaaagccagtcacgtggctaagtctagccccctgtgagaggagactgcataagagtgtgaacaccaggagacac

SEQ ID NO: 11598 - DNA, 201 bp, Homo sapiens
caacactccattgcgacacttagtggggttgaaagtgacaacagcaagggtttctctttttggaaatgcgaggagggtatttccgcttctcgcagtggggyagggtggcagacgcctagcttgggtgagtgactatttctttataaaccacaactctgggcccgcaatggcagtccactgccttgctgcagtcacagaatg

SEQ ID NO: 11599 - DNA, 201 bp, Homo sapiens
gcgctgggcatccaaggtggtccctcatcctccaggctctctttccatgtgatctctcagtgtttaagagttagttggagcttccttacagcatggcggckgacttccaaaagggattattccaaaaagagcctcaacatgcaggcgcttattatgacttctgcttgcatcatcctattggccaaagccagtcacgtggct

SEQ ID NO: 11600 - DNA, 201 bp, Homo sapiens
ctgtgggttgaccaggattagctgggtagttctgttccatgtggtggaacatgctggggtcactttggaagctgcattcagcagagtgcctggcttgcgcygggcatccaaggtggtccctcatcctccaggctctctttccatgtgatctctcagtgtttaagagttagttggagcttccttacagcatggcggctgact

SEQ ID NO: 11601 - DNA, 201 bp, Homo sapiens; identical to SEQ ID NO: 1667

SEQ ID NO: 11602 - DNA, 201 bp, Homo sapiens
gcaagtcgggctctgtgggtgtatgagtgacaagtctctcccttccagatatggggactgtctgcttccctaggttgcctctccctgctctgatcagctakaagctccaggagatcctcctggaggccccagcaggtgatgtttatccctccagactgaggctaaatctagaaactaggataatcacaaacaggccaatgc

SEQ ID NO: 11603 - DNA, 201 bp, Homo sapiens
gcctgcacaaaccctaggtgcaatgtcctaatccttgttgggtctttgtattcaagtttgaagctgggagggcctggctactgaagggcacatatgagggyagcctgaagagggtgtggagaggtagagtctaggtcagaggtcagtgcctataggcacagtggtcccagggccacagctgggaagggcaaataccagaag

SEQ ID NO: 11604 - DNA, 201 bp, Homo sapiens
tcttatgattctgtgggttgaccaggattagctgggtagttctgttccatgtggtggaacatgctggggtcactttggaagctgcattcagcagagtgccwggcttgcgctgggcatccaaggtggtccctcatcctccaggctctctttccatgtgatctctcagtgtttaagagttagttggagcttccttacagcatg

SEQ ID NO: 11605 - DNA, 201 bp, Homo sapiens
aaattgctaagagggtatatcttatatgttcttaccaataataataataatggtaataattaaggggcaggaggacacttcaaaaggtgatggatatgttwatggccttgatggtggtgatggtttcatgagagtatacttatccccaaactaattgagatgtaaatattaaatatgtacagctttttgtatgtcaatcgt

SEQ ID NO: 11606 - DNA, 201 bp, Homo sapiens
ggtgtgacagtgggacagcctctttgtgtctttgctgtcctaagaaacctgggccaggccaggcgcagtggctcacgcctgtaatcccagcactttgagargccaaggtgggcagatcacgaggtcaggagtttgagaccagcctggccaacatggtgaaaccctgtctctattaaaaatagaaaacattagacaggtgtg

SEQ ID NO: 11607 - DNA, 201 bp, Homo sapiens
aattgctaagagggtatatcttatatgttcttaccaataataataataatggtaataattaaggggcaggaggacacttcaaaaggtgatggatatgtttwtggccttgatggtggtgatggtttcatgagagtatacttatccccaaactaattgagatgtaaatattaaatatgtacagctttttgtatgtcaatcgta

SEQ ID NO: 11608 - DNA, 201 bp, Homo sapiens
ggagggcctggctactgaagggcacatatgagggcagcctgaagagggtgtggagaggtagagtctaggtcagaggtcagtgcctataggcacagtggtcycagggccacagctgggaagggcaaataccagaaggcaaggttgaccattcccttcctcaagtgcctattaaggctccatgttcctatgttgttcaaaccc

SEQ ID NO: 11609 - DNA, 201 bp, Homo sapiens
taatcccagctactcaggaggctgaggcaggagaatcgcttgaacccaggaggtggaggttgcagtgagccgagattgtgccactgcactccagcctaggygacagagcaagactccgtctcgggaaaattaattaataaataaataaacctaggtcccagagtcccacagaatggcagacaggagcacctgggggctttt

SEQ ID NO: 11610 - DNA, 201 bp, Homo sapiens
ggatttacagtcatcagaattgtaaaactgatcccatgtattttcaaacctcaaatcccttgctctgaccttgtgtgtctaagctagaaggaagcaggatscacctctcccctggctggaatgaagggattcacccaagctctcagtcttctcacggcatccagggcccccctgcttgtgtgtggtctagatttccattcc

SEQ ID NO: 11611 - DNA, 201 bp, Homo sapiens
tgaaaatgccaaaaaattagccaggcatggtggtacatgtctgtaatcccagctacttgggaggctgaggcatgagaatcactcaaacctggaaggtgacrgttgcggtgagctgagatcatgccactgcatcccagcctgggtgatagtgagaccctgtctcaaacaaacaaaaaaacaaaacacttccttactttggtt

SEQ ID NO: 11612 - DNA, 201 bp, Homo sapiens
gaagaccttctatctgaggaacaaccaactagttgctggatacttgcaaggaccaaatgtcaatttagaaggtgagtggttgccaggaaagccaatgtatstgggcatcacgtcactttgcccgtctgtctgcagcagcatggcctgcctgcacaaaccctaggtgcaatgtcctaatccttgttgggtctttgtattcaa

SEQ ID NO: 11613 - DNA, 201 bp, Homo sapiens
agagattagataatttgcccatggccagacagctagtataagaggaggaggtggattgactgcagacattctgtcttcaaaccactacactatgctatggrggcacagagacttaatgaaatcatggagaggggaattgctttgtcaaccacaagcagttattccgggggcagcagatcctcccctgtcccccagtgggta

SEQ ID NO: 11614 - DNA, 201 bp, Homo sapiens
atggtccctggtgggttgtgctacaatgttagcccatggtcttatgtgtttttcaaatgtgtaaagtaggatgctggaaccactcttagaaccagataccratacattgtgaagaaataaatctctgtgcttaaaactggttcatcccaaaatattttgaactgacacacaataggtgctaaataaatgtgtgttaacttg

SEQ ID NO: 11615 - DNA, 201 bp, Homo sapiens
tgtgtgttaacttgaattggattgaattcgggaaaaaagtgcaataagcttagtgaagacaccatgttccctgggtagaggaaccacattctccatctaakgccaggagtatgggaggtatcaatgtttgcccagcacagaacagggtgccaagaagagaaaagttgacggggtgcatactctgactggaaactggaaggg

SEQ ID NO: 11616 - DNA, 201 bp, Homo sapiens
accacattctccatctaaggccaggagtatgggaggtatcaatgtttgcccagcacagaacagggtgccaagaagagaaaagttgacggggtgcatactckgactggaaactggaagggtgagaacagagggtaaaggatagagatggaaccatgtgcatacactttgtgttaccttggacaagtcattcatttctctgga

SEQ ID NO: 11617 - DNA, 201 bp, Homo sapiens
gtttgcccagcacagaacagggtgccaagaagagaaaagttgacggggtgcatactctgactggaaactggaagggtgagaacagagggtaaaggatagasatggaaccatgtgcatacactttgtgttaccttggacaagtcattcatttctctggacctctgctttctctctacacaatggggtcccaccacttccctt

SEQ ID NO: 11618 - DNA, 201 bp, Homo sapiens
cacaatggggtcccaccacttcccttacagctgacttgtatgaagaaggaggtggaggaggaggagaaggtgaagacaatgctgactcaaagggtaaattmtttttaggatccaagtttgaaaacaattttaggctactagatatgaacaacatcttgattatgtagttgaaggaaattaaagatgaatggtttaattaaa

SEQ ID NO: 11619 - DNA, 201 bp, Homo sapiens
ccttctcctcttcttcttcctcctccttctcctcttcttcttcttcttcttcttcttcctcttcttcttcttcctcctcctcctcctcctcttcttcttcytcttcctcttcctcttcctcttcttcctcttcctcttattcttcttcgtcgtcttcgtcttctttttattttcaaagtgaaagcaagtttattaagaaag

SEQ ID NO: 11620 - DNA, 201 bp, Homo sapiens
aggccccagtgaggtcatgcacttgctgtctgattttggccaagtcacctccctttgtggggactgttcctcatttgtttgaggggaatgttgatttggayggggattttccaaacagagctccttggacccttccctctaaggtctctggaaatgggaaaccctgcagaggggaggataaatgggccaggattcatccct

SEQ ID NO: 11621 - DNA, 201 bp, Homo sapiens
gtgtggtgtgtcctgtgacactcaggattcaagtgttggccgaagccactaaatgtgagatgaagccattacaaggcagtgtgcacatctgtccacccaarctggatgccaacatttcacaaatagtgcttgcgtgacacaaatgcagttccaggaggcccaaatgaaaatgtttgtactgaaatttgttaaagcttcccg

SEQ ID NO: 11622 - DNA, 201 bp, Homo sapiens
tccatctgtccactgtctccaacacgatctttataaaacacacctgacaacattacccttttattcagttttttaaaagataagtttccagctcatcgggstggctttaaaggccatttctcctctggacctcacccaacttttcaaatcacttttcctacccctacctctaaatgctactcaaactccagccatcctgaa

SEQ ID NO: 11623 - DNA, 201 bp, Homo sapiens
tggtaggcaattaatttggctgaactccaaactctgaaatctctcttctttttttgttggttaactttacctgggctgcttggagtctaccccattcatgmctactttaggggccggtcagggatttgagcagagtttatatacagagtttgggcctccttctctacactctcccctgtctgtgctttctcccctcatttt

SEQ ID NO: 11624 - DNA, 201 bp, Homo sapiens
agtttctccacccacaaagtgaggacaatgatagcactttcatcacagggttgttgggtgggttaaacaagataaagtcattagcacttgtgcctggaaawttataagctaccaataattgttttattattattagtgagactaggtcaaccgaagatgcacccagcccctctagcccacgctcctgttcctgctcctctc

SEQ ID NO: 11625 - DNA, 201 bp, Homo sapiens
ctcctgcagctcacgcccctgaggacccctcggatctgctccagcacgtgaaattccagtccagcaactttgaaaacatcctgacgtgggacagcgggccrgagggcaccccagacacggtctacagcatcgagtataagacgtaggcttctctcttgaccccacctcctttgactgatctgaagccagcccctctccaag

SEQ ID NO: 11626 - DNA, 201 bp, Homo sapiens
gaacagcgtggggagcatcccctcttgctggtccatttgtagaaggctgggggccagggtctccctgcccacccaccaggctggcatcttgaaagcaaagrcactttgcatgaaatttatatggggcaggactctgactgagcccatacatgggcagggtgaccctgggaaagcccctgctcaccctcctcccaccctcct

SEQ ID NO: 11627 - DNA, 201 bp, Homo sapiens
atgtctgtagtcccagctacacaggaggctgaggtgcgaggattgcttaagcccaggaagtcgaggctgcagtgagccatgatcacgccactgcactccarcctgggggacagagcaagaccctgtctcaaagaccaaaaaaatggtgtggccactttagaaaatagttcgacagttcttcaaaaggttaaagatagagct

SEQ ID NO: 11628 - DNA, 201 bp, Homo sapiens
ctggtgggaatttaagatggtgcagccataacatcctggacaatatatgagaccccatcactacaaaaaatttaaaaataaattagacggatgtggtggtrcatgtctgtagtcccagctacacaggaggctgaggtgcgaggattgcttaagcccaggaagtcgaggctgcagtgagccatgatcacgccactgcactcc

SEQ ID NO: 11629 - DNA, 201 bp, Homo sapiens
accaacttcaggttgtgttaaaaagtgaatgagagacaataccaagcatcaatggcgatgtggagaaactgaacccctcaaacaatgctggtgggaatttragatggtgcagccataacatcctggacaatatatgagaccccatcactacaaaaaatttaaaaataaattagacggatgtggtggtgcatgtctgtagtc

SEQ ID NO: 11630 - DNA, 201 bp, Homo sapiens
agggatagggtggtggaggggacgaatttttgtttctttcggtagttgggggagccactagagattactaagcagggagagtccttatcacaactattttwtggtaaatatttagggtcttattaaatattttattgttgatttctaatttaattcaatttgtggtcagagaacacacgctgtatgatttcagtcctttta

SEQ ID NO: 11631 - DNA, 201 bp, Homo sapiens
gaggccccaaggaacactttcgtgttccacagacctgttggggctgcgtcttgtcctctcggccagccacttgggaccaaagcctgctcttctccctaagsgtcccttgtaacctgtttttctcgctgtagcttccccacactgccttgtcatcaaagtcatcaaaaaccctctatccatcatggttcattcagtagcaca

SEQ ID NO: 11632 - DNA, 201 bp, Homo sapiens; identical to SEQ ID NO: 1721

SEQ ID NO: 11633 - DNA, 201 bp, Homo sapiens; identical to SEQ ID NO: 1722

SEQ ID NO: 11634 - DNA, 201 bp, Homo sapiens
tgcgcccggcctgcaaaggtttttaagggaactcattggtccttgggttcctcattttgtaacagaggatgcttgctgcgtgagacctccttctcagaaayggtccagagacagcaacccagcaacactgaggagtagagacttatttccatttctagatgaggaagctgaggacaagaggctaagggaccctcacacagc

SEQ ID NO: 11635 - DNA, 201 bp, Homo sapiens
gtcctcgccaagcctgaggacccctcttgtgtgtagagttggagtaggggaatcaataactgtctgctccctcacaccttgggcccactggcagtcgtagwcgtgtctggggaaggagaggcacagacatattcaagacacacacccaggccgcaaggccttgacccagctggggttgcttaacattttcccacctgttta

SEQ ID NO: 11636 - DNA, 201 bp, Homo sapiens; identical to SEQ ID NO: 1714

SEQ ID NO: 11637 - DNA, 201 bp, Homo sapiens; identical to SEQ ID NO: 1717

SEQ ID NO: 11638 - DNA, 201 bp, Homo sapiens
aggtttgttcggaaactcatcacttttccaaacagcccacaagagactgatttctccacctgaatcccagtgcaccaattggcaggggagctatgcctcayggaacagccaacactggccacttgcatggggcatgcccttcctggggcaaaggctgctagggagctcagaatagaacttggcaagaggagaactagaaaa

SEQ ID NO: 11639 - DNA, 201 bp, Homo sapiens
ctgttgccttactttgtcttgcttataatgagataccattttttcctaagactatagcttttatataaatcacacttcctggtggctacttcttgctgacrtatagaaggcaccttatccttaaaaatatatttaaaacaattcctacatttattaggttctactatattgccaagcaaatagttgtgccaaatgctttac

SEQ ID NO: 11640 - DNA, 201 bp, Homo sapiens
tccttgggctctatgtggagatcggtgtgtaacaggaatcacattccattctctgtccaattcagcaccttggagggaagcagagagaatatgagttcttyggcctgacccctgacacagagttccttggcaccatcatgatttgcgttcccacctgggccaaggagagtgccccctacatgtgccgagtgaagacactgc

SEQ ID NO: 11641 - DNA, 201 bp, Homo sapiens
cattctctgtccaattcagcaccttggagggaagcagagagaatatgagttcttcggcctgacccctgacacagagttccttggcaccatcatgatttgcrttcccacctgggccaaggagagtgccccctacatgtgccgagtgaagacactgccaggtgagttcggctgaaaccagagggaggtggggctcccgaattc

SEQ ID NO: 11642 - DNA, 201 bp, Homo sapiens
gtccctattctgtcctggaacaaacagcagtggttttccaggaatgttatagacattcgggtggggtctttttcctggagtagggatgggggtaacatgtsacaggagacagggtttcactgaagtgggaagctgacccagagaggcccaagctcgtgggctaggggaggatcgaggagtgggctagaagtagaggttcca

SEQ ID NO: 11643 - DNA, 201 bp, Homo sapiens
tgtttagccgttgctttcagaagcatagctggcactggagtggaaggagagagggagcagtcattttccactgtccaaggttgcctcagacactacccacygattctgactttttcttttctcttttctctctccctatccccagctaccctcaagccacctgatgtgacctgtatctccaaagtgagatcgattcagatg

SEQ ID NO: 11644 - DNA, 201 bp, Homo sapiens
aggttgcctcagacactacccaccgattctgactttttcttttctcttttctctctccctatccccagctaccctcaagccacctgatgtgacctgtatcyccaaagtgagatcgattcagatgattgttcatcctacccccacgccaatccgtgcaggcgatggccaccggctaaccctggaagacatcttccatgacct

SEQ ID NO: 11645 - DNA, 201 bp, Homo sapiens
tttctctctccctatccccagctaccctcaagccacctgatgtgacctgtatctccaaagtgagatcgattcagatgattgttcatcctacccccacgccmatccgtgcaggcgatggccaccggctaaccctggaagacatcttccatgacctgttctaccacttagagctccaggtcaaccgcacctaccaaatggtga

SEQ ID NO: 11646 - DNA, 201 bp, Homo sapiens
aggctcccagccctttgagatgggggaccccaagaaatagcccttaggagattgtcaagggtcagctgcctcgcgctgcacacaccgggccctcacccccscaatcttaggctgactccagagcatgtggaattgtttcttgtttgtgtatttttccttagcttcccagctggttgacagaacattgtttttccacatgaa

SEQ ID NO: 11647 - DNA, 201 bp, Homo sapiens
tcgaccatgagggctggggcatctatacacatgtgcgtgagggccctggcagtgtgggatggaactgggctgggctgggctgggctgggggcctgcagtgygctgcgggctttccctgtacctccccacttcagcacagtacctagagaagtccaagaactctgaattaaaatatggcatcccaggtggttgtaaaaaatc

SEQ ID NO: 11648 - DNA, 201 bp, Homo sapiens
ggagcgtccctacccctctgtgatgtgtttgatgatgtagtgagataacataggtagagcacccagctctacatgatcatacagatcatggcctgtagtaggagttcaaccactgctggctactgttattattaaagggtagaccagagagggtcgtgcagcaggaaggatgctcagcatatctgtggcagagccaggcct

SEQ ID NO: 11649 - DNA, 201 bp, Homo sapiens
ccactttatcctcatgttcagattcatgatgtcagtaagtgatttcagttccaaccatgccaacattcagaatagagttgagtttgcaagctggacattgygtgtggcatagtggaaagagaagtaccgtgtgaggaatgagaaggcacggtattagtcagatgtcagccaaccacgtgcctgggggagtcactcagcctc

SEQ ID NO: 11650 - DNA, 201 bp, Homo sapiens
gggagcgtccctacccctctgtgatgtgtttgatgatgtagtgagataacataggtagagcacccagctctacatgatcatacagatcatggcctgtagtaggagttcaaccactgctggctactgttattattaaagggtagaccagagagggtcgtgcagcaggaaggatgctcagcatatctgtggcagagccaggcc

SEQ ID NO: 11651 - DNA, 201 bp, Homo sapiens
aattcagcaccttggagggaagcagagagaatatgagttcttcggcctgacccctgacacagagttccttggcaccatcatgatttgcgttcccacctggkccaaggagagtgccccctacatgtgccgagtgaagacactgccaggtgagttcggctgaaaccagagggaggtggggctcccgaattcaagtcttgactc

SEQ ID NO: 11652 - DNA, 201 bp, Homo sapiens
agaggctcccagccctttgagatgggggaccccaagaaatagcccttaggagattgtcaagggtcagctgcctcgcgctgcacacaccgggccctcacccscccaatcttaggctgactccagagcatgtggaattgtttcttgtttgtgtatttttccttagcttcccagctggttgacagaacattgtttttccacatg

SEQ ID NO: 11653 - DNA, 201 bp, Homo sapiens
gcctcggccaggccctccttgctcaagtgcaggacgaggcccacgaaaaggcagagcttcccaccttctctgccactgtcccgccagggctgcctgcgtcyccagggcttccagctctgtgggaccccctccagtctgcttcccagcatcaagctgggcgttccaggaagatgtgaggcacccccttgaggcaccaagaca

SEQ ID NO: 11654 - DNA, 201 bp, Homo sapiens
tctctctctgctctcctggtgcattgcatgaaattcagggaacttccttaggaagtcaaagcatagtcctgattgaggatggcgagcaggtatggcctcgrccaggccctccttgctcaagtgcaggacgaggcccacgaaaaggcagagcttcccaccttctctgccactgtcccgccagggctgcctgcgtccccaggg

SEQ ID NO: 11655 - DNA, 201 bp, Homo sapiens
agacacacacccaggccgcaaggccttgacccagctggggttgcttaacattttcccacctgtttatttcccacgccagccggccagggcctccgagctcygagccagctgccagcttgggccgccattttcccgcaggctcttgctctccacagcccaagcctgggggcctgagggaagggttttataagttaaggactc

SEQ ID NO: 11656 - DNA, 201 bp, Homo sapiens
atattcaagacacacacccaggccgcaaggccttgacccagctggggttgcttaacattttcccacctgtttatttcccacgccagccggccagggcctcygagctccgagccagctgccagcttgggccgccattttcccgcaggctcttgctctccacagcccaagcctgggggcctgagggaagggttttataagtta

SEQ ID NO: 11657 - DNA, 201 bp, Homo sapiens
agaccctcagccatactggttagaaatcctagaggctcccagccctttgagatgggggaccccaagaaatagcccttaggagattgtcaagggtcagctgyctcgcgctgcacacaccgggccctcacccccccaatcttaggctgactccagagcatgtggaattgtttcttgtttgtgtatttttccttagcttcccag

SEQ ID NO: 11658 - DNA, 201 bp, Homo sapiens
ggccaggccctccttgctcaagtgcaggacgaggcccacgaaaaggcagagcttcccaccttctctgccactgtcccgccagggctgcctgcgtccccagrgcttccagctctgtgggaccccctccagtctgcttcccagcatcaagctgggcgttccaggaagatgtgaggcacccccttgaggcaccaagacacgtcc

SEQ ID NO: 11659 - DNA, 201 bp, Homo sapiens
tgcatatcgtggattattcttgccttttctgcccctcagctccttgataaaccacttgggatgaatcagccaccggaccagataaacaagccagcctgttrctattgctgttttctgcaagtcggaagggaactcccttagatcccgcccagaacctggaattccagagcacacagggccaggacacctttgtacccctgc

SEQ ID NO: 11660 - DNA, 201 bp, Homo sapiens
ccgtatgagaagaacagcagttgcaattaactggactccgagagcgacagggagggacgggagactgaagcaggtacagtgtcgccacacagggggagaargccacaggcttggttgctgtcggagaaacagcatggaggttcagagcagtcagtttgttcttaatggtcataagtccagggaagggaataaaagagaaaa

SEQ ID NO: 11661 - DNA, 201 bp, Homo sapiens
aagtactggaattacaggcatgagccacggcgcctggcctcctttccattcttgaacatgtaacacagctgaagtatcatagtggacaatgccaaaatgcrggccagaccacatattctggaaggactttgtttttaagttcgtttgttttttgagacaaggtgtcactctgttgcccaggctgagtgctgtggtgcagtc

SEQ ID NO: 11662 - DNA, 201 bp, Homo sapiens
tcagccaccaagatgactgacaggttcagctctctgcagcacagtgagttggagcccctgtgggtttcaggggagggaagaggaaagcgcaggtgtttgcrgggtgggatggcctcttcccctctggagtgggtggagggtccagaaggggctctctgcaaggggaggggcagctggggatgtggcttttagggaagcccc

SEQ ID NO: 11663 - DNA, 201 bp, Homo sapiens
atcttgcattctgacggtaggagaggccttgccagcccagccagagagggttttcagcatccacatgtggggccagacccaaccgggcccaggcagagccsagcctcacgcttccttctctggcccctttggtttcccagaccggacatggacctactccttctccggagccttcctgttctccatgggcttcctcgtcgc

SEQ ID NO: 11664 - DNA, 201 bp, Homo sapiens
cttggaggccaaaggatcattgaggaatttttacaaattagattcagggtaaatgaggtccatgaatccctgaagttggatgcaagatttttgtatatatrcattttggcaggaagaagacccacagcattcatcacattctcaaaggagtctgtaaaccagcaaaggtaatttggttatttggaaaattccatcttgaga

SEQ ID NO: 11665 - DNA, 201 bp, Homo sapiens
agggagcgtccctacccctctgtgatgtgtttgatgatgtagtgagataacataggtagagcacccagctctacatgatcatacagatcatggcctgtagtaggagttcaaccactgctggctactgttattattaaagggtagaccagagagggtcgtgcagcaggaaggatgctcagcatatctgtggcagagccaggc

SEQ ID NO: 11666 - DNA, 201 bp, Homo sapiens
aaggggaggggcagctggggatgtggcttttagggaagccccccacccccaccaattacagtgtgttcctagcaggtttgttcacttttctccacctccamcccaacctccctagttcagaccacccttatcttgacccccgactgcagtcaaggccacctaacttgtttccccaactctcctctttaccacctcctccag

SEQ ID NO: 11667 - DNA, 201 bp, Homo sapiens
gaaggagggatagtgggagcgtgggagggtggtggaggtcataatgacagctgccattatgtgtgtataaccacacattttatatatatatatatatatawgtatataaccacattatatagtgtgtataaccactgcctatgggccagacactattgcaagtgaaaggcacacgtgcttggagactgattggatttgggg

SEQ ID NO: 11668 - DNA, 201 bp, Homo sapiens
gcccagatctctctccctgagataacccaggctttagaaccaaagagctgagagaccctgtcccttcagagaggcacttgcacctagaggagtctctgggragcagatggggatatgggacagacgcatcttgaaaaagcccccagatgcctccctatggaggacctcacccacccacatcaccagtagggagcttgggac

SEQ ID NO: 11669 - DNA, 201 bp, Homo sapiens
ccagccctcagcatagtgcctggcacatagaagattctcaatagccaggcgtggtggctcacacttgtaatcccagcactttaggaggctgaggcaagagsatcacttgagcctaggagttcaagaccagcctggggaacacagtgagaccccatctctacaaaaaatttaaaaattagctgggtgtggtggcacacactt

SEQ ID NO: 11670 - DNA, 201 bp, Homo sapiens; identical to SEQ ID NO: 1723

SEQ ID NO: 11671 - DNA, 201 bp, Homo sapiens
gcagaatccactgcattcccagccctcagcatagtgcctggcacatagaagattctcaatagccaggcgtggtggctcacacttgtaatcccagcactttrggaggctgaggcaagagcatcacttgagcctaggagttcaagaccagcctggggaacacagtgagaccccatctctacaaaaaatttaaaaattagctgg

SEQ ID NO: 11672 - DNA, 201 bp, Homo sapiens
ttcggcctgacccctgacacagagttccttggcaccatcatgatttgcgttcccacctgggccaaggagagtgccccctacatgtgccgagtgaagacacygccaggtgagttcggctgaaaccagagggaggtggggctcccgaattcaagtcttgactcttctctttcctccctgtaaccaaggtgagacttggcaaca

SEQ ID NO: 11673 - DNA, 201 bp, Homo sapiens; identical to SEQ ID NO: 1726

SEQ ID NO: 11674 - DNA, 201 bp, Homo sapiens
gcgaggattgcttaagcccaggaagtcgaggctgcagtgagccatgatcacgccactgcactccagcctgggggacagagcaagaccctgtctcaaagacmaaaaaaatggtgtggccactttagaaaatagttcgacagttcttcaaaaggttaaagatagagctactatataacctaccaaattccactcttagatata

SEQ ID NO: 11675 - DNA, 201 bp, Homo sapiens; identical to SEQ ID NO: 1727

SEQ ID NO: 11676 - DNA, 201 bp, Homo sapiens
agatgtgaggcacccccttgaggcaccaagacacgtccctttagaccctcagccatactggttagaaatcctagaggctcccagccctttgagatgggggaccccaagaaatagcccttaggagattgtcaagggtcagctgcctcgcgctgcacacaccgggccctcacccccccaatcttaggctgactccagagcatg

SEQ ID NO: 11677 - DNA, 201 bp, Homo sapiens
aaaataaactcatttttatctaagtgaatttcccacatactatgaccaggaaacaaaagtaatcatgagtaaattatacctagatttgattttttttttttcctttcagtgtcctactttcaaattgttgttgtctaggcacattttcggaagtcatcacttttctgtttgcatcacgatagtcttttttccttcatgcta

SEQ ID NO: 11678 - DNA, 201 bp, Homo sapiens
taatcccagctactcaggaggctgaggcaggagaatcacttgaactggggaggcggagtttgcagtgagccgagatcaagccactgcactccagcctgggygacagagtgagactccatctcaaaaagaaaaaaaaagaaaaaaaggtaaaataaactcatttttatctaagtgaatttcccacatactatgaccaggaaa

SEQ ID NO: 11679 - DNA, 201 bp, Homo sapiens
attggctgctgatgacttcagactgaagtaagaaacataaagacttgaaaacaagtgttacgggagaaaaataaattttattccattttataaataaatawatatatatatatatatatatatatatatatatatatatactagaggatcatgacctaaatttacaaacatcccaagggtaaactttagaccattagacaa

SEQ ID NO: 11680 - DNA, 201 bp, Homo sapiens
tactaagtaagtttgcaaagcaagtcacctttaaaagctaatagcacaggccgggcacggtggctcacacctgtaatcccagcactttaggaggctgaggygggcaaatcacttgaggtcaggaatttgagattagcctggccaacatggtgaaaccccgtgtctactaaaaacacacacacaaaaaaaattagccgggca

SEQ ID NO: 11681 - DNA, 201 bp, Homo sapiens
cacaaggtaaaaatcattcgtgattcactcactattaacatcttttttagatcattgctgccactgttgaaaatgctgggatcattttgcacattgacaatgccagattggctgctgatgacttcagactgaagtaagaaacataaagacttgaaaacaagtgttacgggagaaaaataaattttattccattttataaat

SEQ ID NO: 11682 - DNA, 201 bp, Homo sapiens; identical to SEQ ID NO: 1730

SEQ ID NO: 11683 - DNA, 201 bp, Homo sapiens
ctggggaggcggagtttgcagtgagccgagatcaagccactgcactccagcctgggcgacagagtgagactccatctcaaaaagaaaaaaaaagaaaaaaaggtaaaataaactcatttttatctaagtgaatttcccacatactatgaccaggaaacaaaagtaatcatgagtaaattatacctagatttgatttttttt

SEQ ID NO: 11684 - DNA, 201 bp, Homo sapiens
cattttccaacagggagttaagcaaatgcagttttctttctttgccaagaggttcactaggcacataaaaaaggcagtgttaaggagaactgcattatgaytatagaaagcattaaaagttaaagataatgtactctattttgcataaaagatttagtttaaaaagaagtgccaaccaaaattaaagaagcaatgatataa

SEQ ID NO: 11685 - DNA, 201 bp, Homo sapiens
tggaagctgttctggtcaaggacgaggtagactttttttaatattgataatagttctgtaatttaaaagtgaagacatactttgcttgtcatactaaaagrgtccgctattttttacataatcttacccagacagaacacgttgaatgcatgtgattgaatttctcttgctctgtgtttctgtgagagtttccagactgac

SEQ ID NO: 11686 - DNA, 201 bp, Homo sapiens
gaatcgcttaaacatgggaggcggaggttgcagtgagctgagatcttgccactgcactccagcctgggcgacagagcgagactctgtctctacacacacamaaaaaaaagagctaataacacaggcaacagctacccttacaagtaggcatgcagacacaaggtaaaaatcattcgtgattcactcactattaacatcttt

SEQ ID NO: 11687 - DNA, 201 bp, Homo sapiens
caagatctggaagctgttctggtcaaggacgaggtagactttttttaatattgataatagttctgtaatttaaaagtgaagacatactttgcttgtcataytaaaagagtccgctattttttacataatcttacccagacagaacacgttgaatgcatgtgattgaatttctcttgctctgtgtttctgtgagagtttcca

SEQ ID NO: 11688 - DNA, 201 bp, Homo sapiens
tagctgggcatggtggtgcacacctataatcccagatactggggaggctgagacaggaggatcacttgagcccaggagtgcaaggttgaacaaaaaagcarcagacacaatccaattaaaacacataaacacatccaaaacttcatcatgaagaatccccggggcggaggctttctcctgcctttgcaaactgcaaaggaa

SEQ ID NO: 11689 - DNA, 201 bp, Homo sapiens
ggtggcacacacctgtagtcccagctactcaggggactgaggcgggaagatcacttgagctcaggaggctgaggctgcagtgagctgtaatcatgccactrtactccagcctgggtgatagaacgagaccttgtctcaaaaaaaaaaaaaaaaaaattagctgggcatggtggtgcacacctataatcccagatactgggg

SEQ ID NO: 11690 - DNA, 201 bp, Homo sapiens; identical to SEQ ID NO: 1735

SEQ ID NO: 11691 - DNA, 201 bp, Homo sapiens; identical to SEQ ID NO: 1736

SEQ ID NO: 11692 - DNA, 201 bp, Homo sapiens
aggcagtgttaaggagaactgcattatgattatagaaagcattaaaagttaaagataatgtactctattttgcataaaagatttagtttaaaaagaagtgycaaccaaaattaaagaagcaatgatataacaatataggttatatggcgaaggtgcacttctagtgccacataaaattgcatttttaaaaaatcatccaat

SEQ ID NO: 11693 - DNA, 201 bp, Homo sapiens
atgaaaattttaagaaattatttgaaaacatatttgcttgttacatatgcaaagtgggacctgatgtgtcttaattattatagtaccttatgtgatgtccratcacattaattttctgtttccatctcagtttcagtatttctacataacagtaaaacttatacaacaccaggcagctaattatcatttatatataagaat

SEQ ID NO: 11694 - DNA, 201 bp, Homo sapiens
gctgcattatgtttgtatttagagcgcatcactacaagcacaaatctccactgatgctggggcagccacttctgccaagaatgagataacagaactaaaaygtaccctgcaagccctggaaattgagcttcagtcccaactggccatggtatgtgcaaatagcttttcacattttccaacagggagttaagcaaatgcagt

SEQ ID NO: 11695 - DNA, 201 bp, Homo sapiens
gtaatcatgagtaaattatacctagatttgattttttttttttcctttcagtgtcctactttcaaattgttgttgtctaggcacattttcggaagtcatcrcttttctgtttgcatcacgatagtcttttttccttcatgctaggaaatgaagaatatgcaaggaagctctggaggggaggtgaccgtagaaatgaatgct

SEQ ID NO: 11696 - DNA, 201 bp, Homo sapiens
tagtgaatttattttataaaaccaaaatgggactcagggcttagacttgtatatatagagagtaataaagtaacagacacaggctgcgtgcagtggctcargcctgtaatcccagcactttgggaggctgaggtgggagaatcacgtgagcccaggagttcaagaccagcttgagcaacatagcaaaaccccttcctcttc

SEQ ID NO: 11697 - DNA, 201 bp, Homo sapiens; identical to SEQ ID NO: 1733

SEQ ID NO: 11698 - DNA, 201 bp, Homo sapiens; identical to SEQ ID NO: 1734

SEQ ID NO: 11699 - DNA, 201 bp, Homo sapiens; identical to SEQ ID NO: 1737

SEQ ID NO: 11700 - DNA, 201 bp, Homo sapiens
gtgattgaatttctcttgctctgtgtttctgtgagagtttccagactgacattgcaatcccatgattttcagattcaagcaagactagagtgactaagacyatcgtagaggagttggtggatggcaaggttgtctcgtctcaagtcagcagtatttctgaggtgaaagttaaataaggaacttccagatcaacaaaagtgt

SEQ ID NO: 11701 - DNA, 201 bp, Homo sapiens
aaggccaaaaaggcagccttgaatacactcttcgtcatcacctctcctattcgcctggacaagctcatgtttgcaggagcaccatgtcttgctcgtctcgygcctcctcctccagggctggaggcagcagctcagccagggtgtctgctggtggaagcagcttcagcagtggaagcagatgtggtctggggggcagctcgg

SEQ ID NO: 11702 - DNA, 201 bp, Homo sapiens
aagcagaacattgtttaacaaataattgaatataaagattaaggtgtgaacatagtttaacagagactggcaaaagaaggaagaaattcttaaataaacaraagtcagctacttaagtttaaagctaaggaggatacaaactatttctggaagcacctgttttttaagactttttaaaaattgtggtaaaatacatataac

SEQ ID NO: 11703 - DNA, 201 bp, Homo sapiens
tgagctcaggaggctgaggctgcagtgagctgtaatcatgccactatactccagcctgggtgatagaacgagaccttgtctcaaaaaaaaaaaaaaaaaaattagctgggcatggtggtgcacacctataatcccagatactggggaggctgagacaggaggatcacttgagcccaggagtgcaaggttgaacaaaaaagc

SEQ ID NO: 11704 - DNA, 201 bp, Homo sapiens
aatcctgtctctactaaaaatacaaaaattagccaggcgtggtggcacacacctgtagtcccagctactcaggggactgaggcgggaagatcacttgagcycaggaggctgaggctgcagtgagctgtaatcatgccactatactccagcctgggtgatagaacgagaccttgtctcaaaaaaaaaaaaaaaaaaattagc

SEQ ID NO: 11705 - DNA, 201 bp, Homo sapiens
atgagaacgagctgtgtctccggcagagcgtggaggctgacatcaatggcctgcggaaagtcctggatgacctgactatgacccgctctgacctggagatkcagattgagagtttcaccgaggagctagcctacctgaggaagaaccacgaggaggtaggaacatgttctacataaacgaataactctagctaacatattt

SEQ ID NO: 11706 - DNA, 201 bp, Homo sapiens
aacgaataactctagctaacatatttctccccatatgcattctatacaaataaaattggctgggtgcagtggctcatgcctttagtctcagctactctggmggccgaggcagggggatcccttgaacccaggagttggaggccacagtgagctatgatcatgccactggattccagcctgagcaacagagagatactgtgt

SEQ ID NO: 11707 - DNA, 201 bp, Homo sapiens
ttagtctcagctactctggaggccgaggcagggggatcccttgaacccaggagttggaggccacagtgagctatgatcatgccactggattccagcctgarcaacagagagatactgtgtctctaaaaaagtaaaataggcctggcacggtggcttatgcctgtaatctcagcactctgggaggccaaggcaggcagatca

SEQ ID NO: 11708 - DNA, 201 bp, Homo sapiens
cttgccactgcactccagcctgggcgacagagcgagactctgtctctacacacacacaaaaaaaagagctaataacacaggcaacagctacccttacaagwaggcatgcagacacaaggtaaaaatcattcgtgattcactcactattaacatcttttttagatcattgctgccactgttgaaaatgctgggatcattttg

SEQ ID NO: 11709 - DNA, 201 bp, Homo sapiens
aggaggctgaggcgggcaaatcacttgaggtcaggaatttgagattagcctggccaacatggtgaaaccccgtgtctactaaaaacacacacacaaaaaamattagccgggcatagtggcacgcccctgtaatcccagctactcaggaggctgaggctcaagaatcgcttaaacatgggaggcggaggttgcagtgagctg

SEQ ID NO: 11710 - DNA, 201 bp, Homo sapiens
aaaatcaaggagtggtatgacaaatatgggcctgggtctggagacggtggatcgggaagagattatagcaaatactattcaataattgaagatctcagaarccaggtgagactatctgtgcctgagtttctattatttgtggatctttcacttcttttcagatcatgtactataatgaaaattttaagaaattatttgaaa

SEQ ID NO: 11711 - DNA, 201 bp, Homo sapiens
ctgaagagaagactactgtctgtctggtatgaagaaaggcacaaaaggactttttaagcagagctaatccttgaaaactgtgcttatttcaaactgtcttrtctgtggagcctggaggacaaagcatcccaacccccgcaaagtcactcacccattctcttaattctccataaactcacggaaagatcttcaggaaacata

SEQ ID NO: 11712 - DNA, 201 bp, Homo sapiens
atacctagatttgattttttttttttcctttcagtgtcctactttcaaattgttgttgtctaggcacattttcggaagtcatcacttttctgtttgcatcrcgatagtcttttttccttcatgctaggaaatgaagaatatgcaaggaagctctggaggggaggtgaccgtagaaatgaatgctgcgccagggaccgacct

SEQ ID NO: 11713 - DNA, 201 bp, Homo sapiens
cagagagatactgtgtctctaaaaaagtaaaataggcctggcacggtggcttatgcctgtaatctcagcactctgggaggccaaggcaggcagatcatgasatcaggatttcgagaccagcctgaccaacatggtgaaaccccctctctactaaaaatacaaaaataaacagggcatgatggcgcacacctgttgcacctg

SEQ ID NO: 11714 - DNA, 201 bp, Homo sapiens
agaaagaggcaaatttagaatgagaattttattattaaaaatgttagacatgattagaattaacattacattggtatttttctttacaagggaaaatttcycaagagaaaacttaataacctttatttattaaaatgcccacaagtgagaactttttcaatatgtaagaatggaaggtaccctttgaaacacggccaggtg

SEQ ID NO: 11715 - DNA, 201 bp, Homo sapiens
ctacgtggctcagctgtcagaaattcaaacgcagatcagtgccctggaggaggagatctgccagatctggggtgagactaaatgccagaacgcagagtacragcaattgctggacatcaagacacgcctggaggtggagatcgagacctaccgccgcctgctcgatggagagggagggtaaaccaaagtcatgaacaaact

SEQ ID NO: 11716 - DNA, 201 bp, Homo sapiens
gttagggaatgataagagaccttgggtggagatggtggtgtagtcaggagggaggtagtatgattttgtgacatgttctcaataaagattttgagtcttcratctctagataaccatactcccatgtgccttgttctatgactcttcatcatatttcatctcaggtggctgcagtgggacaagagccacaggtatttggaa

SEQ ID NO: 11717 - DNA, 201 bp, Homo sapiens
agagttttcatctagcattttcttataaatctattcctatgtatccttagatagaaaccatagaatttcaaacctggaaattttgagctcatagagaccarctgcctcatctgacagagaaggaaactgaggccaagaccctaaatgctgaaactgcacagttacatatggctagagacacacttggggttagaaccctgg

SEQ ID NO: 11718 - DNA, 201 bp, Homo sapiens
gggaacagagggactgggcgcgcctcacaactcaccacctcgcccgctggtccttcctggctcgcctggctctgaagctgcacctggaggggaaacctcaraacagtaggcgggattgcctagtaaatatctcccattcagggaggcccaggtcgtgtgacgtcgacagttgctgggtagatgaggccaacacaggttgca

SEQ ID NO: 11719 - DNA, 201 bp, Homo sapiens
tctctctctcacacacacatacacacattgttccttctcattcttgatataccctctccctgtctctctctctctgtctctgtctctctctctctctctcwcacacacacacacacacaattgtttttctcattcttgatatacctcaggagcaaaatattgtcctccttaccttaagaaaaacctagagttttcatctag

SEQ ID NO: 11720 - DNA, 201 bp, Homo sapiens
gtgtagtcaggagggaggtagtatgattttgtgacatgttctcaataaagattttgagtcttcgatctctagataaccatactcccatgtgccttgttctrtgactcttcatcatatttcatctcaggtggctgcagtgggacaagagccacaggtatttggaagaagtcttcaagaaaatattgcctatggcctgaccca

SEQ ID NO: 11721 - DNA, 201 bp, Homo sapiens
atatggggatacctgggaccttcagtctgttccctgaacacaccctgatcccctttttttccgggttctttatagtgcagtgctggagttcgtgggtgacrggatctataacaacaccatgggccacgtgcacagccacttgcagggagaggtgtttggggctgtcctgcgccaggagacggagtttttccaacagaacca

SEQ ID NO: 11722 - DNA, 201 bp, Homo sapiens
ctctctctcacacacacatacacacattgttccttctcattcttgatataccctctccctgtctctctctctctgtctctgtctctctctctctctctctyacacacacacacacacaattgtttttctcattcttgatatacctcaggagcaaaatattgtcctccttaccttaagaaaaacctagagttttcatctagc

SEQ ID NO: 11723 - DNA, 201 bp, Homo sapiens
agtctgttccctgaacacaccctgatcccctttttttccgggttctttatagtgcagtgctggagttcgtgggtgacgggatctataacaacaccatgggycacgtgcacagccacttgcagggagaggtgtttggggctgtcctgcgccaggagacggagtttttccaacagaaccagacaggtttctcctgaaactctt

SEQ ID NO: 11724 - DNA, 201 bp, Homo sapiens
cgtgcacagccacttgcagggagaggtgtttggggctgtcctgcgccaggagacggagtttttccaacagaaccagacaggtttctcctgaaactctttcrttatacgccatgtactgttcatatcctcatacatctgctttgatctcccccctccccgctctctctctctcacacacacatacacacattgttccttctc

SEQ ID NO: 11725 - DNA, 201 bp, Homo sapiens
ttttgagtggcgcagccttgacccaaattcaggtctgcctgacttgaatgctcatctctttactactaagttatatttccttaaaatcgaatataaaaatkccaagtccatgggtagagaagaggactattcaatagtctttattcttctgtcacgtgtttcaccctagggttctcatttttatcctacttttgcaccctt

SEQ ID NO: 11726 - DNA, 201 bp, Homo sapiens
aggtcatatagcttttgagtggcgcagccttgacccaaattcaggtctgcctgacttgaatgctcatctctttactactaagttatatttccttaaaatckaatataaaaatgccaagtccatgggtagagaagaggactattcaatagtctttattcttctgtcacgtgtttcaccctagggttctcatttttatcctac

SEQ ID NO: 11727 - DNA, 201 bp, Homo sapiens
gagtgagaatctgagcttatttctgtggtacctggtgcgaggcctatgtctcttggggatcatgctctggggatcagtgtccctcaccatggtcaccctgrtcaccctgcctctgcttttccttctgcccaagaaggtgggaaaatggtaccaggtatgttcatggagttggcccgctctacacagaccctcatctcccag

SEQ ID NO: 11728 - DNA, 201 bp, Homo sapiens; identical to SEQ ID NO: 1766

SEQ ID NO: 11729 - DNA, 201 bp, Homo sapiens
tgaccctggcatcctggctcattgttagttcgtctcatcacttggaacctgtctgattcacctcactctcttctccccaaccctgcaggtaacatcatgtytcgggtaacagaggacacgtccaccctgagtgattctctgagtgagaatctgagcttatttctgtggtacctggtgcgaggcctatgtctcttggggatc

SEQ ID NO: 11730 - DNA, 201 bp, Homo sapiens
gtttgccaacccgtgtgacatctcttgtccatgtatccacagttgctggaagtgcaggtgcgggaatctctggcaaagtccagccaggtggccattgaggytctgtcggccatgcctacagttcgaagctttgccaacgaggagggcgaagcccagaagtttagggaaaagctgcaagaaataaagacactcaaccagaag

SEQ ID NO: 11731 - DNA, 201 bp, Homo sapiens
tttcccaggtatatggaaccctgggaggaatgctgactcgacagccttttgccattggtggctccggcagcacctttatctatggttatgtggatgcagcrtataagccaggcatgtctcccgaggagtgcaggcgcttcaccacagacggtaaccagccaagtggaagggtacctggggagggctttgaaacatgggaag

SEQ ID NO: 11732 - DNA, 201 bp, Homo sapiens
gaccaaaaaaaaaaaaatagactgaccttgtttcccaagatcatagtcaattactctgtgttgggtctacaccacatctgcacatactatgagcccttccrttggagataattttcacttgcggagctgcttcacttctacctgtaggagcctcatctccacctctctacagtggagaggattccactaggcaagttggaa

SEQ ID NO: 11733 - DNA, 201 bp, Homo sapiens
ttcttttctagcttctccccacaatctgtctttaagaatttgatccccaacccgttctgagtcattttcctcttcctcgtatttctttagcatccaagggscatagctgtgtctctttctcttttctccttttcctctgtctcttctcacctttaatttccaaataggtaactcaggtattagtgtccctgatggtttgcc

SEQ ID NO: 11734 - DNA, 201 bp, Homo sapiens
cccgagggcagcggccggaatcggctctcccggttgcgggaagcgggcgtcgctcggacccaggacactacagtttctctatgcgatctccagagctcgcyttaccccggggaatgcaggtcggggcagtagggaagcccctagggatgcagggaggcgggcgctgaggagtggagggtcgcctgagaggaggaggcgaga

SEQ ID NO: 11735 - DNA, 201 bp, Homo sapiens
ttcttctctaacatgagggcatcaaggctgttcttgccctgacattccatattctgtgtctctgcagaccaccatcatggcagtggagtttgacgggggcrttgtgatgggttctgattcccgagtgtctgcagggtgagtaaaagtgaagatgtatgcatttggaaagaagctaatggcctcaaatacacactttcctta

SEQ ID NO: 11736 - DNA, 201 bp, Homo sapiens
gctttcaattgctcactcttttgctcagccccacccacataactttcttttggctgcaaggaccctgctcttatggggaaaagcagataaggttacttccrtcccaacgaccttgatttctcgtatggtaactgcctgatattatggtgggtcacaatatcaccttcttcctgattatttatatcaggatagtgatttaca

SEQ ID NO: 11737 - DNA, 201 bp, Homo sapiens
ggaacgcagggcaagaggggaggacacaaggggactgggacaggaatcaaaggtaattgtcagtaaggtagagtagcgtgggttctgggaaatgtggagcrggagaaggactcctagcgtgggtcttggaacaccacttcggtgtagaagaaacggcactggactggcgggggccagaggttctgggctccattgctgacc

SEQ ID NO: 11738 - DNA, 201 bp, Homo sapiens
ccggcggtcagggcggctctggaaaccctgtgcgtcggcttctaggctgcctgggctcggagacgcgccgcctctcgctgttcctggtcctggtggtcctstcctctcttggtaaggggaacgcagggcaagaggggaggacacaaggggactgggacaggaatcaaaggtaattgtcagtaaggtagagtagcgtgggtt

SEQ ID NO: 11739 - DNA, 201 bp, Homo sapiens
ctgtggcctatgcagtcaactcctggaccactagtgtgagcacctgaagatgaatacccattcccttgtccttaagatgccgtgactccattcccattccyatgaccctgctcccactcctcctttactgggaaatggttggttcagtattttcgtcctagcaacctgaggctcaatgactctactcagtgtccctagccc

SEQ ID NO: 11740 - DNA, 201 bp, Homo sapiens
gcactgagatttgcagacctctggagaaccctaaccttgtttcctgcagcctccttagaaccccatgttgacacccctgaccctggcatcctggctcattkttagttcgtctcatcacttggaacctgtctgattcacctcactctcttctccccaaccctgcaggtaacatcatgtctcgggtaacagaggacacgtcca

SEQ ID NO: 11741 - DNA, 201 bp, Homo sapiens
cctgatcaccctgcctctgcttttccttctgcccaagaaggtgggaaaatggtaccaggtatgttcatggagttggcccgctctacacagaccctcatctyccagacttggcagactcagttcctctcacattgctttcagtccagctttcctggcacccttactgattctccatcttcatggaacaccctgtccctgtgg

SEQ ID NO: 11742 - DNA, 201 bp, Homo sapiens
ttatacaaaccagtccttgcagttctcagttcccaaatccagttccattggatgcctccccaaggagtagagatagaagacgaggcaaagacacctagaaycagttaaaagagactatctacaaactacagactgaatttctttctttctttccttttttttttttaagacagtgtctcactcagttgcccaggctggagc

SEQ ID NO: 11743 - DNA, 201 bp, Homo sapiens
ttcctcatttttcaaaaatggagtgatataaccttctttataaggctcttcatgtattagctgacatcacatgaatgaaagccttttgtgaagagtaaaaygctccccagacaaggtgatagtggtgatggtggtgaagataactgtgacttgcatgatgtgcattgagtcagactccatggggtctctggttcattctcc

SEQ ID NO: 11744 - DNA, 201 bp, Homo sapiens; identical to SEQ ID NO: 1740

SEQ ID NO: 11745 - DNA, 201 bp, Homo sapiens
atcttggctcactgcagcttcaacctgctgggctcaagcgattctcccctcagcctcccgagtagctgggactacaggtgtacaccactatgcctggttgrcttttatatttttagtagagatgggtttcaccatgttgcccaggctggccttgaattcctgagctcaggtaatctgcccccctcagcctcccaaagggct

SEQ ID NO: 11746 - DNA, 201 bp, Homo sapiens
gaacagagggactgggcgcgcctcacaactcaccacctcgcccgctggtccttcctggctcgcctggctctgaagctgcacctggaggggaaacctcagarcagtaggcgggattgcctagtaaatatctcccattcagggaggcccaggtcgtgtgacgtcgacagttgctgggtagatgaggccaacacaggttgcaag

SEQ ID NO: 11747 - DNA, 201 bp, Homo sapiens
tcctggctcgcctggctctgaagctgcacctggaggggaaacctcagaacagtaggcgggattgcctagtaaatatctcccattcagggaggcccaggtcrtgtgacgtcgacagttgctgggtagatgaggccaacacaggttgcaagaagaggcggggtttagaggcgtgaaactccgcagtgctcagccaagcaggga

SEQ ID NO: 11748 - DNA, 201 bp, Homo sapiens; identical to SEQ ID NO: 1769

SEQ ID NO: 11749 - DNA, 201 bp, Homo sapiens
acttgcagggagaggtgtttggggctgtcctgcgccaggagacggagtttttccaacagaaccagacaggtttctcctgaaactctttcattatacgccaygtactgttcatatcctcatacatctgctttgatctcccccctccccgctctctctctctcacacacacatacacacattgttccttctcattcttgatat

SEQ ID NO: 11750 - DNA, 201 bp, Homo sapiens; identical to SEQ ID NO: 1771

SEQ ID NO: 11751 - DNA, 201 bp, Homo sapiens
cacccctcgctgcccacccagtggtctgttgactcccttacacttggagggccttgtccagttccaagatgtctcctttgcctacccaaaccgcccagatrtcttagtgctacaggtacaacctaccactccctgtattccactggccccaactgcaattctgccatcctaaattttcttcctgccttcagcctgcttact

SEQ ID NO: 11752 - DNA, 201 bp, Homo sapiens
gggaatcctctacattggtgggcagctggtgaccagtggggctgtaagcagtgggaaccttgtcacatttgttctctaccagatgcagttcacccaggctktggaggtgaggtccctccaccttcactccccagtgtgattccttcctctggcccagcaccatctgtgtgatgtccttccattctttacccttcttgcttc

SEQ ID NO: 11753 - DNA, 201 bp, Homo sapiens; identical to SEQ ID NO: 1753

SEQ ID NO: 11754 - DNA, 201 bp, Homo sapiens
ggaatcggctctcccggttgcgggaagcgggcgtcgctcggacccaggacactacagtttctctatgcgatctccagagctcgctttaccccggggaatgmaggtcggggcagtagggaagcccctagggatgcagggaggcgggcgctgaggagtggagggtcgcctgagaggaggaggcgagagcgggagcgcggggta

SEQ ID NO: 11755 - DNA, 201 bp, Homo sapiens
gagatggtggtgtagtcaggagggaggtagtatgattttgtgacatgttctcaataaagattttgagtcttcgatctctagataaccatactcccatgtgycttgttctatgactcttcatcatatttcatctcaggtggctgcagtgggacaagagccacaggtatttggaagaagtcttcaagaaaatattgcctatgg

SEQ ID NO: 11756 - DNA, 201 bp, Homo sapiens
aggtccctccaccttcactccccagtgtgattccttcctctggcccagcaccatctgtgtgatgtccttccattctttacccttcttgcttcacataatgmtggcaagcagactacctcactttcactattcttacctccctctaggtactgctctccatctaccccagagtacagaaggctgtgggctcctcagagaaaa

SEQ ID NO: 11757 - DNA, 201 bp, Homo sapiens
ggtgctgggtctctgcccttgtctttgccgcttcttctatctctactccttggggaggcatcacccagaaatctgtgcatgtgggagggtaggagtttctrtatttccctgtttttcttctggggtaagacatcatgctatgtaacaaggcaatgacactctcaaggttagaggccttggtagcctcttatcgtgtgcttc

SEQ ID NO: 11758 - DNA, 201 bp, Homo sapiens
tttttccctttcctggtggtatctgacatcaagtgtgtggcatagtggtgctgggtctctgcccttgtctttgccgcttcttctatctctactccttgggraggcatcacccagaaatctgtgcatgtgggagggtaggagtttctatatttccctgtttttcttctggggtaagacatcatgctatgtaacaaggcaatg

SEQ ID NO: 11759 - DNA, 201 bp, Homo sapiens
ttaacctccatactctctgggtcttcttttctagcttctccccacaatctgtctttaagaatttgatccccaacccgttctgagtcattttcctcttcctygtatttctttagcatccaaggggcatagctgtgtctctttctcttttctccttttcctctgtctcttctcacctttaatttccaaataggtaactcaggt

SEQ ID NO: 11760 - DNA, 201 bp, Homo sapiens
cctggaccactagtgtgagcacctgaagatgaatacccattcccttgtccttaagatgccgtgactccattcccattcctatgaccctgctcccactcctyctttactgggaaatggttggttcagtattttcgtcctagcaacctgaggctcaatgactctactcagtgtccctagccccctccctctctttaaagatgc

SEQ ID NO: 11761 - DNA, 201 bp, Homo sapiens
cttttcctttgtaatttggaatgtgatttttccctttcctggtggtatctgacatcaagtgtgtggcatagtggtgctgggtctctgcccttgtctttgcygcttcttctatctctactccttggggaggcatcacccagaaatctgtgcatgtgggagggtaggagtttctatatttccctgtttttcttctggggtaag

SEQ ID NO: 11762 - DNA, 201 bp, Homo sapiens; identical to SEQ ID NO: 1742

SEQ ID NO: 11763 - DNA, 201 bp, Homo sapiens
gaactccagagcttcatacccatggagctccagctggtaggcggccatgtcggccacggcttgggcatcagcagctgaaccagagagtgcacagtagatgygctcgtgcagcggggacagcttgtcaaacactcggttcaccaccgcctcgctgtcaggagggagtcaacagtcaccaagttaaaactcaggttttttttt

SEQ ID NO: 11764 - DNA, 201 bp, Homo sapiens
tccagggtcccctggccgctgcatctcctccacccctctgccaaccctcaagcccagacccattaccccggtgtggacttctcccgcccggggtaagtccycggttggtgctcccgcccgcagcatccctgcaaggcaccgctctcctcgccgcctggggcactggtttccaacctgggacagcgcacaacgcgcagccga

SEQ ID NO: 11765 - DNA, 201 bp, Homo sapiens
ccttgtctttgccgcttcttctatctctactccttggggaggcatcacccagaaatctgtgcatgtgggagggtaggagtttctatatttccctgtttttsttctggggtaagacatcatgctatgtaacaaggcaatgacactctcaaggttagaggccttggtagcctcttatcgtgtgcttctctggcctctaggggc

SEQ ID NO: 11766 - DNA, 201 bp, Homo sapiens
tctctactccttggggaggcatcacccagaaatctgtgcatgtgggagggtaggagtttctatatttccctgtttttcttctggggtaagacatcatgctrtgtaacaaggcaatgacactctcaaggttagaggccttggtagcctcttatcgtgtgcttctctggcctctaggggctgacattcaccctacgccctggc

SEQ ID NO: 11767 - DNA, 201 bp, Homo sapiens
ttcctttcagtatggtacataaaatccacccaaccatgtggattggagagatgcgtgtcttccagtcctagggccttcctttgcctctcaggggaagtgcmgggcgccataaattcttgcacctgggactgcttcatgctggtaccttgtagatttgttagtgagagtgatgggaatagtggaagccagggatgagggaca

SEQ ID NO: 11768 - DNA, 201 bp, Homo sapiens
gggaggcatcacccagaaatctgtgcatgtgggagggtaggagtttctatatttccctgtttttcttctggggtaagacatcatgctatgtaacaaggcartgacactctcaaggttagaggccttggtagcctcttatcgtgtgcttctctggcctctaggggctgacattcaccctacgccctggcgaggtgacggcgc

SEQ ID NO: 11769 - DNA, 201 bp, Homo sapiens; identical to SEQ ID NO: 1772

SEQ ID NO: 11770 - DNA, 201 bp, Homo sapiens
tttcagtatggtacataaaatccacccaaccatgtggattggagagatgcgtgtcttccagtcctagggccttcctttgcctctcaggggaagtgcagggmgccataaattcttgcacctgggactgcttcatgctggtaccttgtagatttgttagtgagagtgatgggaatagtggaagccagggatgagggacatctg

SEQ ID NO: 11771 - DNA, 201 bp, Homo sapiens
tgagcactctgaaagaggggttagggaatgataagagaccttgggtggagatggtggtgtagtcaggagggaggtagtatgattttgtgacatgttctcartaaagattttgagtcttcgatctctagataaccatactcccatgtgccttgttctatgactcttcatcatatttcatctcaggtggctgcagtgggacaa

SEQ ID NO: 11772 - DNA, 201 bp, Homo sapiens
acccaaccatgtggattggagagatgcgtgtcttccagtcctagggccttcctttgcctctcaggggaagtgcagggcgccataaattcttgcacctgggmctgcttcatgctggtaccttgtagatttgttagtgagagtgatgggaatagtggaagccagggatgagggacatctgtgatgcactggaaagagagctac

SEQ ID NO: 11773 - DNA, 201 bp, Homo sapiens
cctatttaggttcgggattgagacgtcagtgtttcctttctgctgatgccctccaggataatggtgagggggaggaggcgtggtggggccagtctgactgraactgacctacttagacttaatatttgtgcgtgacctctcttctctttctccaggggagatggccattccattctttacgggccgcctcactgactggat

SEQ ID NO: 11774 - DNA, 201 bp, Homo sapiens; identical to SEQ ID NO: 1748

SEQ ID NO: 11775 - DNA, 201 bp, Homo sapiens
tgtggcctatgcagtcaactcctggaccactagtgtgagcacctgaagatgaatacccattcccttgtccttaagatgccgtgactccattcccattcctrtgaccctgctcccactcctcctttactgggaaatggttggttcagtattttcgtcctagcaacctgaggctcaatgactctactcagtgtccctagcccc

SEQ ID NO: 11776 - DNA, 201 bp, Homo sapiens; identical to SEQ ID NO: 1755

SEQ ID NO: 11777 - DNA, 201 bp, Homo sapiens; identical to SEQ ID NO: 1746

SEQ ID NO: 11778 - DNA, 201 bp, Homo sapiens
atcttcccagaatctcccctatccagctacaaccgtcagatcttggtgtgtgtgagtgcgtgaatgcatgagtgtgtctgtgtgcatgtacatgcgtgcayacatgtggctataccgttctcatcttggccctttgctctgcagaggtagacgaggctgggagccagctgtcagggggtcagcgacaggcagtggcgttgg

SEQ ID NO: 11779 - DNA, 201 bp, Homo sapiens
tcttggccctttgctctgcagaggtagacgaggctgggagccagctgtcagggggtcagcgacaggcagtggcgttggcccgagcattgatccggaaaccrtgtgtacttatcctggatgatgccaccagtgccctggatgcaaacagccagttacaggtgaggcagtcatcttcttaatggctatatcccacccaatctt

SEQ ID NO: 11780 - DNA, 201 bp, Homo sapiens
agcattgatccggaaaccgtgtgtacttatcctggatgatgccaccagtgccctggatgcaaacagccagttacaggtgaggcagtcatcttcttaatggmtatatcccacccaatcttgcttcttttatacatcttctgttagttttactaacatcataattatacaaaccagtccttgcagttctcagttcccaaatcc

SEQ ID NO: 11781 - DNA, 201 bp, Homo sapiens
tgtgagtgcgtgaatgcatgagtgtgtctgtgtgcatgtacatgcgtgcacacatgtggctataccgttctcatcttggccctttgctctgcagaggtagrcgaggctgggagccagctgtcagggggtcagcgacaggcagtggcgttggcccgagcattgatccggaaaccgtgtgtacttatcctggatgatgccacc

SEQ ID NO: 11782 - DNA, 201 bp, Homo sapiens
cattgatccggaaaccgtgtgtacttatcctggatgatgccaccagtgccctggatgcaaacagccagttacaggtgaggcagtcatcttcttaatggctrtatcccacccaatcttgcttcttttatacatcttctgttagttttactaacatcataattatacaaaccagtccttgcagttctcagttcccaaatccag

SEQ ID NO: 11783 - DNA, 201 bp, Homo sapiens
gcatgtacatgcgtgcacacatgtggctataccgttctcatcttggccctttgctctgcagaggtagacgaggctgggagccagctgtcagggggtcagcracaggcagtggcgttggcccgagcattgatccggaaaccgtgtgtacttatcctggatgatgccaccagtgccctggatgcaaacagccagttacaggtg

SEQ ID NO: 11784 - DNA, 201 bp, Homo sapiens; identical to SEQ ID NO: 1744

SEQ ID NO: 11785 - DNA, 201 bp, Homo sapiens; identical to SEQ ID NO: 1747

SEQ ID NO: 11786 - DNA, 201 bp, Homo sapiens
caccctgcaaatgagggagttggaagttggggctgctgtccgaaatgcacttatatggggatacctgggaccttcagtctgttccctgaacacaccctgaycccctttttttccgggttctttatagtgcagtgctggagttcgtgggtgacgggatctataacaacaccatgggccacgtgcacagccacttgcagggag

SEQ ID NO: 11787 - DNA, 201 bp, Homo sapiens
aatgcacttatatggggatacctgggaccttcagtctgttccctgaacacaccctgatcccctttttttccgggttctttatagtgcagtgctggagttcktgggtgacgggatctataacaacaccatgggccacgtgcacagccacttgcagggagaggtgtttggggctgtcctgcgccaggagacggagtttttcca

SEQ ID NO: 11788 - DNA, 201 bp, Homo sapiens
agcgtcccgctatgttgcccaggctggccttgaactcctgggcccaagtgatcctccctccttgacctcccaaagtgctaggattataggcatgagccacygggcccagcccatcctaatcatattaatattaattaagctagtctgtttacatgcactgtcactcatttattcattaggaatccttctgagctaggcatt

SEQ ID NO: 11789 - DNA, 201 bp, Homo sapiens
aaacacaggtgtctccctgggctgagggtagtccccggctctgacggtccgatgtctttcctcaggtggagcagctcctgtacgaaagccctgagcggtaytcccgctcagtgcttctcatcacccagcacctcagcctggtggagcaggctgaccacatcctctttctggaaggaggcgctatccgggaggggggaaccc

SEQ ID NO: 11790 - DNA, 201 bp, Homo sapiens
tctctaccagatgcagttcacccaggctgtggaggtgaggtccctccaccttcactccccagtgtgattccttcctctggcccagcaccatctgtgtgatktccttccattctttacccttcttgcttcacataatgctggcaagcagactacctcactttcactattcttacctccctctaggtactgctctccatctac

SEQ ID NO: 11791 - DNA, 201 bp, Homo sapiens
ctccgcctcccgggttcacgccgttctcccgcctcagcctcctgagtagctgggactacaggcacccgccaccacgcccggctaattttttttttttttttgtatttttagtagagacgaggtttctccgtgttagccaggatggtctcaatctcctgaccttgtgatccgcccacttcggcctcccaaagtgctggaatt

SEQ ID NO: 11792 - DNA, 201 bp, Homo sapiens
gctccgcctcccgggttcacgccgttctcccgcctcagcctcctgagtagctgggactacaggcacccgccaccacgcccggctaattttttttttttttttgtatttttagtagagacgaggtttctccgtgttagccaggatggtctcaatctcctgaccttgtgatccgcccacttcggcctcccaaagtgctggaat

SEQ ID NO: 11793 - DNA, 201 bp, Homo sapiens
actccattcccattcctatgaccctgctcccactcctcctttactgggaaatggttggttcagtattttcgtcctagcaacctgaggctcaatgactctactcagtgtccctagccccctccctctctttaaagatgctaggtggcttcctttcagtatggtacataaaatccacccaaccatgtggattggagagatgcg

SEQ ID NO: 11794 - DNA, 201 bp, Homo sapiens
ctcaggattctgttcatcttcccagaatctcccctatccagctacaaccgtcagatcttggtgtgtgtgagtgcgtgaatgcatgagtgtgtctgtgtgcytgtacatgcgtgcacacatgtggctataccgttctcatcttggccctttgctctgcagaggtagacgaggctgggagccagctgtcagggggtcagcgac

SEQ ID NO: 11795 - DNA, 201 bp, Homo sapiens; identical to SEQ ID NO: 1745

SEQ ID NO: 11796 - DNA, 201 bp, Homo sapiens
aaaactgccaaaaaaaattacatcaatgcctctaaacccaaaggactctacccccacaggtccctggttgttgtggtgattttcattgtgtaaaatacttyccacatcttttgacaccaagtctttctgcagccatgtttgaaaattaactttcaggctacagagtctttcttataccaaagttgaagaaagttttaagaa

SEQ ID NO: 11797 - DNA, 201 bp, Homo sapiens
gagaaggcaactagaacaaacaggaatccttgccttggtgaaatgtatttgaactgggtcagaaatgaggccattgggtatcaggccttaactccagcgcmccctggaggtcactgatgtggctccaggctgacctgctcctgtcaaagaatattgagcaagatgcctctcgtggaatgttctgggaccttaaaacagata

SEQ ID NO: 11798 - DNA, 201 bp, Homo sapiens
atcttcatgcacaggaggagcaagaaaggtgagaaagcctgcagggtgagcgggacttaccttcccctggcatattcacacttattccacgatgaggggtytgacagaaaagaaatgtcagaaagctctagaggccactgatatcagataatcggggaacaaacatgacctatagcgagagagggatcccaggctgggatc

SEQ ID NO: 11799 - DNA, 201 bp, Homo sapiens
aatggtgagcagactgcaaatctgcctgataggacccatattcccacagcactaattcaacatataccttactgagagcatgttttatcattaccattaakaagttaaatgaacatcagaatttaaaatcataaatataatctaatacactttaaccattttctttgtgtgccatcacaaatactccttaaccaaatacgg

SEQ ID NO: 11800 - DNA, 201 bp, Homo sapiens
agcactcacccttgatggccccagctcctcggagactcagcaggaaagccaaggagagggctctcaagatcacagctctgatatggaacattctgtcttcwgggcgcatgttgtggggtctataattgatgactgtgagcacaggaacagtgatgaggaactgaggccgagtggaggcagatgagactgaaactgtgggcc

SEQ ID NO: 11801 - DNA, 201 bp, Homo sapiens
tagaaaactaaaatagagtagagaatatcaaagaaattgtcatgggaagcaaagaatcgccttccaaagggccctgtcctgatcttattgcagatgagggygtcctcccacatttccaggagcagatcatgcctcttacacgtgtgattctagaacatagaatggaacagaatttttgagatcattttatgaggttggttc

SEQ ID NO: 11802 - DNA, 201 bp, Homo sapiens
agaaggtccaagggccagatcttgatgcccaacattgcttatgggagcaacaacaacaacaaaaaaaacatgctgcccagtggcttccagaagtttctggyccacagcctcaaggagctgaaagtgctgctgatgtgcaacaaatcttactgtgctgagatcgctcacaaaatttcctccagaactgcaaagtcatcatgg

SEQ ID NO: 11803 - DNA, 201 bp, Homo sapiens
tcacccgggtactagttacatgggtgcttgcggtgataaccattcaacgtacattctattggtttgtgtgtttcttccaaatgtcccctagttcacaataraaagggcttaaatagagaagtaaaggagaatttgggaatttgaagcaaaagcaagaagccactgaatcaagcacaaatattgagctttgataaagattgg

SEQ ID NO: 11804 - DNA, 201 bp, Homo sapiens
accccagtaccagggtgcacagctaagaaaatgagtagaaagttcatgtccacgttttgtgtgtaaataaaaccataaaaactgccaaaaaaaattacatsaatgcctctaaacccaaaggactctacccccacaggtccctggttgttgtggtgattttcattgtgtaaaatactttccacatcttttgacaccaagtct

SEQ ID NO: 11805 - DNA, 201 bp, Homo sapiens
ggactttgggttggggattcatggggggagcccatctggagcttgtcaggggagcgagcgcggggacctggactgggctgagcatggagtgaggaggacgrgagcagagagacccccgggacttcatcaggcctggcagctgactgcatgtggggtgaaaaaaggaagccacaggacagcgcacaagggtatggtgtggag

SEQ ID NO: 11806 - DNA, 201 bp, Homo sapiens
attcatggggggagcccatctggagcttgtcaggggagcgagcgcggggacctggactgggctgagcatggagtgaggaggacgagagcagagagaccccsgggacttcatcaggcctggcagctgactgcatgtggggtgaaaaaaggaagccacaggacagcgcacaagggtatggtgtggagatggaggtggagatgg

SEQ ID NO: 11807 - DNA, 201 bp, Homo sapiens
gtgtgcagtaagaggatttctcaaggatgggacaggaaggccttggagctttggcttcctcctgtgaacttgtggggtggggagcctggtgcaccaacctkagggacttgagggagtagtatcaggatgtgggattgagccctggaccttttttctagaaagaggaaaaaaatgaagggaggaggaggaggaagctgggga

SEQ ID NO: 11808 - DNA, 201 bp, Homo sapiens
ccacactcagagtggggcaattgaacaggcaggggcggatggatggcagaggaggaggaatctggactcaaggagctggggggctctgggcctggaatttyagggtctggggcccaaggcaccaggagaagaggcaggtcaggatatctgagtcaagacctgggatcttgccttagcaatgacactggagactaaaggtgg

SEQ ID NO: 11809 - DNA, 201 bp, Homo sapiens
tgtgcagtaagaggatttctcaaggatgggacaggaaggccttggagctttggcttcctcctgtgaacttgtggggtggggagcctggtgcaccaacctgwgggacttgagggagtagtatcaggatgtgggattgagccctggaccttttttctagaaagaggaaaaaaatgaagggaggaggaggaggaagctggggag

SEQ ID NO: 11810 - DNA, 201 bp, Homo sapiens
aggtttgtagggggaatgagatgaggcagtggagccatgtgacagggactgagggtagattactggagctccctgcgtagaatgaatgttcaatcaaaacytgctggagggagagctggagccataggggagtgggtaaagtgggcagggctgattccacaattccctgcatgctcccccaactccacacacatccccaac

SEQ ID NO: 11811 - DNA, 201 bp, Homo sapiens
ccgcaggtccccaacctcactcctctgaagactcttctggagatcctctgtgatgcacagatctccagactcagtgcccccagactcagattccctgggtrgggaggtctggggatctctgcttgtaatcagctccctagaggttcccatgtagccagataagtattgtcagaacactgaagatttttgaaaaatgaaaaa

SEQ ID NO: 11812 - DNA, 201 bp, Homo sapiens
atgggaacgagggtcagatagtggaacctgtgtaatctgagtttcttgctgggcaggaagatggtctctgcaataccctcaatgactggctccccattgcrcagccacgtgatgttcagcactggtgggaagaacttgtcaacatggcagacgagggtgttgggctggcccagatccacaggctccttgggaaagacgctt

SEQ ID NO: 11813 - DNA, 201 bp, Homo sapiens
ctacctcctggcctaaggaggggcacagggatgctggcaacagtctatttcttcacccgggtactagttacatgggtgcttgcggtgataaccattcaacrtacattctattggtttgtgtgtttcttccaaatgtcccctagttcacaatagaaagggcttaaatagagaagtaaaggagaatttgggaatttgaagcaa

SEQ ID NO: 11814 - DNA, 201 bp, Homo sapiens
aaattctctctctgcgtggtgagaaaacaggcctggagaggctctgcgacccgcttaggaccacagaactcggtactaggaaaactcctattttaaaatcyagccctgggtgggaagatttgggaagaatcgttaatattgagagagagagggagaaagaggattagatgagagtggcgcctccgctcatgtccgccccct

SEQ ID NO: 11815 - DNA, 201 bp, Homo sapiens
tgcatgaggctgagtgtggcgcatcctcctcggggctgagatggattttacttgtcttgggttccccacggctgtcacagggcagtgtctcagttcattcrtctttttccttcaggaagtctgggtgtaaagggatggagagaggtgaggtgtgtgcagtaagaggatttctcaaggatgggacaggaaggccttggagct

SEQ ID NO: 11816 - DNA, 201 bp, Homo sapiens
tcaatttcttttacacagtaagaataggatcagctgtgctaaactaacaaatacccagatatccaggtttggctcatgctacacgtccaaagtaagtcatscaggaagctctgcttatcatcgtactcaggaagccaggctgacagtctttctcctgcacatctgctcccagaacctccccagcagaatgaagggaaccta

SEQ ID NO: 11817 - DNA, 201 bp, Homo sapiens
tctctgcgtggtgagaaaacaggcctggagaggctctgcgacccgcttaggaccacagaactcggtactaggaaaactcctattttaaaatccagccctgrgtgggaagatttgggaagaatcgttaatattgagagagagagggagaaagaggattagatgagagtggcgcctccgctcatgtccgccccctccccgcag

SEQ ID NO: 11818 - DNA, 201 bp, Homo sapiens
cccaacctcactcctctgaagactcttctggagatcctctgtgatgcacagatctccagactcagtgcccccagactcagattccctgggtggggaggtckggggatctctgcttgtaatcagctccctagaggttcccatgtagccagataagtattgtcagaacactgaagatttttgaaaaatgaaaaagagaaggtt

SEQ ID NO: 11819 - DNA, 201 bp, Homo sapiens
aggaaggatgcagtgcagagacaggtcccagaggagacaagagctgagagaccatccaaactgggaccaccttgtcactagacttcaaattttcaatattkatagagtgttttctaagagtcaggccctttgctgagtgctatgtgcagcaggatcaaaggcagccaggaggtagaggagtcttgaggtacatcagtcatt

SEQ ID NO: 11820 - DNA, 201 bp, Homo sapiens
cgtggtgagaaaacaggcctggagaggctctgcgacccgcttaggaccacagaactcggtactaggaaaactcctattttaaaatccagccctgggtgggwagatttgggaagaatcgttaatattgagagagagagggagaaagaggattagatgagagtggcgcctccgctcatgtccgccccctccccgcagagaatt

SEQ ID NO: 11821 - DNA, 201 bp, Homo sapiens
gtgtgaataaactctggtagaggccagaccatctccttctcatccaggttcacgtagaactgctcctcctcatcaaattcaaacatatactccccagaggktctgtgcgtctgcacaaactccgcatatgttgacacatggtctgctgcatgaaggagaagatggagaatgggtgaatacgtaggatgctacacagaatgc

SEQ ID NO: 11822 - DNA, 201 bp, Homo sapiens
caattgaacaggcaggggcggatggatggcagaggaggaggaatctggactcaaggagctggggggctctgggcctggaattttagggtctggggcccaasgcaccaggagaagaggcaggtcaggatatctgagtcaagacctgggatcttgccttagcaatgacactggagactaaaggtggactccatggtgcccttg

SEQ ID NO: 11823 - DNA, 201 bp, Homo sapiens
gaggtttgtagggggaatgagatgaggcagtggagccatgtgacagggactgagggtagattactggagctccctgcgtagaatgaatgttcaatcaaaayctgctggagggagagctggagccataggggagtgggtaaagtgggcagggctgattccacaattccctgcatgctcccccaactccacacacatccccaa

SEQ ID NO: 11824 - DNA, 201 bp, Homo sapiens
gcaggtgtttatgaaactctgggatttctaaggaaggatgcagtgcagagacaggtcccagaggagacaagagctgagagaccatccaaactgggaccacyttgtcactagacttcaaattttcaatattgatagagtgttttctaagagtcaggccctttgctgagtgctatgtgcagcaggatcaaaggcagccaggag

SEQ ID NO: 11825 - DNA, 201 bp, Homo sapiens
gtgggatgagggacagtgttgggagccaccaaggaaacccagaggtgggggagcagagagcagaagggggcatgtgatgctgggcagtgaaagggaggacrggcaaaggctgggttgaggtttgtagggggaatgagatgaggcagtggagccatgtgacagggactgagggtagattactggagctccctgcgtagaatg

SEQ ID NO: 11826 - DNA, 201 bp, Homo sapiens
tcagccctgggaactgcagaggggtgaggctggggagagaggaggctggagcagcactggtgacactgaacagtgtcaggaggaagtgacggatgcagcgyccccatcccataggcagagctgtcatgtgggatgagggacagtgttgggagccaccaaggaaacccagaggtgggggagcagagagcagaagggggcatg

SEQ ID NO: 11827 - DNA, 201 bp, Homo sapiens
ctcagccctgggaactgcagaggggtgaggctggggagagaggaggctggagcagcactggtgacactgaacagtgtcaggaggaagtgacggatgcagcrcccccatcccataggcagagctgtcatgtgggatgagggacagtgttgggagccaccaaggaaacccagaggtgggggagcagagagcagaagggggcat

SEQ ID NO: 11828 - DNA, 201 bp, Homo sapiens
cggctcagccctgggaactgcagaggggtgaggctggggagagaggaggctggagcagcactggtgacactgaacagtgtcaggaggaagtgacggatgcrgcgcccccatcccataggcagagctgtcatgtgggatgagggacagtgttgggagccaccaaggaaacccagaggtgggggagcagagagcagaaggggg

SEQ ID NO: 11829 - DNA, 201 bp, Homo sapiens
taaccagcaggacggctcagccctgggaactgcagaggggtgaggctggggagagaggaggctggagcagcactggtgacactgaacagtgtcaggaggargtgacggatgcagcgcccccatcccataggcagagctgtcatgtgggatgagggacagtgttgggagccaccaaggaaacccagaggtgggggagcagag

SEQ ID NO: 11830 - DNA, 201 bp, Homo sapiens
tgggagggggtgcatgaggctgagtgtggcgcatcctcctcggggctgagatggattttacttgtcttgggttccccacggctgtcacagggcagtgtctsagttcattcgtctttttccttcaggaagtctgggtgtaaagggatggagagaggtgaggtgtgtgcagtaagaggatttctcaaggatgggacaggaagg

SEQ ID NO: 11831 - DNA, 201 bp, Homo sapiens
tagcaatgacactggagactaaaggtggactccatggtgcccttgagcccagccctaccccatctccactatcctctgccaccagctgtgcaacttctgcwaggggtgaggttaataaactggagaagttaatttgtggagcatgaaacagatgagcagaacaatcacagcaccttaatttccccagtgtgcccaagaaca

SEQ ID NO: 11832 - DNA, 201 bp, Homo sapiens
gtctttggggaaaatgggaccaagaggtcctggataaccttggacagacaaggtttgcagagagagaagttggcaagtgcaggctcctgggcgtgttcatrtctgcatccagcctggaggggactcaggcagagagccctaagctggagtgtccaggctctgaggatcactgaggattcagtgctcacgaagaatgcctct

SEQ ID NO: 11833 - DNA, 201 bp, Homo sapiens
cctggagaggctctgcgacccgcttaggaccacagaactcggtactaggaaaactcctattttaaaatccagccctgggtgggaagatttgggaagaatcsttaatattgagagagagagggagaaagaggattagatgagagtggcgcctccgctcatgtccgccccctccccgcagagaattaccttttccagggacgg

SEQ ID NO: 11834 - DNA, 201 bp, Homo sapiens
cctgatccgtaatggagactggaccttccagatcctggtgatgctggaaatgaccccccagcagggagatgtctacacctgccaagtggagcacaccagcmtggatagtcctgtcaccgtggagtggagtgagtctctgatgaccctctagaccccacctctgaagagcaggggactctctggctctggggtccactcatc

SEQ ID NO: 11835 - DNA, 201 bp, Homo sapiens
tgtctttggggaaaatgggaccaagaggtcctggataaccttggacagacaaggtttgcagagagagaagttggcaagtgcaggctcctgggcgtgttcaygtctgcatccagcctggaggggactcaggcagagagccctaagctggagtgtccaggctctgaggatcactgaggattcagtgctcacgaagaatgcctc

SEQ ID NO: 11836 - DNA, 201 bp, Homo sapiens
caatcccagggtcacagaagactacttgggttcatggtctctaatatttcaaacaggagctccctttagcgagtccttcttttcctgactgcagctctttycattttgccatccttttccagctccatgatggttctgcaggtttctgcggccccccggacagtggctctgacggcgttactgatggtgctgctcacatct

SEQ ID NO: 11837 - DNA, 201 bp, Homo sapiens
gggtacagtaaacagagagaggtgcccagtggtcagtgcttgtctttggggaaaatgggaccaagaggtcctggataaccttggacagacaaggtttgcasagagagaagttggcaagtgcaggctcctgggcgtgttcatgtctgcatccagcctggaggggactcaggcagagagccctaagctggagtgtccaggctc

SEQ ID NO: 11838 - DNA, 201 bp, Homo sapiens
aaactggagaagttaatttgtggagcatgaaacagatgagcagaacaatcacagcaccttaatttccccagtgtgcccaagaacagagcaggcctgaagayactcaaacagaaacaaacatgtgccgtgtcactgataattctgtgtagacacacacctgccagacactgctcatggcactccctaggaagaacagcatgt

SEQ ID NO: 11839 - DNA, 201 bp, Homo sapiens
aggaaggaaagaaggacaatctcaaattctatttcattatttttcttccacgctcctagtccagcctagggtgaatgtttccccctccaagaaggggcccytgcagcaccacaacctgcttgtctgccacgtgacggatttctacccaggcagcattcaagtccgatggttcctgaatggacaggaggaaacagctggggt

SEQ ID NO: 11840 - DNA, 201 bp, Homo sapiens
atttgggaagaatcgttaatattgagagagagagggagaaagaggattagatgagagtggcgcctccgctcatgtccgccccctccccgcagagaattacsttttccagggacggcaggaatgctacgcgtttaatgggacacagcgcttcctggagagatacatctacaaccgggaggagttcgcgcgcttcgacagcga

SEQ ID NO: 11841 - DNA, 201 bp, Homo sapiens
ttgggaagaatcgttaatattgagagagagagggagaaagaggattagatgagagtggcgcctccgctcatgtccgccccctccccgcagagaattacctkttccagggacggcaggaatgctacgcgtttaatgggacacagcgcttcctggagagatacatctacaaccgggaggagttcgcgcgcttcgacagcgacg

SEQ ID NO: 11842 - DNA, 201 bp, Homo sapiens
gggaagaatcgttaatattgagagagagagggagaaagaggattagatgagagtggcgcctccgctcatgtccgccccctccccgcagagaattacctttwccagggacggcaggaatgctacgcgtttaatgggacacagcgcttcctggagagatacatctacaaccgggaggagttcgcgcgcttcgacagcgacgtg

SEQ ID NO: 11843 - DNA, 201 bp, Homo sapiens
  misc_feature (1)...(201): n = A,T,C or G, or insertion/deletion polymorphism (see Tables 1-2)
gaatcgttaatattgagagagagagggagaaagaggattagatgagagtggcgcctccgctcatgtccgccccctccccgcagagaattaccttttccagngacggcaggaatgctacgcgtttaatgggacacagcgcttcctggagagatacatctacaaccgggaggagttcgcgcgcttcgacagcgacgtggggga

SEQ ID NO: 11844 - DNA, 201 bp, Homo sapiens
ctgagacgcatcctctcaccataatttttctctcctggacttacaggaaggaggctggcaacctgggataacttgtcttttacccccacagggttcctgasctcactgaaaagactattgtgccttaggaaaagcatttgctgtgtttcgttagcatctggctccaggacagaccttcaacttccaaattggatactgctg

SEQ ID NO: 11845 - DNA, 201 bp, Homo sapiens
agtggggcaattgaacaggcaggggcggatggatggcagaggaggaggaatctggactcaaggagctggggggctctgggcctggaattttagggtctggsgcccaaggcaccaggagaagaggcaggtcaggatatctgagtcaagacctgggatcttgccttagcaatgacactggagactaaaggtggactccatggt

SEQ ID NO: 11846 - DNA, 201 bp, Homo sapiens
gggtgaatgtttccccctccaagaaggggcccttgcagcaccacaacctgcttgtctgccacgtgacggatttctacccaggcagcattcaagtccgatgsttcctgaatggacaggaggaaacagctggggtcgtgtccaccaacctgatccgtaatggagactggaccttccagatcctggtgatgctggaaatgaccc

SEQ ID NO: 11847 - DNA, 201 bp, Homo sapiens
gcaggtttctgcggccccccggacagtggctctgacggcgttactgatggtgctgctcacatctgtggtccagggcagggccactccaggtaagagccgarctgccattcttggagggtctggctcagggaacaattcctaggggacgttatctttaagggatcaaattctgagacaggctgcgggggctcctgccctaag

SEQ ID NO: 11848 - DNA, 201 bp, Homo sapiens
ggaaatgaccccccagcagggagatgtctacacctgccaagtggagcacaccagcctggatagtcctgtcaccgtggagtggagtgagtctctgatgaccvtctagaccccacctctgaagagcaggggactctctggctctggggtccactcatcttatcttctgcatctataccctggggccatgtccaaaccccatct

SEQ ID NO: 11849 - DNA, 201 bp, Homo sapiens
ataggcagagctgtcatgtgggatgagggacagtgttgggagccaccaaggaaacccagaggtgggggagcagagagcagaagggggcatgtgatgctggrcagtgaaagggaggacaggcaaaggctgggttgaggtttgtagggggaatgagatgaggcagtggagccatgtgacagggactgagggtagattactgga

SEQ ID NO: 11850 - DNA, 201 bp, Homo sapiens
cagcgcccccatcccataggcagagctgtcatgtgggatgagggacagtgttgggagccaccaaggaaacccagaggtgggggagcagagagcagaagggrgcatgtgatgctgggcagtgaaagggaggacaggcaaaggctgggttgaggtttgtagggggaatgagatgaggcagtggagccatgtgacagggactga

SEQ ID NO: 11851 - DNA, 201 bp, Homo sapiens
tgaggtgcttgaggggcagatgggtggtctgatgggcaggtagacagaagggtctgcagccggggaggagactgagatacatgagaccatccagggagagrggacccagggggaagagcaaaggaccggatcctgggaactggacagttgtgatttggccaagacagaaaagcctgtgaaagagaccaaaaaaacccaagt

SEQ ID NO: 11852 - DNA, 201 bp, Homo sapiens
caaccattgtactctcaggacatttctagtccaaatttacaccaacactctgagaggaaggactgcaaagtaggtaccttagttttccactgacttccacytttcctgcttacacccttcctcctagacctctccacacccctcctaggacacacctagaaggtactgacatcatgtcacctcctcatctttcagggtagc

SEQ ID NO: 11853 - DNA, 201 bp, Homo sapiens
cagcgcttcctggagagatacatctacaaccgggaggagttcgcgcgcttcgacagcgacgtgggggagttccgggcggtgacggagctggggcggcctgmtgcggagtactggaacagccagaaggacatcctggaggagaagcgggcagtgccggacaggatgtgcagacacaactacgagctgggcgggcccatgacc

SEQ ID NO: 11854 - DNA, 201 bp, Homo sapiens
gcagatgcagtggctcaggcccgtaatcccagccctttgagaggccgagcgggtggatcacttgaggtcaggcgttggtcaagtgctcctagagaaccagsctgaccaacatggagaaaccttgtctctactaataatacaaaaattagccaggtgaagtggcaggcacctataatcccagctattcgggaggctgaggaa

SEQ ID NO: 11855 - DNA, 201 bp, Homo sapiens
acatagactatgaggaccagatagatcaatgagcccctaaaatctgtgatccctgaagcagcaattgatgtgaaccaccccatcactcaccccgacgctcytgcgtcctcctgagcactcacccttgatggccccagctcctcggagactcagcaggaaagccaaggagagggctctcaagatcacagctctgatatggaa

SEQ ID NO: 11856 - DNA, 201 bp, Homo sapiens
tatgtgtgcatgtgtctttatagcagcatgatttataatcctttgggtatatatccagtaatgggatggctgggtcaaatggtatttctagttctagatcyttgaggaattgccacactgtcttgagataccatctcacaccagttaaaatggcgatcattaaaaagtcaggaaacaacaggtgctggagaggatgtggag

SEQ ID NO: 11857 - DNA, 201 bp, Homo sapiens
ctactggcctattctctctccaaggacatgggtacagtaaacagagagaggtgcccagtggtcagtgcttgtctttggggaaaatgggaccaagaggtccwggataaccttggacagacaaggtttgcagagagagaagttggcaagtgcaggctcctgggcgtgttcatgtctgcatccagcctggaggggactcaggca

SEQ ID NO: 11858 - DNA, 201 bp, Homo sapiens
cttcctgtgtccatgtgttctcattgttcagttcccacctatgagtgagaacatgtggtctttggttttttgtccttgcaatagtttgctgtgaatgatgrtttccagcttcctccatgtccctacaaaggacatgaactcatccttttttatggctgcacagtattccatggtgtatatgtgtgcattttcttaatccag

SEQ ID NO: 11859 - DNA, 201 bp, Homo sapiens
  misc_feature (1)...(201): n = A,T,C or G, or insertion/deletion polymorphism (see Tables 1-2)
aatcgttaatattgagagagagagggagaaagaggattagatgagagtggcgcctccgctcatgtccgccccctccccgcagagaattaccttttccaggnacggcaggaatgctacgcgtttaatgggacacagcgcttcctggagagatacatctacaaccgggaggagttcgcgcgcttcgacagcgacgtgggggag

SEQ ID NO: 11860 - DNA, 201 bp, Homo sapiens
tgaataagagacgaattcattcagatcagtggtttcaaaccgtgctctgggcaactcaattgctaagggttccacaaacaggataaagtttcttatatacaaaaaaaaatgaaggtttcaaattacaccataaaacccctcattgcttatgtctacttggcaggtaaaattccatttcaaaagttaaatgtacttaaaaaa

SEQ ID NO: 11861 - DNA, 201 bp, Homo sapiens
ctccccgcagagaattaccttttccagggacggcaggaatgctacgcgtttaatgggacacagcgcttcctggagagatacatctacaaccgggaggagtwcgcgcgcttcgacagcgacgtgggggagttccgggcggtgacggagctggggcggcctgctgcggagtactggaacagccagaaggacatcctggaggag

SEQ ID NO: 11862 - DNA, 201 bp, Homo sapiens
cccgcagagaattaccttttccagggacggcaggaatgctacgcgtttaatgggacacagcgcttcctggagagatacatctacaaccgggaggagttcgygcgcttcgacagcgacgtgggggagttccgggcggtgacggagctggggcggcctgctgcggagtactggaacagccagaaggacatcctggaggagaag

SEQ ID NO: 11863 - DNA, 201 bp, Homo sapiens
cgcttcctggagagatacatctacaaccgggaggagttcgcgcgcttcgacagcgacgtgggggagttccgggcggtgacggagctggggcggcctgctgmggagtactggaacagccagaaggacatcctggaggagaagcgggcagtgccggacaggatgtgcagacacaactacgagctgggcgggcccatgaccctg

SEQ ID NO: 11864 - DNA, 201 bp, Homo sapiens
gacagtggctctgacggcgttactgatggtgctgctcacatctgtggtccagggcagggccactccaggtaagagccgaactgccattcttggagggtctrgctcagggaacaattcctaggggacgttatctttaagggatcaaattctgagacaggctgcgggggctcctgccctaaggcagtgtcctctcttcccagc

SEQ ID NO: 11865 - DNA, 201 bp, Homo sapiens
tcctggagagatacatctacaaccgggaggagttcgcgcgcttcgacagcgacgtgggggagttccgggcggtgacggagctggggcggcctgctgcggastactggaacagccagaaggacatcctggaggagaagcgggcagtgccggacaggatgtgcagacacaactacgagctgggcgggcccatgaccctgcagc

SEQ ID NO: 11866 - DNA, 201 bp, Homo sapiens
ccgggaggagttcgcgcgcttcgacagcgacgtgggggagttccgggcggtgacggagctggggcggcctgctgcggagtactggaacagccagaaggacmtcctggaggagaagcgggcagtgccggacaggatgtgcagacacaactacgagctgggcgggcccatgaccctgcagcgccgaggtgagtgagggctttg

SEQ ID NO: 11867 - DNA, 201 bp, Homo sapiens
agagggaacatagactatgaggaccagatagatcaatgagcccctaaaatctgtgatccctgaagcagcaattgatgtgaaccaccccatcactcaccccracgctcctgcgtcctcctgagcactcacccttgatggccccagctcctcggagactcagcaggaaagccaaggagagggctctcaagatcacagctctga

SEQ ID NO: 11868 - DNA, 201 bp, Homo sapiens
aggaaggaaggaaggaaggaaggaaggaaggaaggaaggaaagaaggacaatctcaaattctatttcattatttttcttccacgctcctagtccagcctarggtgaatgtttccccctccaagaaggggcccttgcagcaccacaacctgcttgtctgccacgtgacggatttctacccaggcagcattcaagtccgatgg

SEQ ID NO: 11869 - DNA, 201 bp, Homo sapiens
ggcctgctgcggagtactggaacagccagaaggacatcctggaggagaagcgggcagtgccggacaggatgtgcagacacaactacgagctgggcgggccsatgaccctgcagcgccgaggtgagtgagggctttgggccggcggtcccagggcagccccgcgggcccgtgcccagggcgcaggagcagccgggttggcct

SEQ ID NO: 11870 - DNA, 201 bp, Homo sapiens
acgctcctagtccagcctagggtgaatgtttccccctccaagaaggggcccttgcagcaccacaacctgcttgtctgccacgtgacggatttctacccagrcagcattcaagtccgatggttcctgaatggacaggaggaaacagctggggtcgtgtccaccaacctgatccgtaatggagactggaccttccagatcctg

SEQ ID NO: 11871 - DNA, 201 bp, Homo sapiens
attctatttcattatttttcttccacgctcctagtccagcctagggtgaatgtttccccctccaagaaggggcccttgcagcaccacaacctgcttgtctrccacgtgacggatttctacccaggcagcattcaagtccgatggttcctgaatggacaggaggaaacagctggggtcgtgtccaccaacctgatccgtaat

SEQ ID NO: 11872 - DNA, 201 bp, Homo sapiens
aaggaaggaaggaaagaaggacaatctcaaattctatttcattatttttcttccacgctcctagtccagcctagggtgaatgtttccccctccaagaaggrgcccttgcagcaccacaacctgcttgtctgccacgtgacggatttctacccaggcagcattcaagtccgatggttcctgaatggacaggaggaaacagct

SEQ ID NO: 11873 - DNA, 201 bp, Homo sapiens
cccagctgagtgttgtatcctccatccctttccacctggtcccttcattttctacccctcacagttccctaacgagaaggtggtccacccaacagacaacrctgcctcagatggttatcaaggggtaccctaagaagaaatcatctcaccctctctttgtccccatttgtcaagtagcagtgaggccgagccaggggatgg

SEQ ID NO: 11874 - DNA, 201 bp, Homo sapiens
tggacaagactgcagccactgcaggcccaaagcctgggtttaaatccaagctttgcactttgaagctgtgtggtcttcacctctcccggtgtctgattccygctctgtaacatgaaataaataagaaccaacctccagatgtaaataagtgaacacatgagaagcacttagaatagtgcctagaacatagtaagcaactca

SEQ ID NO: 11875 - DNA, 201 bp, Homo sapiens
taaaaacaatacgttttgaccaattttagatttattctaggaatgcaatgattcttcagtgtcagaaaatatataatgtggttaacacattagtggactcygcaaaattcatattaatttaaactgaattcagctcaagacatagacagaatttaatcaatttcatgacatgttaaaggtagtgaaccaaaaatctatagc

SEQ ID NO: 11876 - DNA, 201 bp, Homo sapiens
cagtgcccctgagctcattcttttcagtaaattctctctctgcgtggtgagaaaacaggcctggagaggctctgcgacccgcttaggaccacagaactcgrtactaggaaaactcctattttaaaatccagccctgggtgggaagatttgggaagaatcgttaatattgagagagagagggagaaagaggattagatgaga

SEQ ID NO: 11877 - DNA, 201 bp, Homo sapiens
atctataccctggggccatgtccaaaccccatctttcttctataccagctcctgagcatagtttgaagccagggaaatggagacttcctgaccttggcttrggggttcctgaagattcatagttctcccccttgtcagagaatctagggacactgactggtctcgaaaccctcacacttaggaactgacctcacacatagg

SEQ ID NO: 11878 - DNA, 201 bp, Homo sapiens
gccaccagcagaagggactgccttcccctcagtgctcgcccctccctagtgatcactcagtgcccctgagctcattcttttcagtaaattctctctctgcrtggtgagaaaacaggcctggagaggctctgcgacccgcttaggaccacagaactcggtactaggaaaactcctattttaaaatccagccctgggtgggaa

SEQ ID NO: 11879 - DNA, 201 bp, Homo sapiens
gggttggttccaagtctttgctattgtgaatagtgccgcaataaacatatgtgtgcatgtgtctttatagcagcatgatttataatcctttgggtatatayccagtaatgggatggctgggtcaaatggtatttctagttctagatctttgaggaattgccacactgtcttgagataccatctcacaccagttaaaatggc

SEQ ID NO: 11880 - DNA, 201 bp, Homo sapiens
cagtattccatggtgtatatgtgtgcattttcttaatccagtctatcactgatggacagttgggttggttccaagtctttgctattgtgaatagtgccgcwataaacatatgtgtgcatgtgtctttatagcagcatgatttataatcctttgggtatatatccagtaatgggatggctgggtcaaatggtatttctagtt

SEQ ID NO: 11881 - DNA, 201 bp, Homo sapiens
cgcgcgcttcgacagcgacgtgggggagttccgggcggtgacggagctggggcggcctgctgcggagtactggaacagccagaaggacatcctggaggagragcgggcagtgccggacaggatgtgcagacacaactacgagctgggcgggcccatgaccctgcagcgccgaggtgagtgagggctttgggccggcggtcc

SEQ ID NO: 11882 - DNA, 201 bp, Homo sapiens
agagagccctaagctggagtgtccaggctctgaggatcactgaggattcagtgctcacgaagaatgcctcttattccccagggtggagcaggagcccacaycccttggacaattaaggagagaagggagggagggggataggttttagcccctgaaggcattctcattaaaggtacttctcccagcctccccagaacttgg

SEQ ID NO: 11883 - DNA, 201 bp, Homo sapiens
gggggagttccgggcggtgacggagctggggcggcctgctgcggagtactggaacagccagaaggacatcctggaggagaagcgggcagtgccggacaggrtgtgcagacacaactacgagctgggcgggcccatgaccctgcagcgccgaggtgagtgagggctttgggccggcggtcccagggcagccccgcgggcccg

SEQ ID NO: 11884 - DNA, 201 bp, Homo sapiens
gtagaaaaaaatacaaaattgagaggaagaagaaaatatccttcaaattttagggctcttgacagttttaaagtttctgtcttagtttatgaacatgaaamtgtagaatgtatagctttgttgataatatttttcatttggggcatataaattcaaaagtacagtacagttattttggcatttgttccaaacttttgtttc

SEQ ID NO: 11885 - DNA, 201 bp, Homo sapiens
gggagttccgggcggtgacggagctggggcggcctgctgcggagtactggaacagccagaaggacatcctggaggagaagcgggcagtgccggacaggatrtgcagacacaactacgagctgggcgggcccatgaccctgcagcgccgaggtgagtgagggctttgggccggcggtcccagggcagccccgcgggcccgtg

SEQ ID NO: 11886 - DNA, 201 bp, Homo sapiens
gtctgatgggcaggtagacagaagggtctgcagccggggaggagactgagatacatgagaccatccagggagaggggacccagggggaagagcaaaggacyggatcctgggaactggacagttgtgatttggccaagacagaaaagcctgtgaaagagaccaaaaaaacccaagtgcagtgtgaggagaggcccgcagaga

SEQ ID NO: 11887 - DNA, 201 bp, Homo sapiens
gtggtctttggttttttgtccttgcaatagtttgctgtgaatgatgatttccagcttcctccatgtccctacaaaggacatgaactcatccttttttatgrctgcacagtattccatggtgtatatgtgtgcattttcttaatccagtctatcactgatggacagttgggttggttccaagtctttgctattgtgaatagt

SEQ ID NO: 11888 - DNA, 201 bp, Homo sapiens
atgttttctgggcattagagaaggcaactagaacaaacaggaatccttgccttggtgaaatgtatttgaactgggtcagaaatgaggccattgggtatcargccttaactccagcgcaccctggaggtcactgatgtggctccaggctgacctgctcctgtcaaagaatattgagcaagatgcctctcgtggaatgttctg

SEQ ID NO: 11889 - DNA, 201 bp, Homo sapiens
tgtgctaaactaacaaatacccagatatccaggtttggctcatgctacacgtccaaagtaagtcatccaggaagctctgcttatcatcgtactcaggaagycaggctgacagtctttctcctgcacatctgctcccagaacctccccagcagaatgaagggaacctaagaatttattcactggcttttaatgatccctcct

SEQ ID NO: 11890 - DNA, 201 bp, Homo sapiens
ttacacgtgtgattctagaacatagaatggaacagaatttttgagatcattttatgaggttggttcatttatatttccagagccagctaagaatagtacargagaacaggattgtggactaattttagccatgtcactgaatccaacagtacattataaaaacaatacgttttgaccaattttagatttattctaggaatg

SEQ ID NO: 11891 - DNA, 201 bp, Homo sapiens
agcattcaagtccgatggttcctgaatggacaggaggaaacagctggggtcgtgtccaccaacctgatccgtaatggagactggaccttccagatcctggwgatgctggaaatgaccccccagcagggagatgtctacacctgccaagtggagcacaccagcctggatagtcctgtcaccgtggagtggagtgagtctctg

SEQ ID NO: 11892 - DNA, 201 bp, Homo sapiens
gctctgcgacccgcttaggaccacagaactcggtactaggaaaactcctattttaaaatccagccctgggtgggaagatttgggaagaatcgttaatattragagagagagggagaaagaggattagatgagagtggcgcctccgctcatgtccgccccctccccgcagagaattaccttttccagggacggcaggaatgc

SEQ ID NO: 11893 - DNA, 201 bp, Homo sapiens
ccgccccctccccgcagagaattaccttttccagggacggcaggaatgctacgcgtttaatgggacacagcgcttcctggagagatacatctacaaccggsaggagttcgcgcgcttcgacagcgacgtgggggagttccgggcggtgacggagctggggcggcctgctgcggagtactggaacagccagaaggacatcct

SEQ ID NO: 11894 - DNA, 201 bp, Homo sapiens
gagattcagaacgaaaagggtaaatgacatttatacacattttaaaatgcaaaatcttacgaccaactctatacatataaatttgaaaatttagataaaamggatacgtttctagaaagatataaaggtcaaaactacaggaagaaatagaaaactaaaatagagtagagaatatcaaagaaattgtcatgggaagcaaag

SEQ ID NO: 11895 - DNA, 201 bp, Homo sapiens
atgaaaatgggagaatccacactcagagtggggcaattgaacaggcaggggcggatggatggcagaggaggaggaatctggactcaaggagctggggggcyctgggcctggaattttagggtctggggcccaaggcaccaggagaagaggcaggtcaggatatctgagtcaagacctgggatcttgccttagcaatgacac

SEQ ID NO: 11896 - DNA, 201 bp, Homo sapiens
caccttgttgaggtcacacccctgttccagatatgagggtggctctttctgaatttcctcttagcaagctttttccgctgcactgtcctcatcccgatatkctgcatcaggctccagaatctcagacaggacatgagtagggatgcagctggtggaggtgacactaaacctgggtctgtccttcccagaggcacagtctga

SEQ ID NO: 11897 - DNA, 201 bp, Homo sapiens
gtgcttccttgccatgacgatgccagcaatacccctctgagaggaacaggcagctataggcagtgccatttgtggcccaagtctgtttggaccattgatcygggtgttcaagtgcttccttgccatgacgatgccagcaatacccctctgagcaccaaagtcaaaggtgtgaataaactctggtagaggccagaccatctc

SEQ ID NO: 11898 - DNA, 201 bp, Homo sapiens
agaacaaacaggaatccttgccttggtgaaatgtatttgaactgggtcagaaatgaggccattgggtatcaggccttaactccagcgcaccctggaggtcrctgatgtggctccaggctgacctgctcctgtcaaagaatattgagcaagatgcctctcgtggaatgttctgggaccttaaaacagatacccaagtattcc

SEQ ID NO: 11899 - DNA, 201 bp, Homo sapiens
gtaagaggatttctcaaggatgggacaggaaggccttggagctttggcttcctcctgtgaacttgtggggtggggagcctggtgcaccaacctgagggacytgagggagtagtatcaggatgtgggattgagccctggaccttttttctagaaagaggaaaaaaatgaagggaggaggaggaggaagctggggagatcaca

SEQ ID NO: 11900 - DNA, 201 bp, Homo sapiens
gaccagatagatcaatgagcccctaaaatctgtgatccctgaagcagcaattgatgtgaaccaccccatcactcaccccgacgctcctgcgtcctcctgascactcacccttgatggccccagctcctcggagactcagcaggaaagccaaggagagggctctcaagatcacagctctgatatggaacattctgtcttcag

SEQ ID NO: 11901 - DNA, 201 bp, Homo sapiens
cgcatcctctcaccataatttttctctcctggacttacaggaaggaggctggcaacctgggataacttgtcttttacccccacagggttcctgagctcacygaaaagactattgtgccttaggaaaagcatttgctgtgtttcgttagcatctggctccaggacagaccttcaacttccaaattggatactgctgccaaga

SEQ ID NO: 11902 - DNA, 201 bp, Homo sapiens
attatttttcttccacgctcctagtccagcctagggtgaatgtttccccctccaagaaggggcccttgcagcaccacaacctgcttgtctgccacgtgacrgatttctacccaggcagcattcaagtccgatggttcctgaatggacaggaggaaacagctggggtcgtgtccaccaacctgatccgtaatggagactgga

SEQ ID NO: 11903 - DNA, 201 bp, Homo sapiens
aggaggaaacagctggggtcgtgtccaccaacctgatccgtaatggagactggaccttccagatcctggtgatgctggaaatgaccccccagcagggagaygtctacacctgccaagtggagcacaccagcctggatagtcctgtcaccgtggagtggagtgagtctctgatgaccctctagaccccacctctgaagagca

SEQ ID NO: 11904 - DNA, 201 bp, Homo sapiens
tcccacatttccaggagcagatcatgcctcttacacgtgtgattctagaacatagaatggaacagaatttttgagatcattttatgaggttggttcatttrtatttccagagccagctaagaatagtacaggagaacaggattgtggactaattttagccatgtcactgaatccaacagtacattataaaaacaatacgtt

SEQ ID NO: 11905 - DNA, 201 bp, Homo sapiens
acagctggggtcgtgtccaccaacctgatccgtaatggagactggaccttccagatcctggtgatgctggaaatgaccccccagcagggagatgtctacayctgccaagtggagcacaccagcctggatagtcctgtcaccgtggagtggagtgagtctctgatgaccctctagaccccacctctgaagagcaggggactc

SEQ ID NO: 11906 - DNA, 201 bp, Homo sapiens
tccgtaatggagactggaccttccagatcctggtgatgctggaaatgaccccccagcagggagatgtctacacctgccaagtggagcacaccagcctggayagtcctgtcaccgtggagtggagtgagtctctgatgaccctctagaccccacctctgaagagcaggggactctctggctctggggtccactcatcttatc

SEQ ID NO: 11907 - DNA, 201 bp, Homo sapiens
ttattccacgatgaggggtttgacagaaaagaaatgtcagaaagctctagaggccactgatatcagataatcggggaacaaacatgacctatagcgagagdgggatcccaggctgggatcttaatgcagccagatgcatgaggtcccaagtactcaggctcctgcggagcgtccattgagtgatgggcaatggaatttggt

SEQ ID NO: 11908 - DNA, 201 bp, Homo sapiens
cctccccgcagagaattaccttttccagggacggcaggaatgctacgcgtttaatgggacacagcgcttcctggagagatacatctacaaccgggaggagytcgcgcgcttcgacagcgacgtgggggagttccgggcggtgacggagctggggcggcctgctgcggagtactggaacagccagaaggacatcctggagga

SEQ ID NO: 11909 - DNA, 201 bp, Homo sapiens
attcacacttattccacgatgaggggtttgacagaaaagaaatgtcagaaagctctagaggccactgatatcagataatcggggaacaaacatgacctatrgcgagagagggatcccaggctgggatcttaatgcagccagatgcatgaggtcccaagtactcaggctcctgcggagcgtccattgagtgatgggcaatgg

SEQ ID NO: 11910 - DNA, 201 bp, Homo sapiens
tcaggatggaaatgtcagtcagggagttaagtagggggagcagctccgccctccacgtccccagctcctcccgcccctgttttttctcccagtgaccccamgtgaaacgtctccgcctcctccagccaccagcagaagggactgccttcccctcagtgctcgcccctccctagtgatcactcagtgcccctgagctcattc

SEQ ID NO: 11911 - DNA, 201 bp, Homo sapiens
cgggacttaccttcccctggcatattcacacttattccacgatgaggggtttgacagaaaagaaatgtcagaaagctctagaggccactgatatcagatartcggggaacaaacatgacctatagcgagagagggatcccaggctgggatcttaatgcagccagatgcatgaggtcccaagtactcaggctcctgcggagc

SEQ ID NO: 11912 - DNA, 201 bp, Homo sapiens
tctttctgcagccatgtttgaaaattaactttcaggctacagagtctttcttataccaaagttgaagaaagttttaagaaatatatttctacatctcctamatgcaaaacaacaggagcaagttgaggaattctcaagaaactggtcgagaagagagagcgcttagctatggaaaagagaaagaaggaagggagggcttcc

SEQ ID NO: 11913 - DNA, 201 bp, Homo sapiens
accaagtctttctgcagccatgtttgaaaattaactttcaggctacagagtctttcttataccaaagttgaagaaagttttaagaaatatatttctacatytcctacatgcaaaacaacaggagcaagttgaggaattctcaagaaactggtcgagaagagagagcgcttagctatggaaaagagaaagaaggaagggagg

SEQ ID NO: 11914 - DNA, 201 bp, Homo sapiens
gactaacacttgtcaggatcagaagctgaggtatctgcacccacattacaggaacaggatatgtgctcctagggaactgagggtgtcaggagatgaggaawgtccctggagtcacagaaagaaggtatcagatgtgtctcactctgacatatgcaggtgtttatgaaactctgggatttctaaggaaggatgcagtgcaga

SEQ ID NO: 11915 - DNA, 201 bp, Homo sapiens
acaaatacccagatatccaggtttggctcatgctacacgtccaaagtaagtcatccaggaagctctgcttatcatcgtactcaggaagccaggctgacagkctttctcctgcacatctgctcccagaacctccccagcagaatgaagggaacctaagaatttattcactggcttttaatgatccctcctagaaagaacaca

SEQ ID NO: 11916 - DNA, 201 bp, Homo sapiens
tgaattaagaggatggaaaagcagaaaaacagcaaaaagaaaatacatgtaaataataaggacaaaagctgaattcaatgaaatataaaaatagagaagayaaaatcaaattttgaggcaatgaaaactttaatgagacctctggcaagactcctaaggaaaatacaggagattcagaacgaaaagggtaaatgacattta

SEQ ID NO: 11917 - DNA, 201 bp, Homo sapiens
aaatagtggaggaagaggaaataactgaaaacataatagatgtttagtctttatagaaagatgaaataagttcattcaaaatgctgcatagaatgtcagaytgttaaacaattttgttagagtaaaatgactgtaaacaaatgagctaattatgtgaattaagaggatggaaaagcagaaaaacagcaaaaagaaaataca

SEQ ID NO: 11918 - DNA, 201 bp, Homo sapiens
aggagaatttgggaatttgaagcaaaagcaagaagccactgaatcaagcacaaatattgagctttgataaagattggaataagaaacataataaatgagayaagaaataggacttttgcaactgaagtgtaattaataaacaaaaagccaaactgagaaactgtcccaaggacaatatgatcgagtaaacaatagaaaatg

SEQ ID NO: 11919 - DNA, 201 bp, Homo sapiens
aaggaaggaaggaaggaaggaaggaaggaaggaaagaaggacaatctcaaattctatttcattatttttcttccacgctcctagtccagcctagggtgaaygtttccccctccaagaaggggcccttgcagcaccacaacctgcttgtctgccacgtgacggatttctacccaggcagcattcaagtccgatggttcctga

SEQ ID NO: 11920 - DNA, 201 bp, Homo sapiens
gcggcaggagctggaatgggagggggtgcatgaggctgagtgtggcgcatcctcctcggggctgagatggattttacttgtcttgggttccccacggctgkcacagggcagtgtctcagttcattcgtctttttccttcaggaagtctgggtgtaaagggatggagagaggtgaggtgtgtgcagtaagaggatttctcaa

SEQ ID NO: 11921 - DNA, 201 bp, Homo sapiens
tccagggagaggggacccagggggaagagcaaaggaccggatcctgggaactggacagttgtgatttggccaagacagaaaagcctgtgaaagagaccaawaaaacccaagtgcagtgtgaggagaggcccgcagagaagagtcttggaagctgaggggaggtgacctcagcagcacagtggacagcggtgccagtgactt

SEQ ID NO: 11922 - DNA, 201 bp, Homo sapiens
gaaacctacagggaggtagctgggtttgaggtgcttgaggggcagatgggtggtctgatgggcaggtagacagaagggtctgcagccggggaggagactgrgatacatgagaccatccagggagaggggacccagggggaagagcaaaggaccggatcctgggaactggacagttgtgatttggccaagacagaaaagcct

SEQ ID NO: 11923 - DNA, 201 bp, Homo sapiens
tggggtccactcatcttatcttctgcatctataccctggggccatgtccaaaccccatctttcttctataccagctcctgagcatagtttgaagccagggmaatggagacttcctgaccttggcttaggggttcctgaagattcatagttctcccccttgtcagagaatctagggacactgactggtctcgaaaccctcac

SEQ ID NO: 11924 - DNA, 201 bp, Homo sapiens
accataatttttctctcctggacttacaggaaggaggctggcaacctgggataacttgtcttttacccccacagggttcctgagctcactgaaaagactawtgtgccttaggaaaagcatttgctgtgtttcgttagcatctggctccaggacagaccttcaacttccaaattggatactgctgccaagaagttgctctga

SEQ ID NO: 11925 - DNA, 201 bp, Homo sapiens
ctggggcggcctgctgcggagtactggaacagccagaaggacatcctggaggagaagcgggcagtgccggacaggatgtgcagacacaactacgagctggdcgggcccatgaccctgcagcgccgaggtgagtgagggctttgggccggcggtcccagggcagccccgcgggcccgtgcccagggcgcaggagcagccggg

SEQ ID NO: 11926 - DNA, 201 bp, Homo sapiens
agggacggcaggaatgctacgcgtttaatgggacacagcgcttcctggagagatacatctacaaccgggaggagttcgcgcgcttcgacagcgacgtgggrgagttccgggcggtgacggagctggggcggcctgctgcggagtactggaacagccagaaggacatcctggaggagaagcgggcagtgccggacaggatgt

SEQ ID NO: 11927 - DNA, 201 bp, Homo sapiens
gcgcgcttcgacagcgacgtgggggagttccgggcggtgacggagctggggcggcctgctgcggagtactggaacagccagaaggacatcctggaggagargcgggcagtgccggacaggatgtgcagacacaactacgagctgggcgggcccatgaccctgcagcgccgaggtgagtgagggctttgggccggcggtccc

SEQ ID NO: 11928 - DNA, 201 bp, Homo sapiens
gggcggcctgctgcggagtactggaacagccagaaggacatcctggaggagaagcgggcagtgccggacaggatgtgcagacacaactacgagctgggcgrgcccatgaccctgcagcgccgaggtgagtgagggctttgggccggcggtcccagggcagccccgcgggcccgtgcccagggcgcaggagcagccgggttg

SEQ ID NO: 11929 - DNA, 201 bp, Homo sapiens
tcttattcttgaatgaaaaacgttctcttactggtgattgaggaggagaaacaaagactaacaaatgaaaatgggagaatccacactcagagtggggcaaytgaacaggcaggggcggatggatggcagaggaggaggaatctggactcaaggagctggggggctctgggcctggaattttagggtctggggcccaaggca

SEQ ID NO: 11930 - DNA, 201 bp, Homo sapiens
cagggttcctgagctcactgaaaagactattgtgccttaggaaaagcatttgctgtgtttcgttagcatctggctccaggacagaccttcaacttccaaaktggatactgctgccaagaagttgctctgaagtcagtttctatcattctgctctttgattcaaagcactgtttctctcactgggcctccaaccatgttccc

SEQ ID NO: 11931 - DNA, 201 bp, Homo sapiens
agggttcctgagctcactgaaaagactattgtgccttaggaaaagcatttgctgtgtttcgttagcatctggctccaggacagaccttcaacttccaaatwggatactgctgccaagaagttgctctgaagtcagtttctatcattctgctctttgattcaaagcactgtttctctcactgggcctccaaccatgttccct

SEQ ID NO: 11932 - DNA, 201 bp, Homo sapiens
aggaggctggcaacctgggataacttgtcttttacccccacagggttcctgagctcactgaaaagactattgtgccttaggaaaagcatttgctgtgtttygttagcatctggctccaggacagaccttcaacttccaaattggatactgctgccaagaagttgctctgaagtcagtttctatcattctgctctttgattc

SEQ ID NO: 11933 - DNA, 201 bp, Homo sapiens
agcatttgctgtgtttcgttagcatctggctccaggacagaccttcaacttccaaattggatactgctgccaagaagttgctctgaagtcagtttctatcrttctgctctttgattcaaagcactgtttctctcactgggcctccaaccatgttcccttcttcttagcaccacaaataatcaaaacccaacatgactgttt

SEQ ID NO: 11934 - DNA, 201 bp, Homo sapiens
gctggcaacctgggataacttgtcttttacccccacagggttcctgagctcactgaaaagactattgtgccttaggaaaagcatttgctgtgtttcgttarcatctggctccaggacagaccttcaacttccaaattggatactgctgccaagaagttgctctgaagtcagtttctatcattctgctctttgattcaaagc

SEQ ID NO: 11935 - DNA, 201 bp, Homo sapiens
ttctatcattctgctctttgattcaaagcactgtttctctcactgggcctccaaccatgttcccttcttcttagcaccacaaataatcaaaacccaacatractgtttgttttcctttaaaaatatgcaccaaatcatctctcatcacttttctctgagggttttagtagacagtaggagttaataaagaagttcattttg

SEQ ID NO: 11936 - DNA, 201 bp, Homo sapiens
ctatcattctgctctttgattcaaagcactgtttctctcactgggcctccaaccatgttcccttcttcttagcaccacaaataatcaaaacccaacatgastgtttgttttcctttaaaaatatgcaccaaatcatctctcatcacttttctctgagggttttagtagacagtaggagttaataaagaagttcattttggt

SEQ ID NO: 11937 - DNA, 201 bp, Homo sapiens
agcaaggttggaatctcctgaatacagcccctcaagccctaaaacctcttatctattaccttgggttcattgtccaggaaggggaggagaacttgaacttrtagtcacagaagggtgctgagaactaaccagcaggacggctcagccctgggaactgcagaggggtgaggctggggagagaggaggctggagcagcactgg

SEQ ID NO: 11938 - DNA, 201 bp, Homo sapiens
tctgctctttgattcaaagcactgtttctctcactgggcctccaaccatgttcccttcttcttagcaccacaaataatcaaaacccaacatgactgtttgytttcctttaaaaatatgcaccaaatcatctctcatcacttttctctgagggttttagtagacagtaggagttaataaagaagttcattttggtttaaaca

SEQ ID NO: 11939 - DNA, 201 bp, Homo sapiens
ggcaacctgggataacttgtcttttacccccacagggttcctgagctcactgaaaagactattgtgccttaggaaaagcatttgctgtgtttcgttagcayctggctccaggacagaccttcaacttccaaattggatactgctgccaagaagttgctctgaagtcagtttctatcattctgctctttgattcaaagcact

SEQ ID NO: 11940 - DNA, 201 bp, Homo sapiens
aggactgcaaagtaggtaccttagttttccactgacttccacttttcctgcttacacccttcctcctagacctctccacacccctcctaggacacacctaraaggtactgacatcatgtcacctcctcatctttcagggtagcaaggttggaatctcctgaatacagcccctcaagccctaaaacctcttatctattacct

SEQ ID NO: 11941 - DNA, 201 bp, Homo sapiens
actgtttctctcactgggcctccaaccatgttcccttcttcttagcaccacaaataatcaaaacccaacatgactgtttgttttcctttaaaaatatgcaycaaatcatctctcatcacttttctctgagggttttagtagacagtaggagttaataaagaagttcattttggtttaaacataggaaagaagagaaccatg

SEQ ID NO: 11942 - DNA, 201 bp, Homo sapiens
cctgggataacttgtcttttacccccacagggttcctgagctcactgaaaagactattgtgccttaggaaaagcatttgctgtgtttcgttagcatctggytccaggacagaccttcaacttccaaattggatactgctgccaagaagttgctctgaagtcagtttctatcattctgctctttgattcaaagcactgtttc

SEQ ID NO: 11943 - DNA, 201 bp, Homo sapiens
ctctcactgggcctccaaccatgttcccttcttcttagcaccacaaataatcaaaacccaacatgactgtttgttttcctttaaaaatatgcaccaaatcrtctctcatcacttttctctgagggttttagtagacagtaggagttaataaagaagttcattttggtttaaacataggaaagaagagaaccatgaaaatgg

SEQ ID NO: 11944 - DNA, 201 bp, Homo sapiens
tcttttacccccacagggttcctgagctcactgaaaagactattgtgccttaggaaaagcatttgctgtgtttcgttagcatctggctccaggacagaccytcaacttccaaattggatactgctgccaagaagttgctctgaagtcagtttctatcattctgctctttgattcaaagcactgtttctctcactgggcctc

SEQ ID NO: 11945 - DNA, 201 bp, Homo sapiens
ggcctccaaccatgttcccttcttcttagcaccacaaataatcaaaacccaacatgactgtttgttttcctttaaaaatatgcaccaaatcatctctcatyacttttctctgagggttttagtagacagtaggagttaataaagaagttcattttggtttaaacataggaaagaagagaaccatgaaaatggggatatgtt

SEQ ID NO: 11946 - DNA, 201 bp, Homo sapiens
cagggtgagcgggacttaccttcccctggcatattcacacttattccacgatgaggggtttgacagaaaagaaatgtcagaaagctctagaggccactgawatcagataatcggggaacaaacatgacctatagcgagagagggatcccaggctgggatcttaatgcagccagatgcatgaggtcccaagtactcaggctc

SEQ ID NO: 11947 - DNA, 201 bp, Homo sapiens
cattgggtatcaggccttaactccagcgcaccctggaggtcactgatgtggctccaggctgacctgctcctgtcaaagaatattgagcaagatgcctctcrtggaatgttctgggaccttaaaacagatacccaagtattccccctgatttcatggttcccagaagctctatggggaagaaattgtaggtaattcacaact

SEQ ID NO: 11948 - DNA, 201 bp, Homo sapiens
tcttcatgcacaggaggagcaagaaaggtgagaaagcctgcagggtgagcgggacttaccttcccctggcatattcacacttattccacgatgaggggttwgacagaaaagaaatgtcagaaagctctagaggccactgatatcagataatcggggaacaaacatgacctatagcgagagagggatcccaggctgggatct

SEQ ID NO: 11949 - DNA, 201 bp, Homo sapiens
ggacaggatgtgcagacacaactacgagctgggcgggcccatgaccctgcagcgccgaggtgagtgagggctttgggccggcggtcccagggcagccccgygggcccgtgcccagggcgcaggagcagccgggttggcctaagggaccttagtgccgggcggaaaggggactttgggttggggattcatggggggagccca

SEQ ID NO: 11950 - DNA, 201 bp, Homo sapiens
atatatttctacatctcctacatgcaaaacaacaggagcaagttgaggaattctcaagaaactggtcgagaagagagagcgcttagctatggaaaagagaragaaggaagggagggcttcctggaggaggtggcatttgaaccaggactgacatcaggatggaaatgtcagtcagggagttaagtagggggagcagctccg

SEQ ID NO: 11951 - DNA, 201 bp, Homo sapiens
gcggaaacccagaggtcttaacagtagggttcgtagaaggtccaagggccagatcttgatgcccaacattgcttatgggagcaacaacaacaacaaaaaamacatgctgcccagtggcttccagaagtttctggtccacagcctcaaggagctgaaagtgctgctgatgtgcaacaaatcttactgtgctgagatcgctca

SEQ ID NO: 11952 - DNA, 201 bp, Homo sapiens
gatggtgaaagtggaaggaggtgggagttgggcattgggtgtgaagatgctctttaaaggggttttaataaccacttgctaccaggccagtgaacacttaycatagttgatgccttttgagcatgttgcattgtaaactgtccctgaaattcctgtgcacttggcttatgggatgaaacatcctcctagttctcttgtctc

SEQ ID NO: 11953 - DNA, 201 bp, Homo sapiens
ttactgtgctgagatcgctcacaaaatttcctccagaactgcaaagtcatcatggaaagagtcacccagccggccatcagagtcaccaaccccagtaccasggtgcacagctaagaaaatgagtagaaagttcatgtccacgttttgtgtgtaaataaaaccataaaaactgccaaaaaaaattacatcaatgcctctaaa

SEQ ID NO: 11954 - DNA, 201 bp, Homo sapiens
cagtaagaataggatcagctgtgctaaactaacaaatacccagatatccaggtttggctcatgctacacgtccaaagtaagtcatccaggaagctctgctyatcatcgtactcaggaagccaggctgacagtctttctcctgcacatctgctcccagaacctccccagcagaatgaagggaacctaagaatttattcactg

SEQ ID NO: 11955 - DNA, 201 bp, Homo sapiens
aaggtactgacatcatgtcacctcctcatctttcagggtagcaaggttggaatctcctgaatacagcccctcaagccctaaaacctcttatctattacctygggttcattgtccaggaaggggaggagaacttgaacttgtagtcacagaagggtgctgagaactaaccagcaggacggctcagccctgggaactgcagag

SEQ ID NO: 11956 - DNA, 201 bp, Homo sapiens
agcactggtgacactgaacagtgtcaggaggaagtgacggatgcagcgcccccatcccataggcagagctgtcatgtgggatgagggacagtgttgggagycaccaaggaaacccagaggtgggggagcagagagcagaagggggcatgtgatgctgggcagtgaaagggaggacaggcaaaggctgggttgaggtttgta

SEQ ID NO: 11957 - DNA, 201 bp, Homo sapiens
agacactgctcatggcactccctaggaagaacagcatgtgggaaaggctgccaaaattgttcatgtaaaaattacatcaatgctgtcttcctcggtgctgyctatgcagctggcagccatctcttcctccacatcatggcctccctcagactcctcatgaaggataagatcctcaaaaagaggaccaacaagttcatgagg

SEQ ID NO: 11958 - DNA, 201 bp, Homo sapiens
agtctcattgagcaccttctcttcaatttcttttacacagtaagaataggatcagctgtgctaaactaacaaatacccagatatccaggtttggctcatgytacacgtccaaagtaagtcatccaggaagctctgcttatcatcgtactcaggaagccaggctgacagtctttctcctgcacatctgctcccagaacctcc

SEQ ID NO: 11959 - DNA, 201 bp, Homo sapiens
gcggcctgctgcggagtactggaacagccagaaggacatcctggaggagaagcgggcagtgccggacaggatgtgcagacacaactacgagctgggcgggsccatgaccctgcagcgccgaggtgagtgagggctttgggccggcggtcccagggcagccccgcgggcccgtgcccagggcgcaggagcagccgggttggc

SEQ ID NO: 11960 - DNA, 201 bp, Homo sapiens
ttacccccacagggttcctgagctcactgaaaagactattgtgccttaggaaaagcatttgctgtgtttcgttagcatctggctccaggacagaccttcarcttccaaattggatactgctgccaagaagttgctctgaagtcagtttctatcattctgctctttgattcaaagcactgtttctctcactgggcctccaac

SEQ ID NO: 11961 - DNA, 201 bp, Homo sapiens
gcctgctgcggagtactggaacagccagaaggacatcctggaggagaagcgggcagtgccggacaggatgtgcagacacaactacgagctgggcgggcccrtgaccctgcagcgccgaggtgagtgagggctttgggccggcggtcccagggcagccccgcgggcccgtgcccagggcgcaggagcagccgggttggccta

SEQ ID NO: 11962 - DNA, 201 bp, Homo sapiens
ccacagggttcctgagctcactgaaaagactattgtgccttaggaaaagcatttgctgtgtttcgttagcatctggctccaggacagaccttcaacttccmaattggatactgctgccaagaagttgctctgaagtcagtttctatcattctgctctttgattcaaagcactgtttctctcactgggcctccaaccatgtt

SEQ ID NO: 11963 - DNA, 201 bp, Homo sapiens
aaggtatcagatgtgtctcactctgacatatgcaggtgtttatgaaactctgggatttctaaggaaggatgcagtgcagagacaggtcccagaggagacargagctgagagaccatccaaactgggaccaccttgtcactagacttcaaattttcaatattgatagagtgttttctaagagtcaggccctttgctgagtgc

SEQ ID NO: 11964 - DNA, 201 bp, Homo sapiens
aggagaagcgggcagtgccggacaggatgtgcagacacaactacgagctgggcgggcccatgaccctgcagcgccgaggtgagtgagggctttgggccggsggtcccagggcagccccgcgggcccgtgcccagggcgcaggagcagccgggttggcctaagggaccttagtgccgggcggaaaggggactttgggttggg

SEQ ID NO: 11965 - DNA, 201 bp, Homo sapiens
aggttggttcatttatatttccagagccagctaagaatagtacaggagaacaggattgtggactaattttagccatgtcactgaatccaacagtacattayaaaaacaatacgttttgaccaattttagatttattctaggaatgcaatgattcttcagtgtcagaaaatatataatgtggttaacacattagtggactcc

SEQ ID NO: 11966 - DNA, 201 bp, Homo sapiens
cgcaggttgtccccggtctgcctgtccatatcgccccctttcccccaggtttccgcatgggccggaccgtggtcgtgctgggcggaggcatcagcggcttsgccgccagttaccacctgagccgggccccctgcccccctaaggtgagtgctccacttgtgccagagggagcttcatttaatgctcttcccatttccatca

SEQ ID NO: 11967 - DNA, 201 bp, Homo sapiens
gccctcttctcttcataccccaccccctcataattcccaaaactcattattgggagtgaaggccttcatttccatccgtcacagtgggaatgtcccccaayccaaaccctatcccaccctcattccctaccaaataggggctgtggaaatcagtcagtgtagattattttttcgctccttagtcctagtctcacccttaag

SEQ ID NO: 11968 - DNA, 201 bp, Homo sapiens
tctgcctgatgaacggctcaagaaactggagctgggacggggacggacctcaggccctcgtcccagaggcccccttcgagcagatcatggggttcccctgyctggctcaccacccccaacagtggctttgcctctcccatctcggaccaacttagcccgttccaagtctgtgagcagtggggacttgcgtccaatggggat

SEQ ID NO: 11969 - DNA, 201 bp, Homo sapiens
gaggactgacaactgtaatgggaatgccttctgagtcaggcctctgcctgatctctagtgctcagtgagctgctccctgctgaggctgcccctctggctcrtgccctgagtgccatcactgcagtgtctgtagctgtggtgaatctgcagtaccaaggagcccatctgcctgtccaggtatgataaagggacggagaggct

SEQ ID NO: 11970 - DNA, 201 bp, Homo sapiens
gagtggccgggatagaactcaaaaccggcggggcttctggagcgcaggttgtccccggtctgcctgtccatatcgccccctttcccccaggtttccgcatsggccggaccgtggtcgtgctgggcggaggcatcagcggcttggccgccagttaccacctgagccgggccccctgcccccctaaggtgagtgctccacttg

SEQ ID NO: 11971 - DNA, 201 bp, Homo sapiens
tgagtggccgggatagaactcaaaaccggcggggcttctggagcgcaggttgtccccggtctgcctgtccatatcgccccctttcccccaggtttccgcaygggccggaccgtggtcgtgctgggcggaggcatcagcggcttggccgccagttaccacctgagccgggccccctgcccccctaaggtgagtgctccactt

SEQ ID NO: 11972 - DNA, 201 bp, Homo sapiens
aaaataaaaattgctggagcttggcttggtctggctgttctatcacctataggcataagaatgcggggcagcaaagaggcaaagtgtgcctgggatgcagraagcaggagcagatgcgagacaaagtcctttattagaaaatatatcaaaatcccagccccctgagccaggaccagaagagggagctattccagcataggc

SEQ ID NO: 11973 - DNA, 201 bp, Homo sapiens
tgctgggaggttcctggttacagacactggaggctagtggctgtgtcttatctcaggagctgtttcaacagcgggcccaggaagcagctgctacacaattmggactgaaggagatgccgagccactgcttggtccatctacacaaggtaagttgggataaacttccctcagctctccactgaaggccttgaagacagagac

SEQ ID NO: 11974 - DNA, 201 bp, Homo sapiens
gcttctggagcgcaggttgtccccggtctgcctgtccatatcgccccctttcccccaggtttccgcatgggccggaccgtggtcgtgctgggcggaggcaycagcggcttggccgccagttaccacctgagccgggccccctgcccccctaaggtgagtgctccacttgtgccagagggagcttcatttaatgctcttccc

SEQ ID NO: 11975 - DNA, 201 bp, Homo sapiens
tctccatggaagagggaggggcttggggtccagccctgctcctactctaggggcagggactcctaggaatcgtcacataaaatcatgacatcaaggattcrcagtcataagccctacaggagaccctagagagagggacccctcaggtctacaggagcccagctccagtccagcagtgagggagaggcccctaccccctag

SEQ ID NO: 11976 - DNA, 201 bp, Homo sapiens
ggtggcgtctctagccatggacagtctctgccgtggagtgtttgcaggcaacagccgtgagctcagcatcaggtcctgctttcccagtctcttccaagctkagcaaacccatcgttccatattactgggcctgctgctgggggcaggtgaggggggattgattcagagggtgaaaatattaagtactgccaaagtgaggga

SEQ ID NO: 11977 - DNA, 201 bp, Homo sapiens
ggaggctggattcgctccgttcgaggccctaatggtgctatctttgagcttggacctcggggaattaggccagcgggagccctaggggcccggaccttgcycctggtgagaggcttgtgggatgtctaggagaggttgtggagggggcttccattggggaatagagtttaggggaggaagtatgtttggtgggtcagatct

SEQ ID NO: 11978 - DNA, 201 bp, Homo sapiens
gagcaggtttctgagcttggcttggattcagaagtgctgcctgtccggggagaccacccagctgcccagaacaggttcctctacgtgggcggtgccctgcmtgccctacccactggcctcaggtaacaccagcacctccgctccttttactgtgccctcatcctcatatgccttccatttctttcttcttttctttttttt

SEQ ID NO: 11979 - DNA, 201 bp, Homo sapiens
ttcaccccccttctccaaacctctgttttgggctgggctgagggagctgaccaagccccggggcaaagagcctgatgagactgtgcacagttttgcccagygccgccttggacctgaggtgacacttgcccagaggccccaaacctcttccctcctaaaccagctgcagagctccctgttcaaatctaccacctaggggct

SEQ ID NO: 11980 - DNA, 201 bp, Homo sapiens
cccttctccaaacctctgttttgggctgggctgagggagctgaccaagccccggggcaaagagcctgatgagactgtgcacagttttgcccagcgccgccytggacctgaggtgacacttgcccagaggccccaaacctcttccctcctaaaccagctgcagagctccctgttcaaatctaccacctaggggctcttctgt

SEQ ID NO: 11981 - DNA, 201 bp, Homo sapiens
ccaaaccctatcccaccctcattccctaccaaataggggctgtggaaatcagtcagtgtagattattttttcgctccttagtcctagtctcacccttaagrtggcgtctctagccatggacagtctctgccgtggagtgtttgcaggcaacagccgtgagctcagcatcaggtcctgctttcccagtctcttccaagctga

SEQ ID NO: 11982 - DNA, 201 bp, Homo sapiens
ccctcactatgcctttctccatgcagggggctactccgcccttcaccccccttctccaaacctctgttttgggctgggctgagggagctgaccaagccccsgggcaaagagcctgatgagactgtgcacagttttgcccagcgccgccttggacctgaggtgacacttgcccagaggccccaaacctcttccctcctaaac

SEQ ID NO: 11983 - DNA, 201 bp, Homo sapiens
agctagagccctttccttctgacgcatgaatgtccttctctccagggatttggacatttggtgccatcttcagaagatccaggagtcctgggaatcgtgtrtgactcagttgctttccctgagcaggacgggagcccccctggcctcagagtgactgtgaggaggaggaaactttgcctagtggcatttccagagggctcc

SEQ ID NO: 11984 - DNA, 201 bp, Homo sapiens
tctccatgcagggggctactccgcccttcaccccccttctccaaacctctgttttgggctgggctgagggagctgaccaagccccggggcaaagagcctgwtgagactgtgcacagttttgcccagcgccgccttggacctgaggtgacacttgcccagaggccccaaacctcttccctcctaaaccagctgcagagctcc

SEQ ID NO: 11985 - DNA, 201 bp, Homo sapiens
acagtggctttgcctctcccatctcggaccaacttagcccgttccaagtctgtgagcagtggggacttgcgtccaatggggattgccttgggagggcaccrtggcaccggagagcttggggctgcactgagccgcttggccctccggcctgagccacccactttgagacgtagcacttctctccgccgcctagggggcttt

SEQ ID NO: 11986 - DNA, 201 bp, Homo sapiens; identical to SEQ ID NO: 2078

SEQ ID NO: 11987 - DNA, 201 bp, Homo sapiens
gattattttttcgctccttagtcctagtctcacccttaaggtggcgtctctagccatggacagtctctgccgtggagtgtttgcaggcaacagccgtgagstcagcatcaggtcctgctttcccagtctcttccaagctgagcaaacccatcgttccatattactgggcctgctgctgggggcaggtgaggggggattgat

SEQ ID NO: 11988 - DNA, 201 bp, Homo sapiens
ccaagagttcctgaagctcctcatggagcggctacaccttgaaatcaaccgccgaggccgccgggctccaccgatacttgccaatggtccagttccctctmcaccccgccgaggaggggctctgctagaagaacctgagttaaggtaagggtcgttccctctacctcctttccccgtagtttatcagcatcattcacactt

SEQ ID NO: 11989 - DNA, 201 bp, Homo sapiens
gtcagttgcccatactctttgtctggctgtagccagcaggatgcccaagagttcctgaagctcctcatggagcggctacaccttgaaatcaaccgccgagrccgccgggctccaccgatacttgccaatggtccagttccctctccaccccgccgaggaggggctctgctagaagaacctgagttaaggtaagggtcgttc

SEQ ID NO: 11990 - DNA, 201 bp, Homo sapiens
agtctctgccgtggagtgtttgcaggcaacagccgtgagctcagcatcaggtcctgctttcccagtctcttccaagctgagcaaacccatcgttccatatkactgggcctgctgctgggggcaggtgaggggggattgattcagagggtgaaaatattaagtactgccaaagtgagggagtggggacaaggggtgctattc

SEQ ID NO: 11991 - DNA, 201 bp, Homo sapiens
atgttgcctcaggcccttgaaacccacctgactagtaggggggtcagtgttctcagaggccagccggtctgtgggctcagcctccaggcagaagggcgctrgaaggtaggggaacccctggagtgtaatgaacctgtcagtgtttccatctttatccaagtggcttaactaggccagggccgataggactggagttcctca

SEQ ID NO: 11992 - DNA, 201 bp, Homo sapiens
tctcattttctgggtctctcaaatgttttcatgctctcaggtatctctaagggacagcagtctggaggctgaccacgttattagtgccattccagcttcargtaatggaatagccaccttccccttccccaacccctaccagtgagaagcaaaagctataccttcctgggtcagcaggaccacaccatgcccctgaactgg

SEQ ID NO: 11993 - DNA, 201 bp, Homo sapiens
tcatctctatgggagtctaatcccaaagaggactgacaactgtaatgggaatgccttctgagtcaggcctctgcctgatctctagtgctcagtgagctgcyccctgctgaggctgcccctctggctcgtgccctgagtgccatcactgcagtgtctgtagctgtggtgaatctgcagtaccaaggagcccatctgcctgtc

SEQ ID NO: 11994 - DNA, 201 bp, Homo sapiens
ccccacccccccaaaaaaatgggaaggagagacagcctcagctagagccctttccttctgacgcatgaatgtccttctctccagggatttggacatttggkgccatcttcagaagatccaggagtcctgggaatcgtgtatgactcagttgctttccctgagcaggacgggagcccccctggcctcagagtgactgtgagg

SEQ ID NO: 11995 - DNA, 201 bp, Homo sapiens
cctagtggcatttccagagggctcctctgtgctccattgtaggcaaggccagactgatcagtgctatattccctccttaggtgatgctgggaggttcctgrttacagacactggaggctagtggctgtgtcttatctcaggagctgtttcaacagcgggcccaggaagcagctgctacacaattaggactgaaggagatgc

SEQ ID NO: 11996 - DNA, 201 bp, Homo sapiens
gtggcatttccagagggctcctctgtgctccattgtaggcaaggccagactgatcagtgctatattccctccttaggtgatgctgggaggttcctggttayagacactggaggctagtggctgtgtcttatctcaggagctgtttcaacagcgggcccaggaagcagctgctacacaattaggactgaaggagatgccgag

SEQ ID NO: 11997 - DNA, 201 bp, Homo sapiens; identical to SEQ ID NO: 2088

SEQ ID NO: 11998 - DNA, 201 bp, Homo sapiens; identical to SEQ ID NO: 2089

SEQ ID NO: 11999 - DNA, 201 bp, Homo sapiens
attcttctttgcttcctctgcagggcggaccccacagccagactcagcactcattcgccaggccttggctgagcgctggagccagtggtcacttcgtggasgtctagagatgttgcctcaggcccttgaaacccacctgactagtaggggggtcagtgttctcagaggccagccggtctgtgggctcagcctccaggcaga

SEQ ID NO: 12000 - DNA, 201 bp, Homo sapiens; identical to SEQ ID NO: 2091

SEQ ID NO: 12001 - DNA, 201 bp, Homo sapiens
tcctctgcagggcggaccccacagccagactcagcactcattcgccaggccttggctgagcgctggagccagtggtcacttcgtggaggtctagagatgtygcctcaggcccttgaaacccacctgactagtaggggggtcagtgttctcagaggccagccggtctgtgggctcagcctccaggcagaagggcgctggaag

SEQ ID NO: 12002 - DNA, 201 bp, Homo sapiens
tgggaggaaaagaggaaaggcatacttgagtgaggctgcgtgcaggctctggggcgactggtttggtcggcgatgggggagtgccactgttgacaaacacygggtacgttgccgggcggccctagctcccgtaggcccggtctgttgctaacatcaaggagctgtttatggagccgcctccccgtggactggccttaagtg

SEQ ID NO: 12003 - DNA, 201 bp, Homo sapiens
ggaaatcagtcagtgtagattattttttcgctccttagtcctagtctcacccttaaggtggcgtctctagccatggacagtctctgccgtggagtgtttgyaggcaacagccgtgagctcagcatcaggtcctgctttcccagtctcttccaagctgagcaaacccatcgttccatattactgggcctgctgctgggggca

SEQ ID NO: 12004 - DNA, 201 bp, Homo sapiens
ccttaaggtggcgtctctagccatggacagtctctgccgtggagtgtttgcaggcaacagccgtgagctcagcatcaggtcctgctttcccagtctcttcyaagctgagcaaacccatcgttccatattactgggcctgctgctgggggcaggtgaggggggattgattcagagggtgaaaatattaagtactgccaaagt

SEQ ID NO: 12005 - DNA, 201 bp, Homo sapiens
gccactgcatccagcctcaatgattcttctttgcttcctctgcagggcggaccccacagccagactcagcactcattcgccaggccttggctgagcgctgragccagtggtcacttcgtggaggtctagagatgttgcctcaggcccttgaaacccacctgactagtaggggggtcagtgttctcagaggccagccggtct

SEQ ID NO: 12006 - DNA, 201 bp, Homo sapiens
ttacaggcgtgagccaccacgcccgacctgccttccatttcttcatctccctgtcagccttcccagcaaaaggaagccaaatgagtggaaatgaccccagygcctggagctggggaggtatgtcaggagcttccccctcactatgcctttctccatgcagggggctactccgcccttcaccccccttctccaaacctctgt

SEQ ID NO: 12007 - DNA, 201 bp, Homo sapiens
cacacacatacagattgtggtcattttctggcaagaggtccacatcgtgcaagaacaggcagtcccactcttcatcacgcagggcctctcgcaccccaacrttcaacagttttgccctgttaaatgttccatttccagcctggaagataatggaggggaaccagactatgtctgtaggtggcacggagaaaagggggctaa

SEQ ID NO: 12008 - DNA, 201 bp, Homo sapiens
cgggggcaggagggggttttgggggcagaaaggtgggagtggtgagcagctgggcaaccatgccggtgctgggggagttgccccaggagctgcaacgtcarctagctgagcagaggagtaagtgggcaacaggtgggacagccatggctgagtccgtggtacattcagctgtgatgggcttactgctcatgaccagtgagg

SEQ ID NO: 12009 - DNA, 201 bp, Homo sapiens
gttttattggtgaacgtgatccggggccttccaagtcccgccaatccagatgtaggagaggtagggttaggcgcgtgccgcgagaacagagtggacggagmgtaggagagaccgaaaaggctgggggtgggagtagcggatttgaagcacttgttggcctacagaggtgtggcaagcagagcacctcagaactcaggcgta

SEQ ID NO: 12010 - DNA, 201 bp, Homo sapiens
ccagagggagcttcatttaatgctcttcccatttccatcaaaagctagatggatcctggccctctgaatatgcctcttcccctcccctcctgacctctcgscggcggctacaggcggtgctgcagtgtctctccctcttgtcgccaggtggtcctagtggagagcagtgagcgtctgggaggctggattcgctccgttcga

SEQ ID NO: 12011 - DNA, 201 bp, Homo sapiens
tagagccctttccttctgacgcatgaatgtccttctctccagggatttggacatttggtgccatcttcagaagatccaggagtcctgggaatcgtgtatgmctcagttgctttccctgagcaggacgggagcccccctggcctcagagtgactgtgaggaggaggaaactttgcctagtggcatttccagagggctcctct

SEQ ID NO: 12012 - DNA, 201 bp, Homo sapiens
tcacacctgtaatcccagcattttgggaggccgaggtgggcagataacaaggtcaggagttcgagaccagcctggccaacatggtgaaaccccatctctaygaaaaatacaaaaattagccaggtgtggtggcttgcacctgtaatctcagctactcgggaggctaaggcaggagaatcgcttgaacccaggaggtggagg

SEQ ID NO: 12013 - DNA, 201 bp, Homo sapiens; identical to SEQ ID NO: 2059

SEQ ID NO: 12014 - DNA, 201 bp, Homo sapiens
actctaggggcagggactcctaggaatcgtcacataaaatcatgacatcaaggattcacagtcataagccctacaggagaccctagagagagggacccctsaggtctacaggagcccagctccagtccagcagtgagggagaggcccctaccccctagcacggcaccagagttcagttccctcacatccctctgagaacag

SEQ ID NO: 12015 - DNA, 201 bp, Homo sapiens
tatgtcaggagcttccccctcactatgcctttctccatgcagggggctactccgcccttcaccccccttctccaaacctctgttttgggctgggctgaggkagctgaccaagccccggggcaaagagcctgatgagactgtgcacagttttgcccagcgccgccttggacctgaggtgacacttgcccagaggccccaaac

SEQ ID NO: 12016 - DNA, 201 bp, Homo sapiens
tgtgtctttttaatcggggaggggggagggggtggttgtagctccattattttttttattaaaaaatacccttccacctggaggctcccttgtctcccagycccatgtacaaagctcaccaagcccctgcccatgtacagcccccagaccctctgcaatatcactttttgtgaataaatttattaagaaaaaatgatgtgc

SEQ ID NO: 12017 - DNA, 201 bp, Homo sapiens
caaccatgccggtgctgggggagttgccccaggagctgcaacgtcagctagctgagcagaggagtaagtgggcaacaggtgggacagccatggctgagtcygtggtacattcagctgtgatgggcttactgctcatgaccagtgaggtagggagactagaatacctagtgaggggaatagggtagagtttggggatgaaac

SEQ ID NO: 12018 - DNA, 201 bp, Homo sapiens
ctctggcacctgtgaagccctttaaacacccttaagccccaggctccccgtttacctcagagacgtctatttttgtgtctttttaatcggggaggggggarggggtggttgtagctccattattttttttattaaaaaatacccttccacctggaggctcccttgtctcccagccccatgtacaaagctcaccaagcccct

SEQ ID NO: 12019 - DNA, 201 bp, Homo sapiens
gaatgaccacaaccctttcccgatctccttttttcctagtgtctcccctgtcagtgaaaaccaggtggcatccagcgagggctacgtgctgttctaccaaytgatgcaggagccaccccggtgcctgtgacacctctaagctctggcacctgtgaagccctttaaacacccttaagccccaggctccccgtttacctcaga

SEQ ID NO: 12020 - DNA, 201 bp, Homo sapiens
ctagtgtctcccctgtcagtgaaaaccaggtggcatccagcgagggctacgtgctgttctaccaactgatgcaggagccaccccggtgcctgtgacacctytaagctctggcacctgtgaagccctttaaacacccttaagccccaggctccccgtttacctcagagacgtctatttttgtgtctttttaatcggggaggg

SEQ ID NO: 12021 - DNA, 201 bp, Homo sapiens
agcggggctcacaacctgcagggcggtaccggccccctggttctacccggggattccgctccacaatctctgccagtgatggcactgggctaaaggacacygacacaggacccactgttgggaaggaatggcaagtagagggatcagaggggcaaagagaaaagaatcaaactagggtttgggaatacctctgacactggc

SEQ ID NO: 12022 - DNA, 201 bp, Homo sapiens
gagccctttccttctgacgcatgaatgtccttctctccagggatttggacatttggtgccatcttcagaagatccaggagtcctgggaatcgtgtatgacycagttgctttccctgagcaggacgggagcccccctggcctcagagtgactgtgaggaggaggaaactttgcctagtggcatttccagagggctcctctgt

SEQ ID NO: 12023 - DNA, 201 bp, Homo sapiens
tttttttttttttttttgagacggagtatcgctctcgcccaggatggagtgcaatggcgcgatcttggctcactgcaacttccgcctttcgggttcaagcrattctcctgcctcagcctcccgagtagctgggactacaggtgcctaccaccacgtctggctagtttttgtatttttagtagagatggggtttcaccatat

SEQ ID NO: 12024 - DNA, 201 bp, Homo sapiens
tcttttctttttttttttttttttttttttttttgagacggagtatcgctctcgcccaggatggagtgcaatggcgcgatcttggctcactgcaacttccrcctttcgggttcaagcgattctcctgcctcagcctcccgagtagctgggactacaggtgcctaccaccacgtctggctagtttttgtatttttagtagag

SEQ ID NO: 12025 - DNA, 201 bp, Homo sapiens
cgctggagccagtggtcacttcgtggaggtctagagatgttgcctcaggcccttgaaacccacctgactagtaggggggtcagtgttctcagaggccagcsggtctgtgggctcagcctccaggcagaagggcgctggaaggtaggggaacccctggagtgtaatgaacctgtcagtgtttccatctttatccaagtggct

SEQ ID NO: 12026 - DNA, 201 bp, Homo sapiens
ataccccaccccctcataattcccaaaactcattattgggagtgaaggccttcatttccatccgtcacagtgggaatgtcccccaacccaaaccctatccyaccctcattccctaccaaataggggctgtggaaatcagtcagtgtagattattttttcgctccttagtcctagtctcacccttaaggtggcgtctctagc

SEQ ID NO: 12027 - DNA, 201 bp, Homo sapiens
cggggcttctggagcgcaggttgtccccggtctgcctgtccatatcgccccctttcccccaggtttccgcatgggccggaccgtggtcgtgctgggcggargcatcagcggcttggccgccagttaccacctgagccgggccccctgcccccctaaggtgagtgctccacttgtgccagagggagcttcatttaatgctct

SEQ ID NO: 12028 - DNA, 201 bp, Homo sapiens
ctcttgtcgccaggtggtcctagtggagagcagtgagcgtctgggaggctggattcgctccgttcgaggccctaatggtgctatctttgagcttggacctyggggaattaggccagcgggagccctaggggcccggaccttgctcctggtgagaggcttgtgggatgtctaggagaggttgtggagggggcttccattggg

SEQ ID NO: 12029 - DNA, 201 bp, Homo sapiens; identical to SEQ ID NO: 2094

SEQ ID NO: 12030 - DNA, 201 bp, Homo sapiens; identical to SEQ ID NO: 2096

SEQ ID NO: 12031 - DNA, 201 bp, Homo sapiens; identical to SEQ ID NO: 2098

SEQ ID NO: 12032 - DNA, 201 bp, Homo sapiens
agcccaatttgatatgtctaagtcctctatcattttccatgaacagggtatcaagccagcaaaccggatgcactcttcaagttggaacaaggagaacaacygtggacaattgaagatggaatccacagtggagcctgttcaggtgagagaacccacaagacagaaggctatggaagtcacattctagacagtcagagaagg

SEQ ID NO: 12033 - DNA, 201 bp, Homo sapiens
aaatgataaaagatcataaaggttttgtgtgtgtgtgtgtggcgggggtgggttgactatgagtttattttttacttttacttttctgctttttttctttyttccttttttttttttttttaattgagatggggtcttgtcatgttgcccaggctgctcttgaactcctgggctcaagcaatcctcctgcctcccaaagtg

SEQ ID NO: 12034 - DNA, 201 bp, Homo sapiens
aatatttacttcctgtcactgtatctgtttgtggatctatgtctatatatgtattaataaaagtgtgagtatatatgaatctatctgtagatatatatatycattatgatatacacatatatatattttacatgatagaatcatatttcaaagaacatagcagccaacttgaagggactcttcattggccgaagatgctac

SEQ ID NO: 12035 - DNA, 201 bp, Homo sapiens
gaaaagagaaaaagttttcttttcacatattttcttcctaatccacttctgtaaatggttggtaatatttacttcctgtcactgtatctgtttgtggatcyatgtctatatatgtattaataaaagtgtgagtatatatgaatctatctgtagatatatatattcattatgatatacacatatatatattttacatgatag

SEQ ID NO: 12036 - DNA, 201 bp, Homo sapiens
gaaaacttcccagtacttctttaaagcactgctcccagtacctctttagggcactgaccttatatctgctgccggcagactcttcccagggtcccctttcrccttgtcaatttcagttcctctgctccagcagaccttcttcattcacgtccttgaagtcccatgtttggatgctgctagttgggcgtgcttggagtccct

SEQ ID NO: 12037 - DNA, 201 bp, Homo sapiens
ctgtggattttttggatcaggcctgatggaaataggaaaagcacaatgtcctaagggctctccagctatggcagcagagcattaaattctttgtattaggrtttctatttctgccaccgaaggaggcagtacagatgtttctgcaactgaaggaggcagtataggccaatttttatcctccctctcctgttttttattttt

SEQ ID NO: 12038 - DNA, 201 bp, Homo sapiens
ctccgtgtccagcagcatggttctgtttagcctggtctgcacacatttcttgccaatttaaattccatgtcagatatgcactagcagacaagcaagttcgygccaagtgtctcacatcaaagggtaaaaaacgcatagcaccaaacacagattctagcaatcctaaggtgaatgggctctgtatgccatcatttaccactc

SEQ ID NO: 12039 - DNA, 201 bp, Homo sapiens
aaaacaacattattccaagaactacatataagatgttaatgtggtgccttagataggtccaagggttgaggctctccaggccttcctggaattcggtccartcttctaaagaaggctgaaattcttgagtttgcctatttaaatcaataattttgttttgtaattcaccaatatcaaaggtgatgttggatgtgaaagctc

SEQ ID NO: 12040 - DNA, 201 bp, Homo sapiens
gcagaatgctgagttggtcacgtcccacaggcctttggctccctgcatatccccctttctgtttatgtattaattgaaagaatgtaaggctgggctgggargctctcattctccaattggtggtccatccgattttacagactataaaccgaagacagagacaaaacaacattattccaagaactacatataagatgttaa

SEQ ID NO: 12041 - DNA, 201 bp, Homo sapiens
gagaaggggtcagggagcaccttacctctagtggacaagggccctgagctttacacagccctccgtatttattaggcaaaagagataggagggtgggggggtggaagaaggggtcggctgctcagttcagagtaggcttgcaagactgcattctctagatgtcgcagtagataacctcggtgccagggagtgattgcctcc

SEQ ID NO: 12042 - DNA, 201 bp, Homo sapiens
atgacttttaccaagcatactgcctgcaaacacattttaacaaagcacgtcctgcacagccctaaatccattaaaccttgagccaacacagcacacgtttytgagcacagggttggggctagggttacagattaacagtatctcaagacagaggaacttttctttgtacagattaaaatggagtttcttatgtcttcctct

SEQ ID NO: 12043 - DNA, 201 bp, Homo sapiens
ggacaattgaagatggaatccacagtggagcctgttcaggtgagagaacccacaagacagaaggctatggaagtcacattctagacagtcagagaaggcarcacagctgtgaagggggtttgaggatatgtaaacagttcctctactcatctgtctcccagtgtgagaccagtttttctttgtaggaatttagagttaaaa

SEQ ID NO: 12044 - DNA, 201 bp, Homo sapiens
caaaccggatgcactcttcaagttggaacaaggagaacaactgtggacaattgaagatggaatccacagtggagcctgttcaggtgagagaacccacaagrcagaaggctatggaagtcacattctagacagtcagagaaggcagcacagctgtgaagggggtttgaggatatgtaaacagttcctctactcatctgtctc

SEQ ID NO: 12045 - DNA, 201 bp, Homo sapiens
ctgggaccacaggcactcaccactgtgcctagctaattttttaattttttgtacagatggggtctcatgttgcccaggctggtcttgaactcctgggctcragtgaccctcctgccttggcctccgaaagtgctgggattacaggtgtgatctactgtgcctgaccaatactgtgccattttatatcagacacctcagtat

SEQ ID NO: 12046 - DNA, 201 bp, Homo sapiens
tttggttcagacatatcaactataataaccgcatgtggggaggctgaggcgggtgtgtgatgagatccggagttgaaggccagcctgaccaagatgctgaratccgatctctactaaaaatacaaaaatcagccaggcgcggtggcgggccgtaacccacatggacccatgggactgcacaaatgggggtgaacgtgggaa

SEQ ID NO: 12047 - DNA, 201 bp, Homo sapiens; identical to SEQ ID NO: 2314

SEQ ID NO: 12048 - DNA, 201 bp, Homo sapiens; identical to SEQ ID NO: 2315

SEQ ID NO: 12049 - DNA, 201 bp, Homo sapiens; identical to SEQ ID NO: 2316

SEQ ID NO: 12050 - DNA, 201 bp, Homo sapiens; identical to SEQ ID NO: 2318

SEQ ID NO: 12051 - DNA, 201 bp, Homo sapiens; identical to SEQ ID NO: 2311

SEQ ID NO: 12052 - DNA, 201 bp, Homo sapiens
ttgctgattgtctcttttctaaaactaatctgcctaagagttcaccatctcctgaggctggtgctatggtgggtctcatttcctacctgccttcacagtcyttccacggaaacgtcacagaggaaaggcatacctccaccacattaagaatcctagacattattggccacaggtataaaatccgctggggctccaaacaaa

SEQ ID NO: 12053 - DNA, 201 bp, Homo sapiens
aattcttctgcctcagcttctggaataactgtatttttatagagatggggtttcaccatgttggctaggccggtctcggactcctgatgtcaggtgatccrcccgcctcggcatcccaaagtgctgggattacaggcgtgagccactgtgcctggacttactagtgttaattgtaactagagattacatgtagtgtgcaac

SEQ ID NO: 12054 - DNA, 201 bp, Homo sapiens
aacagaagaatcgactttaagacctttttgatgagcctgttttaatccttctcctgctgtatcccaattttccacatcaagagtgcctgcctgtggaaacsatgggttatgtgtaataaccttttgtggcttctgcaggaggttagtgtctgcgaattaacctgagctgcagactgtctcaacagaactttaagcaactgc

SEQ ID NO: 12055 - DNA, 201 bp, Homo sapiens
cctgctgtatcccaattttccacatcaagagtgcctgcctgtggaaacgatgggttatgtgtaataaccttttgtggcttctgcaggaggttagtgtctgygaattaacctgagctgcagactgtctcaacagaactttaagcaactgcacataatgtttttcttcaatagacaaattctttcccttgttaccctgagtca

SEQ ID NO: 12056 - DNA, 201 bp, Homo sapiens
cttgaagtcccatgtttggatgctgctagttgggcgtgcttggagtccctgttctggttgccatttgtaacctgcacggacctaggtggactaaacaaagkggggtgaacacgggaataaagatgagacaaaagagtgtatttggaagaagggatcgggggcgctttgcctctaggggacaagggccctgagctttacaca

SEQ ID NO: 12057 - DNA, 201 bp, Homo sapiens; identical to SEQ ID NO: 2312

SEQ ID NO: 12058 - DNA, 201 bp, Homo sapiens
agcagaatgctgagttggtcacgtcccacaggcctttggctccctgcatatccccctttctgtttatgtattaattgaaagaatgtaaggctgggctgggmggctctcattctccaattggtggtccatccgattttacagactataaaccgaagacagagacaaaacaacattattccaagaactacatataagatgtta

SEQ ID NO: 12059 - DNA, 201 bp, Homo sapiens
gactgcattctctagatgtcgcagtagataacctcggtgccagggagtgattgcctccagcaaaccttatgttggcaggagcagtcctgagtttgctcacrtcctgtattcatgataaacagtttgctgtttgatcatatagcctccagcagaatgctgagttggtcacgtcccacaggcctttggctccctgcatatccc

SEQ ID NO: 12060 - DNA, 201 bp, Homo sapiens
ataagtcctcataactgatatggcaagtcttctaacttttttttcaaactttaaaaaaaagtttatagctatttaaacttttcagtatcagtttgggattrtgactgtgatttcattgaatctgtagatttgggagacttgacatttttaaaatgctttgttttccagcccatctttatagtacatctttgcatttattta

SEQ ID NO: 12061 - DNA, 201 bp, Homo sapiens; identical to SEQ ID NO: 2317

SEQ ID NO: 12062 - DNA, 201 bp, Homo sapiens
tgttattacaggaatccataacactggaggatgtggctgtggacttcacttgggaggagtggcaactcctgggcgctgctcagaaggacctgtaccgggaygtgatgttggagaactacagcaacctggtggcagtgggtgaggacagctgccctgtgtcactcagagggtgcctagtcagtggccttcctttctcagatg

SEQ ID NO: 12063 - DNA, 201 bp, Homo sapiens
tttccaaagaggaaactttgaagtcctcactgttttcggactcccacccctttgtgccccttggctaatgctgacctcccctcctaacacctcccctgtgwtggatgtggcttcctcagggtaaactggactttcgctgtgccttggcttccttcgcttctctttttccttattcttaggttctccaaaggtcccgttctc

SEQ ID NO: 12064 - DNA, 201 bp, Homo sapiens
acaaaacaaaacaaaaactctttatctcctcagagatctgattattttatctacatattgtttgtttgcctgcataattttcttcttcctcgggtttcaartatttcccttcttcatgttgttccacctctcttgttacgaaattccaccttccaggcctctttccaaagaggaaactttgaagtcctcactgttttcgga

SEQ ID NO: 12065 - DNA, 201 bp, Homo sapiens
agcttgtattattaagaataatgcatgtgtgaaaatttgtgtaaatgtcttttggttcatatgtgctctcatatgggggaggcagagatgtatatctagaygtgcacctcggaggaaaattgctgcttcatagagtgtgtataaactccgtctaaatagatgtcaaactgttttctaaagtggttgtaccacttacagttc

SEQ ID NO: 12066 - DNA, 201 bp, Homo sapiens
gtggcttatgcctactttgggaggcttaggcaggaggattccttgagcccaggagtttgagactagcctgggcaatctagtgagaccttgtctatatttartaaaattgaagaaaagagaaaaagttttcttttcacatattttcttcctaatccacttctgtaaatggttggtaatatttacttcctgtcactgtatctg

SEQ ID NO: 12067 - DNA, 201 bp, Homo sapiens
aactaatctgcctaagagttcaccatctcctgaggctggtgctatggtgggtctcatttcctacctgccttcacagtccttccacggaaacgtcacagagsaaaggcatacctccaccacattaagaatcctagacattattggccacaggtataaaatccgctggggctccaaacaaaggtatatagttaactatattgg

SEQ ID NO: 12068 - DNA, 201 bp, Homo sapiens
aaaaagtataaatttcaaaaagcaggatctggagagaagtaagcttagtttttaaactcaatatcatgcaaaatagtaggataaggaatataatgttcatwgcattaacactaaattatgaattttgtgacaccatgcatggctggaggatcctgtggattatattagctgtcagcttgcatctaatatctctgacagcca

SEQ ID NO: 12069 - DNA, 201 bp, Homo sapiens
attgctagtgataggtttgacatggaaatgagcttaggcgtatggtgcaattctagccaactatgtatgtgaaaatctgcctgggagtttctgagggagcrttttcttttttaaatatgtaatttcttgaatctctttttccatgttcgtgatgatatcgcctgaaaataacattaattttctgtcttactttgtaatgct

SEQ ID NO: 12070 - DNA, 201 bp, Homo sapiens
aggcccaggtaactgacttttggtttgttttattctttcctttgttccataatagatttgtagaagcctataaacatcaatttcactaatataaaaagtakaaatttcaaaaagcaggatctggagagaagtaagcttagtttttaaactcaatatcatgcaaaatagtaggataaggaatataatgttcatagcattaac

SEQ ID NO: 12071 - DNA, 201 bp, Homo sapiens; identical to SEQ ID NO: 2313

SEQ ID NO: 12072 - DNA, 201 bp, Homo sapiens
tcacactggagaaatactttcctctggcaaacccctgtggcagggttttcagtaaaatgttttgcctcatcgtgtgctaggaaataatgcagaaaaaactwatgaaaacattcaatgtagaagacttttaggaaaatatcagagaatttaatgaaggaaagaagccttggcaaaatgatggatgagagctttctgtcacaa

SEQ ID NO: 12073 - DNA, 201 bp, Homo sapiens
tatgcagagttacagaagatatcacaacagaagttattagtttgaccaaggaaacaatagcaaaaattatgcctaaggctctatggacacagtgagtaagstgagttagaagaagtgttacaaaaatgcaaagcaggtgtggcagcccaaggctcagacagattaacaagaatccatagcccagggatgcaacccaacatt

SEQ ID NO: 12074 - DNA, 201 bp, Homo sapiens
caaggagaacaactgtggacaattgaagatggaatccacagtggagcctgttcaggtgagagaacccacaagacagaaggctatggaagtcacattctagwcagtcagagaaggcagcacagctgtgaagggggtttgaggatatgtaaacagttcctctactcatctgtctcccagtgtgagaccagtttttctttgtag

SEQ ID NO: 12075 - DNA, 201 bp, Homo sapiens
ctctgaagtggtagattctcagatccttctcttgctcccacacaagacggtgtaatctaccctcttgtaagagaaaaaccttgatgttacagatatgaaaygaaactttcatagtttcagataagaaactaaattttgggtattttaagaaactcaagtttcttgaaatgtaacattcttccttcttgacattgccagccc

SEQ ID NO: 12076 - DNA, 201 bp, Homo sapiens
ttcttttcaacactcataagcttagtgcttccaaaggcaaccttggcagaagaggatgaggcagacgagcagaaagagtagtcacaattcagagaaaggaracccaacaagaaaggactggataaataaataatggtgcatgcatttgatgaattctggagccgccatgagaaataaggctatatgtgaatatttaatgcc

SEQ ID NO: 12077 - DNA, 201 bp, Homo sapiens
tgcttgaaaccatgaggtggaagttgcagtgagctgagaccacaccactgcactccagcctgggtgacagagcaagactccgtctcaaaaaaaaaaaaaaagaatgtgccataggctgggcatggtgatggtggcttacacctgtaatcccaacactttgggaggcccaggtaagacaatcatttgagcccaggagtttga

SEQ ID NO: 12078 - DNA, 201 bp, Homo sapiens
tgtttggtgattggctagttggttgatcagttggttgcttgattggttgttcagctgactggccagttggttgcttggctagttgactaactggtggttcrttggagaattggctggctgcttggttggctagttcttagcttggttgactgattgagtggctggttggcattttggttggtaggttgttttgatggctag

SEQ ID NO: 12079 - DNA, 201 bp, Homo sapiens
gccagttggttgcttggctagttgactaactggtggttcgttggagaattggctggctgcttggttggctagttcttagcttggttgactgattgagtggytggttggcattttggttggtaggttgttttgatggctagttagttggttgcctggttagcaggttggttagttggttgcctggtttgttgtttggctgaa

SEQ ID NO: 12080 - DNA, 201 bp, Homo sapiens
ctgcttgaaaccatgaggtggaagttgcagtgagctgagaccacaccactgcactccagcctgggtgacagagcaagactccgtctcaaaaaaaaaaaaaaagaatgtgccataggctgggcatggtgatggtggcttacacctgtaatcccaacactttgggaggcccaggtaagacaatcatttgagcccaggagtttg

SEQ ID NO: 12081 - DNA, 201 bp, Homo sapiens
caaacaccagctctgttgcttaccagctgtgtggccttgaaaagtcacagtcacagaaagacagtttcttgaaggatacttttgctgggaatagaaccctctttttttttttgcttgagacagagtctcgctctgtcacctaggctggagtgcagtggtgtgatcttggctcactgaaacctccgcctcccaggttcaagg

SEQ ID NO: 12082 - DNA, 201 bp, Homo sapiens
gttttcaccatgttggccaggctggtctcaaactcctgacctcaggtgatccaccaacctcagcctcctaaagtgctgggatgacaggcgtgagccaccayacctggctgtttatcctttctttcatccacccatccctcttcctacccacgcagccacctatccatctttctttctctcaatcacccacccatctctcct

SEQ ID NO: 12083 - DNA, 201 bp, Homo sapiens
ttagcaccattcattcatacagtcactcactcagtccatattcatgagcacctactgtgcaccaggagccagagacatacaggccctgaaggaattggggrcacctggaccacagaacacagacaacaagtgatagggcaggtgtagttttccacatgaggaaaccgaggctctgaaaaataaatcaacttgtgcagagcc

SEQ ID NO: 12084 - DNA, 201 bp, Homo sapiens
ctgacaggtggcagttctcatctgatggtgcggacatcggcttcggagttttcctgaagaccaagatgggggagcgacagcgggcaggggagatgacagakgttctacccagccagcgctataacgcccacatggtgcccgaggatgggaacctcacctgctcagaggccggcgtctgtaagtctgccccagctgggacct

SEQ ID NO: 12085 - DNA, 201 bp, Homo sapiens
ttctcaggtaggggcaggccctaacccctcagagacccatcaggctgagcagcaacctgtctcctccccctccccctgacaggtggcagttctcatctgayggtgcggacatcggcttcggagttttcctgaagaccaagatgggggagcgacagcgggcaggggagatgacagatgttctacccagccagcgctataacg

SEQ ID NO: 12086 - DNA, 201 bp, Homo sapiens
aagttctgtgcatcttttcatgcccaggtgatccagaagtacatgcctgggggcctgtgtggctatgaccgtgatggctgccccgtgtggtatgacatcaytgggccacttgatcccaaggggttgctcttctcagtcaccaagcaggacctgctcaagaccaagatgagggactgtgagcgcatcctgcatgagtgtgac

SEQ ID NO: 12087 - DNA, 201 bp, Homo sapiens
ggagcttataaatccttactttctctttcttcctggtacctgagcctctgcctctacccaattccactgggatggggaacttgatagattatgagggcctrgtttgaagggtccaggctcatgccttctacgccttccaaagcctagagcagtgtgggttaccagcacagtccaggccttaagtccacagcctctgcccca

SEQ ID NO: 12088 - DNA, 201 bp, Homo sapiens
gtgctttttataccatggtgtgtgtaggcttgggccacccaggtcagcctggtctggggtctcaagggaggtgtgtaatgccaagttctgtgcatcttttyatgcccaggtgatccagaagtacatgcctgggggcctgtgtggctatgaccgtgatggctgccccgtgtggtatgacatcattgggccacttgatcccaa

SEQ ID NO: 12089 - DNA, 201 bp, Homo sapiens
tgactaactggtggttcgttggagaattggctggctgcttggttggctagttcttagcttggttgactgattgagtggctggttggcattttggttggtargttgttttgatggctagttagttggttgcctggttagcaggttggttagttggttgcctggtttgttgtttggctgaatcttagatgattatttggatgg

SEQ ID NO: 12090 - DNA, 201 bp, Homo sapiens
agacctggctttgccatttaccctctgtgagcaaggccctcccctgcaggacctcagctttctcacctgagacaatagcactgtcttccagggagggacavtgctttttataccatggtgtgtgtaggcttgggccacccaggtcagcctggtctggggtctcaagggaggtgtgtaatgccaagttctgtgcatcttttc

SEQ ID NO: 12091 - DNA, 201 bp, Homo sapiens
tgagttttctgctccttgaagccaggggctgtgattctccacttttgttgtagccctcacaggcctgggtccatggtggatgctccataggtatttgggtrattgttgtgggtagatgaaaggatggatggatgtttggtgattggctagttggttgatcagttggttgcttgattggttgttcagctgactggccagttg

SEQ ID NO: 12092 - DNA, 201 bp, Homo sapiens
acctaagaagtccaagggcctgctgagacctggctttgccatttaccctctgtgagcaaggccctcccctgcaggacctcagctttctcacctgagacaayagcactgtcttccagggagggacagtgctttttataccatggtgtgtgtaggcttgggccacccaggtcagcctggtctggggtctcaagggaggtgtgt

SEQ ID NO: 12093 - DNA, 201 bp, Homo sapiens
ttatccttacttctatctctccagctaccaaactgttccctgtgggctacaacctcatgaagccattcctgagtgaggacactcgcaggaaaattattgtrttgggaagtaagtagtgccagctcaatttcctgacctctatacatgacctttggagtgaggttgtcccattaccccatctagaactccacacattaggtt

SEQ ID NO: 12094 - DNA, 201 bp, Homo sapiens
ctggtgcagccttccctgtttgctgccttttagggatctccagctgttttatttgtgctcatcctgctttactggctgagttttctgctccttgaagccargggctgtgattctccacttttgttgtagccctcacaggcctgggtccatggtggatgctccataggtatttgggtaattgttgtgggtagatgaaaggat

SEQ ID NO: 12095 - DNA, 201 bp, Homo sapiens
ttaaccttcagaatctgtgttctccatcactaaacccgactcttctccacagaaagggacacgggagacatcaggggcagacctaagaagtccaagggccwgctgagacctggctttgccatttaccctctgtgagcaaggccctcccctgcaggacctcagctttctcacctgagacaatagcactgtcttccagggagg

SEQ ID NO: 12096 - DNA, 201 bp, Homo sapiens
tgtcccaggattgttgtgaggcaggttggtttcttggctgtatgcaaatcacttagaatgcctggcatagagtaagttctcaataaatggtaacttctagkgttggccttactgcaagagaaggcagctccagtcccagctctcccagggatcctcccttatttctcctgtccatgatgatctctccctccccagactgct

SEQ ID NO: 12097 - DNA, 201 bp, Homo sapiens
aaagaagtttagcccatcaaggcactgatgaggacagtgccaccactggcatcttagtagagtaatggtcacgtcttcacttgtagggcatgtacccggakctgggcactctgctttgccaactttatctcagggactttccccaacagtcccaagagtgaggggttatccaaaccattttacaaaaaaagtaggtagaat

SEQ ID NO: 12098 - DNA, 201 bp, Homo sapiens
tgggagaggttgggatcagggggcatcaagaggggcctggtctcaactgctccagagtgtctcatggctctcagggtccatccacacaatcttgcttcacrtgttcaggtccagaggagggaagggggtaggggagcaaggtctcacccaggcccccagtgtcctccatagctcccactggccaggagtaagacaaggcat

SEQ ID NO: 12099 - DNA, 201 bp, Homo sapiens
ccctaacccctcagagacccatcaggctgagcagcaacctgtctcctccccctccccctgacaggtggcagttctcatctgatggtgcggacatcggcttyggagttttcctgaagaccaagatgggggagcgacagcgggcaggggagatgacagatgttctacccagccagcgctataacgcccacatggtgcccgagg

SEQ ID NO: 12100 - DNA, 201 bp, Homo sapiens
gggaaagaagtttagcccatcaaggcactgatgaggacagtgccaccactggcatcttagtagagtaatggtcacgtcttcacttgtagggcatgtacccrgatctgggcactctgctttgccaactttatctcagggactttccccaacagtcccaagagtgaggggttatccaaaccattttacaaaaaaagtaggtag

SEQ ID NO: 12101 - DNA, 201 bp, Homo sapiens
cctgtggaacccgcaggcctgcagtctcctttcctacagtcataatgaatgtttcctgggggcttgcaaggtccaggcctaggttaagatgttagcagcakgagcttctttaatcatcacaatgatggatgctattgtccccattttgtggatgaggacactgaagcccagcaaaaattaggtaacttgcccacagtccca

SEQ ID NO: 12102 - DNA, 201 bp, Homo sapiens
accatgaatgaggggcagcaagcctgagaggcctgtggaacccgcaggcctgcagtctcctttcctacagtcataatgaatgtttcctgggggcttgcaargtccaggcctaggttaagatgttagcagcatgagcttctttaatcatcacaatgatggatgctattgtccccattttgtggatgaggacactgaagccca

SEQ ID NO: 12103 - DNA, 201 bp, Homo sapiens
agttccgagaaaacgtccaggatgtgcttcctgccctgcccaaccctgatgattatttccttctacgctggctccgaggtgagggcagaggtgggagaggytgggatcagggggcatcaagaggggcctggtctcaactgctccagagtgtctcatggctctcagggtccatccacacaatcttgcttcacatgttcaggt

SEQ ID NO: 12104 - DNA, 201 bp, Homo sapiens
tcaaacaccagctctgttgcttaccagctgtgtggccttgaaaagtcacagtcacagaaagacagtttcttgaaggatacttttgctgggaatagaacccyctttttttttttgcttgagacagagtctcgctctgtcacctaggctggagtgcagtggtgtgatcttggctcactgaaacctccgcctcccaggttcaag

SEQ ID NO: 12105 - DNA, 201 bp, Homo sapiens
cttaattttgtaattttagtagagatggggtttctccatgttggtcaggctgctctcgaactcctgacctcaagtgatccacccaccttggcctcccaaartgctgggattataggtgtgagccactgtgcccggccaacacctgctttttggggtggttgtgaggaggcaaacagtgtccagcaggcctgccccagaacc

SEQ ID NO: 12106 - DNA, 201 bp, Homo sapiens
agctgcctcctcctggcaggggacctctggcacacgctccatgcccgcctgcccctccagatctgtccccaagccaagcaggggacctcacttaatcccarttatgtaatctgcaatttaaacagttggcccatgaggaggcgcttggagccacgcccaggagtgggggcaaaaggacccagctgggtcagggctgacaaa

SEQ ID NO: 12107 - DNA, 201 bp, Homo sapiens
tgggaggcccaggtaagacaatcatttgagcccaggagtttgagactagcctgggcaacatagtgaaaccctatctctacaaaaaaaaaccaaacaaaacmaaataaaaattagccaggcatggtggtacatgcttgtagtcccagctacgcaggaggctgaggtgggaggatcacttgagcccaggaagtcgaggctgca

SEQ ID NO: 12108 - DNA, 201 bp, Homo sapiens
tcgcccttacagagctctcagcagctgtaaaggcaaacaagaaataggcgaattttaacccagagggatgagctgggaggggaagctcccagcagacgcaytggcccagtttggagggtcatagaaggcttgaggaggtgggagagtggggctaggatgaagaggatacttccaggaggtggtgaaagtgtctcaggcaga

SEQ ID NO: 12109 - DNA, 201 bp, Homo sapiens
atggcatgaagggaaaccctccagagccatctgaaacctcccaacaggagattgcacaggagatggaggtaggagaagatgtgatgtgctctctgaagggwtctctcttggttccacagttctttggcctccttgaagagaattacccagagaccctgaagttcatgctcatcgtgaaaggtatgtgacaaatgacttcac

SEQ ID NO: 12110 - DNA, 201 bp, Homo sapiens
aattcttttcttcccattatccttacttctatctctccagctaccaaactgttccctgtgggctacaacctcatgaagccattcctgagtgaggacactcrcaggaaaattattgtgttgggaagtaagtagtgccagctcaatttcctgacctctatacatgacctttggagtgaggttgtcccattaccccatctagaa

SEQ ID NO: 12111 - DNA, 201 bp, Homo sapiens
gtttcctgacctacaaaatggggatagcaatgtagggatacttcagcaagttgttatgtaaagtgtatatacactgcttggcaaatagtgaacatttaatmaacagtagtcattattattatactaccattattataatatttactaaaaacaattattatgtaattattattagagtatggttataatagtatgaggtga

SEQ ID NO: 12112 - DNA, 201 bp, Homo sapiens
gggctccctcattgtgactcaaactccagaaggccttaatacctttcctagaagatcccacagaatgggtttcagggacaacactgtactgagaccacacrttccagcttccaccaaaccctctccatgcttgtttcctgacctacaaaatggggatagcaatgtagggatacttcagcaagttgttatgtaaagtgtata

SEQ ID NO: 12113 - DNA, 201 bp, Homo sapiens
tggcacacacaaaaaagtgcttgataaatatcagtttatatttatcagtttatatttatattatggaaaaatggaggatgaataaattaatgacaatatgwatgaatggatggatggttcaattaattgatgagtaagttgatatatacgggggtgggtgggtggatggttggatagatggatggatggatggatggatgg

SEQ ID NO: 12114 - DNA, 201 bp, Homo sapiens
gggaacacaagcctgtcctcctccatggccaggggtggaaaaaagagtgtgtaaagccaagcccaatgcccctctttccatctgtcccccagatgtcctaygcttcgacaacacctatagctttgtccacgccaagaaggtcagcttcacagtggaggtcctgctccctgacgagggcatgcagaaatatgataaggagct

SEQ ID NO: 12115 - DNA, 201 bp, Homo sapiens
tttgttttgcttcagtgttttgaatatgtcatttcacctgtctgagcctcagctccttcacctataaaacagggatatgaataaataatggttgcaaaagygaaatgaaataatgcaagtatgcaatttagcacacagggcctaatatatatttctcaacaatggtagctattgctattccctctgagcctttctttgccc

SEQ ID NO: 12116 - DNA, 201 bp, Homo sapiens
attcaaccattaacccatcctttcatcaatgtgggccattttgcatgtgggaggaaaggagaggttgtgaaaacagtctttgagtctggaggccaaggctsaatgtgagagagccactttaaccagcatctctcttgccagttccgagaaaacgtccaggatgtgcttcctgccctgcccaaccctgatgattatttcctt

SEQ ID NO: 12117 - DNA, 201 bp, Homo sapiens
agtcacagtcacagaaagacagtttcttgaaggatacttttgctgggaatagaaccctctttttttttttgcttgagacagagtctcgctctgtcacctargctggagtgcagtggtgtgatcttggctcactgaaacctccgcctcccaggttcaagggattttcctgcctcggcctcctgagtagctgggattacaggc

SEQ ID NO: 12118 - DNA, 201 bp, Homo sapiens
agtgctgtggagcgatctcagctcactgcagcctctgtctcccaggttcaagcaattctcctgcctcagcctcctgagtagctgggattacaggcatgtgmcaccacacctggctaatttttgtatttttagtagagatgagttttcaccatgttggccaggctggtctcaaactcctgacctcaggtgatccaccaacct

SEQ ID NO: 12119 - DNA, 201 bp, Homo sapiens
cagctgtgtggccttgaaaagtcacagtcacagaaagacagtttcttgaaggatacttttgctgggaatagaaccctctttttttttttgcttgagacagwgtctcgctctgtcacctaggctggagtgcagtggtgtgatcttggctcactgaaacctccgcctcccaggttcaagggattttcctgcctcggcctcctg

SEQ ID NO: 12120 - DNA, 201 bp, Homo sapiens
gagtgctgtggagcgatctcagctcactgcagcctctgtctcccaggttcaagcaattctcctgcctcagcctcctgagtagctgggattacaggcatgtrccaccacacctggctaatttttgtatttttagtagagatgagttttcaccatgttggccaggctggtctcaaactcctgacctcaggtgatccaccaacc

SEQ ID NO: 12121 - DNA, 201 bp, Homo sapiens
gaggaggcaaacagtgtccagcaggcctgccccagaaccccacttcatccaagggggctgggaggtctctgatgaacccaaccatgtgccttcacagcccmgtcatgtgcgtctccaggtgtgagacaatgggatgtaatgaccattgttctcgatgccagtaaagccatgcctgggcacatgccaagaggaggttggtgt

SEQ ID NO: 12122 - DNA, 201 bp, Homo sapiens
ctgttgcttaccagctgtgtggccttgaaaagtcacagtcacagaaagacagtttcttgaaggatacttttgctgggaatagaaccctctttttttttttkcttgagacagagtctcgctctgtcacctaggctggagtgcagtggtgtgatcttggctcactgaaacctccgcctcccaggttcaagggattttcctgcc

SEQ ID NO: 12123 - DNA, 201 bp, Homo sapiens
acaaccacagtcagagggctctggggtcaaacaccagctctgttgcttaccagctgtgtggccttgaaaagtcacagtcacagaaagacagtttcttgaargatacttttgctgggaatagaaccctctttttttttttgcttgagacagagtctcgctctgtcacctaggctggagtgcagtggtgtgatcttggctcac

SEQ ID NO: 12124 - DNA, 201 bp, Homo sapiens
cagctgtaaaggcaaacaagaaataggcgaattttaacccagagggatgagctgggaggggaagctcccagcagacgcactggcccagtttggagggtcayagaaggcttgaggaggtgggagagtggggctaggatgaagaggatacttccaggaggtggtgaaagtgtctcaggcagaagaaacatgaacaatggccag

SEQ ID NO: 12125 - DNA, 201 bp, Homo sapiens
tagctggctttcattactgtttttcacacattaactttggcctcaacttgacaactcaaataatatttataaatacagccacacttaaaatggtcccattrtgaaatacatatttaaatatctatacgatgtgttaaaaccaagaaaatatttgattcttctctgatatttaagaattgaaggtttgaggtagttacgtgt

SEQ ID NO: 12126 - DNA, 201 bp, Homo sapiens
aattcttgtctataaagacccgtatgcttggttttcatgtgatgacagagaaaacaaaacactgcagatatccttcaggacctgacaggaagaaacatttyggattatctggtgaagacgtatgtgcagatcatagccaaaaggtgactttttactaaacttggcccctgccttattattactaattagaggaattaaaga

SEQ ID NO: 12127 - DNA, 201 bp, Homo sapiens
ccagggactttctgcttaggacccctctcatcacttctccaacgctggtatcatgaaccccattctacagatgatgtccactagattaagaatggcatgtraggccaagtttccacctgagagtcagttttattcagaagagacaggtctctgggatgtggggaatgggacggacagacttggcatgaagcattgtataaa

SEQ ID NO: 12128 - DNA, 201 bp, Homo sapiens
gaaataagatgccagatgtaagttgtcaacagttgcagccacatgacagacatagatatatgtgcacacactagtaaacctctttccttctcatccatggktgccacttttatctttttatttttatttttttttttgagatggagtctcgctctgacgcccaggctggagtgcagtggctcgatctcggctcactgcaac

SEQ ID NO: 12129 - DNA, 201 bp, Homo sapiens
ccacttttgttccatttttcccactttgttctttggcacacagaatgtttgatttgtgaaaatcttaataacagtagttttttctataaggaacactcagaatcttgataatattggaataatacagatccttttgtaggatcctctcagacctcatataatagagttcatgtagtcaatatttaaagaaaaacaccctta

SEQ ID NO: 12130 - DNA, 201 bp, Homo sapiens
cccacttttgttccatttttcccactttgttctttggcacacagaatgtttgatttgtgaaaatcttaataacagtagttttttctataaggaacactcagaatcttgataatattggaataatacagatccttttgtaggatcctctcagacctcatataatagagttcatgtagtcaatatttaaagaaaaacaccctt

SEQ ID NO: 12131 - DNA, 201 bp, Homo sapiens
gcacccctaccagcaatgtgggagaaaatagcaacatatttttgatgttggggtctagtgttacggtttcttctgctctttgggatgtatattccatggcwactgaatacccaagtcccaaacagttttcttagactcagaaggtcatccacttcagcttcttcatcaaaaagacatattttctggctgggcacggtggct

SEQ ID NO: 12132 - DNA, 201 bp, Homo sapiens
cccatatttcagaacttgatacatttttaggataaaccatgaatgacacccgtttcttctccctcaccctcccttccctcccattttttttttttttttttagaagctgaataatatcaatgatatcctgaagtccgtgttcttgatcttcccacatttttgcctgggacgagggctcatcgacatggtgaaaaaccaggc

SEQ ID NO: 12133 - DNA, 201 bp, Homo sapiens
attctcctgcctcagcctccctagtagctgggattacaggtgcatgccaccacacccggctaatttttgtatttttagcagagatggggtttcgtcatgtyggccaggctggtctccaactcctgacctcaggtgatccacccacctcggcctcccaaagtgctagaatcacaggtgtgagccgccgcacccggccgctta

SEQ ID NO: 12134 - DNA, 201 bp, Homo sapiens
ttttaaatttggtggaatatgtttttattagcttgtatctttaattcctaaattaagctgtgtgtgtgtgtgtgtgtgtgtgtgtgtgtgtgtgtgtgtgtgaagtttaaagccaggatgagctagtttaaagtatgcagcctttggagtcatacagatctgggtttgaatctggtctctaaactttatagatgtatgata

SEQ ID NO: 12135 - DNA, 201 bp, Homo sapiens
ttgtttgttgcagatatatagaaggaagcggaagcctgctgttgacaggatttgcgtgggcattcctcctggtgaggtaaagacactttgtctatattgcrtttgtccctattagttcagactatctctacccaatcaagcaacgatgctcgttaagaggtaaaagtggattttaaaggcttctgtatttatgccaggatg

SEQ ID NO: 12136 - DNA, 201 bp, Homo sapiens
tagtgaaaccctgtctctgctaaaaacatagaaaaattagccgggcatggtggcgtgcgcctgtaatcccagctactcgggaggctgaggtgagagaattrcttgaacccgggaggcggaggttgcagtgagcccagattgcaccactgcactccagcctgggcgacagagcaagactccatctcaaaaaaagctctcaga

SEQ ID NO: 12137 - DNA, 201 bp, Homo sapiens
ccccgtctctactaaaaatacaaaaattagctgggcgtggtggtgcaagcctgtaatcccagctactcaggaggcttaggcagaagaatcgcttgaacccrggaggcagagattgcagtgagccgagatggtgccactgcacagagcgagactccatctcaaaaaaacaaaacaaaacaaaacaaaaatcttgctttatag

SEQ ID NO: 12138 - DNA, 201 bp, Homo sapiens
tattcattgtatttattttgagatagggtcttgctctgttgcacagggtggagtgcagctgcacagacaaggctcactgcaacctcagcctcctgcgctcrcgtgatcctcatacatcagcctcttaaggagctggggccacaggcacgcaccactgctcctggctaaatttttacaattttttgtaaagacaaggtctca

SEQ ID NO: 12139 - DNA, 201 bp, Homo sapiens
aaaacttcatttgaatttttaatacataagaaaacaataagaaatagttaaaaatatatatttatataatatatatgtgtgtgtgtgtgtgtgtgtgtatrtatatatatatattttatttatttatttttttttgagatggagtctcgctctgttgcccaggctggagtgcagtggctcaatcttggctcactgccacct

SEQ ID NO: 12140 - DNA, 201 bp, Homo sapiens
ctccagagccaacctggcagcagcctgtgggggcatcatctacttcacgctgtacctgccctacgtcctgtgtgtggcatggcaggactacgtgggcttcmcactcaagatcttcgctgtgagtacctctggcctttcttcagtggctgtaggcatttgaccttcctttggagtccctgaataaaagcagcaagttgagaa

SEQ ID NO: 12141 - DNA, 201 bp, Homo sapiens
ggaaaacttcatttgaatttttaatacataagaaaacaataagaaatagttaaaaatatatatttatataatatatatgtgtgtgtgtgtgtgtgtgtgtrtatatatatatatattttatttatttatttttttttgagatggagtctcgctctgttgcccaggctggagtgcagtggctcaatcttggctcactgccac

SEQ ID NO: 12142 - DNA, 201 bp, Homo sapiens
gtagaatgatcttggctcactgcaacttccgcctctcaggttcaggtgattctcctgcctcaacctcctgagtagctgggattacaggtgcgtgccaccayacccggctagtttttgtgtttttagtagggacagggtttcaccatgttggccaggctggtctcaagctcctgacctcaagtgatctgccagcctcagcct

SEQ ID NO: 12143 - DNA, 201 bp, Homo sapiens
aaggagacaattagagatcaatctggaaaacttcatttgaatttttaatacataagaaaacaataagaaatagttaaaaatatatatttatataatatatrtgtgtgtgtgtgtgtgtgtgtgtatatatatatatatattttatttatttatttttttttgagatggagtctcgctctgttgcccaggctggagtgcagt

SEQ ID NO: 12144 - DNA, 201 bp, Homo sapiens
atagactcttctaattatgaagatatctagatgtctagaaaatatcaaaatgcatgtggtttttgcatttctaaaatacttttaaaaccaaatactttttyttttttttttttttctgagatggagtcttgctcttttgcctaggctggagcgcagtagaatgatcttggctcactgcaacttccgcctctcaggttcagg

SEQ ID NO: 12145 - DNA, 201 bp, Homo sapiens
aggtgctttaaggagacaattagagatcaatctggaaaacttcatttgaatttttaatacataagaaaacaataagaaatagttaaaaatatatatttatataatatatatgtgtgtgtgtgtgtgtgtgtgtatatatatatatatattttatttatttatttttttttgagatggagtctcgctctgttgcccaggctg

SEQ ID NO: 12146 - DNA, 201 bp, Homo sapiens
aacctccacctcctgggttcaagagattctcctgcctcagcctcctgagtagctgggactataggcgcacgccaccatgcctggctagtttttgcattttyagtagagacagagtttcaccatgttggccaggatggtctcgatttcctgacctcttgatccacccgcctcggcctcccaaagtgctgggattacaggcgt

SEQ ID NO: 12147 - DNA, 201 bp, Homo sapiens
cacatgcagtgtccctttccaaatcctcccatgccatttatgtccaatgctgttgacctattgggagttcacggtctcgatccctgagggacattttctttgttgtcttggcttctagaagagtatcttttacttgccccctcccaaacacacatttcatggtctcctaacaagctagaagaaagaggtaaagacaagcgt

SEQ ID NO: 12148 - DNA, 201 bp, Homo sapiens
tcacatgcagtgtccctttccaaatcctcccatgccatttatgtccaatgctgttgacctattgggagttcacggtctcgatccctgagggacattttctttgttgtcttggcttctagaagagtatcttttacttgccccctcccaaacacacatttcatggtctcctaacaagctagaagaaagaggtaaagacaagcg

SEQ ID NO: 12149 - DNA, 201 bp, Homo sapiens
atcacatgcagtgtccctttccaaatcctcccatgccatttatgtccaatgctgttgacctattgggagttcacggtctcgatccctgagggacattttctttgttgtcttggcttctagaagagtatcttttacttgccccctcccaaacacacatttcatggtctcctaacaagctagaagaaagaggtaaagacaagc

SEQ ID NO: 12150 - DNA, 201 bp, Homo sapiens
atgacaaagccaaggccacaaatagaactgaaaactcttgatgtcagagatgacctctcttgtcttccttgtgtccagtatggtgttttgcttgagtaatyttttctgaactaagcacaactgaggagcaggtgcctcatcccacaaattcctgacttggacacttccttccctcgtacagagcagggggatatcttggag

SEQ ID NO: 12151 - DNA, 201 bp, Homo sapiens
gcagtgtatgtggtttatagtcctgccttccacagttgcttgggagagctgtgagtcactgaggcttatgaatgtttacattttgtttgttgcagatatayagaaggaagcggaagcctgctgttgacaggatttgcgtgggcattcctcctggtgaggtaaagacactttgtctatattgcgtttgtccctattagttca

SEQ ID NO: 12152 - DNA, 201 bp, Homo sapiens
ctaccacgcccagctaattttgtatttttagtagagatgggttttatccatgttggtcaggctggtctcgagctccagacctcaggtgatctgcccgcctyggcctcccaaagtgctgggattataggcctgagccacagcgctcagccataactttaatttgaaaatgattgtctagcttgatagctctcaccactgagg

SEQ ID NO: 12153 - DNA, 201 bp, Homo sapiens
tgtgtgttgaaaccagtggtacctaacacatttacatcccaaccttaaactcctatgcacttatttaccctttaatgagcctctttacttaagtacagtgkgaggaacagcggcatcaggatcacttgggaacttgttagaaattcagcaacttgggcccagctcagacctactgaatcagaatcaggagcaattctctgg

SEQ ID NO: 12154 - DNA, 201 bp, Homo sapiens
cgtagttacctccttagagtatgaaaaaataggcttagggcatccccaagtcccctctatgtctgagagctgaggctggctgtcaaagaggaactaaggaygccagggactttctgcttaggacccctctcatcacttctccaacgctggtatcatgaaccccattctacagatgatgtccactagattaagaatggcatg

SEQ ID NO: 12155 - DNA, 201 bp, Homo sapiens
ggtcttgaactcctgacctcaggtgatccgcccaccttggcctcccaaagtgctgggattacaggcgcgagccactgtgcccagcccacttcatcttaccrtagttacctccttagagtatgaaaaaataggcttagggcatccccaagtcccctctatgtctgagagctgaggctggctgtcaaagaggaactaaggatg

SEQ ID NO: 12156 - DNA, 201 bp, Homo sapiens
aggtgcccttgaggagctttgtagctggcagaggaggtgaaactgacaaatgtttggcagatggaggagagtaccagaggggtttgagatgagctaaattycaatctaaccgcaggtgtgaggaagaggcttggattgggaccatggagatgggggttctactcccagtcacgccagctgactttgcgagtgttctttgtc

SEQ ID NO: 12157 - DNA, 201 bp, Homo sapiens
atattatttacttgtcttcctgtacacccactgcctagtcctgatcctacttttgtttgcaaataggatggggcacaacgtacaaggaagggcctttgccrcccctgctaagggataacctgaaataccttcaccatcactgccctgtgctgcttttcacctatgccagtctgtctacagtgccagtgtctcctggcattg

SEQ ID NO: 12158 - DNA, 201 bp, Homo sapiens
ttccagtgagcctcctgcctcagcctcccaaatagctgagactacaggcatgtgccaccacgtccggctaatttttgtatttttagtagagacagggtttygccatgttgaccacactggtctcgaactcctggcctcaggtgattcgcccgcctcagcctcccaaagtgctgggattacaggcatgagccaccatgcccg

SEQ ID NO: 12159 - DNA, 201 bp, Homo sapiens
tagtgcaatctccgctcactacaatgtctgcctcccaggttccagtgagcctcctgcctcagcctcccaaatagctgagactacaggcatgtgccaccacrtccggctaatttttgtatttttagtagagacagggttttgccatgttgaccacactggtctcgaactcctggcctcaggtgattcgcccgcctcagcctc

SEQ ID NO: 12160 - DNA, 201 bp, Homo sapiens
gtatacagatcttcctttgagaaaaactgattgtgttcagcctctcatgttacaaatggggaacctgaattctgaggtctctagtgagagaacagggactrgaatctgtggatcctatctgttttaataataattgtaaagtataatagataatattatattaataaaataaaagcaaacacttagaatgagcttccatgt

SEQ ID NO: 12161 - DNA, 201 bp, Homo sapiens
ctctatgttcaggtgctgaggagctggcaaaaggttttaagtcggggagaggcatgttcagatatttggtctagctgagtaactttgggtgctctgtgacraatggttgggagaccagtgaggtggcagttgcggtcatctaggagcaggatcagagtggcctattgactgggatgactgtgaagtgggatcctttccagc

SEQ ID NO: 12162 - DNA, 201 bp, Homo sapiens
tattaggaagtaaaagtaggtataaacttcttataggctgttattatacaactatatgacccatacatatttacaaattaagtgcagccaaaattgcaaartcaataccattcaaattaataccttaaatgtggtgaggcagctgttgttcaactgaaaccaaattataagttgcatggcagtaaatgctatcatgctgat

SEQ ID NO: 12163 - DNA, 201 bp, Homo sapiens
accagggaggaggctctccaagtggccaaggcataaagcaagaaatgaggcctggtgactgcttagtggcagagcagtgaaagagagggaggcatcaaagygagtctcgatttctagctgggtgggtggtagcgatgtccagtaggccagtggctactgaggtctgcagtggaggagggtggttgggctggagacagatga

SEQ ID NO: 12164 - DNA, 201 bp, Homo sapiens
gggctgagaactccacaaagtgccggaatacatttgcatgtaagacagaacgctgcctgggtcattgatgcctgttgagtggcagtcacagacactgcctrgggtttctgactcacgctgttgggactgttctatgcagggcaccctcttgtgtggcataggatttgtgcctcaccacacactgttgtagctttgctgtct

SEQ ID NO: 12165 - DNA, 201 bp, Homo sapiens
attgcttcagtcagatgtttgcgaatagctgtgtgatctcaaaatgttttcctatgtgatctatagaaaatggaatgatagagtattaggctgtaagggcmtaagaaacaaaggaaaaagagaagtgaactgttagtttagttgtaaaacctaactttggtgaattgtaaaaatttgttataatacaatatgattcttgct

SEQ ID NO: 12166 - DNA, 201 bp, Homo sapiens
tctttgcaagagggacaagagtgtgggagatactgagttaatgcaacttgcaggttttaagtgtcctgtcattgtgccttgtgctttgatacattctgagkttcagtaaagagacctgatgcattggactgttgcaatggaacctgttttaagatcttcaaagctgtattgatatgaagttctccaaaagacttcaaggac

SEQ ID NO: 12167 - DNA, 201 bp, Homo sapiens
ctaaatacaagtcctgtgtttttatcacagggaggctgatcaatataatgaaattaaaagggggctggtccatattgttctgtgtttttgtttgtttgttttgtttgtttctttttttgtttttgtggcctccttcctctcaatttatgaagagaagcagtaagatgttcctctcgggtcctctgagggacctggggagct

SEQ ID NO: 12168 - DNA, 201 bp, Homo sapiens
actaaatacaagtcctgtgtttttatcacagggaggctgatcaatataatgaaattaaaagggggctggtccatattgttctgtgtttttgtttgtttgttttgtttgtttctttttttgtttttgtggcctccttcctctcaatttatgaagagaagcagtaagatgttcctctcgggtcctctgagggacctggggagc

SEQ ID NO: 12169 - DNA, 201 bp, Homo sapiens
aactaaatacaagtcctgtgtttttatcacagggaggctgatcaatataatgaaattaaaagggggctggtccatattgttctgtgtttttgtttgtttgttttgtttgtttctttttttgtttttgtggcctccttcctctcaatttatgaagagaagcagtaagatgttcctctcgggtcctctgagggacctggggag

SEQ ID NO: 12170 - DNA, 201 bp, Homo sapiens
aatcacatgcagtgtccctttccaaatcctcccatgccatttatgtccaatgctgttgacctattgggagttcacggtctcgatccctgagggacattttctttgttgtcttggcttctagaagagtatcttttacttgccccctcccaaacacacatttcatggtctcctaacaagctagaagaaagaggtaaagacaag

SEQ ID NO: 12171 - DNA, 201 bp, Homo sapiens
aaactaaatacaagtcctgtgtttttatcacagggaggctgatcaatataatgaaattaaaagggggctggtccatattgttctgtgtttttgtttgtttgttttgtttgtttctttttttgtttttgtggcctccttcctctcaatttatgaagagaagcagtaagatgttcctctcgggtcctctgagggacctgggga

SEQ ID NO: 12172 - DNA, 201 bp, Homo sapiens
tgaggagcagggcattggagtgcagtgggacaacctgtttgagagtcctgtggaggaagatggcttcaatctcaccacttcggtctccatgatgctgtttracaccttcctctatggggtgatgacctggtacattgaggctgtctttccaggtacactgctttgggcatctgtttggaaaatatgacttctagctgatgt

SEQ ID NO: 12173 - DNA, 201 bp, Homo sapiens
atataaatgatgtcacagtgtacaaggctgttgtgggatcaagcaatcaaatgagatcatgcttgtcttttccaaatggtgagggaatagatgcatgtttrtggttgttacggaatgatcctgtgctcctgaggcaacagaaaggccaggccatctctggtaatcctactcttgctgtcttccctttgcagagacacgccc

SEQ ID NO: 12174 - DNA, 201 bp, Homo sapiens
tggaaacataaagttttaaaagttttatgcttcactgtatatgcatttctgaaatgtttgtatataatgagtggttacaaatggaatcattttatatgttrcttggtagcccaccactcccctaaagggactctataggtaaatactacttctgcaccttatgattgatccattttgcaaattcaaatttctccaggtata

SEQ ID NO: 12175 - DNA, 201 bp, Homo sapiens
ggtagaattggctgctcatctcaaccccgctactgactatctctgtgatttacccttcctccagccttagccttgctacatataaaatcaagacaataatrtttcctatctcacagggttgtcctgaggattaaattaagtaattaatataaaatgtgccttgtacatattgggccctaaataaacagtagctactattta

SEQ ID NO: 12176 - DNA, 201 bp, Homo sapiens; identical to SEQ ID NO: 2402

SEQ ID NO: 12177 - DNA, 201 bp, Homo sapiens
ggtggctgggatacacagaatgtagtatcccttgttcacgagaagaccttcttgccctagcatggcaaacagtcctccaaggaggcacctgtgacacccarcggagtaggggggcggtgtgttcaggtgcaggtggaacaaggccagaagtgtgcatatgtgctgaccatgggagcttgtttgtcggtttcacagttgatg

SEQ ID NO: 12178 - DNA, 201 bp, Homo sapiens
ttgaacccaggaggcagaggttgcagtgagctaagatcgcatcattgcactcccgcctgggcaataagagtgaaactccatctcaaaaaaaaaaaaagatrcaaaaatagaaaaaggggcttggtaagggtagtagggttttgggcaatttttttttttttttttttttattgtatggttctaaaggaatggttgattacc

SEQ ID NO: 12179 - DNA, 201 bp, Homo sapiens
ggacagaattgctcccagtattgatcattgtgttctgagatgggggagcaaattgtgcaggaggccaggtcagtgccaaggtgggtgggaggaattggagsaggaagcttgcctaagtgtgcccagcaaagccacggtagaactttctactgtggctctatgctacttcttagcaaccttctccatgtgcttcctggagag

SEQ ID NO: 12180 - DNA, 201 bp, Homo sapiens
ttatattagtagggatgggtaagaggtgttttggtctggttggttggttagttgctatgactcagaattgctaagaaaacagaaaagtaagataagatcaytgttttaacctcttttcctccacaaaatcaataaataacatatccctaaattactcttagaatttctcttaaattgcagtgaaaaaccaaaatccttcat

SEQ ID NO: 12181 - DNA, 201 bp, Homo sapiens
acctgaggggtagggaggtcctgcctacagtctccgtgcgctcagctgagctggtgtccctggcgcagagcgcggacgagttttgtttccttttctttttyttttttttctttcctttaagtctcggtctgtcgcccaggctggagtgcaatggaacgatctccgctcactgcaacctccgcctcccgggttcaagcgatt

SEQ ID NO: 12182 - DNA, 201 bp, Homo sapiens
agcacatctgtgcaggcctctgcctcggcccctctggatctgctgattgagcagcggattgatctgtccttctctttcgtgttgacccatgtgaggaaccractggcaagggaacaagaaatggaaataggcctcctttgcatcatgacctgtacatcctgcaattggaaaagattgtactttagttggtttaaccagcag

SEQ ID NO: 12183 - DNA, 201 bp, Homo sapiens
ggtcggccagtacctacggagacaaatgccagcactgagtcttcactcggttcttaagaagctggtctgttctgacctgggaattggctatatgctccccsggactggagcggcacagtcccggactgtgaatccgggaactcgagttggaggtgtcccaaacggtccgtggtgctattgctcactagaggccttgggtct

SEQ ID NO: 12184 - DNA, 201 bp, Homo sapiens
ctccaattcggtagaaccagagcttcatcttctctgtcgaagctgtgacaggagttgcaaatgcctctcctttttgctgagtttgcagctgctgtttttcyggcagcacatctgtgcaggcctctgcctcggcccctctggatctgctgattgagcagcggattgatctgtccttctctttcgtgttgacccatgtgagga

SEQ ID NO: 12185 - DNA, 201 bp, Homo sapiens
gtggcccttcccctcccctctgtgctctatagctcagtcttcccaggcggtgtgaacacgcagtgacatttccaggaatacagggatttattaatgatttmttgtgaaatgtttggaaatacaaagtactctataaatatttcataatagcattggggctgagaactccacaaagtgccggaatacatttgcatgtaagac

SEQ ID NO: 12186 - DNA, 201 bp, Homo sapiens
ctcaccccacaggtcccagggcacctctctcgggcaagtcttggaaccctctgacactgatttgctctcttttctgagctgcttttagccacccatcctcrggacctgttttctctctgcctccacccctgcgggcagtcttaggtctcctgcccctcacgagcaccccagagaggccacgtgctcagtgatctcagtggg

SEQ ID NO: 12187 - DNA, 201 bp, Homo sapiens
gtgctagatgccccctctctggagaaaaaaaatccttgtggcctctgacccacctctggagagcctagttcccttctggaggcagaaggcaaagcttaggwcctagagagtgctggaccacgccactcacaggaaccagcaggctgtgaggttgaaagctaggcatatggagctttccaggctgggtgcagggcctcgtgg

SEQ ID NO: 12188 - DNA, 201 bp, Homo sapiens
tgtgggtggaagaaaagggaacctcttccaactgttttctttgcttcttccctctctttctctttttttttttttttggacagagtcttgctctgtcaccyaggctgaaatgcagtggcatgatcttggctcaccacagcctccgcctcctgggttcaagcaattctcctgtctcagcctccagagtagctgggattacag

SEQ ID NO: 12189 - DNA, 201 bp, Homo sapiens
atttggctagctggctttcattactgtttttcacacattaactttggcctcaacttgacaactcaaataatatttataaatacagccacacttaaaatggwcccattatgaaatacatatttaaatatctatacgatgtgttaaaaccaagaaaatatttgattcttctctgatatttaagaattgaaggtttgaggtagt

SEQ ID NO: 12190 - DNA, 201 bp, Homo sapiens
aatctgatctttgggaatacagctacattttataggcttcttagataatgttactctaagtactttaaatatgtggggcttctctgggcttttttttttttgagacggagtttcactcttactgcccaggctggagagcaatggcgcgaccttggctcactgcaacctccgcctcccaggttcaagcgattctcctgcctc

SEQ ID NO: 12191 - DNA, 201 bp, Homo sapiens
taatgtttcagcactgtggatgcaaagtgagcaggataaacaggctcttctttcaaagcttgtggtccactggaccacgtatgaagtagaatagtttaggyccagaaaggcaattaagtaaaatatgaccaagaagaggctctctagtgggtttggtataaagaaaagataagaatgatttagaattggcctatcaatgag

SEQ ID NO: 12192 - DNA, 201 bp, Homo sapiens
ttacagacatgacccactgcacccggcctgttgtcagtattcttaaacatagacactaactgtaggctgacagcctagcagcaaggaccagttaaagaaaygagtagaactgaagtgtgcttgagtatctctggcagtcagcaaaaacttaatgggaatcatggtaggccaaatgttctgcagtatttcaaaagctgcatg

SEQ ID NO: 12193 - DNA, 201 bp, Homo sapiens
aaccttctctgcatccgtttataattggaaattgacctgcaccagggaaagagagtagcccaggtgtctggggcttgttcccattagatcttccccaaggrgtttttctccttggtggctggcctgtggggcccctctccaggaggcattggtgaagaaactaggggagctggttgccacagacagtgatgtactaatctt

SEQ ID NO: 12194 - DNA, 201 bp, Homo sapiens
gcaggcatttcttggggatggggaggactggcacagggctgctgtgatggggtatcttttcagggaggagccaaagcgctcattgtctgtgcttctcctcctttttctgcggtccctggctccccacctgactccaggtgaacaagaccttccaggaactggctgtgttccatgatctggaaggcatgtgggaggaactca

SEQ ID NO: 12195 - DNA, 201 bp, Homo sapiens
tcattcctcttcttgtgagcgctggcctgctagtggtcatcctgaaggtaaggcagcctcactcgctcttccctgccaggaaactccgaaatagctcaacrcgggctaagggaggagaagaagaaaaaaaatccaagcctctggtagagaaggggtcatacctgtcatttcctgcaatttcatccatttatagttggggaa

SEQ ID NO: 12196 - DNA, 201 bp, Homo sapiens
agcaggcatttcttggggatggggaggactggcacagggctgctgtgatggggtatcttttcagggaggagccaaagcgctcattgtctgtgcttctcctcctttttctgcggtccctggctccccacctgactccaggtgaacaagaccttccaggaactggctgtgttccatgatctggaaggcatgtgggaggaactc

SEQ ID NO: 12197 - DNA, 201 bp, Homo sapiens
cgatctcctgacctcgtgatccgcctgtctcggcctcccaaagtgctgggattacaggcgtgaaccactgcgccctgttgagaatttttttttttttttttgggagacggagtttcgctcttgttgcccgggctagagtgcagtgacacaatctcggctcactgcaacctctgcctcctgggttcaagcgattctcctgcc

SEQ ID NO: 12198 - DNA, 201 bp, Homo sapiens
gctccgcctcccgggttcacgccattctcctgcctcagcctcctgagtagctggaactgcaggtgcccgccaccatgcccagctaatttttttttttttttgtattttgagtagagacggggtttcactgtgttagccaggatggtctcgatctcctgacctcgtgatccgcctgtctcggcctcccaaagtgctgggatt

SEQ ID NO: 12199 - DNA, 201 bp, Homo sapiens
aggatgagagcagttcctgataggctcaaccacaatgagatgtagctgttcagagaaagcattcttttatctataaactggaagataatcccggtgaaacraagcccagccccaggggcttcactaactccaggctgtgcttctcaaactttagtgagcataggaatcacctgggcatcttgtgaagctgtagatttgaat

SEQ ID NO: 12200 - DNA, 201 bp, Homo sapiens
agagacatgacgtgacttttcaaaggctgtaagctgacgagggacatagctagggttcagacttgagtttttctttttctttttctttttcttttttttttaagactgagtcttgcttttgtcgcccaggctggattgcagtggtgcttggctcactgcaacctctgcctcccgggttcaagcaattctcctgcctcagcc

SEQ ID NO: 12201 - DNA, 201 bp, Homo sapiens
cagagacatgacgtgacttttcaaaggctgtaagctgacgagggacatagctagggttcagacttgagtttttctttttctttttctttttcttttttttttaagactgagtcttgcttttgtcgcccaggctggattgcagtggtgcttggctcactgcaacctctgcctcccgggttcaagcaattctcctgcctcagc

SEQ ID NO: 12202 - DNA, 201 bp, Homo sapiens
tcagagacatgacgtgacttttcaaaggctgtaagctgacgagggacatagctagggttcagacttgagtttttctttttctttttctttttcttttttttttaagactgagtcttgcttttgtcgcccaggctggattgcagtggtgcttggctcactgcaacctctgcctcccgggttcaagcaattctcctgcctcag

SEQ ID NO: 12203 - DNA, 201 bp, Homo sapiens
atgcctgggctctttctgatagttttccttttttaattgtcccctcctcattgttaccttggggatttcaagagattcatgtagcttctaaatcaacgaastgattcctggagagcagcttctgtatgagaaaaatctagctaattatttatttcagtgtctctggaatgcaagctctgtcctgagccacttagaaaacaa

SEQ ID NO: 12204 - DNA, 201 bp, Homo sapiens
ctcagagacatgacgtgacttttcaaaggctgtaagctgacgagggacatagctagggttcagacttgagtttttctttttctttttctttttcttttttttttaagactgagtcttgcttttgtcgcccaggctggattgcagtggtgcttggctcactgcaacctctgcctcccgggttcaagcaattctcctgcctca

SEQ ID NO: 12205 - DNA, 201 bp, Homo sapiens
gtttcccctcctgctttatctttcagttaatgaccagccacggcgtccctgctgtgagctctggccgctgccttccagggctcccgagccacacgctgggsgtgctggctgagggaacatggcttgttggcctcagctgaggttgctgctgtggaagaacctcactttcagaagaagacaaacagtaagcttgggtttttc

SEQ ID NO: 12206 - DNA, 201 bp, Homo sapiens
actcagagacatgacgtgacttttcaaaggctgtaagctgacgagggacatagctagggttcagacttgagtttttctttttctttttctttttcttttttttttaagactgagtcttgcttttgtcgcccaggctggattgcagtggtgcttggctcactgcaacctctgcctcccgggttcaagcaattctcctgcctc

SEQ ID NO: 12207 - DNA, 201 bp, Homo sapiens
ttcaaagggctataagggactttggagagaatttcattcagttttcctcaaactagaataatgcttgcactgtctgtaaaagaacaaaagtgtcaaagcayccttttgttcactaaatttccttttttattatagtgttacttaaatattaggaagtaaaagtaggtataaacttcttataggctgttattatacaactat

SEQ ID NO: 12208 - DNA, 201 bp, Homo sapiens
tgcctaatcgcttttcagtggtgtcattattttgcctattctccatctgagaatattgaagtttctgactccttccttgcctttctccctgcctcccgtgkttatccccaggtcttggtgttccagtcctctatgtccgtccttactcttattcctttgctacagtgtgatccagggctcctgccccttcttatcctggta

SEQ ID NO: 12209 - DNA, 201 bp, Homo sapiens
gagggtttatgtttaggaaaagtgctaagcttagagaaggaggagaaatctgattttattaatgagtgtagccataatggcatatcctggcagaagtcaastttggtttctagagggaggctattatgaaaagaaatacctggaacattcccctgggtttggaaggtgagttctaggttcaatgatgggaagaattttaga

SEQ ID NO: 12210 - DNA, 201 bp, Homo sapiens
gatgggaagaattttagaggtccaagataaaagggcaaagattaaattttgtctctcatgagttctctggctcaggtggtgtgaactttgcagacagtctytttaattcactcatacatgctagtctcccagctcagcaagggctttgagagagcaggtgtctgtatgctctggtaagtgaaggcaaagtgcataaggagg

SEQ ID NO: 12211 - DNA, 201 bp, Homo sapiens
  misc_feature (1)...(201): n = A,T,C or G, or insertion/deletion polymorphism (see Tables 1-2)
gaggattcttcaaatgcacaggaccgtgatgtgagttaggacggagtaaggacgatgggatgtggctcaggacaatcctgaggaagctgcagctgcggcangcagggccacactgtcatgttcatggaccctagactggctttgtagcctccatgggccccttccatacacaaatattaaaaattatatttcatgactgca

SEQ ID NO: 12212 - DNA, 201 bp, Homo sapiens
gtgctttaaggagacaattagagatcaatctggaaaacttcatttgaatttttaatacataagaaaacaataagaaatagttaaaaatatatatttatatwatatatatgtgtgtgtgtgtgtgtgtgtgtatatatatatatatattttatttatttatttttttttgagatggagtctcgctctgttgcccaggctgga

SEQ ID NO: 12213 - DNA, 201 bp, Homo sapiens
tccttggggcctccagctttctgcgggtgatgagccggtcaatgcccctcttcatgacgctggcctggatttactcagtggctgtgatcatcaagggcatygtgtatgagaaggaggcacggctgaaagagaccatgcggatcatgggcctggacaacagcatcctctggtttagctggttcattagtagcctcattcctc

SEQ ID NO: 12214 - DNA, 201 bp, Homo sapiens
cagatgtctctgctatctccaacctcatcaggaagcatgtgtctgaagcccggctggtggaagacatagggcatgagctgacctatgtgctgccatatgargctgctaaggagggagcctttgtggaactctttcatgagattgatgaccggctctcagacctgggcatttctagttatggcatctcagagacgaccctgg

SEQ ID NO: 12215 - DNA, 201 bp, Homo sapiens
ttgtcgggtattttgattaatagtttatgtggcttcattaattcagagttactctccaatatgtttatctgccctttcttgtctgataatggtgaaaactygtgtgatgcattgtatatttgatttaggggtgaactggatgtctttgttttcacttttagtgcaattacgttgtccctgccacactggtcattatcatct

SEQ ID NO: 12216 - DNA, 201 bp, Homo sapiens
agaaaccatactgggcagggccgacttcaccctaaaggctgcgtctcttcactctgcttttgtttgttccaaataaagtggcttcagaattgctaaccctrgcctctgtgaacttgtgaggtacaattttgtgtctgttatgttaacaaaaatacatacataccttcctggtgatggtataaattgctattctctattgga

SEQ ID NO: 12217 - DNA, 201 bp, Homo sapiens
gtccaaaattcatttgggtcaatgttatgtcttagtgttatcttccatttccttctgagcttcaaagccaggctgactgtgcccttccacgccctggccaktgtgaccaggacatcctttccctctggggctgcactggctctttgggggaattgttaccattcagggtcttcaaccctcattctagggacttccagtaac

SEQ ID NO: 12218 - DNA, 201 bp, Homo sapiens
gctggttgtggcatgggttttgtgacacaaccatttgtctgtgtctctgatagcattgagaaaagtgaaagggcagttttgaaggtaaggaaaatagtgtyatttgcttggatccactggctcatgccactgtctgggttggttagaagcactggaaaagtcaaaccataactttgagaattaggtgatcagggaatcaga

SEQ ID NO: 12219 - DNA, 201 bp, Homo sapiens
agctggttgtggcatgggttttgtgacacaaccatttgtctgtgtctctgatagcattgagaaaagtgaaagggcagttttgaaggtaaggaaaatagtgktatttgcttggatccactggctcatgccactgtctgggttggttagaagcactggaaaagtcaaaccataactttgagaattaggtgatcagggaatcag

SEQ ID NO: 12220 - DNA, 201 bp, Homo sapiens
gtgagagcccaggagatgaggaacagccttccagatttttcttgggtagcgtgtgtaggaggccagtgtcaccagtagcatatgtggaacagaagtcttgrcccttgctatctctgcctagtcctaatggctggcttttcccaggaaggcttctgcttccatggactgttagattaaccctttatttaggtaaatgaggga

SEQ ID NO: 12221 - DNA, 201 bp, Homo sapiens
gggccatggtttttgatccctccattctgaccggatctctgcattgtgtctactaggggagaatcgctttgtgtcaccattatcttgggacttggtgggaygaaacctcttcgccatggccgtggaaggggtggtgttcttcctcattactgttctgatccagtacagattcttcatcaggcccaggtgagctttttctta

SEQ ID NO: 12222 - DNA, 201 bp, Homo sapiens
agtggacactgaataccagggatgaggagctgagggccaagccaggagggtgggatttgagcttagtacataagaagagtgagagcccaggagatgaggarcagccttccagatttttcttgggtagcgtgtgtaggaggccagtgtcaccagtagcatatgtggaacagaagtcttgacccttgctatctctgcctagtc

SEQ ID NO: 12223 - DNA, 201 bp, Homo sapiens
ctggggtatccagtagggcccagagctgacctgcctccctgtccccaggctgactgtcgaagaacacatctggttctatgcccgcttgaaagggctctctragaagcacgtgaaggcggagatggagcagatggccctggatgttggtttgccatcaagcaagctgaaaagcaaaacaagccagctgtcaggtgcggccca

SEQ ID NO: 12224 - DNA, 201 bp, Homo sapiens
aagatagggaacttcacatacagtaccttttctcccaaggcggaagagggctgttcaatttctacactagagttcggggagttttagaaatgagtcagttrtcgaggatgagagcagttcctgataggctcaaccacaatgagatgtagctgttcagagaaagcattcttttatctataaactggaagataatcccggtga

SEQ ID NO: 12225 - DNA, 201 bp, Homo sapiens
cagaaccgtcagctacactgtgtcccatcctgctgtgttgtggttgtgccttgtggatgcgttggtttatgaccaggtattgattaaggtggctactaccrggtgctttctgcatatctcgggtttgtggagcactcaggttctgcttctgcccctctgctgttaccaagagacctctcttcaaaatggggctcttgagtt

SEQ ID NO: 12226 - DNA, 201 bp, Homo sapiens
ttttaaagaatactttcattgcaaattggaaacttcgtttaaaaaatgctcatactaaaattggcatttctaacccataggcccacttgtagttatttacygaagcaaaaggacagctttgctttgtgtgggtctggtagggttcattagaaaggaatgggggcggtgggagggttggtgttctgttctctctgcagactg

SEQ ID NO: 12227 - DNA, 201 bp, Homo sapiens
tggcagctctgcttcctgacctttcaccctcaggaagcgaggctgttcacacggcacacacatgccagacagggtcctctgaagccacggctgccagtgcrtgtgtcccagggaaagctttttcctttagttctcacacaacagagcttcttggaagccctccccggcaaaggtgctggtggctctgccttgctccgtccc

SEQ ID NO: 12228 - DNA, 201 bp, Homo sapiens
gaacagaagatgattgtcttttccaatgggacatgaaccttagctctagattctaagctctttaagggtaagggcaagcattgtgttttattaaattgttwacctttagtcttctcagtgaatcctggttgaattgaattgaatggaatttttccgagagccagactgcatcttgaactgggctggggataaatggcattg

SEQ ID NO: 12229 - DNA, 201 bp, Homo sapiens
caatgggcggaggtgtagttattgcagacatctgaaatatgtaatgtttcttccagattctggaaattctcttattctctgtggttggtggtggtggtggsatgtgtgtgtgtgtgtgtgtgtgtgtgtgtgtgtgtagggatcaggatgcgggaggagctgggttctgcttgtattggttctctgttttgcattgaatag

SEQ ID NO: 12230 - DNA, 201 bp, Homo sapiens; identical to SEQ ID NO: 2351

SEQ ID NO: 12231 - DNA, 201 bp, Homo sapiens; identical to SEQ ID NO: 2343

SEQ ID NO: 12232 - DNA, 201 bp, Homo sapiens
ttttaaaagttttatgcttcactgtatatgcatttctgaaatgtttgtatataatgagtggttacaaatggaatcattttatatgttacttggtagcccaycactcccctaaagggactctataggtaaatactacttctgcaccttatgattgatccattttgcaaattcaaatttctccaggtataatttacactagaa

SEQ ID NO: 12233 - DNA, 201 bp, Homo sapiens
tggcaatgccgaaaacacctaagataataggtgaccttcagtgttggcttcttgcagaatccagagagacagacttgctcagtgggatggatggcaaaggrtcctaccaggtgaaaggctggaaacttacacagcaacagtttgtggcccttttgtggaagagactgctaattgccagacggagtcggaaaggattttttg

SEQ ID NO: 12234 - DNA, 201 bp, Homo sapiens
ttgtgacctgaactaggtagatggttgtgttaaaaatgcagtgggtatttcagtctgaagctcaggggcaatgatggaaaataagataaatgtgtgcaagytggctgggcgtggtggtgcacgcctataatcacagcactttgggaggccgagacgggtggatcacttgaggtcaggcgtttgcgaccagcctaacatggt

SEQ ID NO: 12235 - DNA, 201 bp, Homo sapiens
ctatctcattcctgtgtgtgtttagccaggcaactgttgatcatcaatattatgataacgtttctccactgtcccattgtgcccactttttttttttttttgagttacttactaaataaaaataaaacactatttctcaatagacttgaagcttcaagatttcctggtggacaatgaaaccttctctgggttcctgtatca

SEQ ID NO: 12236 - DNA, 201 bp, Homo sapiens
ccagcctgggcgacagagccagactccatctaaataaataaatagataaataaataaaataaaataaaaacttgtagggaggtggcagtgtgctatggagrataggtgcaacctctgtgagaatgtagagaaaatagtataagtgagtggtgaggacccccaagagggggttttatagtaaaacaatggtcagaagtggca

SEQ ID NO: 12237 - DNA, 201 bp, Homo sapiens
aatacaagtcctgtgtttttatcacagggaggctgatcaatataatgaaattaaaagggggctggtccatattgttctgtgtttttgtttgtttgttttgyttgtttctttttttgtttttgtggcctccttcctctcaatttatgaagagaagcagtaagatgttcctctcgggtcctctgagggacctggggagctcag

SEQ ID NO: 12238 - DNA, 201 bp, Homo sapiens
ggccctgcattcctcattgccgtgctggttggtcggggaggtgggctggactcgtagggatttgccccttggccttgtttctaacacttgccgtttcctgytgtccccctgccccctccactgcctgggtaaagattgtcttgccagctgtgtttgtctgcattgcccttgtgttcagcctgatcgtgccaccctttggca

SEQ ID NO: 12239 - DNA, 201 bp, Homo sapiens
attctggttttctactcaccagatagattctcttaaaaccagggaaagattcctggaggaaggatgtatctggaaagagatgttccttattataataaaaygaaattgtaatactcttggattttgtgcagcacgaattctttatagagagttggtcctcccagagaattaagaatactcagtttctggaccctgttccca

SEQ ID NO: 12240 - DNA, 201 bp, Homo sapiens
aataaacatttatagcctcctgcctgcctgagaaaccagggtggacatggagagaaggcacttctgaaagttcaagcgcagtgcgctgtgtccttacactscactcctcagtgctttctgtgggttcatttctgtcttctctcctgtcacagtctgcatggaggaggaacccacccacttgaagctgggcgtgtccattca

SEQ ID NO: 12241 - DNA, 201 bp, Homo sapiens
tctctgagaagcacgtgaaggcggagatggagcagatggccctggatgttggtttgccatcaagcaagctgaaaagcaaaacaagccagctgtcaggtgcrgcccagagctaccttccctatccctctcccctcctcctccggctacacacatgcggaggaaaatcagcactgccccagggtcccaggctgggtgcggttg

SEQ ID NO: 12242 - DNA, 201 bp, Homo sapiens
tgctcatattatccccatgttgaaatagcaagatgggaagtgcaaagtggtgcttcggtactcttggagcagctttgactttggtgagaaacgccttttawaaacaatgtttcttcccatcttcccaccccatggggaggtgtggggttgggtgggtaggcaccaaagcaagatttagaagagttttctgtaggaatttat

SEQ ID NO: 12243 - DNA, 201 bp, Homo sapiens
gccccctctctggagaaaaaaaatccttgtggcctctgacccacctctggagagcctagttcccttctggaggcagaaggcaaagcttaggacctagagartgctggaccacgccactcacaggaaccagcaggctgtgaggttgaaagctaggcatatggagctttccaggctgggtgcagggcctcgtggcccttcccc

SEQ ID NO: 12244 - DNA, 201 bp, Homo sapiens
ctaggtgacagggtgagactccgtctcaaaataaaaaaaaaaaaagaaaaggaaaggctgtgtgtgtgtgtatgtgtgtgtgtgtgtgtgtgtgtgtgtgtaacagcaccatcacactgtttgagttgaggagcacatgctgagtgtggctcaacatgttaccagaaagcaatattttcatgcctctcctgatatggcgat

SEQ ID NO: 12245 - DNA, 201 bp, Homo sapiens
caaactaaatacaagtcctgtgtttttatcacagggaggctgatcaatataatgaaattaaaagggggctggtccatattgttctgtgtttttgtttgttkgttttgtttgtttctttttttgtttttgtggcctccttcctctcaatttatgaagagaagcagtaagatgttcctctcgggtcctctgagggacctgggg

SEQ ID NO: 12246 - DNA, 201 bp, Homo sapiens
gaagagccaccctggttccaaccagaagagaatatcagaaagtaagtgctgttgacctcctgctctttctttaacctagtgctgctgcctctgctaactgytgggggcaagcgatgtctcctgcctttctaaaagactgtgaaaccactccaggggcagagaaatcacatgcagtgtccctttccaaatcctcccatgcca

SEQ ID NO: 12247 - DNA, 201 bp, Homo sapiens
tatccaggattctggttttctactcaccagatagattctcttaaaaccagggaaagattcctggaggaaggatgtatctggaaagagatgttccttattayaataaaatgaaattgtaatactcttggattttgtgcagcacgaattctttatagagagttggtcctcccagagaattaagaatactcagtttctggaccc

SEQ ID NO: 12248 - DNA, 201 bp, Homo sapiens
aactataaaacagccaatatttattaggcactgatttcatgccagagacactctgggcatgaaagaaagtaatgataatagttaattttatatagcgttgwtaccatttacaaccttttttttttttttaacctctatcatctcaattaaagtgcagagagaccctgggaagaaggtaactatatttattatcccagatga

SEQ ID NO: 12249 - DNA, 201 bp, Homo sapiens
tgttaaagcttagagagtggtgggagagactggagaagttgattaattagtaaatgaagttgtctgtggatttcccagatcccagtggcattggatatccrtattatttttaaatttacagtgttctatcttatttcccactcagtgtcagctgctgctggaagtggcctggcctctatttatcttcctgatcctgatctc

SEQ ID NO: 12250 - DNA, 201 bp, Homo sapiens
tgggttcatttctgtcttctctcctgtcacagtctgcatggaggaggaacccacccacttgaagctgggcgtgtccattcagaacctggtaaaagtctacygagatgggatgaaggtggctgtcgatggcctggcactgaatttttatgagggccagatcacctccttcctgggccacaatggagcggggaagacgaccac

SEQ ID NO: 12251 - DNA, 201 bp, Homo sapiens
atttttttattttcaaattttccataaaaatataaggacttgaagatcaagaaaaaatttctgctttggctcagtgcagtggctcacgcctgtaatcccarcagtttgggagccctaggggagaggatcacttgaacccaagagtttgacgttccagtgagctatgatctccggatcgtaccgcctggacgatggagcaag

SEQ ID NO: 12252 - DNA, 201 bp, Homo sapiens
ctggatctgtgctctctaagataactgttagtggtggcgtgtgtgttctcacactcagacatttgatctgctctttgtttcccattcttagctgcaaggcrgtgttaaagaaccctgtgtctccatatccactccccacacttaagcacttttgtgggcccgtgtgccgtatgcctcgtggcagcagggatccaatgtcac

SEQ ID NO: 12253 - DNA, 201 bp, Homo sapiens
caagagccaggattcaagcccaaatctgcctggatctgtgctctctaagataactgttagtggtggcgtgtgtgttctcacactcagacatttgatctgcyctttgtttcccattcttagctgcaaggcagtgttaaagaaccctgtgtctccatatccactccccacacttaagcacttttgtgggcccgtgtgccgtat

SEQ ID NO: 12254 - DNA, 201 bp, Homo sapiens
caggtatggacctctaaaataaggcttcctctccattccggttgtcattgcctttgtccaaacacagcacacaaggccttttacagttgcacaactcttcytgtccatacccaccacaccctttcccagctgtaagcttcagatgagttgcctccaaccaccatgctcctgtaggcctggcttgaaatgcccttcttctgt

SEQ ID NO: 12255 - DNA, 201 bp, Homo sapiens
tctgggggaagatgagtaatgtctcgttccacccctgattccagtgctgactgattctggagtggcagagagggttggaggctcaccgctctgctcacccsaccctctggccatctcctcttagaatgcaagggcagggattttgttacacagcgcctcttttgttataggctagctcctgccttcaaggagcactgagaa

SEQ ID NO: 12256 - DNA, 201 bp, Homo sapiens
ctgttgggactgttctatgcagggcaccctcttgtgtggcataggatttgtgcctcaccacacactgttgtagctttgctgtcttgatgatgagtagagggcagtgtccaggccatggtataagcatctactgccccccagggttaccaaaaccaagccaagttgtgtctcagcgagctccgtgaagcatggagaagttga

SEQ ID NO: 12257 - DNA, 201 bp, Homo sapiens
acaccacatggatgaagcggacgtcctgggggacaggattgccatcatctcccatgggaagctgtgctgtgtgggctcctccctgtttctgaagaaccagytgggaacaggctactacctgaccttggtcaagaaagatgtggaatcctccctcagttcctgcagaaacagtagtagcactgtgtcatacctgaaaaaggt

SEQ ID NO: 12258 - DNA, 201 bp, Homo sapiens
aaggatgatgtactggtcttaatattaccattgagataagctttataataacataaaaagaaataacagtaatgataatagcaacaacaacaacaacaaaraactaacatttaagtagaatttcttgtgcactgtgcattctgtttaagttatctcattttaccctcatgataaccctgcagggaagattctttaacccca

SEQ ID NO: 12259 - DNA, 201 bp, Homo sapiens
gtctggggctggtcctggagtttgtcttgctctgtttttttgtaggtggaatgcagagaaagctatctgtggccttggcctttgtcgggggatctaaggtkgtcattctggatgaacccacagctggtgtggacccttactcccgcaggggaatatgggagctgctgctgaaataccgacaaggtgcctgatgtgtattta

SEQ ID NO: 12260 - DNA, 201 bp, Homo sapiens
tttaaatttggtggaatatgtttttattagcttgtatctttaattcctaaattaagctgtgtgtgtgtgtgtgtgtgtgtgtgtgtgtgtgtgtgtgtgtgaagtttaaagccaggatgagctagtttaaagtatgcagcctttggagtcatacagatctgggtttgaatctggtctctaaactttatagatgtatgatat

SEQ ID NO: 12261 - DNA, 201 bp, Homo sapiens
cagagcaagactccatctcaaaaaaagctctcagaacaaccaggtttacaaatttggtcagttggtaaataaactgggtttcaaacatactttgctgaaayaatcactgactaaataggaaatgaatctttttttttttttttttaagctggcaagctggtctgtaggacctgataagtactcacttcatttctctgtgtc

SEQ ID NO: 12262 - DNA, 201 bp, Homo sapiens
attttccagatattcctcaaggtggccgaagagagtggggtggatgctgagacctcaggtaactgccttgagggagaatggcacacttaagatagtgcctyctgctggctttctcagtgcacgagtattgttcctttccctttgaattgttctattgcattctcatttgtagagtgtaggtttgttgcagatggggaaggt

SEQ ID NO: 12263 - DNA, 201 bp, Homo sapiens
gctgggctcagtgggtggattgacactgcagaaatggccagatctaaaggatcaacatttacgtagctgggaaatgtagctgggacttcagtttcactgcsctagtgatttttcctaccactaagcagctcagtccatacccctacgagacccacaagcttatgagatactgttcttccaggaaagcagtggggccagggc

SEQ ID NO: 12264 - DNA, 201 bp, Homo sapiens
aaaggaatgggagaggtgatagacttcaggcagtgtaactagttgtctgaacactactggctcaattatattgtgtctagtgatttccatcttgtccgtckgctaatttatcgcctggtaactcactgaggcagggttttcctttggagaaacctcattgttttaaccagtgtatcatgcttgtttagaagttcaatgatc

SEQ ID NO: 12265 - DNA, 201 bp, Homo sapiens
taactttttactgattttgtttttatttacttattttatttgtttaaatttatttttagttttttttttttttagagacagggtctctttctgttacccargctagagtgcagtggtgcccttagagctcactgagctcactgcagcctcgaattcctgggctcaagtgatcctcctgccttagcctcccgaagggctggg

SEQ ID NO: 12266 - DNA, 201 bp, Homo sapiens
aggcaaaatggcctggttctctgtcccctttctgtctgtatgcctcgtacaggttatgaaaagaaaaagttgggaaaagctgtccacctcacctaattgtrttcttgtggagtgtgctagatgccccctctctggagaaaaaaaatccttgtggcctctgacccacctctggagagcctagttcccttctggaggcagaag

SEQ ID NO: 12267 - DNA, 201 bp, Homo sapiens
ggtgaaaggttattatgaatggtacaaaactttgttacaaaaccattttcttggactgttttgggctgcttcactgcatgacaaatgctcaccctttcagytggaatgattgaaattttggaaaagatgggtgtttttagaagacattgtaatttgttccggtgctgtgcccattcattccatttcacttctgtttactca

SEQ ID NO: 12268 - DNA, 201 bp, Homo sapiens
tttcctaaagcctggcagacctgggttttggagctttgtatcacatgttttatgtttggaatgaaaatgagaccatgtctgtgaaggcactttgatatgcrtaatgcactctgccagtgtttgtcaaaacatggtccccaggtcagcagcatcagcatcacctgtaagtgattctccagtcgcatcccagggccgctgtat

SEQ ID NO: 12269 - DNA, 201 bp, Homo sapiens
actaaaattctggattcttagtgctgctttttctgttttgttgcactggattgaagccttttctaactgtactcagagggcctattatttagggagattcygtatgaaatcctttagcaatcaaatcatttaatagggctgatggtttaaatatatgttaatgtgttttcctaaagcctggcagacctgggttttggagct

SEQ ID NO: 12270 - DNA, 201 bp, Homo sapiens
ttctactttaagaaccccttcctggcattgtttggctcctcattgttctggaatctcatgtccatctcatgtatttgccttggttcacacttgatcttctrctcatattcctcacctactgaaattttacccatcaaccagaccgtgggtgatggaacacagcatgggctagttcttcttatatatgatctcatttaattt

SEQ ID NO: 12271 - DNA, 201 bp, Homo sapiens
ttctgagcttcaaagccaggctgactgtgcccttccacgccctggccagtgtgaccaggacatcctttccctctggggctgcactggctctttgggggaaktgttaccattcagggtcttcaaccctcattctagggacttccagtaacttctcccaccttccctcttctcagtaagacatgggtattgtcttattctgtt

SEQ ID NO: 12272 - DNA, 201 bp, Homo sapiens
ctttgggatagtgcctagtgagaaggcttgatatttattcttttgtgagtatataaatggtgcctctaacataaagggaaataaaactgagcaaaacagtrtagtggaaagaatgagggctttgaagtccgaactgcattcaaattctgtctttaccatttactggttctgtgactcttgggcaagtgacttaactactgt

SEQ ID NO: 12273 - DNA, 201 bp, Homo sapiens
caggcctctctcatctggctcctctcctcctcctttatcattactcttcttcgtagcttatcctactccagccatgctgtcttcctattattcctaaaaartagaaatgcatttcttcctagggcctttgtacctgcacttgccatcgcttttgctcagaatgttctttttgccaagcttttgcccagcttgttctccatc

SEQ ID NO: 12274 - DNA, 201 bp, Homo sapiens
tttaaatagttttctggagatcctccatttgggtattttttcctgctttcaggtttggagatggttatacaatagttgtacgaatagcagggtccaacccrgacctgaagcctgtccaggatttctttggacttgcatttcctggaagtgttctaaaagagaaacaccggaacatgctacaataccagcttccatcttcat

SEQ ID NO: 12275 - DNA, 201 bp, Homo sapiens
taatgattgaattctccacccatttttctacttgtatgaccttaatttgatggcacctgttccatcctcatgagtttgctacaattatactggtgccaacrcaatcataaacacaaatataaacttgggctttgaaatcttgtgccagaacttggctttaaagtaagcatttaaaaaatccatatgtgtttattagacttt

SEQ ID NO: 12276 - DNA, 201 bp, Homo sapiens
aactttttttcaaatatgcatataattgtcagtggttactatattttggggaagagattgttgacttctttgaagaaagatacggattttctcttcagaaraaatacacatgggctcatataatccaaattttatgtgtaattacagggtgttcatgaatgcccacaaatccattaagccatgtgaccttggacaagtcat

SEQ ID NO: 12277 - DNA, 201 bp, Homo sapiens
cagctaatttttgtatttttagtagagacggggtttcaacttgttggccaggctggtctcgaaccctcgacctcaggtgatccaccggcctcggcctcccmaagtgctgggattataggcgtgagccaccgcgcgcggccgagttttgtttcttttaaaaacaagacttaggagagcctgcggagacccggaggtggggtg

SEQ ID NO: 12278 - DNA, 201 bp, Homo sapiens
atattcctcaaggtggccgaagagagtggggtggatgctgagacctcaggtaactgccttgagggagaatggcacacttaagatagtgccttctgctggcyttctcagtgcacgagtattgttcctttccctttgaattgttctattgcattctcatttgtagagtgtaggtttgttgcagatggggaaggtttgttttgt

SEQ ID NO: 12279 - DNA, 201 bp, Homo sapiens
taactgtaggctgacagcctagcagcaaggaccagttaaagaaatgagtagaactgaagtgtgcttgagtatctctggcagtcagcaaaaacttaatgggratcatggtaggccaaatgttctgcagtatttcaaaagctgcatgggttttgagaggcttttggtccatcactcaccttaggttgttctacaagcacatca

SEQ ID NO: 12280 - DNA, 201 bp, Homo sapiens
atatctgtcacatctaatcagtttaaaataaggggcatcctaagcatggagatggtccttggatggtccttggagtttctgtattttcagtattctttttyttgagcatacaagacatttattgaaaaattcttgggatcaatacttgtgtaaggaaaggaaagggaacaaagcatgattgggcagaggcagaagatgaca

SEQ ID NO: 12281 - DNA, 201 bp, Homo sapiens
aacccccctgctgctccaggcagttctccttctacagtgctctattgtgctgttttaataatctttcaactgggaagaactcccatttcaggaattaagcygtggacaaatcttttaattatccttgaaatcatcctaataagaaatccaaggaggaagtcttacagggtgcctcacccacttttctcatcactggaactt

SEQ ID NO: 12282 - DNA, 201 bp, Homo sapiens
ccccctgccaatttcatatctgtcacatctaatcagtttaaaataaggggcatcctaagcatggagatggtccttggatggtccttggagtttctgtattktcagtattcttttttttgagcatacaagacatttattgaaaaattcttgggatcaatacttgtgtaaggaaaggaaagggaacaaagcatgattgggcag

SEQ ID NO: 12283 - DNA, 201 bp, Homo sapiens
ctccacatagatgttatgaattttacttttacagaggagccaactgaggctcagataagttacttattatatgactagtagtggtagagctggggtttcarctaagaactctctggctccaaagcccttgtaagtttctatcagtatatgaccatgcatatgagcatttgtctctcctcttcttcatagctccttactgca

SEQ ID NO: 12284 - DNA, 201 bp, Homo sapiens
atttctattctagagaagaatctgacccagaagggggaagtgactgtcccaagtctacacaaccacagaagggatattctgggaataaatcacggctaaahccccctgctgctccaggcagttctccttctacagtgctctattgtgctgttttaataatctttcaactgggaagaactcccatttcaggaattaagccgt

SEQ ID NO: 12285 - DNA, 201 bp, Homo sapiens
tgggtagcaccagacccagcttgcatggttattgatttttcagagacactttttgagcttattctctggcagaaaggggaactgcttcctcccctatctcrtgtctgcatactagcttgtctttacaagaagcagaagtagtggaaatgtttattcttgaaaataagctttttgcttcacatgatctagaatttttaaaat

SEQ ID NO: 12286 - DNA, 201 bp, Homo sapiens
aagaatgtgaagctctttgcactaggatggcaatcatggtcaatggaaggttcaggtgccttggcagtgtccagcatctaaaaaataggtaataaagatartttctttgggatagtgcctagtgagaaggcttgatatttattcttttgtgagtatataaatggtgcctctaacataaagggaaataaaactgagcaaaac

SEQ ID NO: 12287 - DNA, 201 bp, Homo sapiens
aaaaaaaaaaaaaaaaaaaaaaaaaaaaaaaaaaaaagatgtgtagggagcaattttggagttattcatttggtcatttgatatgtagttttagttttggbgctgatagagcccagaatgtaccctgaatttgatgaacattctgatatatgggggagctcattgtcccccacttacctttttgcctctcagaatatcttt

SEQ ID NO: 12288 - DNA, 201 bp, Homo sapiens
catattcctcacctactgaaattttacccatcaaccagaccgtgggtgatggaacacagcatgggctagttcttcttatatatgatctcatttaattttcwctggaactctgagataggtagcatttcagcccactcaagttgactcaaatttttgtaatcatcaatatattttaaaataactttatatttgacctgtaat

SEQ ID NO: 12289 - DNA, 201 bp, Homo sapiens
atctctacccaatcaagcaacgatgctcgttaagaggtaaaagtggattttaaaggcttctgtatttatgccaggatggagcaattagtcatcgagaagaragggaccctgtatgtcaagagaatgatttcagagaatccaatacaatttaagaaaaagcatggggctgggcgcagtgattcactcctgtaatcccagcac

SEQ ID NO: 12290 - DNA, 201 bp, Homo sapiens
cgggccaacctgcaaaagggagagaaccctagccattatggaattactgctttcaatcatcccctgaatctcaccaagcagcagctctcagaggtggctcygtaagtgtggctgtgtctgtatagatggagtggggcaagggagagggttatggagaaggggagaaaaatgtgaatctcattgtaggggaacagctgcaga

SEQ ID NO: 12291 - DNA, 201 bp, Homo sapiens
tgggttttaatgtcaggctgttcttttaggtatggcggcttttccctgggtgtcagtaatactcaagcacttcctccgagtcaagaagttaatgatgccaycaaacaaatgaagaaacacctaaagctggccaaggtaaaatatctatcgtaagatgtatcagaaaaatgggcatgtagctgctgggatataggagtagtt

SEQ ID NO: 12292 - DNA, 201 bp, Homo sapiens
tccccatctgcttgcctccagacccacattcacacccgagccactgggttggaggagcatctgtgagatgaaacaccattctttcctcaatgtctcagctrtctaactgtgtgtgtaatcaggccaggtcctccctgctgggcagaaaccatgggagttaagagattgccaacatttattagaggaagctgacgtgtaact

SEQ ID NO: 12293 - DNA, 201 bp, Homo sapiens
cagtgctgacaatcttatactctaggttgaacctccggggaaggtgcccttgcttgatggcatgtttaccaggggttctagagcctcaatcacagattctstctagctcacatgaagttaatgaaaatgaatgtgcttccctacaaattagagaggctttgaggaaaaatcagattaaatgcactcctgcttgaacttatg

SEQ ID NO: 12294 - DNA, 201 bp, Homo sapiens
attgtatccaggtgtttataggctccctgagttcctgacttgagcctatctatgggtttagagttcaaggctctttaccagtgctgacaatcttatactcyaggttgaacctccggggaaggtgcccttgcttgatggcatgtttaccaggggttctagagcctcaatcacagattctctctagctcacatgaagttaatg

SEQ ID NO: 12295 - DNA, 201 bp, Homo sapiens
ccttcctggcattgtttggctcctcattgttctggaatctcatgtccatctcatgtatttgccttggttcacacttgatcttctgctcatattcctcacctactgaaattttacccatcaaccagaccgtgggtgatggaacacagcatgggctagttcttcttatatatgatctcatttaattttcactggaactctgag

SEQ ID NO: 12296 - DNA, 201 bp, Homo sapiens
gctgtagaggtgacatcagcccagccagtggatgggggcttgggaaacattgcttcccattattgtcatgctggagggccctttagcccatcctctcccccgccaccctccttattgaggcctggagcagacttcccagacctggtagtgcttcagggccctggtatgatggacctatatttgctgcttaagacatttgct

SEQ ID NO: 12297 - DNA, 201 bp, Homo sapiens
gatgatgctgagcttggctcatacctgtgctttgctttcaggccagtacggaattcccaggccctggtattttccttgcaccaagtcctactggtttggcraggaaagtgatgagaagagccaccctggttccaaccagaagagaatatcagaaagtaagtgctgttgacctcctgctctttctttaacctagtgctgctg

SEQ ID NO: 12298 - DNA, 201 bp, Homo sapiens
actaatgcgttcctcgtttttacagttttattatttctagaatgttacataaatggaaccatacagtaggtatccttttgatactggctttttttttttttcactcagcagtattcccttagatctatccaagttgtgtgtgtcaacagttcattcctcttcactgctgagtagtgttccctgggaggggtgtatcacagt

SEQ ID NO: 12299 - DNA, 201 bp, Homo sapiens
ctgggaaaagacattcgctctgagatgagcaccatccggcagaacctgggggtctgtccccagcataacgtgctgtttgacatgtgagtaccagcagcacrttaagaataggccttttctggatgtgtgtgtgtcatgccatcatgggaggagtgggacttaagcattttactttgctgtgtttttgttttttcttttttt

SEQ ID NO: 12300 - DNA, 201 bp, Homo sapiens
aggaagtatattttgctgaatcagaaagaaaagtgatttatttcaggttgctgatgcttagattgttagagttggaaagatctggcttgcatcttgtacarctgacagaactggggctcaggggggcacaggtgcccagagttggtcagtcaggaaagtagcaccagaaccagtctcctggtggccctacagttgcagacc

SEQ ID NO: 12301 - DNA, 201 bp, Homo sapiens
tgattcatcaagaaataactagaatggcaagttaaaatttaagctgtttcaaagatgcttctgcatttaaaaacaaatttatctttgattttttttccccycagcaaataagacttattttattctaattacaggatgaacccaccacaggcatggatcccaaagcccggcggttcttgtggaattgtgccctaagtgttg

SEQ ID NO: 12302 - DNA, 201 bp, Homo sapiens
tttgtggttgttacggaatgatcctgtgctcctgaggcaacagaaaggccaggccatctctggtaatcctactcttgctgtcttccctttgcagagacacrccctgccaggcaggggaggaagagtggaccactgccccagttccccagaccatcatggacctcttccagaatgggaactggacaatgcagaacccttcac

SEQ ID NO: 12303 - DNA, 201 bp, Homo sapiens
tgagctgcagtcttggtgctgggctggtgttgggtctgggcagccaggacttgctggctgtgaatgatttctccatctccaccccttttgccatgttgaarccaccatctccctgctctgttgcccctttgaaatcatatcatacttaaggcatggaaagctaaggggccctctgctcccattgtgctagttctgttgaat

SEQ ID NO: 12304 - DNA, 201 bp, Homo sapiens
attaactgcaaattaaaatcttagtctcttgcctctttaatccaggcttcttcatactataccagaatttaggataactattacagtgccctttataggaragaaagaagaaattgtgtctgtagatgtctgttcctttcagcttaaaatggacactgaaatgttaaatattggactggcctcatttatttctcctgtctg

SEQ ID NO: 12305 - DNA, 201 bp, Homo sapiens
tccctatccctctcccctcctcctccggctacacacatgcggaggaaaatcagcactgccccagggtcccaggctgggtgcggttggtaacagaaacttgyccctggctgtgcccctaggtcctctgccttcactcactgtctggggctggtcctggagtttgtcttgctctgtttttttgtaggtggaatgcagagaaag

SEQ ID NO: 12306 - DNA, 201 bp, Homo sapiens
ctcgaaggaactatagctggttttctcaccagactgattaacatatagtatggtttggtacctgttaaatgagtctctctctacaggttttcatcttctaytttaagaaccccttcctggcattgtttggctcctcattgttctggaatctcatgtccatctcatgtatttgccttggttcacacttgatcttctgctcat

SEQ ID NO: 12307 - DNA, 201 bp, Homo sapiens
actaggtgctggacagaggtcaaaagacttttaagaatctgccaccattaatgatctctttctgcttggcattcaaggctctttgaaataagactgtgacscactttgatagttttgtcctggattataagacacatgctcgaaggaactatagctggttttctcaccagactgattaacatatagtatggtttggtacct

SEQ ID NO: 12308 - DNA, 201 bp, Homo sapiens
cacactcttctccagagccaacctggcagcagcctgtgggggcatcatctacttcacgctgtacctgccctacgtcctgtgtgtggcatggcaggactacrtgggcttcacactcaagatcttcgctgtgagtacctctggcctttcttcagtggctgtaggcatttgaccttcctttggagtccctgaataaaagcagca

SEQ ID NO: 12309 - DNA, 201 bp, Homo sapiens
gctagttctgttgaatcccgttttccttttcctatgaggcacagagagtgatggagaaggtccttagaggacattattatgtcaaagaaaagagacttgtyaagaggtaagagccttggctacaaatgacctggtgttcctgctcattacttttcaatctcattgaccttaacttttaaactataaaacagccaatattta

SEQ ID NO: 12310 - DNA, 201 bp, Homo sapiens
ttctcatctgaaatgcaaaggaaggaggagttggtttaattcaataagtttcagttgagtaaacatgatttagtgagacactgttcttgcttctgactcaycatttggaaaatctctctaaaataaaattggactctccatctcggacatcattttgggtgtaggttttgcttttttttttgagatggagtctcgttatgt

SEQ ID NO: 12311 - DNA, 201 bp, Homo sapiens
gtgatttaattagcattcaataaaaattcatgttgaatttttctttagtacttctttcttaatataatacatcttcttgaccaagtccaagaggaacctgygttggacagttttcatatgagatcaaattctgagagagcaagatttaaccctttttggttcaccttctgatcctcccctaaggaggtatacatgaaatat

SEQ ID NO: 12312 - DNA, 201 bp, Homo sapiens
tgagtagctgggattacaggcatgcgccaccacacccggctaattttgtatttttagtagagacggggtttcttcatgttggtcaggctggtctcgaactyccgacctcagttgatccacccgtcttggcctcccaaagtgctgtattagccccattttatatccaaggaaactgaggcttagggagatttaaataggggg

SEQ ID NO: 12313 - DNA, 201 bp, Homo sapiens
tttgcctcagtttcatcatctgtaaaataggtatttgtgtttgtgtataatgtgaaccgtataatataatgcttggcctatagtgaaatttattcatacgmgtgttttcagtgattttaaaagcttgctttaggccgggcgcgatggcttctgcctataattccagcactttgggaggccaaggtgggcggatcatgaggt

SEQ ID NO: 12314 - DNA, 201 bp, Homo sapiens
gtgaccccctgcccctgcccaccagagaacaaccccctttgactgtaattttccattaccttcccaaatcctataaaacggccccacccctatctcccttygctgactctcttttcggactcagcccacctgcagccaggtgaaaaaaacagctttattgctcacacaaagcctgtttggtggtctcttcacacagacgca

SEQ ID NO: 12315 - DNA, 201 bp, Homo sapiens
taaaagtctaccgagatgggatgaaggtggctgtcgatggcctggcactgaatttttatgagggccagatcacctccttcctgggccacaatggagcgggraagacgaccaccatgtaagaagagggtgtggttcccgcagaatcagccacaggagggttctgcagtagagttagaaatttataccttaggaaaccatgct

SEQ ID NO: 12316 - DNA, 201 bp, Homo sapiens
ggtgctttaaggagacaattagagatcaatctggaaaacttcatttgaatttttaatacataagaaaacaataagaaatagttaaaaatatatatttatawaatatatatgtgtgtgtgtgtgtgtgtgtgtatatatatatatatattttatttatttatttttttttgagatggagtctcgctctgttgcccaggctgg

SEQ ID NO: 12317 - DNA, 201 bp, Homo sapiens
tgttcctgctcattacttttcaatctcattgaccttaacttttaaactataaaacagccaatatttattaggcactgatttcatgccagagacactctggkcatgaaagaaagtaatgataatagttaattttatatagcgttgttaccatttacaaccttttttttttttttaacctctatcatctcaattaaagtgcag

SEQ ID NO: 12318 - DNA, 201 bp, Homo sapiens
gtgttcctgctcattacttttcaatctcattgaccttaacttttaaactataaaacagccaatatttattaggcactgatttcatgccagagacactctgkgcatgaaagaaagtaatgataatagttaattttatatagcgttgttaccatttacaaccttttttttttttttaacctctatcatctcaattaaagtgca

SEQ ID NO: 12319 - DNA, 201 bp, Homo sapiens
taagagccttggctacaaatgacctggtgttcctgctcattacttttcaatctcattgaccttaacttttaaactataaaacagccaatatttattaggcwctgatttcatgccagagacactctgggcatgaaagaaagtaatgataatagttaattttatatagcgttgttaccatttacaacctttttttttttttta

SEQ ID NO: 12320 - DNA, 201 bp, Homo sapiens
aatagagatttcaggtttacatttgaattcagaaacaaagttttctttctcattacagagaacactaaactctacatctcccttcccgagcaaggagctgrctgaagccacaaaaacattgctgcatagtcttgggactctggcccaggaggtaagttgtgtctttccagtaccaggaagcggatcatccactgtatcagt

SEQ ID NO: 12321 - DNA, 201 bp, Homo sapiens
ctctttcatgagattgatgaccggctctcagacctgggcatttctagttatggcatctcagagacgaccctggaagaagtaagttaagtggctgactgtcrgaatatatagcaaggccaaatgtcctaaggccagaccagtagcctgcattgggagcaggattatcatggagttagtcattgagtttttaggtcatcgaca

SEQ ID NO: 12322 - DNA, 201 bp, Homo sapiens
tgcacttatttaccctttaatgagcctctttacttaagtacagtgtgaggaacagcggcatcaggatcacttgggaacttgttagaaattcagcaacttgsgcccagctcagacctactgaatcagaatcaggagcaattctctggtgtgactgtgtcacagccaggtatcaactggattctcatacataggaaatgacaa

SEQ ID NO: 12323 - DNA, 201 bp, Homo sapiens
ggcactgtgtgaatgatgagctgctgttactgtgtggaggggaaatgcacttagtgcttcagagccacttgaaagggataagtgctctagagacaattggrttcaaatgtggagcaggctgagcaagaacagaatgtctcctttgcctgagcctgagtgctgttaatcacatcttcctgccttgggctgagttagagaatc

SEQ ID NO: 12324 - DNA, 201 bp, Homo sapiens
tcaccatgttggccaggctggtcttgaactcctgacctcaggtgatccacccgcctcgacctcccaaagtactgggattacaggtgtgagccactgcaccsggcccagactcgagtttttcatcttaatgctttttcattgcctgacactttactgagaccaagatagggaacttcacatacagtaccttttctcccaagg

SEQ ID NO: 12325 - DNA, 201 bp, Homo sapiens
ccctttagcttttgcaaacctcctttaagacccgatttaaatgcttccctcctcatgaagctcttctggatccactccttcccatcactaagttgaaagtmagatccccttctctttacttccattagacttggattacagcactctttgtatcatgtatttaattctgttttttaattacagttaacatttatttgtctt

SEQ ID NO: 12326 - DNA, 201 bp, Homo sapiens
ttgaaaacaaagttggtacaaaaccctttagcttttgcaaacctcctttaagacccgatttaaatgcttccctcctcatgaagctcttctggatccactcyttcccatcactaagttgaaagtaagatccccttctctttacttccattagacttggattacagcactctttgtatcatgtatttaattctgttttttaat

SEQ ID NO: 12327 - DNA, 201 bp, Homo sapiens
tttgaaatcctgtctttcccatgttgaaaacaaagttggtacaaaaccctttagcttttgcaaacctcctttaagacccgatttaaatgcttccctcctcrtgaagctcttctggatccactccttcccatcactaagttgaaagtaagatccccttctctttacttccattagacttggattacagcactctttgtatca

SEQ ID NO: 12328 - DNA, 201 bp, Homo sapiens
atttacttgctgattttctaatgcacatcacacatagtcatattaaacacacacacacacacacacacacacacacacccctcaagaaacattttctgagrcgtgatttcctgatttcatcaaaaaagaaaagagcgggccaggcacagtgggaagtcaaggtgggtggatcacttgaggtcaggagtttgaaaccagcct

SEQ ID NO: 12329 - DNA, 201 bp, Homo sapiens
caaaataaagtttgaaatcctgtctttcccatgttgaaaacaaagttggtacaaaaccctttagcttttgcaaacctcctttaagacccgatttaaatgcytccctcctcatgaagctcttctggatccactccttcccatcactaagttgaaagtaagatccccttctctttacttccattagacttggattacagcact

SEQ ID NO: 12330 - DNA, 201 bp, Homo sapiens
ggattacaggcatgagccaccatgcctggccttctttgagaagctggagacatgagttaagtggtgaagaagccaaatctgtatctaaaaaccctacagtwgtgtgcagagctctgaggagagaaggtcccttagattttgagtgtattattatgtcagtgcttgttttacatctctctgttcacgcagtatgtccccttt

SEQ ID NO: 12331 - DNA, 201 bp, Homo sapiens
ataaaattgatttccggtggggccttcagttactctccattctacgaagaccacaaatagcattcaggcaaagagcatttattccaacaatggaggagcaytggatttggttcctaaaacaaaataaagtttgaaatcctgtctttcccatgttgaaaacaaagttggtacaaaaccctttagcttttgcaaacctccttt

SEQ ID NO: 12332 - DNA, 201 bp, Homo sapiens
gacccacaagcttatgagatactgttcttccaggaaagcagtggggccagggccaccttttaattgtgtttcttggcctggtcccatctttctcacaatayatagcaacagttatttacttgctgattttctaatgcacatcacacatagtcatattaaacacacacacacacacacacacacacacacacccctcaagaa

SEQ ID NO: 12333 - DNA, 201 bp, Homo sapiens
acattaccctgtggctgcatgactttgtgaataggttagttagcaccctttcagccacttcttcttacctgttaatgagataaaacatgtaattgcttaaraacagtatttggcacataggaagcacttagtgaatatgaattatgattttttttggagtggtgacatctcaaccaagccatttaacccctcagccttact

SEQ ID NO: 12334 - DNA, 201 bp, Homo sapiens
agggtgctgacgggcaccgagaagaaaactggtgtctatatgcaacagatgccctatccctgttacgttgatgacatgtaagttacctgcaagccactgtwtttaaccagtttatactgtgccagatgggggtgtatatatgtgtgtgcatgtgcatgcatgtgtgaatgatctggaaataagatgccagatgtaagttgt

SEQ ID NO: 12335 - DNA, 201 bp, Homo sapiens
gcccctctccaggaggcattggtgaagaaactaggggagctggttgccacagacagtgatgtactaatcttctctgggaagacagaagaaaagtccccagrgaagaatactacagacttggccttagggacagctaggggtgcagattgctgccaactgcattttttctgaagttggccatatggttgcagtgaatggatt

SEQ ID NO: 12336 - DNA, 201 bp, Homo sapiens
aacagaggccgggaacggggcggggaggagggagagcacaggctttgaccgatagtaacctctgcgctcggtgcagccgaatctataaaaggaactagtcycggcaaaaaccccgtaattgcgagcgagagtgagtggggccgggacccgcagagccgagccgacccttctctcccgggctgcggcagggcagggcgggga

SEQ ID NO: 12337 - DNA, 201 bp, Homo sapiens
cactgagcctactgtggttcatggataagttggccctgggggcatgtgtgtgcatgcatgtgtgtgcacatgcatgatgagccgggccttgaagggtggtragatttgggtgtgtagaccaatggagaaaggcatttggggcagtgatgatgggtgggggagggaacatggtgatgaatggagctgggtgtggggagccat

SEQ ID NO: 12338 - DNA, 201 bp, Homo sapiens
cgtgggtatagaatcatagttacaagcaggcatttcttggggatggggaggactggcacagggctgctgtgatggggtatcttttcagggaggagccaaagcgctcattgtctgtgcttctcctcctttttctgcggtccctggctccccacctgactccaggtgaacaagaccttccaggaactggctgtgttccatgat

SEQ ID NO: 12339 - DNA, 201 bp, Homo sapiens
agttctgttgaatcccgttttccttttcctatgaggcacagagagtgatggagaaggtccttagaggacattattatgtcaaagaaaagagacttgtcaakaggtaagagccttggctacaaatgacctggtgttcctgctcattacttttcaatctcattgaccttaacttttaaactataaaacagccaatatttatta

SEQ ID NO: 12340 - DNA, 201 bp, Homo sapiens
ttgaatcttgaagattatttttcagaaattgataaagttattttaaaaagcacggggagagaaaaatatgcccattctcatctgttctgggccaggggacwctgtattctggggtatccagtagggcccagagctgacctgcctccctgtccccaggctgactgtcgaagaacacatctggttctatgcccgcttgaaagg

SEQ ID NO: 12341 - DNA, 201 bp, Homo sapiens
ccagcctgggtagacagagcaagaccctgtctcaaaaaaaagaaatgaaagagaaagaaagaaagaggagaggagaggagatgaggggaggggaggggagsagggagggggggaggaaggaaggaaggaaggaaggaaaaaaagatgaaaaaagaaaaaaacaagatgaaacagaggcagaaagactttacgtaaattgct

SEQ ID NO: 12342 - DNA, 201 bp, Homo sapiens
acaagtgatttaagtttcttttaaacagagaatagtaatacctacctcatattattattgtcagtgtatcatcttacaatcacagtctttctcttagggcygggctcagtgggtggattgacactgcagaaatggccagatctaaaggatcaacatttacgtagctgggaaatgtagctgggacttcagtttcactgccct

SEQ ID NO: 12343 - DNA, 201 bp, Homo sapiens
tctgagaagttccccagcttccctctgttccccgtttccacacttagcgaggctcttgtccactgctacatcccccatagccagtccctcagccttgccaytgcttatgctggtctggaaacaattcctagacttgtggggcatctggggaagttctccatctttttttagctggcatgacccaagtggtgtgggcagggc

SEQ ID NO: 12344 - DNA, 201 bp, Homo sapiens
catggggcctcattgttttaattagtgacaaaacaacaataataacaacaaaacccccgaagcttcacagatgacatcagaccccaagcctgtgtgtttttcaggtgcccttgaggagctttgtagctggcagaggaggtgaaactgacaaatgtttggcagatggaggagagtaccagaggggtttgagatgagctaaat

SEQ ID NO: 12345 - DNA, 201 bp, Homo sapiens
gtttcctatctcacagggttgtcctgaggattaaattaagtaattaatataaaatgtgccttgtacatattgggccctaaataaacagtagctactatttrtccttaaagtacaaatggtagtttcagagcttcaaggctgatggctatttatcttactcatactctttgtttagcttcatttttttcccctaatttcatt

SEQ ID NO: 12346 - DNA, 201 bp, Homo sapiens
ccctccatggccgaatccctgcttcccacgaagagaacctcacaaaaatttcccccaagttaaagagtggaattttcttgatttttttttcttttttttttaacggccgtagtttagaacccagacttaaattatgatcttcttttcaaacaaaacttaaagtccttaagttttcatctccccttttatttcaacctattc

SEQ ID NO: 12347 - DNA, 201 bp, Homo sapiens
tctccaattttagctctgtgagatggcactggggaaacagaaatgaacggactagtgtcacaaagctcaggtgggatggacgagatcacttcaaaggtctrtaatcccacgtctataatcccagcactttgggaggccaaggcgggaaaatcacttgaggtcaggagttcgagaccatcctggccaacatggcaaagcctg

SEQ ID NO: 12348 - DNA, 201 bp, Homo sapiens
ttagcgtgtttgccaactcccaggccattggtaaagcaggaaggttcttggggcggcggacggtgccagggttatgtgtaggtgcctctttaggtatatcktttatcaaaaagaagcaaagaaataagattaaaaataaacaaagaaaaaagttgtctggcactggcagtaattggcctgcctttgcagcactgataccat

SEQ ID NO: 12349 - DNA, 201 bp, Homo sapiens
ttgagttaaacttaaaaaatattcacagttctgaggcaataaccgtggttaagggttattgatctggaggagctctgtctaaaaaattgaggacaggagamtttagacaagggtgtatttggagacttttaagaattttataaaataagggctggacgcagtggcactgagttgagaactgttgcttgctttgcattaaat

SEQ ID NO: 12350 - DNA, 201 bp, Homo sapiens
ctggcttatcacttggcatttgtgatgatttcctcctacaagggatacattttaagttgagttaaacttaaaaaatattcacagttctgaggcaataaccrtggttaagggttattgatctggaggagctctgtctaaaaaattgaggacaggagactttagacaagggtgtatttggagacttttaagaattttataaaa

SEQ ID NO: 12351 - DNA, 201 bp, Homo sapiens
gaggtagtttgaatacaacttcacttaattttacttccctattcaggcaggaattgccaaaccatccaggagtggaatatgcaacctggcgtcatgggccmgctggttaaaataaaattgatttctggcttatcacttggcatttgtgatgatttcctcctacaagggatacattttaagttgagttaaacttaaaaaata

SEQ ID NO: 12352 - DNA, 201 bp, Homo sapiens
catctactagacgaatgattttctggaatgattacaagcaggcaagatggtgtagtggaaatagcaaatgtcttcggcatcagacaagttggggtttgtttgtatcctgcctctgcccttcaccgaggttgtgatcttgggcagattgttgagttttaacctagattcctctgactccagatcataaattttcagaaaagt

SEQ ID NO: 12353 - DNA, 201 bp, Homo sapiens
attatatccaacattgctgagaagatgagtaaggaatgtaaatgagtaaaggcaggaatggctattgaatttgttaagacagaggtccttggtgaccttcmtaagagtcatttcagcatgacaaggatgcagacctaactggaatagattttcagggaagactgagaggcaaggaaggggagactgcaaatatatgcaaat

SEQ ID NO: 12354 - DNA, 201 bp, Homo sapiens
gaaagctaaggggccctctgctcccattgtgctagttctgttgaatcccgttttccttttcctatgaggcacagagagtgatggagaaggtccttagaggrcattattatgtcaaagaaaagagacttgtcaagaggtaagagccttggctacaaatgacctggtgttcctgctcattacttttcaatctcattgacctta

SEQ ID NO: 12355 - DNA, 201 bp, Homo sapiens
aacagaagatgattgtcttttccaatgggacatgaaccttagctctagattctaagctctttaagggtaagggcaagcattgtgttttattaaattgtttmcctttagtcttctcagtgaatcctggttgaattgaattgaatggaatttttccgagagccagactgcatcttgaactgggctggggataaatggcattga

SEQ ID NO: 12356 - DNA, 201 bp, Homo sapiens
ctttctcacaatatatagcaacagttatttacttgctgattttctaatgcacatcacacatagtcatattaaacacacacacacacacacacacacacacmcacccctcaagaaacattttctgagacgtgatttcctgatttcatcaaaaaagaaaagagcgggccaggcacagtgggaagtcaaggtgggtggatcact

SEQ ID NO: 12357 - DNA, 201 bp, Homo sapiens
gagaccaagatagggaacttcacatacagtaccttttctcccaaggcggaagagggctgttcaatttctacactagagttcggggagttttagaaatgagycagttatcgaggatgagagcagttcctgataggctcaaccacaatgagatgtagctgttcagagaaagcattcttttatctataaactggaagataatcc

SEQ ID NO: 12358 - DNA, 201 bp, Homo sapiens
gggctcagtgggtggattgacactgcagaaatggccagatctaaaggatcaacatttacgtagctgggaaatgtagctgggacttcagtttcactgccctrgtgatttttcctaccactaagcagctcagtccatacccctacgagacccacaagcttatgagatactgttcttccaggaaagcagtggggccagggccac

SEQ ID NO: 12359 - DNA, 201 bp, Homo sapiens
gctgttcaccgacaatgtgagtcatgcagagagaacactcctgctgggatgagcatctctgggagccagaggacagtgtttaattgtgatcttattccacytgtcagtggtattgacactgctgactgccttgtcctgtcttcagagtctgtcttccctgagaaggcaaagcacctttctttcttgctgtgccttacattt

SEQ ID NO: 12360 - DNA, 201 bp, Homo sapiens
caccctttggcaagtaccccagcctggaacttcagccctggatgtacaacgaacagtacacatttgtcaggtatgtttgtcttctacatcccaggaggggrtaagattcgagcagaccaaagatgtttacgagggccaagggaatggacttcagaattacacggtggaatgaattttactgctgcggctcaggtccctgta

SEQ ID NO: 12361 - DNA, 201 bp, Homo sapiens
cagacccttctccattcccaggcatgtttggtggcagagtttaccttagttggggttaggctgttgtctggtactgtgagagagaaggaagaagaagataygatattaacaacaacaatacatatttatatttgaaaattaaatgcactaatacacctatagtgctattaaacaaatttatttgttcagcaaatgtttgtt

SEQ ID NO: 12362 - DNA, 201 bp, Homo sapiens
tgaatcatagaaccagaaggggttctcatctgaaatgcaaaggaaggaggagttggtttaattcaataagtttcagttgagtaaacatgatttagtgagayactgttcttgcttctgactcaccatttggaaaatctctctaaaataaaattggactctccatctcggacatcattttgggtgtaggttttgctttttttt

SEQ ID NO: 12363 - DNA, 201 bp, Homo sapiens
ttctgaggcagctgtgatttaagaaaatgctctagtctgtggcattccatattcaagtactttgagttgtatattaatttatttttgttaataagagtgasatgactcactaagtaatttagagatttaaacacttttttaaaaaacagtaacttcatatgcattggatctattcttctataaagtcttttcttggggggt

SEQ ID NO: 12364 - DNA, 201 bp, Homo sapiens
caatggaggagcactggatttggttcctaaaacaaaataaagtttgaaatcctgtctttcccatgttgaaaacaaagttggtacaaaaccctttagctttkgcaaacctcctttaagacccgatttaaatgcttccctcctcatgaagctcttctggatccactccttcccatcactaagttgaaagtaagatccccttct

SEQ ID NO: 12365 - DNA, 201 bp, Homo sapiens
catacatcagcctcttaaggagctggggccacaggcacgcaccactgctcctggctaaatttttacaattttttgtaaagacaaggtctcactatcttgcycagactggtcttgaactcctgggctcaagtgatcctcccacatcagcctcccaaagtgctgggattacaggcataagccactgtgcaggtcatcaaatgc

SEQ ID NO: 12366 - DNA, 201 bp, Homo sapiens
tgagaaactttccgtttctgttgagagtatcattctcttgagaaactttctcctaaatcagagaaagtatggaagcatggaaagtattcctgagtagaacytctacagatattacaatatttttcaaatacaaagtttccattgtcagcctgtttcccaagtgcttccacaaaccattaaataattccacaaaccattaaa

SEQ ID NO: 12367 - DNA, 201 bp, Homo sapiens
ttttaaatagttttctggagatcctccatttgggtattttttcctgctttcaggtttggagatggttatacaatagttgtacgaatagcagggtccaaccyggacctgaagcctgtccaggatttctttggacttgcatttcctggaagtgttctaaaagagaaacaccggaacatgctacaataccagcttccatcttca

SEQ ID NO: 12368 - DNA, 201 bp, Homo sapiens
tgcgatgaaacaattctgacattcatgttatgagcagttacctcataaatagattacatgtgagattgaacttgggcagactataatatagcattaatgaygaaacagacacagtcatcttcgggaagaagaatagaggcttatttgctgcctgtgaaattaaaattactctgactgggaatccatcgttcagtaagttta

SEQ ID NO: 12369 - DNA, 201 bp, Homo sapiens
atgatgatgagatctttgctgtttataccaagccccttagactgtgtcactcttctgatccggttgtccttgtatggccatgctgtatattgtgaatgtccgttttcaaaagcaaagccaagaattaaccttgtgttcaggctgtggtctgaatggttatgggtccagagggagttgatctttagctcacacttctattac

SEQ ID NO: 12370 - DNA, 201 bp, Homo sapiens
tgacttcaatagaggtttcagacaaaaagttgttttgtatatacttatcagtcatgaaaagataattacaactaaatggcctttttccttccctatttatytggagaaatttaattacataaaaaagtactcagaatatttgagtttcctgcatcaataagacatttataataatgaccttgtttacaaatgaatttgaaa

SEQ ID NO: 12371 - DNA, 201 bp, Homo sapiens
tcgcatcccctgtgacttgcacatatacgcccagatggcctgaagtaactgaagaatcacaaaagaagtgaaaaggccctgcctcgccttaactgatgacrttccaccattgtgatttgttcctgccccaccttaactgagtgattaaccctgtgaatttccttctcctggctcagaagctcccccactgagcaccttgtg

SEQ ID NO: 12372 - DNA, 201 bp, Homo sapiens
ctgtaaggctaacagttgcaatatactagggtaatctgagtgagctggaattaaaaaaaaaaaggaatttcaccccaatcttatactgacttcaatagagstttcagacaaaaagttgttttgtatatacttatcagtcatgaaaagataattacaactaaatggcctttttccttccctatttatttggagaaatttaat

SEQ ID NO: 12373 - DNA, 201 bp, Homo sapiens
ctcctaggcttagcattttctccccacactatgctgccatgttgcttattccaacattaggaagcataggtgccatccccagcttttgaggccaatatcaygatgaagcatttttaaaacatctcattaaattgctgatatagtggaaagaaccaaagctttgcagtcaaagctgtttgggttcaaatttaccacttgttt

SEQ ID NO: 12374 - DNA, 201 bp, Homo sapiens
ccccactttttccttttgctgcagccctgggagccacctggctctccaaaagcccctaatgggcccctgtatttctggaagctgtgggtgaagtgagttartggccccactcttagagatcaatactgggtatcttggtgtcaatctggattctttccttcaggcctggaggaatataataactgagacttgttttatttc

SEQ ID NO: 12375 - DNA, 201 bp, Homo sapiens
gctccctctttccccacatccattcaaatctgttccttctccaaaggatgtgtcaaggaggaaatggacctggctgggaaaccctcagaatactgggatgwtgctgagcttggctcatacctgtgctttgctttcaggccagtacggaattcccaggccctggtattttccttgcaccaagtcctactggtttggcgagga

SEQ ID NO: 12376 - DNA, 201 bp, Homo sapiens
ggagaaggtccttagaggacattattatgtcaaagaaaagagacttgtcaagaggtaagagccttggctacaaatgacctggtgttcctgctcattacttwtcaatctcattgaccttaacttttaaactataaaacagccaatatttattaggcactgatttcatgccagagacactctgggcatgaaagaaagtaatga

SEQ ID NO: 12377 - DNA, 201 bp, Homo sapiens
cacagagagtgatggagaaggtccttagaggacattattatgtcaaagaaaagagacttgtcaagaggtaagagccttggctacaaatgacctggtgttcstgctcattacttttcaatctcattgaccttaacttttaaactataaaacagccaatatttattaggcactgatttcatgccagagacactctgggcatga

SEQ ID NO: 12378 - DNA, 201 bp, Homo sapiens
ctttgggggaggcctcagcttctctgtctataagattgcagcaggggtgtagtgggaatgagtcttcaacattccaagagattttatctactaatacgacmgtcaaatggagcatgactttgtggaagcctctcctcttccacccagaggggccaatttctctgtcccagtgagatgttgacacttgtatgatccctgctt

SEQ ID NO: 12379 - DNA, 201 bp, Homo sapiens
tataagattgcagcaggggtgtagtgggaatgagtcttcaacattccaagagattttatctactaatacgacagtcaaatggagcatgactttgtggaagyctctcctcttccacccagaggggccaatttctctgtcccagtgagatgttgacacttgtatgatccctgcttggagacttccctcttctggaacctgccc

SEQ ID NO: 12380 - DNA, 201 bp, Homo sapiens
agattctattacgtttttcaggatgtcccaggagtcacctgggaagctcagcagtcctttgtgactttcaagcatatggtagaagctgctgaacacagagmtccctctttggggataatttgcccaaatcatttaatcaggcttgagaaatgagttaccacaggtccaggagtgctgccacccttgaattctgacacccta

SEQ ID NO: 12381 - DNA, 201 bp, Homo sapiens
cactctctcagttcattgtcctaaagatgcttcatcagaaaggaataacttccaccccgttactctctgtccccttactctgctttatttttcttcgtcartcctaccaccaccacccactgtttgaacaacccactattatttgtctgtttcccatccctggtagaataggagccccatgaatgaaggaactttgcttct

SEQ ID NO: 12382 - DNA, 201 bp, Homo sapiens
ctgggatgactgtgaagtgggatcctttccagccagtaactggaaatgtgtatgagggcagaagtgagtgtactgcatttgaaacattgagaaatctagtrcatagtactgtctcttttatatcttttttttttttttttttgattttggtttgtttgttcactaacttggaaaactgatgtggaaatgtccctttggctt

SEQ ID NO: 12383 - DNA, 201 bp, Homo sapiens; identical to SEQ ID NO: 2363

SEQ ID NO: 12384 - DNA, 201 bp, Homo sapiens
tgtccctttggcttcagttacctgagcagaaggggccgggcattgccaaactctcctcttaggacagaattgctcccagtattgatcattgtgttctgagwtgggggagcaaattgtgcaggaggccaggtcagtgccaaggtgggtgggaggaattggaggaggaagcttgcctaagtgtgcccagcaaagccacggtag

SEQ ID NO: 12385 - DNA, 201 bp, Homo sapiens; identical to SEQ ID NO: 2367

SEQ ID NO: 12386 - DNA, 201 bp, Homo sapiens
acagtcctccaaggaggcacctgtgacacccaacggagtaggggggcggtgtgttcaggtgcaggtggaacaaggccagaagtgtgcatatgtgctgaccrtgggagcttgtttgtcggtttcacagttgatgccctgagcctgccatagcagacttgtttctccatgggatgctgttttctttccagagacacagcgcta

SEQ ID NO: 12387 - DNA, 201 bp, Homo sapiens
ttccgtttgtgttcttttatgcccttttgccagagtaggtggtgcaatttggctagctggctttcattactgtttttcacacattaactttggcctcaacytgacaactcaaataatatttataaatacagccacacttaaaatggtcccattatgaaatacatatttaaatatctatacgatgtgttaaaaccaagaaaa

SEQ ID NO: 12388 - DNA, 201 bp, Homo sapiens
ttgatggtgctttttttttttttttttgagacagagtctcgctctgtcgccatgctggagtgtagtggcacaatcttggctcactgcacctccgcctgccrggttcagcgattctcctgcctcagcctcccaagtagctgggactacaggtgcctgccaccatgcccagctaatttttgtatttttagtagagacggggtt

SEQ ID NO: 12389 - DNA, 201 bp, Homo sapiens
ctttgtggttttgagttggggattggaggagggagggagggaaggaagctgtgttggttttcacacagggattgatggaatctggctcttatggacacagractgtgtggtccggatatggcatgtggcttatcatagagggcagatttgcagccaggtagaaatagtagctttggtttgtgctactgcccaggcatgagt

SEQ ID NO: 12390 - DNA, 201 bp, Homo sapiens
gagttggggattggaggagggagggagggaaggaagctgtgttggttttcacacagggattgatggaatctggctcttatggacacaggactgtgtggtcyggatatggcatgtggcttatcatagagggcagatttgcagccaggtagaaatagtagctttggtttgtgctactgcccaggcatgagttctgatccctag

SEQ ID NO: 12391 - DNA, 201 bp, Homo sapiens
aagggttttggggccacttgttagctcacatagtgagaaccagccctgcccattaggtaggggaagaagttagcagtccatgatagctgttgcctgcagcrtatggatgttcattgcacagttcctgtctcctgagatcctggagtgtatacgcttggcctcagagcccagcacagagcctggcccttgggacatgcttag

SEQ ID NO: 12392 - DNA, 201 bp, Homo sapiens
ggttttggggccacttgttagctcacatagtgagaaccagccctgcccattaggtaggggaagaagttagcagtccatgatagctgttgcctgcagcgtayggatgttcattgcacagttcctgtctcctgagatcctggagtgtatacgcttggcctcagagcccagcacagagcctggcccttgggacatgcttagtaa

SEQ ID NO: 12393 - DNA, 201 bp, Homo sapiens
ttggggccacttgttagctcacatagtgagaaccagccctgcccattaggtaggggaagaagttagcagtccatgatagctgttgcctgcagcgtatggaygttcattgcacagttcctgtctcctgagatcctggagtgtatacgcttggcctcagagcccagcacagagcctggcccttgggacatgcttagtaagtat

SEQ ID NO: 12394 - DNA, 201 bp, Homo sapiens
ttgttagctcacatagtgagaaccagccctgcccattaggtaggggaagaagttagcagtccatgatagctgttgcctgcagcgtatggatgttcattgcrcagttcctgtctcctgagatcctggagtgtatacgcttggcctcagagcccagcacagagcctggcccttgggacatgcttagtaagtatttactgaatg

SEQ ID NO: 12395 - DNA, 201 bp, Homo sapiens
aatgagtgggaaatgtcttaaggcccattagtttgcaggtcttgaggaggctcccttgcactaggaagaatagaaagcatacataaagcctgtgtgctgcygccaggaagactagaaacgctatgttcagcctggagctgaatggtataccccagagcaaccctgttgaaaggcagtgcttgccttttcattctgtgtcct

SEQ ID NO: 12396 - DNA, 201 bp, Homo sapiens
gctattatttaggagaatttaccttggttctgattaacttacccatacttgcaaatcatttgcagctttttagttaactttgtgagttctcttagatttaygaccatgccagaaacagaaaggatattttcatctcttcctttctgatgtttattcttcttgtttcctttttttatcccccattatattctcaagaatctc

SEQ ID NO: 12397 - DNA, 201 bp, Homo sapiens
cgattcggaaactgggcctcgtgaagtatggagaaaaatatgctggtaactatagtggaggcaacaaacgcaagctctctacagccatggctttgatcggygggcctcctgtggtgtttctggtgagtataactgtggatggaaaactgttgttctggcctgagtggaaaacatgactgttcaaaagtcctatatgtccag

SEQ ID NO: 12398 - DNA, 201 bp, Homo sapiens
aggcaattaacgtgggctaaattggacttttccaaagatgctgtctttgggaaacatcacacatgctttggatcagaaaacctaggcttctaatttgttgrtaaggcatgaactcaggagactgttttcagtcctagtgaatggtgataattgtaattataacagtagacaacatctcttttacacattttaaatcatgaa

SEQ ID NO: 12399 - DNA, 201 bp, Homo sapiens
tcctttctgatgtttattcttcttgtttcctttttttatcccccattatattctcaagaatctctcaatactaagaaatagcgacttcatttttcagcgcrgagtgcattattttggctaccatgattcagaagcctcttgcctaaggcccaattttattctgctagttttctctgttctttgtacatggcccttgcgctg

SEQ ID NO: 12400 - DNA, 201 bp, Homo sapiens
atgcatattgaataacatgatgataagtactagactctgtgctaagccttctatgtgaaatacatttaattctcataataactctagagcagtggttctcraccggggccggttatccccctaccccaccccaccctcacccttccaccagggacataacatctggagatatttttggttgtcacaatcctgggaatgtat

SEQ ID NO: 12401 - DNA, 201 bp, Homo sapiens
agttctgttaaagcttagagagtggtgggagagactggagaagttgattaattagtaaatgaagttgtctgtggatttcccagatcccagtggcattggayatccatattatttttaaatttacagtgttctatcttatttcccactcagtgtcagctgctgctggaagtggcctggcctctatttatcttcctgatcctg

SEQ ID NO: 12402 - DNA, 201 bp, Homo sapiens
attggacttttccaaagatgctgtctttgggaaacatcacacatgctttggatcagaaaacctaggcttctaatttgttgataaggcatgaactcaggagrctgttttcagtcctagtgaatggtgataattgtaattataacagtagacaacatctcttttacacattttaaatcatgaaaatagaataaccttactgat

SEQ ID NO: 12403 - DNA, 201 bp, Homo sapiens
acacatgctttggatcagaaaacctaggcttctaatttgttgataaggcatgaactcaggagactgttttcagtcctagtgaatggtgataattgtaattrtaacagtagacaacatctcttttacacattttaaatcatgaaaatagaataaccttactgataattttagaaagtggtgattaaaagcacatttaagata

SEQ ID NO: 12404 - DNA, 201 bp, Homo sapiens
cataacaaccttgaatagaactcagatcatctgtcaatcatgtattttgataacagcctttacagtgagcatagaaaatacagtagtggctaacaacacargctccagatgtcaggttatctgggtatgaattctggtgtcagcattcactaagcatatgaccttggacaagtgatttaagtttcttttaaacagagaata

SEQ ID NO: 12405 - DNA, 201 bp, Homo sapiens
agatcatctgtcaatcatgtattttgataacagcctttacagtgagcatagaaaatacagtagtggctaacaacacaggctccagatgtcaggttatctgrgtatgaattctggtgtcagcattcactaagcatatgaccttggacaagtgatttaagtttcttttaaacagagaatagtaatacctacctcatattatta

SEQ ID NO: 12406 - DNA, 201 bp, Homo sapiens
accgaggttgtgatcttgggcagattgttgagttttaacctagattcctctgactccagatcataaattttcagaaaagttctgaaattcttgtatatacwgatggtaaatgagacttttccttacatctatgcacttctttgtttgtttgttttgagatggtcttgctctgttgcccagactggagtgcagtagtgcaat

SEQ ID NO: 12407 - DNA, 201 bp, Homo sapiens
ggttgtgatcttgggcagattgttgagttttaacctagattcctctgactccagatcataaattttcagaaaagttctgaaattcttgtatatactgatgrtaaatgagacttttccttacatctatgcacttctttgtttgtttgttttgagatggtcttgctctgttgcccagactggagtgcagtagtgcaatctccg

SEQ ID NO: 12408 - DNA, 201 bp, Homo sapiens
aacaggaagatagggagattaactgtgtaaatgttcaataggccagagtccctgcagagggtggccacagtgatcagatcttatcacatccttgctttggrtgttgcctctctggttggagtatggatagaaaagaaagaaagaccctatattgaaatgcaaagtgcagcaagtcctgactttggattaacttctcagccc

SEQ ID NO: 12409 - DNA, 201 bp, Homo sapiens
ccatagcaacagaagtctggctcatcaacaagtccatggagctgctggatgagaggaagttctgggctggtattgtgttcactggaattactccaggcagyattgagctgccccatcatgtcaagtacaagatccgaatggacattgacaatgtggagaggacaaataaaatcaaggatgggtaagtggaatcccatcaca

SEQ ID NO: 12410 - DNA, 201 bp, Homo sapiens
agggtggccacagtgatcagatcttatcacatccttgctttgggtgttgcctctctggttggagtatggatagaaaagaaagaaagaccctatattgaaaygcaaagtgcagcaagtcctgactttggattaacttctcagcccatttgcatgaaaataaaaagatgaataaaacaaggttcccactttggagggaggtgg

SEQ ID NO: 12411 - DNA, 201 bp, Homo sapiens
agaaagaaagaccctatattgaaatgcaaagtgcagcaagtcctgactttggattaacttctcagcccatttgcatgaaaataaaaagatgaataaaacarggttcccactttggagggaggtggtagctgtgagatggaaggagtgttcctgctgggcaacagcagagtaagtgctggggtagattcactcccacagtgc

SEQ ID NO: 12412 - DNA, 201 bp, Homo sapiens
tcagcccatttgcatgaaaataaaaagatgaataaaacaaggttcccactttggagggaggtggtagctgtgagatggaaggagtgttcctgctgggcaayagcagagtaagtgctggggtagattcactcccacagtgcctggaaaatcctcataggctcatttgttgagtctttgtcctacaccaggcactctgcaaaa

SEQ ID NO: 12413 - DNA, 201 bp, Homo sapiens
tgaataaaacaaggttcccactttggagggaggtggtagctgtgagatggaaggagtgttcctgctgggcaacagcagagtaagtgctggggtagattcaytcccacagtgcctggaaaatcctcataggctcatttgttgagtctttgtcctacaccaggcactctgcaaaaacgctttgcctgcaaggtctcatgcgat

SEQ ID NO: 12414 - DNA, 201 bp, Homo sapiens
cccaagtcccctctatgtctgagagctgaggctggctgtcaaagaggaactaaggatgccagggactttctgcttaggacccctctcatcacttctccaaygctggtatcatgaaccccattctacagatgatgtccactagattaagaatggcatgtgaggccaagtttccacctgagagtcagttttattcagaagaga

SEQ ID NO: 12415 - DNA, 201 bp, Homo sapiens
  misc_feature (1)...(201): n = A,T,C or G, or insertion/deletion polymorphism (see Tables 1-2)
ctagagggtaggggctggcacaaagatgcatgctggaagggtccttgcccataagaagctgacagccaaggctaggggagttctgtcttctctgcatcagntcacctctctcacctctgtcactgccccatcagactacaatgtctgcaggtctttctcccctgagtgtgagctccctgagcaaagcaggatgctgcccct

SEQ ID NO: 12416 - DNA, 201 bp, Homo sapiens
aagctgggcgtgtccattcagaacctggtaaaagtctaccgagatgggatgaaggtggctgtcgatggcctggcactgaatttttatgagggccagatcayctccttcctgggccacaatggagcggggaagacgaccaccatgtaagaagagggtgtggttcccgcagaatcagccacaggagggttctgcagtagagtt

SEQ ID NO: 12417 - DNA, 201 bp, Homo sapiens
  misc_feature (1)...(201): n = A,T,C or G, or insertion/deletion polymorphism (see Tables 1-2)
atgctggaagggtccttgcccataagaagctgacagccaaggctaggggagttctgtcttctctgcatcaggtcacctctctcacctctgtcactgccccntcagactacaatgtctgcaggtctttctcccctgagtgtgagctccctgagcaaagcaggatgctgccccttccctttgtattcctggctcctggcttca

SEQ ID NO: 12418 - DNA, 201 bp, Homo sapiens
ccatgggagtgggttagggccagcctgtggaggacctgggagccaggctgagttctatgcacttggcagtcacttctgtaaagcagcagaggcagttggcmtagctaaagcctttcgccttttcttgcaccctttacagtgtggctcgcctgttctcagatgctcggaggcttcttttatacagccagaaagacaccagca

SEQ ID NO: 12419 - DNA, 201 bp, Homo sapiens
tgttcaagatccccagcacagcctatgtggtgctcaccagcgtgaacctcttcattggcattaatggcagcgtggccacctttgtgctggagctgttcacygacaatgtgagtcatgcagagagaacactcctgctgggatgagcatctctgggagccagaggacagtgtttaattgtgatcttattccacttgtcagtgg

SEQ ID NO: 12420 - DNA, 201 bp, Homo sapiens
ggcttacacctgttatcccagcattttgggatgccgaggcgggcaaagcacaaggtcaggagtttgagaccagcctggccaacatagtgaaaccctgtctytgctaaaaacatagaaaaattagccgggcatggtggcgtgcgcctgtaatcccagctactcgggaggctgaggtgagagaattgcttgaacccgggaggc

SEQ ID NO: 12421 - DNA, 201 bp, Homo sapiens
gatatggataagtgaaagttaagcacttctttctaaaaagagaatgcaattcattttcccctaatcatttcaattagtctgatgggcatttgaacttgttrtctttaaaaagtgaaatctttacctctgatctggtaagtatccaggcaatttcttgtgtgccacccaggaggtatctggggagtgggcattttctgactg

SEQ ID NO: 12422 - DNA, 201 bp, Homo sapiens
tgaacagtcacaactgaggcaggtttctgttgtttacaggacagttctgcagatcgatttctcaacagcttgggaagatttatgacaggactggacaccaraaataatgtcaaggtaaaccgctgtctttgttctagtagctttttgatgaacaataatccttatgtttcctggagtactttcaactcatggtaaagttgg

SEQ ID NO: 12423 - DNA, 201 bp, Homo sapiens
tgatctgcccacctcggcctcccaaagtgttgggattaaaggcatgagtcaccgtgcctggtcccatgttataattttaaagtaaggtatatttctctacrgggatctttgcaaccctaagtaactggcctaaaaagttagagaagctgacttgtgcagacatttgcagcctgttggtcttttttgtgctgtgaatcatag

SEQ ID NO: 12424 - DNA, 201 bp, Homo sapiens
acttgttgtctttaaaaagtgaaatctttacctctgatctggtaagtatccaggcaatttcttgtgtgccacccaggaggtatctggggagtgggcatttkctgactgaggcattggctgccatagcatcagagcagccttccaggcagtggcctggcaaggggacagaggctggtgggagcagctggctgagtgcagcca

SEQ ID NO: 12425 - DNA, 201 bp, Homo sapiens
gaggcagtacggtgtagtgtagtgattcagagaatttgctttgccaccagacataccaggtaaccttgactaagttacttaacctatctaaacctcagttycctcatctgtgaaatggagacagtaatcatagctatttccaaactgttgtgagaattcaatgagttaaaggtataaggtcctcaccacagcgcctgccca

SEQ ID NO: 12426 - DNA, 201 bp, Homo sapiens
tgatctctgttcggctgagctacccaccctatgaacaacatgaatgtaagtaactgtggatgttgcctgagactcaccaatggcagggaaaatccaggcarttaacgtgggctaaattggacttttccaaagatgctgtctttgggaaacatcacacatgctttggatcagaaaacctaggcttctaatttgttgataagg

SEQ ID NO: 12427 - DNA, 201 bp, Homo sapiens
ctcccaaagtgctgggattataggcttgagccaccacgcctggccgatggtgctttttatcatttgaaggactcagttgtataacccactgaaaattagtmtgtaaggaagttcagggaatagtataagtcactccaggcttgaggcaaaatttacaaatgctgctgactttgtatgtaaggggaggcattttcttagaaa

SEQ ID NO: 12428 - DNA, 201 bp, Homo sapiens
ttctctcttttctctgtgctctcagagtccttagtccatgcctccagtacaacgtacatccacttacatggtaatttcctgtttacatacttttcctactyggagtggagtctgtttcttaataattttgcctctcccatgccctagcacagtgcatccagcgtatagccccttattcagttggtagatatttggccactg

SEQ ID NO: 12429 - DNA, 201 bp, Homo sapiens
cacatgtgattcttcacttgactggcttcatagaaccccaaagccaccccaccaccacataaattgtgtctctaggttctgtgttgctcacactcaaaatktctgggccttctcatttggtgcatgtgaatggtgcatatgagtgaagtctaggatggggccttagcattaaagccctggggtagtgtgactgagattgtt

SEQ ID NO: 12430 - DNA, 201 bp, Homo sapiens
agaatttaaaattagtttttattgttaatgagtgtattatgaatatttcccagtgggttacatttcctaagatgtggaattttacattgctacataaaatycccctatgtacatgtacctataatttatttaataaattccttataaatgttggacacattagtttccatttttcactatgtaaatatgtccctgtataca

SEQ ID NO: 12431 - DNA, 201 bp, Homo sapiens
gcttgctcctagtaccaagctcctgacgcatatagcagtggcagtaataaccagcccatagtaaggtttgtcacagggactggttgtaagaactgatttgrttggtatagctgtgagggcctggcacggtgtccacgtgtgcctcaatcctaattctgaaaaaggctgaccctgggggtgctaattagatacacagagagg

SEQ ID NO: 12432 - DNA, 201 bp, Homo sapiens
ggagtgcagtggcgcagtcttggctcactgcagcctctgcctcctgggttcaagcgattctcctgcctcagcctcctgagtagctgggactataggcatgstccaccatgcccaactaatttttgtatttttagtagagatgagatttcaccatgttggccaggatggtctcgatctcctaacctcgtgatctgcccgcct

SEQ ID NO: 12433 - DNA, 201 bp, Homo sapiens
ttattacaaatttctactctgtggaatttaatttttaaaatacctgcaatacatatatatgttgaatagatgaaaaattatgtagatgataatgaatgatrcggttctaaaaagacaggttaaaaagtaagttcacttttattttgagcttcagaatcattcagaagccagtcgccacaaacgcagaccaaggctcttggc

SEQ ID NO: 12434 - DNA, 201 bp, Homo sapiens
ggaattttacattgctacataaaatccccctatgtacatgtacctataatttatttaataaattccttataaatgttggacacattagtttccatttttcrctatgtaaatatgtccctgtatacatcttttattatttcctcaggaacaattcctacaaagtaaattgccctctctaaagagcatacaaattgactgagc

SEQ ID NO: 12435 - DNA, 201 bp, Homo sapiens
taacctcgtgatctgcccgcctaggccttccaaagtgctgggattacaggcatgagccaccatgcctggccttctttgagaagctggagacatgagttaaktggtgaagaagccaaatctgtatctaaaaaccctacagtagtgtgcagagctctgaggagagaaggtcccttagattttgagtgtattattatgtcagtg

SEQ ID NO: 12436 - DNA, 201 bp, Homo sapiens
tctaccactcactaagtagcccattctgggtgttgacagctctaattgttagaaaatattcaccaccctgttatgctttctagagaacaagtctaattctrttttccttgaaatagtcgaagacagctctcatgtttttctttccctgttttcccaaagtccatgattttttaggcaaaatggcctcctttcctcttatgg

SEQ ID NO: 12437 - DNA, 201 bp, Homo sapiens
acttggatgggggatcacctgggactacccaaggatgtgggctgtctgctagactatagccccttgagggcaaggtgggcgccttgctcatggttccatcmtaagccccagcacagtagtgggtgcatggtgagccattagtgaatctttgtggaatgaaggtgggagaaaataaaatacctgtacttcacagggtattgt

SEQ ID NO: 12438 - DNA, 201 bp, Homo sapiens
ggctggtggaagacatagggcatgagctgacctatgtgctgccatatgaagctgctaaggagggagcctttgtggaactctttcatgagattgatgaccgrctctcagacctgggcatttctagttatggcatctcagagacgaccctggaagaagtaagttaagtggctgactgtcggaatatatagcaaggccaaatgt

SEQ ID NO: 12439 - DNA, 201 bp, Homo sapiens
ttgagaggagtcccagagaaagaagttggcaaggtactgtgggcacctgaaagccagcctgtctcctttggcatcctgacaatatataccttatggctttyccacacgcattgacttcaggctgtttttcctcatgaatgcagcagcacaaaatgctggttctttgtatctgctttcagggtggaaacctgtaacggtggt

SEQ ID NO: 12440 - DNA, 201 bp, Homo sapiens
atttgcaatatttttattacaaatttctactctgtggaatttaatttttaaaatacctgcaatacatatatatgttgaatagatgaaaaattatgtagatrataatgaatgatacggttctaaaaagacaggttaaaaagtaagttcacttttattttgagcttcagaatcattcagaagccagtcgccacaaacgcagac

SEQ ID NO: 12441 - DNA, 201 bp, Homo sapiens
attttcttccctcttccctttaatcaagaccgtatgtgccaaagtaaatggatgactgagcagttggtgatgtaggggtggggggcgatatagaaagtcartttttggccgggcgtggtggctcatgcctgtaatcccagcactttgggaggctgaggagcaggcagatcatgaggtcaggagatccagataatcctggcc

SEQ ID NO: 12442 - DNA, 201 bp, Homo sapiens
ggtgaaaccccgtctctactaaaaatacaaaaattagctgggcatggtggtgcgcacttgtagtcccagctacttgcgaggctgaggcaggagaattgctygaacccaggaggtggaggttacagtgagccaaggtctcgccactgcactccagcctggggacagagcaagaccccatttcaaggggggaaaaaaagtcta

SEQ ID NO: 12443 - DNA, 201 bp, Homo sapiens
atacacacatgaaggagccgaagttcagagaggccaagtaacttgcctaagaaagcacagctggcaaggggcagtaataggaccagaattccagtttctcrtgctctgttgttgttatatcctaaagagagcagctctgagtagccagaagcttccctaaagtcacaggacatggggcatgggctggctgggatgagaaag

SEQ ID NO: 12444 - DNA, 201 bp, Homo sapiens
agtgagccaaggtctcgccactgcactccagcctggggacagagcaagaccccatttcaaggggggaaaaaaagtctatttttaagttgttattgcttttytcaagtattcttccctccttcacacacagttttctagttaatccatttatgtaattctgtatgctcctacttgacctaatttcaacatctggaaaaatag

SEQ ID NO: 12445 - DNA, 201 bp, Homo sapiens; identical to SEQ ID NO: 2383

SEQ ID NO: 12446 - DNA, 201 bp, Homo sapiens
taatgtctcgttccacccctgattccagtgctgactgattctggagtggcagagagggttggaggctcaccgctctgctcacccgaccctctggccatctyctcttagaatgcaagggcagggattttgttacacagcgcctcttttgttataggctagctcctgccttcaaggagcactgagaaaaatattatccctttg

SEQ ID NO: 12447 - DNA, 201 bp, Homo sapiens
gctttggaattaaaaaccctggccctcaaggaatttctattcttctgggagcaggatatttacatgggtgactgcagcttgatctgtgtggtactagtggraaacataggatgttgggcacaaaagagtcacaaaacgccgggcgcggtggctcatgcctctaatcctagcactttgggaggccaaggcgagtggatcacc

SEQ ID NO: 12448 - DNA, 201 bp, Homo sapiens
agaggaggcgcacagggaaacactcaccaatgggggttgcattgaactgaactcaaaatatgtgataaaactgattttcctgatgtgggcatcccgcagcyccctccctgcccatcctggagactgtggcaagtaggttttataatactacgttagagactgaatctttgtcctgaaaaatagtttgaaaggttcattttt

SEQ ID NO: 12449 - DNA, 201 bp, Homo sapiens
gggagcaggatatttacatgggtgactgcagcttgatctgtgtggtactagtggaaaacataggatgttgggcacaaaagagtcacaaaacgccgggcgcrgtggctcatgcctctaatcctagcactttgggaggccaaggcgagtggatcacctgaggtcaggagttcaagaccagcctggccaacatgatgaaacccc

SEQ ID NO: 12450 - DNA, 201 bp, Homo sapiens
caaaatttagccctcctttgaacaggaatttgactcagtgaaccttgtacacactcgcactgagtctgctgctgatgatactgtgcaccccactgtctggsttttaatgtcaggctgttcttttaggtatggcggcttttccctgggtgtcagtaatactcaagcacttcctccgagtcaagaagttaatgatgccatcaa

SEQ ID NO: 12451 - DNA, 201 bp, Homo sapiens
cagataaacctcatcttgggccagtgcttccatttactgtctccttttggcttgcttatccttccttctgccttcttgaattgatttgcctctttatctcycctttcagccttgaaagttcctcgaaggcagggactgtgtccccatcttttctataaatggcattgttgtacattggtaaagttgagtgaaaaaatcttt

SEQ ID NO: 12452 - DNA, 201 bp, Homo sapiens
ttcccccagctgggcagagtggaggcagaggaggagaggtgcagaggctggtggcgctgactcaaggtttgctgctgggctggggctgggtggctgcgggkgtgggagcagcttggtggcgggttggcctaatgcttgctggggtgcctggggctcggtttgggagctagcagggcagtgtcccagagagctgagatgatt

SEQ ID NO: 12453 - DNA, 201 bp, Homo sapiens
tcagccctaatcccatctcctagtgtttagtattcagctacccttcactgggcagtaattctgtgccaggcctgatctgggcattggtggtactaagaacrcatattccctatcctataggcatagtctggtagagacaacatgcaagtaaaacaatgttccttaaactgtggttccacacctccctcccccaacattaaa

SEQ ID NO: 12454 - DNA, 201 bp, Homo sapiens
gtgtgtgtgtgtaacagcaccatcacactgtttgagttgaggagcacatgctgagtgtggctcaacatgttaccagaaagcaatattttcatgcctctccygatatggcgatgctcccctatctcattcctgtgtgtgtttagccaggcaactgttgatcatcaatattatgataacgtttctccactgtcccattgtgcc

SEQ ID NO: 12455 - DNA, 201 bp, Homo sapiens
tctcagctatctaactgtgtgtgtaatcaggccaggtcctccctgctgggcagaaaccatgggagttaagagattgccaacatttattagaggaagctgaygtgtaacttctctgaggcaaaatttagccctcctttgaacaggaatttgactcagtgaaccttgtacacactcgcactgagtctgctgctgatgatactg

SEQ ID NO: 12456 - DNA, 201 bp, Homo sapiens
agcatctagagttaagggtaggtcaaccctgacttctgtacttctaaatttttgtcctcaggtcaatcctgaccgggttgttccccccgacctcgggcacygcctacatcctgggaaaagacattcgctctgagatgagcaccatccggcagaacctgggggtctgtccccagcataacgtgctgtttgacatgtgagtac

SEQ ID NO: 12457 - DNA, 201 bp, Homo sapiens
ctataatatagcattaatgatgaaacagacacagtcatcttcgggaagaagaatagaggcttatttgctgcctgtgaaattaaaattactctgactgggartccatcgttcagtaagtttactgagtgtgacaccttggcttgactgttggaaagacagaaagggcatgtagtttataaaatcagccaaggggaaaatgct

SEQ ID NO: 12458 - DNA, 201 bp, Homo sapiens
cacatcgagcataagatccagactctttcccaggcctctctcatctggctcctctcctcctcctttatcattactcttcttcgtagcttatcctactccarccatgctgtcttcctattattcctaaaaagtagaaatgcatttcttcctagggcctttgtacctgcacttgccatcgcttttgctcagaatgttcttttt

SEQ ID NO: 12459 - DNA, 201 bp, Homo sapiens
gtgcaaagcacgtcattacagacatttgtttactgatttagaaccttaatatttaatttaaatagcactttacacttactgatgaaatgcttttcctttcyttctctcccagcccctgtacttaagtgcttcaataggctctcattatatatgatttttaggttttgtttatcagcttcttcgcttttataatctgaaaag

SEQ ID NO: 12460 - DNA, 201 bp, Homo sapiens
tcttaatcttttaacaggtatttgtgaactttgccaaggaccaaagtgatgatgaccacttaaaagacctctcattacacaaaaaccagacagtagtggamgttgcagttctcacatcttttctacaggatgagaaagtgaaagaaagctatgtatgaagaatcctgttcatacggggtggctgaaagtaaagaggaacta

SEQ ID NO: 12461 - DNA, 201 bp, Homo sapiens
ttgtatggttctaaaggaatggttgattacctgtggtttggttttaggtactgggaccctggtcctcgagctgacccctttgaggacatgcggtacgtctsggggggcttcgcctacttgcaggatgtggtggagcaggcaatcatcagggtgctgacgggcaccgagaagaaaactggtgtctatatgcaacagatgccc

SEQ ID NO: 12462 - DNA, 201 bp, Homo sapiens
ggtgtggacatctttgcaggggatattcagtctgctgtagctttcttgattggaaggaatagtttatcatatatttgaagtgttccctcagtgcctttggyttttgttgacccctctgcagctctctgctttttcttgcccatatttggaaagtgactctaaagcataataagcatcacctattagggtttttaatgtaca

SEQ ID NO: 12463 - DNA, 201 bp, Homo sapiens
atctctgaactaggtatgagacattcatcgaaaaaaatccatcaagtgtttattgtatgtctgctttataccagcactgttctaggcactgaagttcgacyaccaacaaggcagttgtgatgcacttggagctttcattctgatgggcattgagatccaggctgaaggctgagtctgggaatttgaggaattctttgtagg

SEQ ID NO: 12464 - DNA, 201 bp, Homo sapiens
gcatctaaaaaataggtaataaagataatttctttgggatagtgcctagtgagaaggcttgatatttattcttttgtgagtatataaatggtgcctctaamataaagggaaataaaactgagcaaaacagtatagtggaaagaatgagggctttgaagtccgaactgcattcaaattctgtctttaccatttactggttct

SEQ ID NO: 12465 - DNA, 201 bp, Homo sapiens
ttttttgagttacttactaaataaaaataaaacactatttctcaatagacttgaagcttcaagatttcctggtggacaatgaaaccttctctgggttcctrtatcacaacctctctctcccaaagtctactgtggacaagatgctgagggctgatgtcattctccacaaggtaagctgatgcctccagcttcctcagtagg

SEQ ID NO: 12466 - DNA, 201 bp, Homo sapiens; identical to SEQ ID NO: 2346

SEQ ID NO: 12467 - DNA, 201 bp, Homo sapiens
tgcattccagccagcgtgacagagtgagactctgtctcagaaaaagaaaaaaaagatagaagttttcttctgtagatcagtgttagaactcataccaagcraagtggtcctggtgagtatttcagtgaaaaactgcattcttgctcagatattgtcaagacttttcacccaaagattcttatttatgtctcagtccgtacc

SEQ ID NO: 12468 - DNA, 201 bp, Homo sapiens
aagcgaagtggtcctggtgagtatttcagtgaaaaactgcattcttgctcagatattgtcaagacttttcacccaaagattcttatttatgtctcagtccrtaccttgtgtgaaaattaatactggatgtcagaacgctgttgtgtttttaaagttccctggggttaagagcagtttccattaggtgttctctgcttttta

SEQ ID NO: 12469 - DNA, 201 bp, Homo sapiens
atgttcattgtggaaaatgctgaagacttggaaaatacaaaaatgctgagatcaaacactattgatacgttagtgtatttcttcctgtcctgttctacttwctttctttgaattctgctcacgtgtttctgactgatgaggtctgacttttgggttccttttccagaggagaagccttctttcagcttgccatttgttacc

SEQ ID NO: 12470 - DNA, 201 bp, Homo sapiens
tggttgttgggttgagaagagactgggatgggggaaagggaggacaaaggacattgtgctggattgagaaagcagtaagtcagtttcattcattcactcarccgatgatgttcaaataccaccatcatccgtgggctaaaggatgaagagccatccctccctgagagtcaggaagcacttcccagataaagtttggagtgt

SEQ ID NO: 12471 - DNA, 201 bp, Homo sapiens
tgatgcaggggaacctttctccatttccaaccacaggtgtgtctttcagacactgagtgaggcaggttttgtactttattgtaacacaagaaccttttctyctctggagtaaagcactccagacattcgcaagttgctttacaagccttaaaaggatggtattgtaggcaactttaattaaatcccatctcctcctctccc

SEQ ID NO: 12472 - DNA, 201 bp, Homo sapiens
tcaagcgattctcctgcctcagcctcatgcgtcaccacgcccagctaattttgtatttttagtagagacagggtttctccatgttggtcaggctggtctcsaactcccaacctcaggtggttcgcccgccttggcctcccaaagtgctgggattgcaggcatgagccactgcgcccagccccaaattttggtttttgcttg

SEQ ID NO: 12473 - DNA, 201 bp, Homo sapiens
ccttgcctgagatggttggcaaaggcctcattgcagcattcattggcaggccacagttcttttggcagctctgcttcctgacctttcaccctcaggaagcraggctgttcacacggcacacacatgccagacagggtcctctgaagccacggctgccagtgcatgtgtcccagggaaagctttttcctttagttctcacac

SEQ ID NO: 12474 - DNA, 201 bp, Homo sapiens
tctgaattcagccttctggttgcccctcaagagtcagtttaaatgttggtcatgttagttgtcagtgaaaacaatggtgaggctggcatgagagtgtgaayctggatgggagggcttgtgcttcacgaaaacatttttccagatcagctcagtcgtgagttatccgtcattgacgttataataagctctgattatttatca

SEQ ID NO: 12475 - DNA, 201 bp, Homo sapiens
gccatgggatactcttctgttatcacagaagagataaagggcattgagactgagattcctgagaggagatgctgtgtctttattcatctttttgtccccarcatggtgcactaaatttatggttagttgaaagggtggatgcttaaatgaatggaagcggagaggggcaggaagacgattgggctctctggttagagatct

SEQ ID NO: 12476 - DNA, 201 bp, Homo sapiens
taattgcagtaccctattttcctttttggctgcagcctctcagccagccacagcatctccctgtgtcttggtaggttttggaaagaagtgtgggagcaaamgcatgatgttacatgtagactggcctgagatactcattctcagggcactgtgtgaatgatgagctgctgttactgtgtggaggggaaatgcacttagtgc

SEQ ID NO: 12477 - DNA, 201 bp, Homo sapiens
cttgccctttcttggaaaatcctgcttgtctgtgccaaagggataattgtgaaagcacttttgaaatacttaatgagttgattttcttcaaattaaaaaawatatataaatgtatatgtgtatgtacatgtgtgtacacatacacacctttatacatacagcccatttaaaacaagctccactttggagtgctctacgtca

SEQ ID NO: 12478 - DNA, 201 bp, Homo sapiens
ggaaaacaggtaagaggctctccagtgacttacttgggcgttattgttttgtttcgaggccaaggaggcttcgggaagtgctcggtttcggggactttgayccggagccccacatccccaccacttgcaactcagatgggaccggaggcggtgttaaatggggagacgatgtcctagtacgagctctggtgaccccaggac

SEQ ID NO: 12479 - DNA, 201 bp, Homo sapiens
aagatgtttacgagggccaagggaatggacttcagaattacacggtggaatgaattttactgctgcggctcaggtccctgtataagctaatactgcatgcrtagaacagcagcgaactaaccctgaataataggccagtcttctgttgagcctttcagcctctctcctcttcatcctactgttgtcaggaacagccacatg

SEQ ID NO: 12480 - DNA, 201 bp, Homo sapiens; identical to SEQ ID NO: 2350

SEQ ID NO: 12481 - DNA, 201 bp, Homo sapiens
taactctgccattatttttctgcgtagttttgggtaagtcacttatcttctttaggatggtaatgatcagttgcctcatcagaaagatgaacagcattacrcctctgcattgtctctaacatgagtaggaataaaccctgtcttttttctgtagatcatacaagtgagtgcttgggattgttgaggcagcacatttgatgt

SEQ ID NO: 12482 - DNA, 201 bp, Homo sapiens; identical to SEQ ID NO: 2352

SEQ ID NO: 12483 - DNA, 201 bp, Homo sapiens
ttggagttgttcttcatcgagctgaaacatccagccctttgtgctcccccaaggcctccctcctgacaccacctacctcagccctctcaatcaatcactgsatgtgggctgccctgggaaggtcgtgccccagggcctacatggctctctgctgctgtgacaaacccagagttgctgatgcctgaggccgtctactgacag

SEQ ID NO: 12484 - DNA, 201 bp, Homo sapiens; identical to SEQ ID NO: 2345

SEQ ID NO: 12485 - DNA, 201 bp, Homo sapiens
cttgtgagcgctggcctgctagtggtcatcctgaaggtaaggcagcctcactcgctcttccctgccaggaaactccgaaatagctcaacacgggctaaggraggagaagaagaaaaaaaatccaagcctctggtagagaaggggtcatacctgtcatttcctgcaatttcatccatttatagttggggaaagtgaggccca

SEQ ID NO: 12486 - DNA, 201 bp, Homo sapiens
gtatgagacattcatcgaaaaaaatccatcaagtgtttattgtatgtctgctttataccagcactgttctaggcactgaagttcgaccaccaacaaggcarttgtgatgcacttggagctttcattctgatgggcattgagatccaggctgaaggctgagtctgggaatttgaggaattctttgtaggtcctgggtctaca

SEQ ID NO: 12487 - DNA, 201 bp, Homo sapiens
ataccttcctggtgatggtataaattgctattctctattggaaagcaatttggaatgaaaatttaaagaaccattttaaaatatgctatcctgcgtacctscattccacccacccccagggatgtagcctactgaaataattttaaagaagtcaccatatgagagaaaatgttattgctatattgttattgtgagaaattg

SEQ ID NO: 12488 - DNA, 201 bp, Homo sapiens
gaccaggaaaggagcagctgccgtatagagcaggagacgctctgctgggtgtgatacagtccctgatggggcctcctactgcagtctttccagtcaggaargaaacatcctctaagtggggacctaaagaatggatgtcagccaggtaaagaacagggagtagaatgttccaggtagaggacatagtatatgcattggtcc

SEQ ID NO: 12489 - DNA, 201 bp, Homo sapiens
tctgtgcttctcctcctttttctgcggtccctggctccccacctgactccaggtgaacaagaccttccaggaactggctgtgttccatgatctggaaggcmtgtgggaggaactcagccccaagatctggaccttcatggagaacagccaagaaatggaccttgtccgggtgagtgtccctcccattattaccatgtgcct

SEQ ID NO: 12490 - DNA, 201 bp, Homo sapiens
ccttgaaagcatctggcttctgaggttcaactatgggaatatggtctcttaatgaacattaagttgagtttgccttttaggtccacatgttgacaaatgtrtcagagtaatctctgtcctaggatcagagggcctgtaggcacttgcaaaagcagttagctctgactcccagccagtgcacactccacctttctgactccc

SEQ ID NO: 12491 - DNA, 201 bp, Homo sapiens
ccctgaaacgggtgctgggaagagtcaatagtttggaataactcaataatttatggtgcttctttagaaagatttgctggctttatgtgggaagaaatttktttttttgattggggagtggtgggttggtggtgaggctgcctgtggaaagagaagtgagtgttttgactcactgttatttaaaaatctctagggctgttc

SEQ ID NO: 12492 - DNA, 201 bp, Homo sapiens
gcagaggaaagtgctagcatacattaccctgtggctgcatgactttgtgaataggttagttagcaccctttcagccacttcttcttacctgttaatgagawaaaacatgtaattgcttaaaaacagtatttggcacataggaagcacttagtgaatatgaattatgattttttttggagtggtgacatctcaaccaagcca

SEQ ID NO: 12493 - DNA, 201 bp, Homo sapiens
cagctactggaaagaaatgaataaacccttgtccttgtaatggtggtgaaggggagggaggtagtttgaatacaacttcacttaattttacttccctattsaggcaggaattgccaaaccatccaggagtggaatatgcaacctggcgtcatgggccagctggttaaaataaaattgatttctggcttatcacttggcatt

SEQ ID NO: 12494 - DNA, 201 bp, Homo sapiens
cgtcttttctctctgccttttccccaagggccaggacccctggatctctgggcagagcagacgcaggcccctataatagccctcatgctagaaaggagccrgagcctgtgtataaggccagcgcagcctactctggacagtgcagggttcccactctcccaactccccatctgcttgcctccagacccacattcacacccg

SEQ ID NO: 12495 - DNA, 201 bp, Homo sapiens
ccggagcctgtgtataaggccagcgcagcctactctggacagtgcagggttcccactctcccaactccccatctgcttgcctccagacccacattcacachcgagccactgggttggaggagcatctgtgagatgaaacaccattctttcctcaatgtctcagctatctaactgtgtgtgtaatcaggccaggtcctccct

SEQ ID NO: 12496 - DNA, 201 bp, Homo sapiens
cggtttgggggcattaccttgtacctggtatgttttctttcaggtgtggttcaataacaagggctggcatgcaatcagctctttcctgaatgtcatcaacratgccattctccgggccaacctgcaaaagggagagaaccctagccattatggaattactgctttcaatcatcccctgaatctcaccaagcagcagctctc

SEQ ID NO: 12497 - DNA, 201 bp, Homo sapiens
gtctctaggttctgtgttgctcacactcaaaatttctgggccttctcatttggtgcatgtgaatggtgcatatgagtgaagtctaggatggggccttagcrttaaagccctggggtagtgtgactgagattgttggtaaagaatgtgcagtggttggcatgacctcagaaattctgaaatgggactgcacctgcagactga

SEQ ID NO: 12498 - DNA, 201 bp, Homo sapiens
ctcaagagtcagtttaaatgttggtcatgttagttgtcagtgaaaacaatggtgaggctggcatgagagtgtgaatctggatgggagggcttgtgcttcaygaaaacatttttccagatcagctcagtcgtgagttatccgtcattgacgttataataagctctgattatttatcaagcatcattctttatagatatctca

SEQ ID NO: 12499 - DNA, 201 bp, Homo sapiens
acctcaagtctgatgcagaccagagctgggccagctccccagtcgtgggtatagaatcatagttacaagcaggcatttcttggggatggggaggactggcrcagggctgctgtgatggggtatcttttcagggaggagccaaagcgctcattgtctgtgcttctcctcctttttctgcggtccctggctccccacctgact

SEQ ID NO: 12500 - DNA, 201 bp, Homo sapiens
attgtttttatctttgaataatatgttcttgtttgtccattttccatgcatgcgatgttaggcatacaaaatacattttttaaagaatactttcattgcarattggaaacttcgtttaaaaaatgctcatactaaaattggcatttctaacccataggcccacttgtagttatttaccgaagcaaaaggacagctttgctt

SEQ ID NO: 12501 - DNA, 201 bp, Homo sapiens
ggactggcacagggctgctgtgatggggtatcttttcagggaggagccaaagcgctcattgtctgtgcttctcctcctttttctgcggtccctggctcccyacctgactccaggtgaacaagaccttccaggaactggctgtgttccatgatctggaaggcatgtgggaggaactcagccccaagatctggaccttcatgg

SEQ ID NO: 12502 - DNA, 201 bp, Homo sapiens
gggcagtcttaggtctcctgcccctcacgagcaccccagagaggccacgtgctcagtgatctcagtgggcgcatctttctagtcttgctattctttttggycatgttgttcagaaaccatactgggcagggccgacttcaccctaaaggctgcgtctcttcactctgcttttgtttgttccaaataaagtggcttcagaat

SEQ ID NO: 12503 - DNA, 201 bp, Homo sapiens
gttaacaaaaatacatacataccttcctggtgatggtataaattgctattctctattggaaagcaatttggaatgaaaatttaaagaaccattttaaaatrtgctatcctgcgtacctccattccacccacccccagggatgtagcctactgaaataattttaaagaagtcaccatatgagagaaaatgttattgctatat

SEQ ID NO: 12504 - DNA, 201 bp, Homo sapiens
tggagtgcagtggcgcaatctcggctcactgcaacttccgcctcccagattcaagcagttctcctgcctcaacctcctgagtagctgggactacaggcgtrtgccaccatgtccggctaatttttgtatttttttaatagagacggggttttactatggtggctaggctggtctttaactcctgaccttgtgatctgccca

SEQ ID NO: 12505 - DNA, 201 bp, Homo sapiens
gcaaggggggaaaagcttataatgttagtgaaactaagactgatttttttataaagcagcagttttcagacccttggagactccaattcggtagaaccagrgcttcatcttctctgtcgaagctgtgacaggagttgcaaatgcctctcctttttgctgagtttgcagctgctgtttttccggcagcacatctgtgcaggc

SEQ ID NO: 12506 - DNA, 201 bp, Homo sapiens
gaaataggcctcctttgcatcatgacctgtacatcctgcaattggaaaagattgtactttagttggtttaaccagcagcattatttttctaaactaagcaktaagaaggaattaggttttatgtgggatcaacagactgggtctcaaaagaggaaggtgatagaacacagtggggagggggaggtgcactagaaacagagg

SEQ ID NO: 12507 - DNA, 201 bp, Homo sapiens
tcacttgagcccaggtgttcaagaccagcccaggcaacatggcaagactctgtctctatgaaaaaattaaaaattagccaggtgtggtggtgtgcacctgkagtcttagctacttggtaggctgagatgggaggatcacttgggcttgggaggtcaaggctgcggtgagctgtgattccatcactgcactccagcccgggc

SEQ ID NO: 12508 - DNA, 201 bp, Homo sapiens
aaataaaaatgaataggtgcttagaatggggcctgacattagtaagtgcttagttttgtgtgtgtatatgttatttttattttggaggagaacataaaaargacaaagtgtagaaaaactggttgggtgtattcagctgtcataacatgagagttgttatgcccagatgcacttgacatgtgaatttattagaaacatgat

SEQ ID NO: 12509 - DNA, 201 bp, Homo sapiens
ctcaagagaatatttctacccattttcttctaggttttcctatctcagtgactaatggtagcaaagcattcccttaaaaaggcattatttgtgaaacttayctaaaatcgaattcgggtccaattaaatttttgaaattttatattaaaaattatattagtagggatgggtaagaggtgttttggtctggttggttggtta

SEQ ID NO: 12510 - DNA, 201 bp, Homo sapiens
agggttctatagctaccccaggttcccatgactggagaattggggcacagggtggcgggggagagtgagtgacaagaatcctaacaatcttatttccattsagtccttataaaagaagtggattaactaccacgtttttaagtttttcttaaatttaggttatgtggatctggcgtttcttgttttgtcctgggtttgttt

SEQ ID NO: 12511 - DNA, 201 bp, Homo sapiens
acccaaataggccctaaataaacatttatagcctcctgcctgcctgagaaaccagggtggacatggagagaaggcacttctgaaagttcaagcgcagtgcsctgtgtccttacactccactcctcagtgctttctgtgggttcatttctgtcttctctcctgtcacagtctgcatggaggaggaacccacccacttgaagc

SEQ ID NO: 12512 - DNA, 201 bp, Homo sapiens
agaattggcctatcaatgagataagaggcctggctttctggcactctgctctagggcaagtaaaatggagaattccaaattctgaaattgttagaacatarttctgtgtcttagttaaatatctacacttacagataaatagcataaatgctttctccccatatttcagcccagtcctacttaaagacaacataaattgca

SEQ ID NO: 12513 - DNA, 201 bp, Homo sapiens
agggccacactgtcatgttcatggaccctagactggctttgtagcctccatgggccccttccatacacaaatattaaaaattatatttcatgactgcattsgtataaagatgaatataatccagaccagattcatgattattcatacatttttagtgtattaacttttaattctgcttttaaaataaattaaaacattcta

SEQ ID NO: 12514 - DNA, 201 bp, Homo sapiens
ccaaggctaggggagttctgtcttctctgcatcaggtcacctctctcacctctgtcactgccccatcagactacaatgtctgcaggtctttctcccctgaktgtgagctccctgagcaaagcaggatgctgccccttccctttgtattcctggctcctggcttcagtgcctggacataagtatgggcataataagtgtccc

SEQ ID NO: 12515 - DNA, 201 bp, Homo sapiens
agtttcaagggcaaactcagttttttcatctactagacgaatgattttctggaatgattacaagcaggcaagatggtgtagtggaaatagcaaatgtcttyggcatcagacaagttggggtttgtttgtatcctgcctctgcccttcaccgaggttgtgatcttgggcagattgttgagttttaacctagattcctctgac

SEQ ID NO: 12516 - DNA, 201 bp, Homo sapiens
ctctatttatcttcctgatcctgatctctgttcggctgagctacccaccctatgaacaacatgaatgtaagtaactgtggatgttgcctgagactcaccartggcagggaaaatccaggcaattaacgtgggctaaattggacttttccaaagatgctgtctttgggaaacatcacacatgctttggatcagaaaacctag

SEQ ID NO: 12517 - DNA, 201 bp, Homo sapiens
ggcttctctcccaggtaactctgagaaagtgttattaagaaatgtggcttctactttctctgtcttacggggctaacatgccactcagtaatataataatygtggcagtggtgactactctcgtaatgttggtgcttataatgttctcatctctctcattttccagatattcctcaaggtggccgaagagagtggggtgga

SEQ ID NO: 12518 - DNA, 201 bp, Homo sapiens
cagctttgtgtgcaattagaggagcaagggttgtgtgtatttagcacagcaggttggcctggtcctctcctctcaacatagtcaccacatacctggcactytgctaaggctgggaatgcagacagatgggtgcctgctttcagagtgctcaatgtgctgaggaagccagcaacagaaacagatgatttcaggagctccagg

SEQ ID NO: 12519 - DNA, 201 bp, Homo sapiens
ggaggtgtggggttgggtgggtaggcaccaaagcaagatttagaagagttttctgtaggaatttataatggtaaaggatcaacttcatttccaagctattyatgagggtttatgtttaggaaaagtgctaagcttagagaaggaggagaaatctgattttattaatgagtgtagccataatggcatatcctggcagaagtc

SEQ ID NO: 12520 - DNA, 201 bp, Homo sapiens
ggtttcaccatgttggccaggctgatctcaaactcttgacctcaggtgatccgcccacctctggctcccaaagtgctaggattacaggcatgagccactgygcccagccccagttttatttattcaccagttgatggtcttttcgacaactaattgtttccagtttttggctattctgtataaggcttctataaatattca

SEQ ID NO: 12521 - DNA, 201 bp, Homo sapiens
tctgactgggaatccatcgttcagtaagtttactgagtgtgacaccttggcttgactgttggaaagacagaaagggcatgtagtttataaaatcagccaargggaaaatgcttgtcaaaatgtattgtcgggtattttgattaatagtttatgtggcttcattaattcagagttactctccaatatgtttatctgcccttt

SEQ ID NO: 12522 - DNA, 201 bp, Homo sapiens
aacctcctgagtagctgggactacaggcgtatgccaccatgtccggctaatttttgtatttttttaatagagacggggttttactatggtggctaggctgktctttaactcctgaccttgtgatctgcccaccttggcttcccagagtgctgggattacagatgtgagccacagtgcccggcctaagttttacttcttata

SEQ ID NO: 12523 - DNA, 201 bp, Homo sapiens
cctgagtagctgggactacaggcgtatgccaccatgtccggctaatttttgtatttttttaatagagacggggttttactatggtggctaggctggtcttkaactcctgaccttgtgatctgcccaccttggcttcccagagtgctgggattacagatgtgagccacagtgcccggcctaagttttacttcttataatgga

SEQ ID NO: 12524 - DNA, 201 bp, Homo sapiens
aagcattggatcatacgtacatttcagagtctagagggcctgtccttctgtggcccagatgtggtgctccctctagcatgcaggctcagaggccttggccyatcaccctggctcacgtgtgtctttctttctccccttgtccttccttggggcctccagctttctgcgggtgatgagccggtcaatgcccctcttcatgac

SEQ ID NO: 12525 - DNA, 201 bp, Homo sapiens
gatgtgtcgtgggcggctgaacgtcgcccgtttaaggggcgggccccggctccacgtgctttctgctgagtgactgaactacataaacagaggccgggaasggggcggggaggagggagagcacaggctttgaccgatagtaacctctgcgctcggtgcagccgaatctataaaaggaactagtcccggcaaaaaccccgt

SEQ ID NO: 12526 - DNA, 201 bp, Homo sapiens
cctggatttactcagtggctgtgatcatcaagggcatcgtgtatgagaaggaggcacggctgaaagagaccatgcggatcatgggcctggacaacagcatmctctggtttagctggttcattagtagcctcattcctcttcttgtgagcgctggcctgctagtggtcatcctgaaggtaaggcagcctcactcgctcttcc

SEQ ID NO: 12527 - DNA, 201 bp, Homo sapiens
tgctagtggtcatcctgaaggtaaggcagcctcactcgctcttccctgccaggaaactccgaaatagctcaacacgggctaagggaggagaagaagaaaaraaatccaagcctctggtagagaaggggtcatacctgtcatttcctgcaatttcatccatttatagttggggaaagtgaggcccagagaggggcagtgact

SEQ ID NO: 12528 - DNA, 201 bp, Homo sapiens
aaaaaagaagacaaaaagggattttataccagtattatcttggctgtgtgactctgaagccacagttgtaagttataattactctgaaacacaaggccctrtgactcttttgggctctttggtgtttatcttgattacaacgttggaatatagaaatgaaaggaatgggagaggtgatagacttcaggcagtgtaactagt

SEQ ID NO: 12529 - DNA, 201 bp, Homo sapiens
ctcgctcttccctgccaggaaactccgaaatagctcaacacgggctaagggaggagaagaagaaaaaaaatccaagcctctggtagagaaggggtcatacmtgtcatttcctgcaatttcatccatttatagttggggaaagtgaggcccagagaggggcagtgacttgcccaaggtcaacccagccgggtagcagctaag

SEQ ID NO: 12530 - DNA, 201 bp, Homo sapiens
gaagaaaaaaaatccaagcctctggtagagaaggggtcatacctgtcatttcctgcaatttcatccatttatagttggggaaagtgaggcccagagagggrcagtgacttgcccaaggtcaacccagccgggtagcagctaagtaggatgagagtgcagggttcatgctttccagataaccacatgctcaactgtgccatg

SEQ ID NO: 12531 - DNA, 201 bp, Homo sapiens
actgcaaggggaaggtcagtggcagaggtagtggtcccatggttggtgcataagagctgctctgagacaactgcatgctggtgggtcctgcagacatgtasccatcagccggagataggctcaaaatatccacaagagtttggatgattgtgggaatgcagaatccatggtgatcaagagggaaagtcaagttgcctggcc

SEQ ID NO: 12532 - DNA, 201 bp, Homo sapiens
tttccttggcttttagacagaaaagttacgtgggatattatctcccacagctcttctgtggtgccaccagtcatagtccttatataaggagaaaccagttraaattacctattgaagaaacaaagagcaaactcgcccactgaaatgcgtagaaagccctggactctgttgtattcataactctgccattatttttctgcg

SEQ ID NO: 12533 - DNA, 201 bp, Homo sapiens
cctgtggaaagagaagtgagtgttttgactcactgttatttaaaaatctctagggctgttccaataagcaacaaaaggcaaaatggcctggttctctgtcmcctttctgtctgtatgcctcgtacaggttatgaaaagaaaaagttgggaaaagctgtccacctcacctaattgtgttcttgtggagtgtgctagatgccc

SEQ ID NO: 12534 - DNA, 201 bp, Homo sapiens
aagaaacaaagagcaaactcgcccactgaaatgcgtagaaagccctggactctgttgtattcataactctgccattatttttctgcgtagttttgggtaartcacttatcttctttaggatggtaatgatcagttgcctcatcagaaagatgaacagcattacgcctctgcattgtctctaacatgagtaggaataaaccc

SEQ ID NO: 12535 - DNA, 201 bp, Homo sapiens
tctgttgtattcataactctgccattatttttctgcgtagttttgggtaagtcacttatcttctttaggatggtaatgatcagttgcctcatcagaaagawgaacagcattacgcctctgcattgtctctaacatgagtaggaataaaccctgtcttttttctgtagatcatacaagtgagtgcttgggattgttgaggca

SEQ ID NO: 12536 - DNA, 201 bp, Homo sapiens
ttcgctgtgagtacctctggcctttcttcagtggctgtaggcatttgaccttcctttggagtccctgaataaaagcagcaagttgagaacagaagatgatwgtcttttccaatgggacatgaaccttagctctagattctaagctctttaagggtaagggcaagcattgtgttttattaaattgtttacctttagtcttct

SEQ ID NO: 12537 - DNA, 201 bp, Homo sapiens
agacttcccctttacaaaagtatgatgagttttgacaaatggatacacatgtgtatctaccactgccatgctccttttcagtctgtcgtcccctccacccrtgaccactggtcaccactgcagtgatttctgtccccttcatttcaccttttccagaatgtcatataaatggaatcatgcagtatgtagttttttgtgtct

SEQ ID NO: 12538 - DNA, 201 bp, Homo sapiens
tttactatggtggctaggctggtctttaactcctgaccttgtgatctgcccaccttggcttcccagagtgctgggattacagatgtgagccacagtgcccrgcctaagttttacttcttataatggactcctgttaagccaataggtgatgaaaggaaaccataaccaactcttcaggctcattcatccttcaagaatagc

SEQ ID NO: 12539 - DNA, 201 bp, Homo sapiens
agattcaagcagttctcctgcctcaacctcctgagtagctgggactacaggcgtatgccaccatgtccggctaatttttgtatttttttaatagagacggkgttttactatggtggctaggctggtctttaactcctgaccttgtgatctgcccaccttggcttcccagagtgctgggattacagatgtgagccacagtgc

SEQ ID NO: 12540 - DNA, 201 bp, Homo sapiens
tctaaaaagacaggttaaaaagtaagttcacttttattttgagcttcagaatcattcagaagccagtcgccacaaacgcagaccaaggctcttggcacatyaaatatgcctatggcttagggttattgacaagtcttatgttgcagtgtatgtggtttatagtcctgccttccacagttgcttgggagagctgtgagtcac

SEQ ID NO: 12541 - DNA, 201 bp, Homo sapiens
ttgagtgaatgaagatttgaatcatagaaccagaaggggttctcatctgaaatgcaaaggaaggaggagttggtttaattcaataagtttcagttgagtamacatgatttagtgagacactgttcttgcttctgactcaccatttggaaaatctctctaaaataaaattggactctccatctcggacatcattttgggtgt

SEQ ID NO: 12542 - DNA, 201 bp, Homo sapiens
ctctgccaaatccaacttccaagaagcatttggaagtcaaaacattttatctggttagtcttaaagtccagatattttgtgatagctggtatttagtttaygatatttcccaggaagaactttttagtagttgaaccatttatgaaagacttccttgaagctaccttagagagttgatttagttcttcctaaataagtaaa

SEQ ID NO: 12543 - DNA, 201 bp, Homo sapiens
gggcgacagagtgagactccgtcttgaaaaaaaatgtctgccttgtaaaagtgaaataggatgagaaagtgcctttcttattaattggtgtaatgaattaraaataaactctttgaagacacctcttggtaaaaatagttacatttactgttgatttatggtatgttggatatgtttttaagttttccgtgtaataactca

SEQ ID NO: 12544 - DNA, 201 bp, Homo sapiens; identical to SEQ ID NO: 2373

SEQ ID NO: 12545 - DNA, 201 bp, Homo sapiens
actccacatagaagactactctgtttctcagacaacacttgaccaagtaagctttgagtgtcaaaacagatttacttctcagggtgtggattcctgccccsacactcccgcccataggtccaagagcagtttgtatcttgaattggtgcttgaattcctgatctactattcctagctatgctttttactaaacctctctga

SEQ ID NO: 12546 - DNA, 201 bp, Homo sapiens
attttttttttaaagggatcttctctcccgtaagccgggatacttaagctatatatgtagtggctacaaattaaggtcttcactgttttcatttttagctsctagaataagtgaacattaccttagatagactcttctaattatgaagatatctagatgtctagaaaatatcaaaatgcatgtggtttttgcatttctaaa

SEQ ID NO: 12547 - DNA, 201 bp, Homo sapiens
ttagctttttattatcttctgtagtacttacctttttggagaggagttggttgggatatttttccatttaaattttttttttaaagggatcttctctcccrtaagccgggatacttaagctatatatgtagtggctacaaattaaggtcttcactgttttcatttttagctgctagaataagtgaacattaccttagatag

SEQ ID NO: 12548 - DNA, 201 bp, Homo sapiens
ttgattgttttcaaggattggttccttctgctcaaggaagtcccattgtaaacataaaaaaatgaatgaaactgaagaagttcagtgacttagctttttaktatcttctgtagtacttacctttttggagaggagttggttgggatatttttccatttaaattttttttttaaagggatcttctctcccgtaagccgggat

SEQ ID NO: 12549 - DNA, 201 bp, Homo sapiens
gttttttttttttttttttttttttttttttttttttttttttttttaaaggctacaaaactgtgctttccttgggcagtaaaagaggcaatgggcaatgkgggacctgatgacaaagggaagcaaagctgtcttaggggtggcatggaggaggtgctgcttcacagcagagagaggtatggctgtgcttggagtgtccac

SEQ ID NO: 12550 - DNA, 201 bp, Homo sapiens
tgtgagcccctacaagtgcaagttgtcagatgtccccaggtcacttatcaggaaagctaagagtgactcataggatgctcctgttgcctcagtctgggctycataggcatcagcagccccaaacaggcacctctgatcctgagccatccttggctgagcagggagcctcagaagactgtgggtatgcgcatgtgtgtgggg

SEQ ID NO: 12551 - DNA, 201 bp, Homo sapiens
tgagtactttgccctttttgaggagcagggcattggagtgcagtgggacaacctgtttgagagtcctgtggaggaagatggcttcaatctcaccacttcgrtctccatgatgctgtttgacaccttcctctatggggtgatgacctggtacattgaggctgtctttccaggtacactgctttgggcatctgtttggaaaat

SEQ ID NO: 12552 - DNA, 201 bp, Homo sapiens
acggaattcccaggccctggtattttccttgcaccaagtcctactggtttggcgaggaaagtgatgagaagagccaccctggttccaaccagaagagaatrtcagaaagtaagtgctgttgacctcctgctctttctttaacctagtgctgctgcctctgctaactgttgggggcaagcgatgtctcctgcctttctaaaa

SEQ ID NO: 12553 - DNA, 201 bp, Homo sapiens
gcaaagagcaatttgggagtccagtttgtttctcattgaaagctttcccatttctggtcctcttgtcactgttgcattgaggcaccaaaaggcaatctcartgcgacactattcaacagactaagttgcaccggataatgataccattttacatttttcatatattattacattgaaggcttcaaacagcactagcagggg

SEQ ID NO: 12554 - DNA, 201 bp, Homo sapiens
ccacagagctcagcctatgcttcataatgtaatcattacccagatccctaatcctctcttggctcttaactgcagacagagatgtccacagctcatcaaakgctctgccttctgggttctttgtgcttagagtggcttcctaaatatttaataggtcccttttctgccagtctcttctgtgcccatcccctgattgccctt

SEQ ID NO: 12555 - DNA, 201 bp, Homo sapiens
ggcaccacctctccagaagtacaggccatggtgcagagataacgctgtgcatatcagcatccatgccactcacggtcaaatagcagttttctgcaaaactyagtgagggctggtgtttggaagtggagttgagtaattgcagtaccctattttcctttttggctgcagcctctcagccagccacagcatctccctgtgtct

SEQ ID NO: 12556 - DNA, 201 bp, Homo sapiens
acctgagctctgcaatcttgggcaaggcttttcccttatgtttcttcttatctaaagtgaacagctggggctcatgtgctccctcctcatctaaagtgaayacatggggctcatgtgcagggtcctccccgctttcagagcctgaggtcccctgaggctcaggaaggctgctccaggtgagtgccgagctgacttcttggt

SEQ ID NO: 12557 - DNA, 201 bp, Homo sapiens
gctctggcctttctgtccatacctgaacaggtccttgggttaagagcccctcgtccagggcctattaatcttgatcctcataagcagcatccatgtattamggccgcaaaccaaactgtgccagaccgaatcctaggaccaagcccaaatatgtcccatcatccttttggtaagaagctcattgtaagaaagaaagaggag

SEQ ID NO: 12558 - DNA, 201 bp, Homo sapiens
attctgagtaaatggactgagagagagcggggggcttttgagaagtgtggctgtatctcatggctaggcttctgtgaagccatgggatactcttctgttakcacagaagagataaagggcattgagactgagattcctgagaggagatgctgtgtctttattcatctttttgtccccaacatggtgcactaaatttatggt

SEQ ID NO: 12559 - DNA, 201 bp, Homo sapiens
acagggtcctctgaagccacggctgccagtgcatgtgtcccagggaaagctttttcctttagttctcacacaacagagcttcttggaagccctccccggcraaggtgctggtggctctgccttgctccgtccctgacccgttctcacctccttctttgccatcaggaggacagtgtttctcagagcagttctgatgctggc

SEQ ID NO: 12560 - DNA, 201 bp, Homo sapiens
actgagaggcctcacctgtcccacatccttgtgtttgtgcctggcaggccgcaccattattctctctacacaccacatggatgaagcggacgtcctggggkacaggattgccatcatctcccatgggaagctgtgctgtgtgggctcctccctgtttctgaagaaccagctgggaacaggctactacctgaccttggtcaa

SEQ ID NO: 12561 - DNA, 201 bp, Homo sapiens
gcaggtgtgggtagggatttcatttagattgacaggttgtcacattaaagctgagagccctgaagttcaagcaatggttagccaggcaaagatcagaggcytagagatagggaaatccattccaggcagagagactgggggtgcctgtcccctaggtcagggaacagaagaaagccagtggcactggtggagtgaataaga

SEQ ID NO: 12562 - DNA, 201 bp, Homo sapiens
ctgctgtgatggggtatcttttcagggaggagccaaagcgctcattgtctgtgcttctcctcctttttctgcggtccctggctccccacctgactccaggygaacaagaccttccaggaactggctgtgttccatgatctggaaggcatgtgggaggaactcagccccaagatctggaccttcatggagaacagccaagaa

SEQ ID NO: 12563 - DNA, 201 bp, Homo sapiens
gttgattacctgtggtttggttttaggtactgggaccctggtcctcgagctgacccctttgaggacatgcggtacgtctgggggggcttcgcctacttgcrggatgtggtggagcaggcaatcatcagggtgctgacgggcaccgagaagaaaactggtgtctatatgcaacagatgccctatccctgttacgttgatgac

SEQ ID NO: 12564 - DNA, 201 bp, Homo sapiens
cctacttgcaggatgtggtggagcaggcaatcatcagggtgctgacgggcaccgagaagaaaactggtgtctatatgcaacagatgccctatccctgttasgttgatgacatgtaagttacctgcaagccactgtttttaaccagtttatactgtgccagatgggggtgtatatatgtgtgtgcatgtgcatgcatgtgtg

SEQ ID NO: 12565 - DNA, 201 bp, Homo sapiens
ctggtaaaagtctaccgagatgggatgaaggtggctgtcgatggcctggcactgaatttttatgagggccagatcacctccttcctgggccacaatggagyggggaagacgaccaccatgtaagaagagggtgtggttcccgcagaatcagccacaggagggttctgcagtagagttagaaatttataccttaggaaacca

SEQ ID NO: 12566 - DNA, 201 bp, Homo sapiens
atacatttttaggataaaccatgaatgacacccgtttcttctccctcaccctcccttccctcccattttttttttttttttttagaagctgaataatatcmatgatatcctgaagtccgtgttcttgatcttcccacatttttgcctgggacgagggctcatcgacatggtgaaaaaccaggcaatggctgatgccctgga

SEQ ID NO: 12567 - DNA, 201 bp, Homo sapiens
tattctctgtggttggtggtggtggtgggatgtgtgtgtgtgtgtgtgtgtgtgtgtgtgtgtgtagggatcaggatgcgggaggagctgggttctgcttktattggttctctgttttgcattgaatagtgtgtttccttgtatggctatctatagcttttcaaggtcaccagaaattatcctgtttttcaccttctaaac

SEQ ID NO: 12568 - DNA, 201 bp, Homo sapiens
agaaatgataaagttctagagtttaaaccagactcagatttgagttttttttttttttttttttttttttttttttttttttttttttttaaaggctacaraactgtgctttccttgggcagtaaaagaggcaatgggcaatgggggacctgatgacaaagggaagcaaagctgtcttaggggtggcatggaggaggtgct

SEQ ID NO: 12569 - DNA, 201 bp, Homo sapiens
gagctctggcctttctgtccatacctgaacaggtccttgggttaagagcccctcgtccagggcctattaatcttgatcctcataagcagcatccatgtatwacggccgcaaaccaaactgtgccagaccgaatcctaggaccaagcccaaatatgtcccatcatccttttggtaagaagctcattgtaagaaagaaagagg

SEQ ID NO: 12570 - DNA, 201 bp, Homo sapiens
actggagatgagatacacaaaacgtcttgagtacacagtagctgcccaatattggctgtaagtattataaatctacaagctgtgaattaattttacctctstggatcctgttgatatttctagaccattccacctagtggggccatttcctacctgagtcacccgtggtgtcaaatagaatgtcatgtggcctcctgagtt

SEQ ID NO: 12571 - DNA, 201 bp, Homo sapiens
ttcccaagtgcttccacaaaccattaaataattccacaaaccattaaaataattaatgctagggaattttaggaaaacattggtttacaatcagaaggacmggggaagtgggtcttcagccttcacgatgactacaagccatttaagggactagaattgctactgttgtcagagcaatttaggagtctgtatttgagcacc

SEQ ID NO: 12572 - DNA, 201 bp, Homo sapiens
agcacccgcatagtgttccagaatgacatatctgactgtaacctggacacgtgtgatatgttgtctcccctgcagatgagcatttgaaatctcaaccctcrtatttctacgagtgcaggcctataatggaccctgggcacattttttttttttttgagatgcagtctcgctctgtttcccaggctggagtgcagtggcacg

SEQ ID NO: 12573 - DNA, 201 bp, Homo sapiens
ttgagtactcagagacatgacgtgacttttcaaaggctgtaagctgacgagggacatagctagggttcagacttgagtttttctttttctttttctttttcttttttttttaagactgagtcttgcttttgtcgcccaggctggattgcagtggtgcttggctcactgcaacctctgcctcccgggttcaagcaattctcc

SEQ ID NO: 12574 - DNA, 201 bp, Homo sapiens
aattttaaagtaaggtatatttctctacagggatctttgcaaccctaagtaactggcctaaaaagttagagaagctgacttgtgcagacatttgcagcctrttggtcttttttgtgctgtgaatcatagagggtgaaaggttattatgaatggtacaaaactttgttacaaaaccattttcttggactgttttgggctgct

SEQ ID NO: 12575 - DNA, 201 bp, Homo sapiens
caactgtgatgaggattatgaaggaaaaaatccggcaaactatggtactggtgttagatactagcaggtgtgggtagggatttcatttagattgacaggtygtcacattaaagctgagagccctgaagttcaagcaatggttagccaggcaaagatcagaggcttagagatagggaaatccattccaggcagagagactgg

SEQ ID NO: 12576 - DNA, 201 bp, Homo sapiens
accacgcccagctattttttgtatttttagtagacatagggtttcactatgttgcccagctggtctcgaactcctgagctcaagtgatctgcccacctcgkcctcccaaagtgttgggattaaaggcatgagtcaccgtgcctggtcccatgttataattttaaagtaaggtatatttctctacagggatctttgcaaccc

SEQ ID NO: 12577 - DNA, 201 bp, Homo sapiens
agtatcttatcaaacatccatgaagtacatcagaacatgggctactgccctcagtttgatgccatcacagagctgttgactgggagagaacacgtggagtyctttgcccttttgagaggagtcccagagaaagaagttggcaaggtactgtgggcacctgaaagccagcctgtctcctttggcatcctgacaatatatacc

SEQ ID NO: 12578 - DNA, 201 bp, Homo sapiens
ttaaactcctatgcacttatttaccctttaatgagcctctttacttaagtacagtgtgaggaacagcggcatcaggatcacttgggaacttgttagaaatwcagcaacttgggcccagctcagacctactgaatcagaatcaggagcaattctctggtgtgactgtgtcacagccaggtatcaactggattctcatacata

SEQ ID NO: 12579 - DNA, 201 bp, Homo sapiens
gcctaggaggtggaggctgcagtgagctgagatctgtctcactctgttgcccaggctggagtgcagtggcgcgatctcgactcactgcaacctccgcctcycaggcttaagtgattctcatgcctcagcctccgagtacctgggactacaggcacctgccaccacgcccagctattttttgtatttttagtagacataggg

SEQ ID NO: 12580 - DNA, 201 bp, Homo sapiens
tctcatgctctcacctgttttctttggatggcctttagccaaggtgatagatccctacagagtccaaagagaagtgaggaaatggtaaaagccacttgttytttgcagcatcgtgcatgtgatcaaacctgaaagagcctatccatatcacttcctttaaagacataaagatggtgcctcaatcctctgaacccatgtatt

SEQ ID NO: 12581 - DNA, 201 bp, Homo sapiens
gaggatcgcttgagcctaggaggtggaggctgcagtgagctgagatctgtctcactctgttgcccaggctggagtgcagtggcgcgatctcgactcactgsaacctccgcctctcaggcttaagtgattctcatgcctcagcctccgagtacctgggactacaggcacctgccaccacgcccagctattttttgtattttt

SEQ ID NO: 12582 - DNA, 201 bp, Homo sapiens
aaaatcctgcttgtctgtgccaaagggataattgtgaaagcacttttgaaatacttaatgagttgattttcttcaaattaaaaaaaatatataaatgtatmtgtgtatgtacatgtgtgtacacatacacacctttatacatacagcccatttaaaacaagctccactttggagtgctctacgtcaccctgatgccgaata

SEQ ID NO: 12583 - DNA, 201 bp, Homo sapiens
ctactcgggaggctgaggcaggaggatcgcttgagcctaggaggtggaggctgcagtgagctgagatctgtctcactctgttgcccaggctggagtgcagwggcgcgatctcgactcactgcaacctccgcctctcaggcttaagtgattctcatgcctcagcctccgagtacctgggactacaggcacctgccaccacgc

SEQ ID NO: 12584 - DNA, 201 bp, Homo sapiens
ctttacacttactgatgaaatgcttttcctttctttctctcccagcccctgtacttaagtgcttcaataggctctcattatatatgatttttaggttttgyttatcagcttcttcgcttttataatctgaaaagatggcatatgaatttttataaaaagggacactttcttcttctcaaattgtatatttttattgtactt

SEQ ID NO: 12585 - DNA, 201 bp, Homo sapiens
taactatcaactgtgatgaggattatgaaggaaaaaatccggcaaactatggtactggtgttagatactagcaggtgtgggtagggatttcatttagattkacaggttgtcacattaaagctgagagccctgaagttcaagcaatggttagccaggcaaagatcagaggcttagagatagggaaatccattccaggcagag

SEQ ID NO: 12586 - DNA, 201 bp, Homo sapiens
tcccaccactttcggatgccacggcgggcagatcacgtgaggtcagcagtttgagaccagcctggccaacatggtgaaaccctgtctctacaaaaatacamaaaatagccgggcgtgatggtgggcacctgtaattccagctactcgggaggctgaggcaggaggatcgcttgagcctaggaggtggaggctgcagtgagc

SEQ ID NO: 12587 - DNA, 201 bp, Homo sapiens
atggcatatgaatttttataaaaagggacactttcttcttctcaaattgtatatttttattgtactttccttcaaaacccccttttaaaaagtaagcagtrgataaataaattcagtgaagcatccatatgactcttaagtgagtgtaggggaagggaggtcaccagatcactgtgagtgaagatggtggagaggtgagga

SEQ ID NO: 12588 - DNA, 201 bp, Homo sapiens
aaaagaatgaactatccaaaaattaaaactcctcatttatgagcttttagagaattttacagagtagatggaaactctctgcatcctttccccacttctastttcacctgacacatttcttccctgtccttactcctgggccggcagcagtggtcatgattccaatcccagcttggccaccatctgcctcagtggcctagg

SEQ ID NO: 12589 - DNA, 201 bp, Homo sapiens
tctggaccctgttcccagatcataccctagaatgtgaccttagaaacacacttcaggattcatacctttgattgaccatcaaaaagtttttgtatcggccwggtgtggtggctcacgcctgtaatcccaccactttcggatgccacggcgggcagatcacgtgaggtcagcagtttgagaccagcctggccaacatggtga

SEQ ID NO: 12590 - DNA, 201 bp, Homo sapiens
gggtggtaaatcctagcagctaatattggttcccaaataaccagatgacaaggatagagaaggacacagacacggcctatctggatttcatggtgcctttsattttccacatgaaggttgtgtagggaagatagaagcatgagatgagatgataatatagttatctggattcatcactggccagctgaaccatatgaactc

SEQ ID NO: 12591 - DNA, 201 bp, Homo sapiens
acacctggctaattgttgtatttttagtagagacggggtttcaccatgttggttggccagactggtcttgaactcctgacctcaggtgatccgtctgcctyggcctcccaaagtgttggaattacagacatgacccactgcacccggcctgttgtcagtattcttaaacatagacactaactgtaggctgacagcctagca

SEQ ID NO: 12592 - DNA, 201 bp, Homo sapiens
cttcaggacctgacaggaagaaacatttcggattatctggtgaagacgtatgtgcagatcatagccaaaaggtgactttttactaaacttggcccctgccktattattactaattagaggaattaaagacctacaaataacagactgaaacagtgggggaaatgccagattatggcctgattctgtctattggaagtttag

SEQ ID NO: 12593 - DNA, 201 bp, Homo sapiens
tgatttccgtcttttctctctgccttttccccaagggccaggacccctggatctctgggcagagcagacgcaggcccctataatagccctcatgctagaarggagccggagcctgtgtataaggccagcgcagcctactctggacagtgcagggttcccactctcccaactccccatctgcttgcctccagacccacattc

SEQ ID NO: 12594 - DNA, 201 bp, Homo sapiens
aaaactccatctcaaaaaacaaattaaatccagagatttaaaagctctcagaggctgggcgcggtggcttacacctgttatcccagcattttgggatgccraggcgggcaaagcacaaggtcaggagtttgagaccagcctggccaacatagtgaaaccctgtctctgctaaaaacatagaaaaattagccgggcatggtg

SEQ ID NO: 12595 - DNA, 201 bp, Homo sapiens
caacatggggaaaccctgtctctactaaaaatacaaaataagctgggcgtggtggtgcgtgcctgtaatcccagctacttgggaggctgaggcaggagaaytgcttgaatctgggaggcggaggttgcagtgagctgagttcatgccattgcattccagcctgggcaacaagagcgaaaccatctcccaaaagaaaaaaaa

SEQ ID NO: 12596 - DNA, 201 bp, Homo sapiens
caattttttacttggttcataatgaaaactatactattgcttcagtcagatgtttgcgaatagctgtgtgatctcaaaatgttttcctatgtgatctatakaaaatggaatgatagagtattaggctgtaagggcctaagaaacaaaggaaaaagagaagtgaactgttagtttagttgtaaaacctaactttggtgaatt

SEQ ID NO: 12597 - DNA, 201 bp, Homo sapiens
tgttccagaatgacatatctgactgtaacctggacacgtgtgatatgttgtctcccctgcagatgagcatttgaaatctcaaccctcgtatttctacgagwgcaggcctataatggaccctgggcacattttttttttttttgagatgcagtctcgctctgtttcccaggctggagtgcagtggcacgatatggctcactg

SEQ ID NO: 12598 - DNA, 201 bp, Homo sapiens
agtgaagcctgtcatctactggctctctaattttgtctgggatatggtaaggacacaggcctgctgtatctttctgatgtctgtcagggccatggattgayatggataagaaagaaagagctctggctatcatcaggaaatgttccagctactctaaagatgtatgaaaaagaaatagccagaggcaggtgatcactttca

SEQ ID NO: 12599 - DNA, 201 bp, Homo sapiens
atttgaaatctcaaccctcgtatttctacgagtgcaggcctataatggaccctgggcacattttttttttttttgagatgcagtctcgctctgtttcccargctggagtgcagtggcacgatatggctcactgcaacctccacctcctgggttcaagagattctcctgcctcagcctcctgagtagctgggactataggcg

SEQ ID NO: 12600 - DNA, 201 bp, Homo sapiens
acctcttccagaatgggaactggacaatgcagaacccttcacctgcatgccagtgtagcagcgacaaaatcaagaagatgctgcctgtgtgtcccccaggkgcaggggggctgcctcctccacaagtgagtcactttcagggggtgattgggcagaaggggtgcaggatgggctggtagcttccgcttggaagcaggaatg

SEQ ID NO: 12601 - DNA, 201 bp, Homo sapiens
acttatatagcactgtgtggcaagtactgtttgaaatgtttttcacgtgtttattcattgtatttattttgagatagggtcttgctctgttgcacagggtrgagtgcagctgcacagacaaggctcactgcaacctcagcctcctgcgctcacgtgatcctcatacatcagcctcttaaggagctggggccacaggcacgc

SEQ ID NO: 12602 - DNA, 201 bp, Homo sapiens
cctcctagtgtaggatttgtctcagccactgcttgttgtcctggctgccaacgttctcatgaaggctgttcttctatcagtgtgtcaacctgaacaagctrgaacccatagcaacagaagtctggctcatcaacaagtccatggagctgctggatgagaggaagttctgggctggtattgtgttcactggaattactccag

SEQ ID NO: 12603 - DNA, 201 bp, Homo sapiens
acacttgttttgtttatgctgagagaaggcctactccaaaaaatgcaaccatcttcgtatctgcatgtggatacaaccatgaatggccaaagttattgcartgttgaatagacacttatatagcactgtgtggcaagtactgtttgaaatgtttttcacgtgtttattcattgtatttattttgagatagggtcttgctct

SEQ ID NO: 12604 - DNA, 201 bp, Homo sapiens
ccaccatgcctggctagtttttgcattttcagtagagacagagtttcaccatgttggccaggatggtctcgatttcctgacctcttgatccacccgcctcrgcctcccaaagtgctgggattacaggcgtgaggcaccgcgcccgacccctggacacattttgacttagaacatattttcggtttgtgtgagacagtgcat

SEQ ID NO: 12605 - DNA, 201 bp, Homo sapiens
cctaggtgacagggtgagactccgtctcaaaataaaaaaaaaaaaagaaaaggaaaggctgtgtgtgtgtgtatgtgtgtgtgtgtgtgtgtgtgtgtgtgtaacagcaccatcacactgtttgagttgaggagcacatgctgagtgtggctcaacatgttaccagaaagcaatattttcatgcctctcctgatatggcga

SEQ ID NO: 12606 - DNA, 201 bp, Homo sapiens
ggaagcatcaggtaggtagcagtttgcaggagcactgattctgagggacactaactgggcctaagaacagctactggctgtcatgaggaataactaggagctagccatagaggggtagcagtgaatcatttctctagcgatgtaaatcttgctcaatttattctgtctatataactcaatattactgaagtttgcctaaag

SEQ ID NO: 12607 - DNA, 201 bp, Homo sapiens
ctgaccgagagtaaccccgtctggctcagctcagctcagcaaagggctttcctcctccgccttcctgagctgctctccctcctctcctttcctccttctttcccagcctcccccaagctccttcacccctctcttccctctcctccctcctcccaccttccttgtcctctatgctcagagaactgaaggaacactgaatgg

SEQ ID NO: 12608 - DNA, 201 bp, Homo sapiens
tccttaactctcttcctgatttctaaaggaagtatattttgctgaatcagaaagaaaagtgatttatttcaggttgctgatgcttagattgttagagttgsaaagatctggcttgcatcttgtacagctgacagaactggggctcaggggggcacaggtgcccagagttggtcagtcaggaaagtagcaccagaaccagtc

SEQ ID NO: 12609 - DNA, 201 bp, Homo sapiens
tgagcaaaacagtatagtggaaagaatgagggctttgaagtccgaactgcattcaaattctgtctttaccatttactggttctgtgactcttgggcaagtkacttaactactgtaagagttagtttccctggaagatctacctcctagctttgtgctatagatgaaatgaaaaaaatttacatgtgccagtactggtgaga

SEQ ID NO: 12610 - DNA, 201 bp, Homo sapiens
gttaccattcagggtcttcaaccctcattctagggacttccagtaacttctcccaccttccctcttctcagtaagacatgggtattgtcttattctgtttstgctgctagaagaaaattctcgagactgagtaatttatacacaatagaaatttacttctcacagttctggaggctgggaaatccaaaatcaaggtgttgg

SEQ ID NO: 12611 - DNA, 201 bp, Homo sapiens
atgcctttagccttgatcataaccttgaactctaatctcaaattctcacttgcctagtggattgctccatttagatagtatatagataccccaacctggayatgtcctagttttctttccccttggaacttaatgcttttcttgccatccctgtcacactcagtggcactaccatccactcggttgcccaagctggctctt

SEQ ID NO: 12612 - DNA, 201 bp, Homo sapiens
gggggctgccccccacctccctcccggacggggtggctggccgggcgggggctggcccccacctccctcccggacggggcggctggccgggcgggggctgscccccacctccctcccggacggggcggctggctgccctgctaatttttgtattttcagtagagatggggttttaccatgttggtcaggctggtctcgaac

SEQ ID NO: 12613 - DNA, 201 bp, Homo sapiens
ggacggggcggctggccgggcgggggctgccccccacctccctcccggacggggtggctggccgggcgggggctggcccccacctccctcccggacggggyggctggccgggcgggggctgccccccacctccctcccggacggggcggctggctgccctgctaatttttgtattttcagtagagatggggttttaccatg

SEQ ID NO: 12614 - DNA, 201 bp, Homo sapiens
actgcagcctcgaattcctgggctcaagtgatcctcctgccttagcctcccgaagggctgggatgacaggcatgagccactgcacctggccaactttttgytgattgcgaatagcactcttgtcaatttcggagagaagctgagactggcatatgtcagtatggatccccacttagagacctgtgtttatctgcactgaca

SEQ ID NO: 12615 - DNA, 201 bp, Homo sapiens
tggcaaaagaagaaatgataaagttctagagtttaaaccagactcagatttgagttttttttttttttttttttttttttttttttttttttttttttttwaaggctacaaaactgtgctttccttgggcagtaaaagaggcaatgggcaatgggggacctgatgacaaagggaagcaaagctgtcttaggggtggcatgg

SEQ ID NO: 12616 - DNA, 201 bp, Homo sapiens
ataagtactcacttcatttctctgtgtctcaggtttcccatttttaggtgagaattaaggggctctgataaaacagaccctaggattgtggacagcagtgrtagtcctagagtccacaagtctgcttttgagtgatgggcccatgtatctggcacatctgcaggcagagcgtggttctggctcttcagatgatgccggtgg

SEQ ID NO: 12617 - DNA, 201 bp, Homo sapiens
atgggacggacagacttggcatgaagcattgtataaatggagcctcaaaatcgcttcagggaattaatgtttctccctgtgtttttctactcctcgatttsaacaggccattttccaaataaagccatgccctctgcaggaacacttccttgggttcaggggattatctgtaatgccaacaacccctgtttccgttacccg

SEQ ID NO: 12618 - DNA, 201 bp, Homo sapiens
tcttcttctcaaattgtatatttttattgtactttccttcaaaacccccttttaaaaagtaagcagtagataaataaattcagtgaagcatccatatgacycttaagtgagtgtaggggaagggaggtcaccagatcactgtgagtgaagatggtggagaggtgaggatcttatgaggccgtgctcaaggctggtagaggt

SEQ ID NO: 12619 - DNA, 201 bp, Homo sapiens
tagtgcatggggcctcattgttttaattagtgacaaaacaacaataataacaacaaaacccccgaagcttcacagatgacatcagaccccaagcctgtgtgtttttcaggtgcccttgaggagctttgtagctggcagaggaggtgaaactgacaaatgtttggcagatggaggagagtaccagaggggtttgagatgagc

SEQ ID NO: 12620 - DNA, 201 bp, Homo sapiens
ttgttataccactgcctgctaacctgttttccttaactctcttcctgatttctaaaggaagtatattttgctgaatcagaaagaaaagtgatttatttcargttgctgatgcttagattgttagagttggaaagatctggcttgcatcttgtacagctgacagaactggggctcaggggggcacaggtgcccagagttggt

SEQ ID NO: 12621 - DNA, 201 bp, Homo sapiens
aagatctgggtgaatgagtttaggtaagttgctgtctttctggcacgtttagctcagggggaggatggtgttgtaggtgtcttggattgaagaaagccttrgggattgtttgtcactcacacacttgtgggtgccatctcactgtgaggaggacagaagccctgtgaacatgtggagcacacaggggcacagacagattta

SEQ ID NO: 12622 - DNA, 201 bp, Homo sapiens
ggtaatctccaatttaaaagcctcaatagaatgataagattgagcttttctgtagttccatgacctccagcagagtctgcaaggccacagctgcctgaagrttgattctgtaattagaagatgccagggtcatctcagaatagaacctcaagccacccaggctacatttacagaatcagcctctccagaaaaacagcaaca

SEQ ID NO: 12623 - DNA, 201 bp, Homo sapiens
gccttgctccgtccctgacccgttctcacctccttctttgccatcaggaggacagtgtttctcagagcagttctgatgctggcctgggcagcgaccatgasagtgacacgctgaccatcggtaaggactctggggtttcttattcaggtggtgcctgagcttcccccagctgggcagagtggaggcagaggaggagaggtg

SEQ ID NO: 12624 - DNA, 201 bp, Homo sapiens
gcctttgccacccctgctaagggataacctgaaataccttcaccatcactgccctgtgctgcttttcacctatgccagtctgtctacagtgccagtgtctyctggcattgaaaggggagaatcttttggtcctttgagtatttggttgggttacataaatctccctgaatgaagagcagctgacttaggcaaggggccttg

SEQ ID NO: 12625 - DNA, 201 bp, Homo sapiens
atctttctcacaatatatagcaacagttatttacttgctgattttctaatgcacatcacacatagtcatattaaacacacacacacacacacacacacacmcacacccctcaagaaacattttctgagacgtgatttcctgatttcatcaaaaaagaaaagagcgggccaggcacagtgggaagtcaaggtgggtggatca

SEQ ID NO: 12626 - DNA, 201 bp, Homo sapiens
gcctggtcccatctttctcacaatatatagcaacagttatttacttgctgattttctaatgcacatcacacatagtcatattaaacacacacacacacacmcacacacacacacacccctcaagaaacattttctgagacgtgatttcctgatttcatcaaaaaagaaaagagcgggccaggcacagtgggaagtcaaggt

SEQ ID NO: 12627 - DNA, 201 bp, Homo sapiens
tcaggagactgttttcagtcctagtgaatggtgataattgtaattataacagtagacaacatctcttttacacattttaaatcatgaaaatagaataaccktactgataattttagaaagtggtgattaaaagcacatttaagataatgccttaacacctagtcttttccatatgcatgatgtcttaatcacacattgcaa

SEQ ID NO: 12628 - DNA, 201 bp, Homo sapiens
gagtggtgggagagactggagaagttgattaattagtaaatgaagttgtctgtggatttcccagatcccagtggcattggatatccatattatttttaaawttacagtgttctatcttatttcccactcagtgtcagctgctgctggaagtggcctggcctctatttatcttcctgatcctgatctctgttcggctgagct

SEQ ID NO: 12629 - DNA, 201 bp, Homo sapiens
cagcagatcaagaaatccagctcaagtaagtaaaaaccttctctgcatccgtttataattggaaattgacctgcaccagggaaagagagtagcccaggtgkctggggcttgttcccattagatcttccccaaggggtttttctccttggtggctggcctgtggggcccctctccaggaggcattggtgaagaaactagggg

SEQ ID NO: 12630 - DNA, 201 bp, Homo sapiens
aaagcttagagagtggtgggagagactggagaagttgattaattagtaaatgaagttgtctgtggatttcccagatcccagtggcattggatatccatatyatttttaaatttacagtgttctatcttatttcccactcagtgtcagctgctgctggaagtggcctggcctctatttatcttcctgatcctgatctctgtt

SEQ ID NO: 12631 - DNA, 201 bp, Homo sapiens
ctgtcccagtgagatgttgacacttgtatgatccctgcttggagacttccctcttctggaacctgccctggctcaggcatgagggctgactgtcacccttygataggagcccagcactaaagctcatgtgttggcagtgttcttgcgggaaggaaaaagaccagccagcccatttgttactgcacaagcaaacagcttctg

SEQ ID NO: 12632 - DNA, 201 bp, Homo sapiens
gtggctcacgcctgtaatcccagcagtttgggagccctaggggagaggatcacttgaacccaagagtttgacgttccagtgagctatgatctccggatcgkaccgcctggacgatggagcaagaccctgtctcaaaaaaaaaaatctttgctttttttttttgtttgtttttgagacggagtctctctctgttgccccagc

SEQ ID NO: 12633 - DNA, 201 bp, Homo sapiens
agtggctcacgcctgtaatcccagcagtttgggagccctaggggagaggatcacttgaacccaagagtttgacgttccagtgagctatgatctccggatcstaccgcctggacgatggagcaagaccctgtctcaaaaaaaaaaatctttgctttttttttttgtttgtttttgagacggagtctctctctgttgccccag

SEQ ID NO: 12634 - DNA, 201 bp, Homo sapiens
tttttattttcaaattttccataaaaatataaggacttgaagatcaagaaaaaatttctgctttggctcagtgcagtggctcacgcctgtaatcccagcastttgggagccctaggggagaggatcacttgaacccaagagtttgacgttccagtgagctatgatctccggatcgtaccgcctggacgatggagcaagacc

SEQ ID NO: 12635 - DNA, 201 bp, Homo sapiens
ctcccaccacacgagtcccttctccctgctttggctcctcaccagttgtcaggttatgattatagaatctagtcctactcagtgaaagaactttcatacaygtatgtgtaggacagcatgataaaattcccaagccagaccaaagtcaaggtgctttttatcactgtaggttggtgagtgggcgattcggaaactgggcct

SEQ ID NO: 12636 - DNA, 201 bp, Homo sapiens
tatcaaaggtctttggaaataaaaaacagttttttaaaaatatcagaaataaaacaacaaataaataaataaataaaaacacccaaaacaatctgaagcaygagcacctagcagaaaggttcaattatgatctattcatagagtggaatatcaagtagacattacaggacatgttttaagattatattttatgtcatggga

SEQ ID NO: 12637 - DNA, 201 bp, Homo sapiens
tatgtaaggaagttcagggaatagtataagtcactccaggcttgaggcaaaatttacaaatgctgctgactttgtatgtaaggggaggcattttcttagaraagagaggtaggtctctgggattccagtatgccatttccatcctcagtgtttttggccacctgagagaggtctattttcagaaatgcattcttcattccc

SEQ ID NO: 12638 - DNA, 201 bp, Homo sapiens
gatttttcttgggtagcgtgtgtaggaggccagtgtcaccagtagcatatgtggaacagaagtcttgacccttgctatctctgcctagtcctaatggctgrcttttcccaggaaggcttctgcttccatggactgttagattaaccctttatttaggtaaatgagggaacctactttataagcataggaaagggtgaagaa

SEQ ID NO: 12639 - DNA, 201 bp, Homo sapiens
ctgggcatgaaagaaagtaatgataatagttaattttatatagcgttgttaccatttacaaccttttttttttttttaacctctatcatctcaattaaagkgcagagagaccctgggaagaaggtaactatatttattatcccagatgagggaagtgaggcttgtagggaattggtagctgattcaaggtcacccagcagg

SEQ ID NO: 12640 - DNA, 201 bp, Homo sapiens
atttggggagttttctgcatggtagaatagacccaaaggaaaagaaagaaagacagtgactaagatttgggtttgtctgccccaccaaatgctttgagcastttcataaatataaatccttcaggttgggagaaggttgaacatctgaagacactgattcttcagagatgtaatccaaacaaagtgatctttggtgatatg

SEQ ID NO: 12641 - DNA, 201 bp, Homo sapiens
gactctgaattcagactggtctgactttgagtctcagctccacatctagtaatactatgaccaagccctggttaaaatcatgtttttttttcttcagcctyagtcttctcacatataaaatagggacactgtcatttacctcagttttctgtgaggataaaacaacgacagtgtatatgcaagtattttgtaaattttgta

SEQ ID NO: 12642 - DNA, 201 bp, Homo sapiens
tggcagtcacagacactgcctagggtttctgactcacgctgttgggactgttctatgcagggcaccctcttgtgtggcataggatttgtgcctcaccacasactgttgtagctttgctgtcttgatgatgagtagagggcagtgtccaggccatggtataagcatctactgccccccagggttaccaaaaccaagccaagt

SEQ ID NO: 12643 - DNA, 201 bp, Homo sapiens
gcttcgggaagtgctcggtttcggggactttgatccggagccccacatccccaccacttgcaactcagatgggaccggaggcggtgttaaatggggagackatgtcctagtacgagctctggtgaccccaggactctgcgctgctgcgcttggggcttgcccgacggtggagaccggggagcatctctgggcgtggagacc

SEQ ID NO: 12644 - DNA, 201 bp, Homo sapiens
tttcacccttttgaccaggctggtcttgaactcctgacctcatgatcaacccacctcagcctcccaaagtgctgggattacaggtgtgagccaccacgccmggcctcataagtattttctaaatttatttacagtcatgccatttaaaaggaaagttgtattcctgtctttgttaatatttataagtgattttattcagct

SEQ ID NO: 12645 - DNA, 201 bp, Homo sapiens
gagtacacagtagctgcccaatattggctgtaagtattataaatctacaagctgtgaattaattttacctctctggatcctgttgatatttctagaccatkccacctagtggggccatttcctacctgagtcacccgtggtgtcaaatagaatgtcatgtggcctcctgagttgggtagaattggctgctcatctcaaccc

SEQ ID NO: 12646 - DNA, 201 bp, Homo sapiens
aaaaaaaaaaaaaaaaaagatgtgtagggagcaattttggagttattcatttggtcatttgatatgtagttttagttttggtgctgatagagcccagaatktaccctgaatttgatgaacattctgatatatgggggagctcattgtcccccacttacctttttgcctctcagaatatcttttgatatttttatctgtttt

SEQ ID NO: 12647 - DNA, 201 bp, Homo sapiens
gcctggctaatttttgtatttttagtagagacatggttttagcatgttggccaggctggtcttgaactcctgacctcaagtgatccacccacctcagcctyccaatctgctgggattacaggcatgagccactgcacccagccagagtaccactatttgggcattctttaatgaaaaagaatgaactatccaaaaattaaa

SEQ ID NO: 12648 - DNA, 201 bp, Homo sapiens
tcaaaagggcacaatgttttggtgaggaagaggtgggagaacacgtgccaggtgctaactagggtcatcatttcccccttcacagccagcttcctgtgaaygtgtgtgtgtgtgtgtgtgtgtgtgtgtgtgtgtgtgtgtgtatttcttttgccagcatcactgaatctgtctgctgtctggtattccaggttttggttt

SEQ ID NO: 12649 - DNA, 201 bp, Homo sapiens
gtttctgtagctcagggtgtttatgaattcactaatcccttcccttcagatcccttttattctggtgttatgattgtgactgaaaaaaattgattttttttctatgacatagaatgttgaaaggttgatttcttttctagaggaaagattctttttttctatgtgctacataccccccgaccagggaaaaggcaaatagtg

SEQ ID NO: 12650 - DNA, 201 bp, Homo sapiens
gatttctctctttttttttttttttaagatggagtttcactcttgttgcccaggctggaattcaatggcatgatctcggctcactgcaacctctgcctccygggttcaagtgagacttgatggtctcacttgatggtttcctggctcagcctcctgagtagctgagattacaggcacccactaccatgcccagctactttt

SEQ ID NO: 12651 - DNA, 201 bp, Homo sapiens
actagagaagattgtaggtagagctgaaaagatggaggaattataaggctcagatttctctctttttttttttttttaagatggagtttcactcttgttgyccaggctggaattcaatggcatgatctcggctcactgcaacctctgcctcccgggttcaagtgagacttgatggtctcacttgatggtttcctggctcag

SEQ ID NO: 12652 - DNA, 201 bp, Homo sapiens; identical to SEQ ID NO: 2513

SEQ ID NO: 12653 - DNA, 201 bp, Homo sapiens; identical to SEQ ID NO: 2514

SEQ ID NO: 12654 - DNA, 201 bp, Homo sapiens; identical to SEQ ID NO: 2515

SEQ ID NO: 12655 - DNA, 201 bp, Homo sapiens
acacttagtccccgcgccccgcgggcgcctgagattgtgagctggtcccgggagatgtccgaggacctcggcgcgccggccccagcagtgggcacgggggragagggctggtggacgggatgtccccgggagagctggacttgcgccgcccgaggcccctcacctcttgcagggcgcgccgcctccggccccggtccggtc

SEQ ID NO: 12656 - DNA, 201 bp, Homo sapiens; identical to SEQ ID NO: 2516

SEQ ID NO: 12657 - DNA, 201 bp, Homo sapiens
gagccgctggaagaggagacgcgtgcggggagagggcccgggcgggtgcctgtcccgtccacacttagtccccgcgccccgcgggcgcctgagattgtgakctggtcccgggagatgtccgaggacctcggcgcgccggccccagcagtgggcacgggggaagagggctggtggacgggatgtccccgggagagctggact

SEQ ID NO: 12658 - DNA, 201 bp, Homo sapiens
ggcttcagtggcagggccaggccgggggctggcggcaggacctgggagacgagcatgctggtggggaaggtggcggtgaggatgatcttgccctgctgcasggccacacccgtcacgatggggctgccagacacagggttggccaggaggaagtttcctgtggggagagagggaccgagcgcaggtgagagccaggagagc

SEQ ID NO: 12659 - DNA, 201 bp, Homo sapiens
gtatacagcctctggatgtctgcaaccttctcaagaaagccttgcttgcaaatcactgtattcaaaggggatgttgaaggtttcccctagaaaccttcctrgttttacagttctaatgaaacctttcttttcagattttgcaaagccacagaacaatgtgtgaccagcagaagcagccacagttccctccatcttgtgtga

SEQ ID NO: 12660 - DNA, 201 bp, Homo sapiens
ctctaccaggtcctcagacagaagttggctggagaaaatgtcatgatcagatatgtttctttgtcatctgtgtaaggatctccacccagctgatggcagtktacggcctgatttagcatgtctgctgtgagaaacaaatgggtgttggggtgggctgggccacgggagaagaagaggaggcagggtagtatgtgtggcacc

SEQ ID NO: 12661 - DNA, 201 bp, Homo sapiens
cagattttgcaaagccacagaacaatgtgtgaccagcagaagcagccacagttccctccatcttgtgtgaaaggttcgggactaggggctgggcagggtascaatggtgcctctgtgaaatgcccagttccatgccagacccaaactgtctgtgtgacaggccctgctccatgccctactcaaacttatgtgaagtaccaa

SEQ ID NO: 12662 - DNA, 201 bp, Homo sapiens
accccagaaagctaatgtcatattgaaaactaataaagtccctgattaccatgaactaggagactgaatttggagatatgaaatggattagagcagaagtrgctttatataatcccaaaccttctcaggagccctgattgtgtgttaggtagatatgtacaaaagacaatgtaaagagaagcatccgccctggggtctagg

SEQ ID NO: 12663 - DNA, 201 bp, Homo sapiens
ttctggggccgctgaatccagcgtctcaggggactcaccccgaaggtccggggagccagacagcagtagctggtggaacagggagcagagcatgggtcagkgacacagtactgggaggttgagccacttgcaggagcttgaacataatagctctggcaaggagaagcaccctggacatagcacgtctgggtctggcaggga

SEQ ID NO: 12664 - DNA, 201 bp, Homo sapiens
cttctccttgtgatctctggtgcttcatttagatgccattaaattgcctcattgctgccctataaaaggtctccccacctgctagtttttcagatcactgrcttcttccagtcttgctcctatcagcaaagagggtaagtctctatacgggataaggacatggtgagaaacagagctttggggaagctggggtgggatgag

SEQ ID NO: 12665 - DNA, 201 bp, Homo sapiens
ttcccaaacagcagcacccagagctgccacatccacagctgcagccacagcccccagaaccacagcatccagagcttcccgaattctcacagcagccagargatcctgtgttgcagttctggggccgctgaatccagcgtctcaggggactcaccccgaaggtccggggagccagacagcagtagctggtggaacagggag

SEQ ID NO: 12666 - DNA, 201 bp, Homo sapiens
aacctcatcactttgcctctgtgctttgcttctctaccaaggcagcctgccagagttagtacagtccccaaactttggcatgaataaagctctgaatgcawttcgtggtaatttctgtctgtttgtttggtccatatttatgcttttctatcaggcactcttctgcatccctctcttcttactcttgtttctcagctagag

SEQ ID NO: 12667 - DNA, 201 bp, Homo sapiens
agtttcttgcctaaatttgtgatctccctttggcttcataaataacggtacatttcatgaagagctggtctcagtctacacaagcctaactgaatggggtrcataggaagggttgcattgtgtgacaaggtttaaatctaattgttttaagtctttgagttatttgctcaccaggctgtgcttgatggttttactttttgt

SEQ ID NO: 12668 - DNA, 201 bp, Homo sapiens
agggaggccaggcatggtggctcatgcctgtaatcccagcactttgggaggtcgaagtgggtggatcctgaggtcaagagatcgagaccattctggccaayatggtgaaactccgtctctactaaaaatataaaaatgagctgggtgtggtggcacgtgcctgtggtccctgctactcgggagggtaaggcgggagaatca

SEQ ID NO: 12669 - DNA, 201 bp, Homo sapiens
atgagcgttttgcttcgtgtactcatttatttctgaaaataatgcagccccttgtagggctttctggctaattgagtggtgccatcattcatgcaattgcrcaattcacacaccaggctgccactttggcccctgcgtcaccttcaccaccacccaatgtgtcctgctcatcactgaggtttgtcatttttactctgagtc

SEQ ID NO: 12670 - DNA, 201 bp, Homo sapiens
ggtggatgagcgttttgcttcgtgtactcatttatttctgaaaataatgcagccccttgtagggctttctggctaattgagtggtgccatcattcatgcarttgcacaattcacacaccaggctgccactttggcccctgcgtcaccttcaccaccacccaatgtgtcctgctcatcactgaggtttgtcatttttactct

SEQ ID NO: 12671 - DNA, 201 bp, Homo sapiens
agggtgcttatgaggaaggtttcctactcctaaaagagatacacaggaagagagaccttctgcttcctctggacactggcgcagcctggactagcagttgscagcttgggtttggacaacctccgaccttagttgaaaatgaccctgtgtaggacagaggagcaagtggaaagaacctgggtgcattgtggcattttagag

SEQ ID NO: 12672 - DNA, 201 bp, Homo sapiens
tccctagtgttggatagctaggccatttataatttggacactattttaaaaaataactcaggcttattttactatttatttttgccttacactttttgtamaagtaatcagagcagtaataatagatgactccccaaaatccttttgcctctaatgattagtctaagcccataatgctgtgttccttgccagtgattggtt

SEQ ID NO: 12673 - DNA, 201 bp, Homo sapiens
gagaatcacttgaacccgagaggcaggggttacagtgagtgcggtggcagctgggacattaaccaagttgtgaaaggagccatgatgttattagctgagtyatgtcactgcacctccagcctgggcaacagagtcagactctgtctcaaaaaaaaaaaaaagtgtactttttgaggaaagttctatttttcattattttcc

SEQ ID NO: 12674 - DNA, 201 bp, Homo sapiens
aagattacaccatgtaaatgaattgtattttatgtaaccattccctagtgttggatagctaggccatttataatttggacactattttaaaaaataactcrggcttattttactatttatttttgccttacactttttgtaaaagtaatcagagcagtaataatagatgactccccaaaatccttttgcctctaatgatta

SEQ ID NO: 12675 - DNA, 201 bp, Homo sapiens
aaaatacaaaaatcagccaggcatggtggcgcatgcttgtagtcccagcgacttgagaggctgagggatgagaatcacttgaacccgagaggcaggggttrcagtgagtgcggtggcagctgggacattaaccaagttgtgaaaggagccatgatgttattagctgagtcatgtcactgcacctccagcctgggcaacaga

SEQ ID NO: 12676 - DNA, 201 bp, Homo sapiens
tcgtaatatataggcacatagatatataattaaaaaaacaagaatttctcatgtcattaaacattgcttgaaaaaacatactagtaatttcctaagattayaccatgtaaatgaattgtattttatgtaaccattccctagtgttggatagctaggccatttataatttggacactattttaaaaaataactcaggcttat

SEQ ID NO: 12677 - DNA, 201 bp, Homo sapiens
cagttcctcctagtgggcagtttgctgctgctgtcttacctcctcatcctcacccctttcacctctcccctggtaactgatttatttttccctcttggagktgcttattcttttcttcttccagttgcatctctccctctacttagatacacatttccattttacttctatttggtagtctcagaacttggcttttattgg

SEQ ID NO: 12678 - DNA, 201 bp, Homo sapiens
acttggtaaagaagcagatatttctttaatacgtgtatatattagactgtgaatttattcatcttccttattcatcatataagtaaattatatgattggayccaggcataaaacgtgatttgactcccccttgcccatcacagttctggagttcacatatcatttgttactttgaaaaatgaacttttgttatttgattat

SEQ ID NO: 12679 - DNA, 201 bp, Homo sapiens
atagtgatagtaaaaagaaccatgtgaactgggcgtggtggctcatgtctgtaaagccagcacttcgggagtccaaggtaggagggtcacttgagcccagsaattggagaccagcctgggcaacatcatgagaccccatctgtatccaaataaaagcaacaaaaaaatgagacatgggggtgcatgtctgtggtcccagct

SEQ ID NO: 12680 - DNA, 201 bp, Homo sapiens
aggttcttctgtgataaaaatagacttggtaaagaagcagatatttctttaatacgtgtatatattagactgtgaatttattcatcttccttattcatcayataagtaaattatatgattggacccaggcataaaacgtgatttgactcccccttgcccatcacagttctggagttcacatatcatttgttactttgaaaa

SEQ ID NO: 12681 - DNA, 201 bp, Homo sapiens
ggtgcagcacctcacacctgtaatttcaacacgtagggaggctgaggcaggaggatctcctgaagcccagaattcaagaccaggctgggcagcatagcackacccatctctactataaatttaaaaattaactgggtgtggtggtgcacatctctagtctcagctgcttgggactactagaaaggtaaggcaagagaatcc

SEQ ID NO: 12682 - DNA, 201 bp, Homo sapiens
agctccctccctaatcttgctagaaggtagggctaatgcattgtcaattcagaaatagggggtgttcctgagtctggggacactctagtgaaattctatgkgtaaaataatttgtacaagtttatatttttagctaaattaaaatactcacattcccattattttttagaggttgtaagctaagtaataacattctagaaa

SEQ ID NO: 12683 - DNA, 201 bp, Homo sapiens
taaatagatgcacaaagcagagggaatcaagtagaataacatggtttatttgtgtgtgtattgttctgtttttggtaaaatcatgcttatcatatcttcartgcatcatttattctgagtccacattgctgcctttgagccggggccctgaggtatctcctatactctggctggggtgagggcggcaggtcctctgggcca

SEQ ID NO: 12684 - DNA, 201 bp, Homo sapiens
ctgcttttgccatcaaatggttattgaaagaactatctgtgttgacagccttttgggtttcatacagtcctttccagcttgggcagtatagataaatagaygcacaaagcagagggaatcaagtagaataacatggtttatttgtgtgtgtattgttctgtttttggtaaaatcatgcttatcatatcttcaatgcatcat

SEQ ID NO: 12685 - DNA, 201 bp, Homo sapiens
ctacgttggcagagctcagtagtcatgacagtaaccatatgcccacaaagcctaaaatatttactatctggctctttgcagaaaatgcgctgaaccttgcrtgttgtgtcacccctggaggtagcaccttgtaattaagcacatgaatatctcacatcagaatgaatgaatattcacactcagtgggacaaacaacttctg

SEQ ID NO: 12686 - DNA, 201 bp, Homo sapiens
gtctcccgtctgcagaagcattggctgacatggaagattttttttttttttaatacttttctttttgccggcatctgcgtagaatttttttttttttttttggtagtttcttaatggtctttagcaaaggaagtaagtgacactgatcggtgaaggcagacagtaagatttataatgtatttgtgctagctgattgccaac

SEQ ID NO: 12687 - DNA, 201 bp, Homo sapiens
gtatgttggtacgttattgaaggtgatgctagctgctataacaaataagcacgcctgtgcacagttgctcaaagatagtagaagtttatttcttgtttatrtaagatccataatgactcttgccaattagcaggctgctctcttccaagtggtaacccagggactcaagctcttttcatcttgtggctcagccgtctgaca

SEQ ID NO: 12688 - DNA, 201 bp, Homo sapiens
cccagcctgggggagggtttgttaaagaactgtctgttttatcacatgaccacaagttaaaatgttgggcaatgtccctgaatgataccttttcattagtractcacatggacccataatctctgaatttaacatgcttttcaggaatgtgttcatattttccacctataaaacctgttttagtaatttactcccttgtaa

SEQ ID NO: 12689 - DNA, 201 bp, Homo sapiens
gatctcatgagatttattcactatcaagggaacagcacaggcagatcccatggctttgactcagttacctcccactgggtccctaccatgacacatgggarttctgggaactacagttcaagatgagatttgggtggggacacagacaaattgtatcatagaatcataaaaattgctatttctaaggcagatgaataatcc

SEQ ID NO: 12690 - DNA, 201 bp, Homo sapiens
aagagaccaatttaaaacattctaatgagcatcatctcataatttggtaatctcatgtaaaatgcttataataggggtgtgtgtatgttatatatattttwaaaataaatttgtaatcatgtatacagtagtccccccttatccgtggtgtttcagtttttttttttttgagtcagagtattactctgttgcccaggctgg

SEQ ID NO: 12691 - DNA, 201 bp, Homo sapiens
gagaccatcctggctaacaaggtgaaaccccgtctctactaaaaatacaaaaaattagccaggcgcagtggcgggcgcctgtagtcccagctactcgggargctgaggcaggagaatggcgtgaacccgggaagtggagcttgcagtgagctgagattgcgccactgcagtccgcagtccggcctgggcgacagagcgaga

SEQ ID NO: 12692 - DNA, 201 bp, Homo sapiens
actgagcaggaagggccaggtgttttacgactctttggagttagcagcttgttggctctgatttggtaaaagcaacggaaatgccttcagcacggtgaacrttacatgcaaatgttgggaagtgttaggaaagggaatttttttaggcgagggaatttcgcattgaggaaggtccctgcttcgtttttagacacagcctat

SEQ ID NO: 12693 - DNA, 201 bp, Homo sapiens
agatcaagaggcccggaaccccgcagtcctgaatgctaaccagtagagacaagggaggaattcatttctgtttgtgttcaacatagactgagcaggaaggrccaggtgttttacgactctttggagttagcagcttgttggctctgatttggtaaaagcaacggaaatgccttcagcacggtgaacgttacatgcaaatgt

SEQ ID NO: 12694 - DNA, 201 bp, Homo sapiens
agaaagtgagagctttcgaagaatctgtggttagaactaagaggatttttctttctcctttttctgctgttattatctcaaggagagagggaaaaaaaaaatcagagcaggacatgaacagtgcttgcaaattttattacctcattataattgatacctgctctctgagccaataaaagaagctatattcagcactggctg

SEQ ID NO: 12695 - DNA, 201 bp, Homo sapiens
agctggtgacaaaactcaaagaagatgtaactagagaaaaggtactcagtgcagcctctgtgagctaccaccactgcctctagttttccagaaaaccaccmctgaccactctctgtacagatgcgctcaagcgaccataaccaccagtgttcctaacaatgcgcctattgacttcttatttcaatagatatccagatttat

SEQ ID NO: 12696 - DNA, 201 bp, Homo sapiens
caccttccgcaggaatggcctttaacactgtcacctcaccccattcccctccactcttgggaagcatacgtctaggtgagtggtgaagatttttattctgmatttttgaaataatatcgtactgcaagttccaggcaatcaaaaactcacaaatcacttgcactctgcagcagtggtatcaggtctgaagaaaggaagagg

SEQ ID NO: 12697 - DNA, 201 bp, Homo sapiens
ggaggcacaggaggtaaaaatacattgttcaagggtcaattattgtgttgtacaaggtgtgaaatctaccaggttgccatccgagtggagaatttttttastgtacttgcctatgaaggtaaagaagcaaatggaaatttttttttaagaattgaaaggattttatttcaaatcaactctcatacctcatcctgggctcca

SEQ ID NO: 12698 - DNA, 201 bp, Homo sapiens
aaatagtcacatcatggagaatggggtatccatcccctcaagaatttatcctttgagtgataaacaattcagttatacccttttagatattttacaatgtrcaattaagttattattaactataatcaacttgttgtgctatcaaatagtaggtcttattctttctttctatcttttttgtacccattaaccatctgcact

SEQ ID NO: 12699 - DNA, 201 bp, Homo sapiens
cccctgtttcaaatgaatacagattcattttgtcacctgtgtgaaattggtgtccgtgtgccttgcttcctaggctgtccaccatgacatcagcctgcccrtgcaatgcttgagatttgccctgtgactcaacccaaatctaaagcccgagtcgtatgaatccaggacacctgcctgcaaatgcatttttcatgtataggt

SEQ ID NO: 12700 - DNA, 201 bp, Homo sapiens
aatacagataatttctctcttaaattccataagctggagacactgcccctgtttcaaatgaatacagattcattttgtcacctgtgtgaaattggtgtccrtgtgccttgcttcctaggctgtccaccatgacatcagcctgcccatgcaatgcttgagatttgccctgtgactcaacccaaatctaaagcccgagtcgta

SEQ ID NO: 12701 - DNA, 201 bp, Homo sapiens
gggtattactctgttgcccaggctggtgttgaactcctggcctcaagcgatcctcctgcctcggcctcccaaagtgctgggattacaggcttgagctactkccccaggctcttcccccgtttgttaatacataccatgaccttggcctttcccacctcttaggttttgcttactttcccttctgtcctttacttatgactc

SEQ ID NO: 12702 - DNA, 201 bp, Homo sapiens
acactgtttaccagattggagtgcagtggtgcaatcctagcttactgcagcctgtaggtcccgggctcaagcgatcttcccacctctgccacttgaatagstgggactacaggtgggtaccaccatacccagctgttgaaaaaaaaatggtggggtattactctgttgcccaggctggtgttgaactcctggcctcaagcg

SEQ ID NO: 12703 - DNA, 201 bp, Homo sapiens
atgccgacccacaagctctggagcagtcaactcagaatggtcaggacttggtcagtaatgcccatttttgctaaattttgtccccacttccaacgcaggaycaaccagagaaagccacatatgctccccaaaccaatcatacaggatgtcctggtctagggagcccacctccggcttccccatgtccacagcctccaatcg

SEQ ID NO: 12704 - DNA, 201 bp, Homo sapiens
cccacacttactcttattcacccagaacaggtgtgtgccaccttggagaagatgaagccagagagaaaatcagtcagacaggaattatgttgaaaggtgamtgaatacattaccacctcccaggagttgaatgaaaaacggctatttctttaggacgtcaaaccacctttttcctctctaattcatgcatatccctataca

SEQ ID NO: 12705 - DNA, 201 bp, Homo sapiens
cactcagtgatgggagtcttccttatgaagctgtcccagctccatctctcaggactgaaatgtgggtaagaccatcacatttttcatcccccgccccccgsccccaacattgactgggcagatattcatacaatggcgattgttttgtctgcctggatggctttaacataataccatagactgggcaggttaaacagcaga

SEQ ID NO: 12706 - DNA, 201 bp, Homo sapiens
tggatgtctgaggtatgctaagcctaatctccatcttctcaaagctccactgccactgtcccgtaagggtgggcagattcctccccattctataaaataayagctaccatttcctgagggcatactgagtgctgacaggcacatcaacatcagaccatcaccttcttatacctcaaaatagtctgcagggtgactcagaag

SEQ ID NO: 12707 - DNA, 201 bp, Homo sapiens
gcagaccattgtttagccctccttccacctgggagactggctgctggttctcattgcttctgtgggtctccaggtttctatcattacacagattagcacayggttccatgatcatggacccgttcagtacacaatgaaatcatttgcaaagcaccttggggtctgttagagaagggaatggatgtctgaggtatgctaagc

SEQ ID NO: 12708 - DNA, 201 bp, Homo sapiens
atttggaaacacggcacaagcaaaggcttgaaacgtgcttttatgttggtgcttgcccacttgctgtgctacgaacccttttacttctgggtgcgaacaarcccaggctagccttctgggcgatgagagacacaagaccatgtttccatattgccccagccaagagccaacctacagacgcaactgccttgctgacagcag

SEQ ID NO: 12709 - DNA, 201 bp, Homo sapiens
ttgaccaatgaggcatttggaaacacggcacaagcaaaggcttgaaacgtgcttttatgttggtgcttgcccacttgctgtgctacgaacccttttacttytgggtgcgaacaagcccaggctagccttctgggcgatgagagacacaagaccatgtttccatattgccccagccaagagccaacctacagacgcaactgc

SEQ ID NO: 12710 - DNA, 201 bp, Homo sapiens
tagtgatctgattcattaatatcccttgttattaagaactgtctgtatttgtgtcctggttggcagatattaagtccacagataccaataattaatatctwtggttgattgtaaaaatggccaccaattcttccctgtcccctgcatatgtacatccttgcactgtgaaattgtagatctcgccctccaaaggtgaagttc

SEQ ID NO: 12711 - DNA, 201 bp, Homo sapiens
ggagtaggaggctgcagtaagctgagatcatgccactgcactccagcctgggttaacagagcaagactctgtctcaaaaaaaaaaaaaaaaaaaaaaaaawtcaaaattgatgcaaaaaatatgataacatttcaaaatttaaatcaagacaaattcaatattatagcaaaggttcaagtaatgaacatgaatttgtaatg

SEQ ID NO: 12712 - DNA, 201 bp, Homo sapiens
cagctactctggatgctgaggcacgagaattgcttgaacctgggagtaggaggctgcagtaagctgagatcatgccactgcactccagcctgggttaacasagcaagactctgtctcaaaaaaaaaaaaaaaaaaaaaaaaaatcaaaattgatgcaaaaaatatgataacatttcaaaatttaaatcaagacaaattcaa

SEQ ID NO: 12713 - DNA, 201 bp, Homo sapiens
gtttcttgtagcaggtcatgaagaggaatgaaatactataatcacagagcttgcagaagctgcctggaggaccagttagtctattttttgtacatgaggayactgaggctcagagaaagtgaggtcattgagtcacttgagttcttgttgagtgttctttcctgctgaggtgtcctaggtgcctcttaatgcctttaacat

SEQ ID NO: 12714 - DNA, 201 bp, Homo sapiens
cctccgagttccactggctgcattctcatcagaacccagctaaaactcacgtctctcaaattccctaaataataaatccaaagttattgaagatattgggwtactaaaagttggcagtgagactggccccactcatttctttgtaacccctgtccctctttttattattgaagcttgggatgcacttggtaaggctaggca

SEQ ID NO: 12715 - DNA, 201 bp, Homo sapiens
aggcaaacatgttgacacaaacgagagaattttaggttctctttgtagctgtggctgggctgggacaaggacgatggacaaagttatgggggtgctaaaaacctcagtaatgaagataaatgatattctaatctaatattttaaaaaatcgaggctaggtgtggtggctcatgcctgtgattccagcattttgggaggcca

SEQ ID NO: 12716 - DNA, 201 bp, Homo sapiens
attgacagacccatgggtgttaagatccttcatggctactggggagaaatgacaggccttttgaaatcgtatcagtggttttccctgggatcactggaaakaatacccctgtttgacaagatatgacacatgctctgttttaattctgcatttgactaacagaaaagattggtgaagatcagactctgctttaaagttatt

SEQ ID NO: 12717 - DNA, 201 bp, Homo sapiens
aaaacctcatttctgctaaaaatacaaaaatcagctggttgtggtggtacacccctgtaatagcagctactcaggagtctgaggcaggagaatcccttgarcccaggaggcagagattgcagtgagcccagatcatgccactgcactccagcgtgggtgacagagcaagactctgtctcagaaagaggaaagaaatggaat

SEQ ID NO: 12718 - DNA, 201 bp, Homo sapiens
catcacaaaacctcatttctgctaaaaatacaaaaatcagctggttgtggtggtacacccctgtaatagcagctactcaggagtctgaggcaggagaatcycttgaacccaggaggcagagattgcagtgagcccagatcatgccactgcactccagcgtgggtgacagagcaagactctgtctcagaaagaggaaagaaa

SEQ ID NO: 12719 - DNA, 201 bp, Homo sapiens
gtggatagcttgaggtcaagagttcgagaccagcctggccaacatcacaaaacctcatttctgctaaaaatacaaaaatcagctggttgtggtggtacacycctgtaatagcagctactcaggagtctgaggcaggagaatcccttgaacccaggaggcagagattgcagtgagcccagatcatgccactgcactccagcg

SEQ ID NO: 12720 - DNA, 201 bp, Homo sapiens
aggcaagtaggggcaccgaaagctttaaagcagggagtaacaggcttgtagtgacttttatcgaagtagaagttgaatagatctagcctggcacagtggcycacgcctgtaatcgcagcactttggttggctgaggcgggtggatagcttgaggtcaagagttcgagaccagcctggccaacatcacaaaacctcatttct

SEQ ID NO: 12721 - DNA, 201 bp, Homo sapiens
gttggaatgttgcagggaggctgggctaaggtgttctgttcctgtctctggttcaaaggaaaggaatagcctagacctaaaggattctgtctggtagctgkttgctcttcgcgcctgtgctttgaatggtgaataccctcggcgggaggcaggcacctgatgccactgcccccgccccacctgcccccgccccgtttctca

SEQ ID NO: 12722 - DNA, 201 bp, Homo sapiens
aaatcagtatgattcatcataaataagtcaggactatgattgacagtctacctagaaagattaggaaagtggggaccaccccccaattattacctttgttyttacaagtgtgtttaaatctctttctgttaatttacaatttgaaaggtgggtgaggagaagagtttgaaaaatagattactgtcttcattaatacaggtt

SEQ ID NO: 12723 - DNA, 201 bp, Homo sapiens
gtgcttgctttgggagttcttgttaaccctgacaattcttgtcaaatatcttactcctgggctgtgctggggatggcagcagagtggggtggttggatggraaggcgggaaagagctagcttggagatgatacgcttttccatccttgaataacttgggaaaaagtcaggagtgtggaatgaagaattggaatataaaggc

SEQ ID NO: 12724 - DNA, 201 bp, Homo sapiens
ttatttaaaaaaatcagtatgattcatcataaataagtcaggactatgattgacagtctacctagaaagattaggaaagtggggaccaccccccaattatwacctttgttcttacaagtgtgtttaaatctctttctgttaatttacaatttgaaaggtgggtgaggagaagagtttgaaaaatagattactgtcttcatt

SEQ ID NO: 12725 - DNA, 201 bp, Homo sapiens
ctgtccttactgtttcccttgggcacgctgttcaccccttaggacatactacagtaaccttttcccaccaccgtgggaggactgtgattttgtaaatgtcytctgatctctcctctttgcaggcgcagtgacatttatgcacactggctttgaggctcattgatcttttgttttatttgcctttgctgaggcaggggcagg

SEQ ID NO: 12726 - DNA, 201 bp, Homo sapiens
ttcactgaaccaagagatgccataagcagtccttgttgtaataatttaatagcgaagccctcagcaatagatcttcaggtaaaatggatgctgactgtctrtctgtcatatgaagattcagacattgatgtaatttaaaatacttgtagtatcatggatacaaacatatgcctttttatttctgaaggaatttccagaatg

SEQ ID NO: 12727 - DNA, 201 bp, Homo sapiens
ggtgacaggcttctttcttctcatcattaaatgacatactggagatcagtcagatgaactgcaatttatatcttgcccccacccagtgttgatttgcccgrggtcatacagataattagtaatgtcttatctcagttttcttatctgcaaaatgagaatacctgatggggttagtgtgggagtttaatgtctgtaaggtgt

SEQ ID NO: 12728 - DNA, 201 bp, Homo sapiens
aatctggagtccaccatcctgggtctagctggggacatccttgaatcagcctctgggaatcactgaaccaacatgagtcacttgctactgtgagatctcaraacacatggatcaggacagagggcagggctgtttccccaaggaaatccaaatgctttacaggaaggggagtggatgctggcccggcccaggcgaggatga

SEQ ID NO: 12729 - DNA, 201 bp, Homo sapiens
taaattttatttttcagtttacttggttttgcctccttctagaactagaacataagctctctgaagtcagggaccatgcctagaatcgccttccttttatytcccatcagccgaaactaactctgctgtgtcacgctgtgttaggctgtgttggctgtgagtaagagaagtctcacccaactagctgaagcgaggtgggtt

SEQ ID NO: 12730 - DNA, 201 bp, Homo sapiens
tgattttgatttggttgtttttggtagagatgatatcttgctctattgccaggctgatctcggactcctgggctccatcaatcctcttgcttcccaaagtrctgggattataggtgtgagccagtacacttggccttttggcaccattattctgcctgccatcctgtcctaactaaagaaagtaaggtccctccatcctcc

SEQ ID NO: 12731 - DNA, 201 bp, Homo sapiens
atctgccatgccaaataacacctttgcaggtttcagggtagagcatggatgccttttgattttgatttggttgtttttggtagagatgatatcttgctctrttgccaggctgatctcggactcctgggctccatcaatcctcttgcttcccaaagtgctgggattataggtgtgagccagtacacttggccttttggcacc

SEQ ID NO: 12732 - DNA, 201 bp, Homo sapiens
ccaggttcaaatgattttcctgcctcagcctcccaagtacctgggattacaggagcctgccaccacgcctggctaattttttgtacttttagtagagatgrggttgcaccatgtttaccaggctggtctggaactcctgaactcaagtgatctgcccgcctttgcctcccaaagtgctgggattacaggcgtgagccactg

SEQ ID NO: 12733 - DNA, 201 bp, Homo sapiens
taccctggaacttaaaagttggtgaaagaaagaaggggccgggcatggtggctcacgcctgtaatcctaacattttgggaggtcgaggcaggcagattgcytgagctcaggagttgaataccagcctgggcaacacggtgaaaccccgactctactaaaatacaaaaaattagccgggcgtggcagtgtgtgcctgtaatc

SEQ ID NO: 12734 - DNA, 201 bp, Homo sapiens
cccaagaggatccgacagctctggaacttgtaatatttgcagcatgtcttgccctcttaatgtctaagaagtcaaaaaaggacacgtatgcctagaaaacrtgaataattatcatctatcaaatttttaccatgtgccaagcatagtcatatttggctaacgaaaacaacaaaatcaaccgtgacaaggttttattagtaa

SEQ ID NO: 12735 - DNA, 201 bp, Homo sapiens
ctggaatcctactgccaaattatggcactcatcctacttggtgtaaaatcctgggatgatagcttataatagtaataataagacctgcttcccggtgattmtctaaggattaaatcagttcatggagatgaaatacttaaactgtgcctggcacaaagtaaatgttagtgctactattatccctgctgctgttaaccccaa

SEQ ID NO: 12736 - DNA, 201 bp, Homo sapiens
ggtgaaagcatgcaagctaggagttaagatctttaactcagggaagaccctgtctatggaagtgctgagctcttcagtgtcatcacagaaaagcatgagcscctccctggtacggagtcatcacatcccatagctgagcgacgtcggagctccacgatggggaggtgacacatagtcagttaattacataaagagaacttg

SEQ ID NO: 12737 - DNA, 201 bp, Homo sapiens
aacatgtaaatcagctcattcattctgctggccctaaataggtagaaggaagggaaacatgaaagggagccttcatctgttttcctgcagatgcccggctygtggttaacccaagcaagaggtagttaaacggccccgcagattgccagtgactccgggaatgcctaggtttatgtatggattaacacagtgatagaccct

SEQ ID NO: 12738 - DNA, 201 bp, Homo sapiens
cttacaagttagattcacactccaggaatgtatctgttcccacatcccctgatgctgagcataccagagttaagggaggcaagcaaggcccctaacctccyaggttcatggaggtacccattctgcacttgttgaccttgagcttgaggactccataaatgtctgcccttggcattgcacgtgcctccctctgggctgacc

SEQ ID NO: 12739 - DNA, 201 bp, Homo sapiens
tacgttgatctgtacagcaaaccaccatggcacacatttacctatgtaacaaacctacacatcctgcacattgtaccctggaacttaaaagttggtgaaaraaagaaggggccgggcatggtggctcacgcctgtaatcctaacattttgggaggtcgaggcaggcagattgcctgagctcaggagttgaataccagcctg

SEQ ID NO: 12740 - DNA, 201 bp, Homo sapiens
ttttcgttgcttacaagttagattcacactccaggaatgtatctgttcccacatcccctgatgctgagcataccagagttaagggaggcaagcaaggcccytaacctcccaggttcatggaggtacccattctgcacttgttgaccttgagcttgaggactccataaatgtctgcccttggcattgcacgtgcctccctct

SEQ ID NO: 12741 - DNA, 201 bp, Homo sapiens
cattttccccagacctaacctcgatttgtgctccaggtctgagcagaaatgttattccctccagaaagccttccctggatgttgagggatgaagttgtagscccctcccgaatgcgtcctcagaactcgctggttctcgtcctcgccctcagcatacttgctcattgtttgtttccatctctatcatctctgtgagccctt

SEQ ID NO: 12742 - DNA, 201 bp, Homo sapiens
ggggttgggggagggagagcatcaggaagaatagctaatggatgttgggcttaatacctaggcgatgggttgataggtgcagcaaaccaccatggcacagrtttacctatgtaacaaacctgcacatcctgcacatgtaccctggaacttaaatttttttaaaaaatgtttttattgtgattttcacaggaaagaaggggc

SEQ ID NO: 12743 - DNA, 201 bp, Homo sapiens
aaggattattcctccccttttatcaagagccgtaagtccttggaaaatgcaaagagggggaaaaagaagaaaaacagcaacgagtttattggagagttaamacttaaatactccagtacattgagtgtgacatgcctgtgtaggagactgtctgtcccccaaataattgacaatttctctccatctaacaagaaaatatat

SEQ ID NO: 12744 - DNA, 201 bp, Homo sapiens
agcctcaaactagaacgtggcttttgaacggtgaacattccacaaacatttaatacagagatggctgtggggtgggggctgggggctgggggcctggaagrggagaaggggcaccagaaggagaaatgggaggaaagggcgagtgagatagcaaagagaactcagaaagtaataaagccctgcagtaatcagagggctgag

SEQ ID NO: 12745 - DNA, 201 bp, Homo sapiens
tttgttccctctgcatatagcactttctcaaaaagtagtttggtgacaggcttctttcttctcatcattaaatgacatactggagatcagtcagatgaacwgcaatttatatcttgcccccacccagtgttgatttgcccggggtcatacagataattagtaatgtcttatctcagttttcttatctgcaaaatgagaata

SEQ ID NO: 12746 - DNA, 201 bp, Homo sapiens
agatggcctctagtgaccctcacttcctgggttttacattgcagtatatttctcttctactctgaacaggattgtcctgtgtaacctacagggggaagtgrtagcgcatgacctctgaagctaggtgacaaaatacatttggacttctgctttgcttctcttggatcactccttgtggcagaagctagacaccatgttgcg

SEQ ID NO: 12747 - DNA, 201 bp, Homo sapiens
tctctgtgagccctttgaggatggatgtgtgtccatcttgttaacagttggctccccagtaaccagtacagtgccagatacagagtagtaaccctacattstagcgtaggcaaatattctagtatttgccaaaactagaggatgaatgagtgatgggtaagagagttctcagaaaaatggatataaacaatattgtaaatc

SEQ ID NO: 12748 - DNA, 201 bp, Homo sapiens
cccactaagagtaggtctttctgttaggtacagactctacaataaccaaattcacagaaactgatgtgtaaacccagggtcataaacaataattttcaacmggagctataattatcacatagtttgaaatgctcttgttaatctgagtaggaagagaggatgagaattttcttataggtggaactacagaaaaagagttta

SEQ ID NO: 12749 - DNA, 201 bp, Homo sapiens
tgtgtgagtgtgtgtgtgtaaaataccaaagagaaaacaataaaaaaatagagaaaataataataactagccaatgtgtcatcactccagacaacagccayggtcagtatttggttaacccattcagattttcccctatgaatgagttttttcgcctccataatattagttataatacattgatactacatcccgagtgtt

SEQ ID NO: 12750 - DNA, 201 bp, Homo sapiens
ctgcgccaccacacctgccacaaaatttctttgttatggctgaataatgtttctgtgtgagtgtgtgtgtgtctgtgtgtgtgtgtgtgtgtgtgtgtgtktttgaataatactcctatgaacattgtaccaatatctattcagatctctgctttcgattcttctgcatatatacctaggagtgaaattgctgcgtcgttt

SEQ ID NO: 12751 - DNA, 201 bp, Homo sapiens
agtaactcaacattaactgtgtacccctcctagtttggccactgttctgcccaaacatacaagagtcaatgtaagtctctgggagcactcacctttgggcrtgttgctacagagtcactcattcctagaaattgcgaagtcacgaagttgtcaaaaaacacaacgacaggccgggcgcggtggctcatgcctgtaatccca

SEQ ID NO: 12752 - DNA, 201 bp, Homo sapiens
aaccgtggaggcagaggctgcagagagctgagatcatgccactgtactctagcctgggtgacagagcgagactgtatctcaaaaaaaaaaaaaaaaaaaaatctttcagggatccaggctgacctcagcaccatctcttacatgtgcctctgttctttccctaatataagggagcatgggggattagtgtctggcttaagc

SEQ ID NO: 12753 - DNA, 201 bp, Homo sapiens
gattcccaaaatagacgggagttacacagagacctttttttttttaacctcctctgagattttttttaacctcctctgagattctgtatttccttaatgasccgaaaaatctatttagcccagtttttatccttgcagataagttagtacgcttctttttctgctggttgtgatcatatttctatttaggggtaaaggtgc

SEQ ID NO: 12754 - DNA, 201 bp, Homo sapiens
gtgttgggaggaaacagggtgcagagtgggaagggcaggagtatctaagtggccaaatttagcctaattaacagatttgcctagggctgaccctgaagcaraaagcaaagcctagatcagtctgctctcctcctaccaacagggtaatgatgaggttgaaccaccagttctcaatgccatacatgagattcccaaaataga

SEQ ID NO: 12755 - DNA, 201 bp, Homo sapiens
tgccgataaacatcatctggacggaatgaagctgagggccaatagtttagaggctcagcacccgactggagagagagagagagagagagagagagtgtgtatgtgtgtgtgtgtgtgtgtgtgtgtgtgcgcgtgcatgtgtatacgctggtgtttaggtgggcttgagaaaagtgctgactttgtgaacgaggaggaggg

SEQ ID NO: 12756 - DNA, 201 bp, Homo sapiens
caccactgctcgcattcccatgttggagttttccctttggggttcttatgccattttaaagactctgaaaacaggaagactttttctcttgggtatttttwtttttttttcctctgcaagggatggggtcataagacattggtgaggttaggccttcctttgtctcccaggagcacacttgatagcaatgtagggtgaatt

SEQ ID NO: 12757 - DNA, 201 bp, Homo sapiens
ctgccgataaacatcatctggacggaatgaagctgagggccaatagtttagaggctcagcacccgactggagagagagagagagagagagagagagtgtgwgtgtgtgtgtgtgtgtgtgtgtgtgtgtgcgcgtgcatgtgtatacgctggtgtttaggtgggcttgagaaaagtgctgactttgtgaacgaggaggagg

SEQ ID NO: 12758 - DNA, 201 bp, Homo sapiens
ttctgccgataaacatcatctggacggaatgaagctgagggccaatagtttagaggctcagcacccgactggagagagagagagagagagagagagagtgwgtgtgtgtgtgtgtgtgtgtgtgtgtgtgtgcgcgtgcatgtgtatacgctggtgtttaggtgggcttgagaaaagtgctgactttgtgaacgaggagga

SEQ ID NO: 12759 - DNA, 201 bp, Homo sapiens
gattctgccgataaacatcatctggacggaatgaagctgagggccaatagtttagaggctcagcacccgactggagagagagagagagagagagagagagwgtgtgtgtgtgtgtgtgtgtgtgtgtgtgtgtgcgcgtgcatgtgtatacgctggtgtttaggtgggcttgagaaaagtgctgactttgtgaacgaggag

SEQ ID NO: 12760 - DNA, 201 bp, Homo sapiens
tgaggcaggagaatcatttgaacccaggaggcggaggttgcagtgagccaagattgcgccactgcactccagcctgggtgacagagcaagactctgtgttwaaaaaaaaaaaaaaaaaagttctaaatcagtggattctgccgataaacatcatctggacggaatgaagctgagggccaatagtttagaggctcagcaccc

SEQ ID NO: 12761 - DNA, 201 bp, Homo sapiens
ggaatgccatagtggtgagctaagagcaggcagttagttaagtgtatgacaagtatctcattataaatggatgctgaaatgtccaagtgtggaaatgataygcttcagctcttatttttaagtcatccttatctctttcacttattccctcattcaggcaccaaaaatgctgtttgactgggagagcaagtggagctgttc

SEQ ID NO: 12762 - DNA, 201 bp, Homo sapiens
gtgtttttttttttttttttagatttctcattgctgagaacagttccagctctgctgaccaaaggctgagtgtccttttattagtctgagcccctagagaraccaaagaggcaaccctcgagccaactgacagccagctgtggggttggaccctgtttttcatacagtgagcactcttgaacccagagaaggtgcaggttg

SEQ ID NO: 12763 - DNA, 201 bp, Homo sapiens
atcgcagacacggaaaaaaggattattcctccccttttatcaagagccgtaagtccttggaaaatgcaaagagggggaaaaagaagaaaaacagcaacgartttattggagagttaacacttaaatactccagtacattgagtgtgacatgcctgtgtaggagactgtctgtcccccaaataattgacaatttctctccat

SEQ ID NO: 12764 - DNA, 201 bp, Homo sapiens
ccacttcctggaggactgtcagtgctagctaatgagactgtaaaagtggactatctgcccaggagacagtgaggaaggaaatcaggggtcacccttacagsgaagggctctttgcagagagagtgcctgatacgtagcagctggtacttctccatcttgaaactgtccttcctggttttgtctaatttgtcatcatgggat

SEQ ID NO: 12765 - DNA, 201 bp, Homo sapiens
ctgcgggggcctaggccaaagatatgcccgagtagaaaatctgacaccagcttcccagttttctcttctgctctctttggctgcaacgcttttaccatggstaaaccattaggccggctctgcagggagggcaagaccacagcagctcagtatttcctgctcagggaaaaaggccaggtcttttgttggtggaaatccact

SEQ ID NO: 12766 - DNA, 201 bp, Homo sapiens
tcccagggtaaagagtcaccgctgattaattacctcaaggacaaggggacggtgactttttctcttgtatccagcagcgccacgcggggcgggcgggagasgcaaggctaagaggtggatgaaaggctagggttaaggcatttcacaatgtcaggcatcttgttagactgcggctttccaggccttcccccgtgactgctg

SEQ ID NO: 12767 - DNA, 201 bp, Homo sapiens
cttccatttgaaaggagctttaaacacctttggtggcagctaagagtgtcaaaatggagggatgtgtaggggacctagggcctgggtaacattgtcccagsccagggcctattgtgttgtgtgtgtctccactttccagcctttgggaacgcagagggggacctctgtaattggtaccagcatcccttccttgcagggtcc

SEQ ID NO: 12768 - DNA, 201 bp, Homo sapiens
cgtccctccgcacctcactgttgggctgatcaatcccattcccactccattatgtgtgtatttctaagtggcagatttgccttaggaaatggaagaagggsatgaaatagtgaccaacacaaattactgggttggcgggagttgagagctggcaaaatcgtcttggagaaggaaatggtgcagatttcagagctggcagac

SEQ ID NO: 12769 - DNA, 201 bp, Homo sapiens
ctggagtcatgtgtttgcttctggaagggaggcaagaggcattcaacctcctgttaatttggttgctccttcagatacgctcttcatggtacagccctgasctgcatcatttaaagaccaattgttaaggaccaatctgagggcctgtgcattagttaaaactccttatctggtcatagagggtggtgtggtttggacgcg

SEQ ID NO: 12770 - DNA, 201 bp, Homo sapiens
atatgatgactagttggtgagttgatcttgtaagacttttacagatacccagaacggctctacttcttcatattccactttttagttttaaaagtttaagkagatctctgtgatccctgaagaattgtgtgcaaagcagcattaagacgaaaatcttttatatttgtgttgtagcttggaaaactagcgcgtggtctgttt

SEQ ID NO: 12771 - DNA, 201 bp, Homo sapiens
atcatctccgtccacatcaatgtcgtcatcgtccttatgaaaagccctgggcatcattttgcccttgagctggatgtccatgttggaaaaacagctagtgraaggcgtgcccaaatctcagaagttggcgtttccttgcagatatcattggtggccattggaggggaaaaagatgctttggaaaccaggacacagagaaaa

SEQ ID NO: 12772 - DNA, 201 bp, Homo sapiens
ttgccacttcctggaggactgtcagtgctagctaatgagactgtaaaagtggactatctgcccaggagacagtgaggaaggaaatcaggggtcacccttayagggaagggctctttgcagagagagtgcctgatacgtagcagctggtacttctccatcttgaaactgtccttcctggttttgtctaatttgtcatcatgg

SEQ ID NO: 12773 - DNA, 201 bp, Homo sapiens
ctcagacagataagaagctggcccacccttgccacttcctggaggactgtcagtgctagctaatgagactgtaaaagtggactatctgcccaggagacagygaggaaggaaatcaggggtcacccttacagggaagggctctttgcagagagagtgcctgatacgtagcagctggtacttctccatcttgaaactgtcctt

SEQ ID NO: 12774 - DNA, 201 bp, Homo sapiens
ctgtggaactatgagccaattaaacctcttttctttataaattacccagtctcaggtaattctttatagcaatgcaagaatggcctaatacatggtctctsagcaggattattgtagaggggactgatgttgaagaatggaaaagaaggcagtgtcagagaatgctgaagagtgtggatcttaaagtccaacctcaaggcc

SEQ ID NO: 12775 - DNA, 201 bp, Homo sapiens
gagtgtttatcagctcacaccaaggaagagagagctcaggagcgactgggcatgaggtggagtgagcactgtgaatgctggggaatggaaagtcctttatstggtgttgcctaagggtacggggaacctggcctggtgttgggaggaaacagggtgcagagtgggaagggcaggagtatctaagtggccaaatttagccta

SEQ ID NO: 12776 - DNA, 201 bp, Homo sapiens
atggaaaggatctattcctagaaaggatccattcctagaagaggaattctgtacaatatggccaactttctctctgttgaggttgaaccatttgacacatytcgctagcattgggaaaatccccattttcctcactatccatttttcttcctctctttccttcctcttttcccttcttcctcttttttttcttttctttcc

SEQ ID NO: 12777 - DNA, 201 bp, Homo sapiens
gaaaacaagtaagagtaactttgtacaccgtgggctcccaatcagtgctgcttttcgttgttgatgttgttgttaatgttgaaaaaaatcttcaagtcatrtttgcccccacagaccttcccagacagtctaactaaatgcactgtatttgctaactgttggaacttggcttttggactagaccagcacctcgagaaagaa

SEQ ID NO: 12778 - DNA, 201 bp, Homo sapiens
ttttcaaaacaataccaagaagctggtcttatttagatctagtcttatatcattgaaatatcattagaattcttatggaaaatatgttttggctgtttagrggatgctaggggctggaagtgagaaggtttcaacaccatatgggtatgtgagtatagatgcttacaagaagaagggtagacttagccaaaactaatttgg

SEQ ID NO: 12779 - DNA, 201 bp, Homo sapiens
ttctccatttatattggtatggatacgtgaatatttagtttattctgtaggtcataatacgacagtattgtgatatattttggtgctcaaattgttccggstttggcccataggaggtctttcgggcaggttcctgcacccttttgacatgccccgttcttttttgagcactttcttattttttggcactgtaagaggctt

SEQ ID NO: 12780 - DNA, 201 bp, Homo sapiens
ggttaacgtggtatctgccagatttctccactgtaaaggatcatttttttcctttgtaattaataaatatattgggggaggtactttgggactacttctcwaattttcatccattaattttagcatccctctggggatcttgcctgcaatgattaatactgtggtattctcatgactgatattgtctttctgtcatgcctt

SEQ ID NO: 12781 - DNA, 201 bp, Homo sapiens
agatgggtttatgcctaattgtgccaccagtttttcccataaaataattcatttggaaggggtggcctaatccagtctgaaccaattctaagatggtagcrtggatgcgggaggcactgcacaggatggaaagcatggagtttggaatctggcacaagtggatttgaattcagacttagtcatcaggagctgtgggacctt

SEQ ID NO: 12782 - DNA, 201 bp, Homo sapiens
aagacatggagctgagagtgaatatgagagtgaatattctgcacgtccattttaatgaccttgtgcctcattttccccatttaaggtagatgggtttatgyctaattgtgccaccagtttttcccataaaataattcatttggaaggggtggcctaatccagtctgaaccaattctaagatggtagcgtggatgcgggagg

SEQ ID NO: 12783 - DNA, 201 bp, Homo sapiens
tgaaaggctgtctccaaccatgcggacacagcgcagtgaagcggttggaaaagctacagacaaatggaaaaccttcattccaaagggtcgttgtctcctcytatttaatagccctgcattcatgcacttttttttatcttgctgtctttttttttttttttaatcaaataccaaagtacttctatggactggtcttaaaaa

SEQ ID NO: 12784 - DNA, 201 bp, Homo sapiens
ttactttttgggctggtaaagccacctaggtcagtgccatgtccaacccaatctggaaaacgattattgtggtgcctgttttgttgacttaacaaagccartcgcccattcctatgctgctaagatgcgaatgcccagctcaggggatgagattactgtcagctttgcctaagctttgggcattagcaccctccatatgca

SEQ ID NO: 12785 - DNA, 201 bp, Homo sapiens
cgacttctgattttcacgtgactcactgcttagttgtctgggtttgttttaattcctttccccctgctgacagttctttaagtggatgtctataaaggttggggcattcgctcttacaacaataggaaaagaaaggaggaaggaataaaaaagagagaaaaggaataaaaaaaagtttggtttagatgtctgatttctctg

SEQ ID NO: 12786 - DNA, 201 bp, Homo sapiens
aattccagttctctcatattaagtgacaagttgcagaatgcccctgtctttctgagctgtttttatatctgtacaatggggttaatactactagtatttgmttccagggattgttttggaggggagtgaggaataaatgatataattcactaaaacacgtagaatagtatttgacacagagtaggtcagcatgcccaaagt

SEQ ID NO: 12787 - DNA, 201 bp, Homo sapiens
ctgaaccacacttgttatctttcattttatgatgagaaccaccttaagaggtgtgaggtgacatctcactgtggtttcaatttgcattttcctgagaattwgtgacagtgagccccttttcatacacttggctatttgtatgttttctttggagaattgtctatttggttcctttgcttgtttttaaaatctgtggttttt

SEQ ID NO: 12788 - DNA, 201 bp, Homo sapiens
caaaccaccaaacctgggttggcgtttcagtgcctgacacagttgtattcctaagacatagttgggaccagacctcaagaaaatagccaacaaatactggstgaatgaacgaaagaggccatatgcagtcagcccccctctctctgggttctacatatgtagatttaactaatgacagattaaaagcattcgaacaaacgg

SEQ ID NO: 12789 - DNA, 201 bp, Homo sapiens
ctcatttctgggggactaattaaatgcatcctgtgtgaccccactggaagaggacatttggaatcttgtacctggttttctccagacttcgcctcattcascatttccctgtgctcattttgccttgcatccttttgctgtgataaatctcagccatgagtgtgaccgtatgctgagtcttatgagtcttccttgcaaacc

SEQ ID NO: 12790 - DNA, 201 bp, Homo sapiens
agaaatagaaaattaattgagttttagtttttagaaaattatctaagaagtagatttttagaaatagaaaattaacgtagatcacagaaaattatccaaastcagttaattttcccttttccagcaactgtatttgtcctccccacttctcttccctgccttctttttttctccttagcacttacaatgtctcactcatgt

SEQ ID NO: 12791 - DNA, 201 bp, Homo sapiens
aactatattttcttcctttttttgtatgcctccccatgcaaggataattacacagaataagcactgagatgcctgttgatggatttattccagcaattttwtttttttagctctctttgtctggaactttgcaaaataaacaccatggtcactccgtgctttgtgagtgacgtgctagaatggaatttcactgttttaaat

SEQ ID NO: 12792 - DNA, 201 bp, Homo sapiens
agacagtgttagtcaacatcaaatgtctggatcaagagaggcaagaatcccgtggatttggcgttggccagaacttgtctggaatcttgttttctgccttsagtgtcacctgttgagagctctgttgacaaactggcatttgtccttgggagagtagcctcaggaccaggggtgaagagttcagtaaactgtgtttaaccc

SEQ ID NO: 12793 - DNA, 201 bp, Homo sapiens
tttgttttaaataaaaatcatactagagcagtaggcagtgtgggtgagttctcccactttacattttactttgcataatttaggcccctttcaggccactyttccccctgtgccccaggtgtgtttgctaccatacctccccaggggatagccctccaaacctgattggccacctagtctggtcttaaagtcccaaaggga

SEQ ID NO: 12794 - DNA, 201 bp, Homo sapiens
atgttagttattattttaatattacagcatctgtggaaacagtgggtttatatttcagcgtcctgagaaacactcatcctgaacaacgggaacattggccrcatccgccattgtcaattttaaataaaagatatgatgactagttggtgagttgatcttgtaagacttttacagatacccagaacggctctacttcttcat

SEQ ID NO: 12795 - DNA, 201 bp, Homo sapiens
tgtgtcttctcccccatttatttatttaatcatttatttatatcacggtacactcatggacatttattttatgctttatgttataatcctatactactttrtttattttgttgcttaaatttttccagatggaacaatttggtcttcaaaagttgctgctgttggctcctgtgttcttgtgatgtacacacatcatggtgt

SEQ ID NO: 12796 - DNA, 201 bp, Homo sapiens
aaaatagagtcagcagcatctaaagagttgttttactacctctggagctgagaggtgaacatagtcgtttttcaggaagccgtttctggctcagacagatmagaagctggcccacccttgccacttcctggaggactgtcagtgctagctaatgagactgtaaaagtggactatctgcccaggagacagtgaggaaggaaa

SEQ ID NO: 12797 - DNA, 201 bp, Homo sapiens
aatgtcaatattttaatgtactagtaagggaaaattctattaagacataattgtttggctttgtcagtttgtcaacttgaaaatagagtcagcagcatctraagagttgttttactacctctggagctgagaggtgaacatagtcgtttttcaggaagccgtttctggctcagacagataagaagctggcccacccttgcc

SEQ ID NO: 12798 - DNA, 201 bp, Homo sapiens
cgggtggggagggcagacaagttgctcatcctctctgcgcctcagtttcttcatctacaaaatgaagatgttggttatttctttattcaagggttgttgaraggatgaagtgctaaaaatgcttgaccagcattcacacaggcactaagacggtgagtactcactacttagcgctgtcaacatcatctccgtccacatcaa

SEQ ID NO: 12799 - DNA, 201 bp, Homo sapiens
ctgcagctgtcgcagttggaacatgtgacgaaagccagttgatgtgacaactgctgggtgggagggacaggcttgggggcggggctgggagggctccttcycttcctgacccagggatggtctttacttctccctggcacctgtagacctgtctttcttgtgtttcagatttgccatacggatgggaacaagaaactgatg

SEQ ID NO: 12800 - DNA, 201 bp, Homo sapiens
agtgcactccagcctgggtgacagagcaagaccctgtttcagaaaacaaaaacccaaaaagcaaaacccccacagtatatatagaaatacaagatttgtgrggggcgggggtccccctacaaagcaagtgttactgtccacagagcaaatgtcaatattttaatgtactagtaagggaaaattctattaagacataattgt

SEQ ID NO: 12801 - DNA, 201 bp, Homo sapiens
tgggcaagaagggaaggagaattgtgaaacatgcacaattagaagtcgtgcacctgggttcatatcctggctgggccacttactttctggcgggtggggarggcagacaagttgctcatcctctctgcgcctcagtttcttcatctacaaaatgaagatgttggttatttctttattcaagggttgttgagaggatgaagt

SEQ ID NO: 12802 - DNA, 201 bp, Homo sapiens
ttgggcgattcagttttacctgtgtcctctctataccatagtttatgacaaggggttttctgtggctggtctccaaggcctcttccaatcttgacattctrtgatcctgtaagtctttgaataatggcccaggatgccaacaagaagtcaccaatgagagttcaggtgttctgttggaaatctttgtaaaatcacagagaa

SEQ ID NO: 12803 - DNA, 201 bp, Homo sapiens
tgtgtatctgtaatcttagcagaagtgactacttttaacatcgctggaacttttaacatcgctagatttattcttctattttccccgcacacgcatccttaaaaaaaaaaagtagggaggccaggcatggtggctcatgcctgtaatcccagcactttgggaggtcgaagtgggtggatcctgaggtcaagagatcgagac

SEQ ID NO: 12804 - DNA, 201 bp, Homo sapiens
gaatacaaggggggataaagatagacttaaaatacgctctctagaaaaaagtaagaaatatggaaagaaatctaatttagaaaaatgcacgcacccacagrcacgcttcacaggactggcaggtggagaggatgtttgttaacagggctggctattttactttaagtgctgcaaacattgcactaatgtttgggtctttgc

SEQ ID NO: 12805 - DNA, 201 bp, Homo sapiens
gagtgagaccctatctcaaataaaaataaaaatagaatacaaggggggataaagatagacttaaaatacgctctctagaaaaaagtaagaaatatggaaakaaatctaatttagaaaaatgcacgcacccacaggcacgcttcacaggactggcaggtggagaggatgtttgttaacagggctggctattttactttaagt

SEQ ID NO: 12806 - DNA, 201 bp, Homo sapiens
gtaaaaaaaatcatctcacacctgtagccgcagctactcaggaggctgaggcagtagattcatttgagcccaggaggcggaggttgcagtcaaccaagatyacgccactgcacaccagccgggggtgacagagtgagaccctatctcaaataaaaataaaaatagaatacaaggggggataaagatagacttaaaatacgc

SEQ ID NO: 12807 - DNA, 201 bp, Homo sapiens
aaacaaacagcttgtttgtggttcgtcctgaaatcctccctgctcacaaaacagccagctacttggttttctaaaagacgtaattttgcaggcagacttcrtagagccattctgtgcagaagaagggaagggagaagctgtttgttttacctgtagtatgaagatattctttgcgctgttagaactgagctcattaattct

SEQ ID NO: 12808 - DNA, 201 bp, Homo sapiens
tttgggaggtcaaggcggatggattgctggagctcaggagtttgagaacatccagggaaacatagtgtgaccccatttctacaagaagtaaaaaaaatcawctcacacctgtagccgcagctactcaggaggctgaggcagtagattcatttgagcccaggaggcggaggttgcagtcaaccaagatcacgccactgcaca

SEQ ID NO: 12809 - DNA, 201 bp, Homo sapiens
ggaaaggatctaagatgattggaaacagtgtacatagaatacaagaggagttgggcatgctggctcatgcctgtaatcccagcactttgggaggtcaaggyggatggattgctggagctcaggagtttgagaacatccagggaaacatagtgtgaccccatttctacaagaagtaaaaaaaatcatctcacacctgtagcc

SEQ ID NO: 12810 - DNA, 201 bp, Homo sapiens
gaatggaaggagtgtgtttaaaatgtgggtggttttgtcaattcctattgggaatgcttgtatttgaatgtatatacatatgcatatttatgtgtaatgtctatttcatgctaaatagggagtgatcaagttgaaaaataagaaatgctgtttgaatttttaaaataggttataaattataacatgaaaatcaaatacaat

SEQ ID NO: 12811 - DNA, 201 bp, Homo sapiens
gcttgaggccaagaatttgagaccagtctgggcaacataggcagaccccatctctaaaaaaaaaaaaaaaaaaattaaattagctgggcttggtggtgcayacctgtaggctgagctgctcgggaggccaagatgggagaattgcttgaggctggatgtgtgtggctatggtgagctaggatcacgctactttacttcaac

SEQ ID NO: 12812 - DNA, 201 bp, Homo sapiens
ctgggtgggtggaggttcagggatatctgggaaggactaagaatagctttttcttttagtagatcaggagtttcctcttacacacaaaaagctccaaattyaaactagcttaagaggaaagggtcattactggctgacaaaatgcgaagttttgtgcaagagtcagcaaagtttctctgtgatgggatatttaataaatat

SEQ ID NO: 12813 - DNA, 201 bp, Homo sapiens
attttatttcaggaccttggtaaggggttatacaatatttcttttgaaacgagggtctcgattattgggcttgagtatcctgatctaattaatgcactggrcagagctggcagacgtgtgggacacccagctattctctggaagggaagggggatataagagacacactataaaggtgaatggtaatcggcatctcccctt

SEQ ID NO: 12814 - DNA, 201 bp, Homo sapiens
atgctggaaggcaaagtaaaagccaacctcttgagaaagacatggaacacaggatggaacttgaactgcttaaaatggcttttctcaggccagctgcactggagtgtgctgctgtaacaaacacgcccggatctcagtggcttagcatggtgaattcatttcccattcgtgatatctgaccacagatgggaggtaaggggc

SEQ ID NO: 12815 - DNA, 201 bp, Homo sapiens
aagaacatcatggcccccttcatatcctggttaatgtccccgctgaccctgagttctgcctccatcactggaacaagagcctgtctttgggaagaggtgtsttccctggcactcgtttgatttgtagccgccacacatggcaggtcccaagctgtctgaagtcttggctgccattcctaagctactaaaactttgctggag

SEQ ID NO: 12816 - DNA, 201 bp, Homo sapiens
gatttggacggtttgctttagagtgcattaacttctttatcacattaatactgactcatatcttatttcccacttgcaataagaaaaccattcaaatcttkccctcacaggacaatatctttaatagcttctgtgtgtttcctatttttggctgtttctgtataaacagactaatctaatagcatactgaacccatctaac

SEQ ID NO: 12817 - DNA, 201 bp, Homo sapiens
tttagtgagctctgctggcaagtgtgtcaaatttataaatatcactactataaagacatacttttggatatggatttcttcctcagtttatttcttctttsattttttcatgtccaggtcactacgtattgcgtatatttggttggaattttatttttgagcaattcatttacccagattgtgtttctggagattaaagca

SEQ ID NO: 12818 - DNA, 201 bp, Homo sapiens
cagtaagtattcttggggcaaatgggaaaagggttaaaatgaccagatctccagagatctcactcactatggtgaagacagcgccaagccatgagggctcygccccagtgattcaaatacctcccattacggacatgtttcaacatgagatttgagcggggacaaatatccaaactatatcaggatcccagcagactgggt

SEQ ID NO: 12819 - DNA, 201 bp, Homo sapiens
tacctgaactgtctcttaaaaggctctgtctccaaacacagtcacattgtgaggtactgggggtttgggcttccacatacaaagtctgggacacagtacgytctcataagagacctcttctcaacaggatccatgtttgatccgggggaataaagctagagttgctttcttccttgtaatatgtataatgactcatgagag

SEQ ID NO: 12820 - DNA, 201 bp, Homo sapiens
aggaatgtagttcctcacagttctggaggttgggagtcctagatcaaggtgtcagcagggttggtttctctctgtaccattgtccctggcttggagatgaycatcttctctgtcttcacatggtcttccctctgtgtgcgtttgcatccttatggcctcttcttgtgagggcactggtcatattggattagggtccaccat

SEQ ID NO: 12821 - DNA, 201 bp, Homo sapiens
atgttgcctccagcatcccaggaactccgttaatgtttatttgaatgatggaatgaaggtgtcttgctatattttgacatttctgtcaaaatatgaatctrtctttgcctagcatcttttcatgtgcacattgcccatctttataacaaagtgtgagtgggaaaggacttttaatcttcattatattatcattcatatgaa

SEQ ID NO: 12822 - DNA, 201 bp, Homo sapiens
tattccagtgggccccgctgcattcttcccagtcccaggaaatctttgtgcatggctgtcttttctgtgccatcttgggcatctcacgcattggccctatmcacatgttgcctccagcatcccaggaactccgttaatgtttatttgaatgatggaatgaaggtgtcttgctatattttgacatttctgtcaaaatatgaa

SEQ ID NO: 12823 - DNA, 201 bp, Homo sapiens
tttaacaagagacacatgtcagatagtagacatgatctgagaagacacaaaacccagcgtggtgattttggcagccttgccatgcatctctaacatgcacrtggccagaaaaatagcttggacattctgttcaaccctccacatcaactggtcagtttagtctttaaaaggtgataggcctgttgtggtggctcacgcctg

SEQ ID NO: 12824 - DNA, 201 bp, Homo sapiens
aaagtccgcacttcctaatgttaccactctggaggttagaatttcaacatataaattttggggggacacattcagaccacaataatgttttataatgttcmttttgctttaacaagagacacatgtcagatagtagacatgatctgagaagacacaaaacccagcgtggtgattttggcagccttgccatgcatctctaac

SEQ ID NO: 12825 - DNA, 201 bp, Homo sapiens
tatttgttaaaaggctttttgcctaacttgtgaaagttttttttcctcaactaattaagggtatcaacgcattggttgtatgttgaaaatgttgaaaatgttttttttttttttccaagttttctttctttttttttttttatactgggtcttgctcttcttatccagggctgaggtgcagtgacacagtcacagctcgct

SEQ ID NO: 12826 - DNA, 201 bp, Homo sapiens
gcataatttaggcccctttcaggccactcttccccctgtgccccaggtgtgtttgctaccatacctccccaggggatagccctccaaacctgattggccamctagtctggtcttaaagtcccaaagggaggccatcacaaactactcagtatggagaagacctgaatcctaattttggcttaaccccaaacttgggcgatt

SEQ ID NO: 12827 - DNA, 201 bp, Homo sapiens
tagaggatggatgggagcatgaagtgtcctccgtcatgttgctaatgttctgttgcttgttcaagctactgggtgtgttcagtttatgaaaattcatttartgacacatgtatgttttgtgaatttttttgcatgtatattttactctaacaaaaagttcatggacaaatacaaaatcatatctgacagttgttgagagaa

SEQ ID NO: 12828 - DNA, 201 bp, Homo sapiens
cattttactttgcataatttaggcccctttcaggccactcttccccctgtgccccaggtgtgtttgctaccatacctccccaggggatagccctccaaacytgattggccacctagtctggtcttaaagtcccaaagggaggccatcacaaactactcagtatggagaagacctgaatcctaattttggcttaaccccaaa

SEQ ID NO: 12829 - DNA, 201 bp, Homo sapiens
tgcaacttgtcaaacacttacatttgtgaataagaaaactggggtctatttggtggtttatttcagagatgttggatcaaatcagacatcagaaaagacamcagtaccaaacgaagatatctttgctgtatttgcagttttctctcttattaacatgaaaacaccttacatagatggaaacatctaaaggctattttttat

SEQ ID NO: 12830 - DNA, 201 bp, Homo sapiens
taggtgagtggtgaagatttttattctgaatttttgaaataatatcgtactgcaagttccaggcaatcaaaaactcacaaatcacttgcactctgcagcagtggtatcaggtctgaagaaaggaagaggctgcagataggcacatggctttgctaagttagcttttatatcctgcgtggctgccttagaaagtgtccttgc

SEQ ID NO: 12831 - DNA, 201 bp, Homo sapiens
caataaaaacatagatatctaatttgccttacaaaggccgatttgcaaatctagtatttccagtggttctttctttctttctttctttctttttttttttaaatgccccatatgacgctgctttgttggaattgccattggtgaggatctcactgataaagaaggggacatccctcccttgatagactttagggttgcact

SEQ ID NO: 12832 - DNA, 201 bp, Homo sapiens
acagcttagatgaaatttaggcaaatggaacgccccaggccccaggaagactgtggcagcacattgtatgtaactgttggggatgttgcctgaaacccccsccttttttttaggcagctgcaaggattagaatgttgcctcctcagaaactaacactcttctctccttgacctttgtttaaccagctttctgaacctgaag

SEQ ID NO: 12833 - DNA, 201 bp, Homo sapiens
taaaaacagaaacagagcagtccctttgcttccgaatgcagccctcccattggaatcactttggaagaatctggatctgcgtgttacccagtcttactttkcaggcagtcccaggcaggaaggcccattagtgaaaagagccctgcatatgctgtgggtcatcacagctgctgctttgcacatttaggagatatttgtgga

SEQ ID NO: 12834 - DNA, 201 bp, Homo sapiens
ttctttaaaaaaaatttatgacatattacttttgctaattatgtgtgtgggtagattatgttattcatgaattttatttcaggaccttggtaaggggttayacaatatttcttttgaaacgagggtctcgattattgggcttgagtatcctgatctaattaatgcactggacagagctggcagacgtgtgggacacccagc

SEQ ID NO: 12835 - DNA, 201 bp, Homo sapiens
ttttcagagttggtttaccaatatgatgtctgtattaaaatatatgtaatgctgctttcaaaatgttaagtattatgagaatacattaacaaaactctggygaattttttgtcttatgtttcttgaatccaaacctataagtaggtgcaaacattagacgatttcattttgggcttctgatacactcctgtccgagaagtt

SEQ ID NO: 12836 - DNA, 201 bp, Homo sapiens
atgagagcagattttgcctgtttcttccaaaatctggattcagtgacatcgtgttggtagcttgaaactgaccgtggtgagaatatttacaccatggaaaktggcaaatgctactaataaggatgattgttttagttttcattttgtaattttcagagttggtttaccaatatgatgtctgtattaaaatatatgtaatgc

SEQ ID NO: 12837 - DNA, 201 bp, Homo sapiens
cggtaaaaaacttgtttccattgatctgaccccagaattccctgtgcttatacagatacacaacgtgcactgggtcttccagaaatgcaggggccttctamatcaagggaagattgtgtggtgttttgttccagtcttttaccaaggtctcaataccatcttgaaacatcatgcagcactgctcataatatttgagtcacc

SEQ ID NO: 12838 - DNA, 201 bp, Homo sapiens
gggcattttggaaatttggaaaggcattttggtggcctttggcacttagcaggtggggtccacgggtccatcctgtgatgccataggcagtccaatataasaaagaactgccctcgtcccggtaacatacacctgtgcccccagacattcatttcggtaaaaaacttgtttccattgatctgaccccagaattccctgtgc

SEQ ID NO: 12839 - DNA, 201 bp, Homo sapiens
agaatctaattttactgtgcattttcttgattattagtgaagctaaacattattttttattgatgtgttaacaatttctttcttttgcaaatgatctattmatgttctgtgactgatttctatcttggtgtctttacgtttgtgaatggtaagaatttttatgtgttcaggaactatttaaatgttcaagacattaacctg

SEQ ID NO: 12840 - DNA, 201 bp, Homo sapiens
tattttgcattgtttatgtcagcattaagcagtattcttacacagtttgtaagtcttaaaactcagtatctactctagtagttgctccaaatgtgatgtcstcataaatcaccgagggatcttgttaaatttggattctgattcagtaggtctaggtggggcccgagcttctttgtttccttttcttatttaatttttgtg

SEQ ID NO: 12841 - DNA, 201 bp, Homo sapiens
acttgtggaataattttttaatataaaataattaccatcactaatcctaactgtgcacattcttgactctgtgacactgagcaaaatcctgaacctctctrtgccttgatttctttcacgtcttgttctagttttgaagagcgattcttgtgtgaattcagggagaggaggcatgaggcatggtaaggccaccgtacgtct

SEQ ID NO: 12842 - DNA, 201 bp, Homo sapiens
ggaagccttcactctaatgacataattacctcccaaagtccgcacttcctaatgttaccactctggaggttagaatttcaacatataaattttggggggasacattcagaccacaataatgttttataatgttccttttgctttaacaagagacacatgtcagatagtagacatgatctgagaagacacaaaacccagcgt

SEQ ID NO: 12843 - DNA, 201 bp, Homo sapiens
tggtgcccatcaccccgatcacatgaacgtctatgcccaggtcccatttcctgacattcccaacatctctaccttctccgggcctagggcagggatcactstttcagaaacatgagcgtatggaagccccagtgtgttccttgaagtcccgatgcgtgatttgtccccatgctgtgtcgcacttggtcatctggaccctgg

SEQ ID NO: 12844 - DNA, 201 bp, Homo sapiens
aaagaggtgtaaatggacaagaatgaaaagcaattgcaagggcccttgaaggtttgtgaaggatggcaaagtgacttggatgttgatttctaaaggaggtraaacttgaaggtagacaagctctttgtgtccatacatttgatgggtcatcctatgaaggagggcccatctcttacggcaggcagcgtggcgtaggcctca

SEQ ID NO: 12845 - DNA, 201 bp, Homo sapiens
cagcacagtgaggaggtattctttggagagcactgtttcccaagagtgattctaacaaagaggtgtaaatggacaagaatgaaaagcaattgcaagggccyttgaaggtttgtgaaggatggcaaagtgacttggatgttgatttctaaaggaggtaaaacttgaaggtagacaagctctttgtgtccatacatttgatgg

SEQ ID NO: 12846 - DNA, 201 bp, Homo sapiens
actctacttaaaattaaggcataaagtaggaaaatgtgtttcctctgtatagtcttattactttgcctgttaagttaactggttcctatttctgctggttygaagaggtccaggacatttaaatagctcttctagaaacaaattcttttccttacaagccctgccaggtcagtgggttcagtaaggaagaaggttttgtat

SEQ ID NO: 12847 - DNA, 201 bp, Homo sapiens
acccagtggaacgctctttctagtttggggcataaaataagataacactctgaattcctacaggaaatcttgtaactctacttaaaattaaggcataaagyaggaaaatgtgtttcctctgtatagtcttattactttgcctgttaagttaactggttcctatttctgctggttcgaagaggtccaggacatttaaatagc

SEQ ID NO: 12848 - DNA, 201 bp, Homo sapiens
gcttagatgaaatttaggcaaatggaacgccccaggccccaggaagactgtggcagcacattgtatgtaactgttggggatgttgcctgaaaccccccccytttttttaggcagctgcaaggattagaatgttgcctcctcagaaactaacactcttctctccttgacctttgtttaaccagctttctgaacctgaagaac

SEQ ID NO: 12849 - DNA, 201 bp, Homo sapiens
tctgccctcctcggcctcccaaagtgctgggattagaggcctgagccaccgcgccagctctatttgctgatttttgaacagcagcttttttttttttttttaacaaaactttaaaatgggttatgtgttttattttcttagtgaagtaatggcttctcaaatttacactccattattttatttaaaaaaatcagtatgatt

SEQ ID NO: 12850 - DNA, 201 bp, Homo sapiens
ggtcaaggtagtgttcattaggtttctccactgcacacttagtctttccctctactttccacactgctgcctttggaggagtgttgctgtgcccagctcaygcttgtggagtggggatttaatgttctcactcttcgagggtagagtatctgcataaactacttggaattctacatggaatatttgtgtcttctcccccat

SEQ ID NO: 12851 - DNA, 201 bp, Homo sapiens
gtctccttagcatcttcttggctgtgacagtttctcagaattgtctttgtgatgaccttgacagctttgaggagtgctggttgggtattctgtaggatgcycctgtgttgggatttttatgatgtttttctcatgagtttactggagttaatgaatttcagggaggaagaccccagaggtctgttttcatcacatcgtatc

SEQ ID NO: 12852 - DNA, 201 bp, Homo sapiens
ttttttttttttttggctgactgtcatgacttagtaaggccatcacaggttgccagaacatctactcaactgttccaagcataacctcctacacaggcctkctacataggagtatatttggccaagactcaccactagaagtgatttccactggactttcctacagcaagtggtaaatgatccctcagataggcccaagag

SEQ ID NO: 12853 - DNA, 201 bp, Homo sapiens
gagatcgtgccactgtactccagcctgggtgacaagagtgaaactccatcttaaaaaaaaaaaaagtgaacccttgtagtttcttcctctgtttgacagayggaccctaagacggccccagtgataccccacctcctggtgtccaaggcctgatgtgatcacccttcccccaccttgaatgtaggtgggacatgggactta

SEQ ID NO: 12854 - DNA, 201 bp, Homo sapiens
gtttcaccacttttggccaggctggtgttgaacccccgacctcaggtgatctgccctcctcggcctcccaaagtgctgggattagaggcctgagccaccgygccagctctatttgctgatttttgaacagcagcttttttttttttttttaacaaaactttaaaatgggttatgtgttttattttcttagtgaagtaatgg

SEQ ID NO: 12855 - DNA, 201 bp, Homo sapiens
gaaaaggaaagacaacagataagtgattgccagggactggagaggagtggggggtgagtgggaaccagagtggatataaaacagcaactggaggatcctgrtatagatggaaatgttctgcatcttgactgtctcaatgtcaatttcctggttgtgaaatcgtactagagttttgtgagatatcacctatgggggaaactg

SEQ ID NO: 12856 - DNA, 201 bp, Homo sapiens
catctcaaaagagaagaaaagagaagaaaaggaaagacaacagataagtgattgccagggactggagaggagtggggggtgagtgggaaccagagtggatwtaaaacagcaactggaggatcctggtatagatggaaatgttctgcatcttgactgtctcaatgtcaatttcctggttgtgaaatcgtactagagttttgt

SEQ ID NO: 12857 - DNA, 201 bp, Homo sapiens
catcctgtgtagaaatatcaataaatataaaggtaagtattattgtccccattttacagatgagaaaatggagtcccagggacctacctgctcaagggcasagaaagcttgaatgagtaaatttactttgtgttgttccaaaggtttctccaaaggtctttgcacctcccaaggctattctcattttgagaaagactggca

SEQ ID NO: 12858 - DNA, 201 bp, Homo sapiens
tgtttagtaagtcatctatgttgtttgggaggaaagagaatgagcattcctcagttcctgcactgcaccaggccttgccaatacagtacctcatttaattmttgctaccatccttgaggtggctggcattaggccatttgcggggtgtagaaaatgacatgcagaaatactgtagcagctcacttaatatcaggcagatgg

SEQ ID NO: 12859 - DNA, 201 bp, Homo sapiens
tgaggtctcctgaaacttattcccgcaaggacatactactgtggacccacctgaagggtggcatccactcttctagtaggatctcacattggtattttcasacacttctgccccttgccatgtttagtaagtcatctatgttgtttgggaggaaagagaatgagcattcctcagttcctgcactgcaccaggccttgccaa

SEQ ID NO: 12860 - DNA, 201 bp, Homo sapiens
ccagggacggctccttggcaagttgtactgctgtggcctagggagggacaactggcagggccacacaaggaggtaaaaccttatgctccatttgcaaagcyagtggccccagcagagataggaggccctctctgtgatttcggcagtggtttccctgggattgaggtctcctgaaacttattcccgcaaggacatactact

SEQ ID NO: 12861 - DNA, 201 bp, Homo sapiens
tttttttaacagttagatttactcttcctttgcacagactaatagcacactgaggtaggatccagggacggctccttggcaagttgtactgctgtggcctrgggagggacaactggcagggccacacaaggaggtaaaaccttatgctccatttgcaaagccagtggccccagcagagataggaggccctctctgtgattt

SEQ ID NO: 12862 - DNA, 201 bp, Homo sapiens
agtgtgcccattttacagaggtggaggaggaagctccaaaaatgaagcccaaggatcttaaggtaatatatgggcttgaatccagtgtatcttgctccgamagccttgcttttgtcattatccaacattagctgtctttattatagtggccttcttaccacctacaaaacaagtgccagcattctagtaaaatttattcac

SEQ ID NO: 12863 - DNA, 201 bp, Homo sapiens
acattgtaccctggaacttaaaagttggtgaaagaaagaaggggccgggcatggtggctcacgcctgtaatcctaacattttgggaggtcgaggcaggcarattgcctgagctcaggagttgaataccagcctgggcaacacggtgaaaccccgactctactaaaatacaaaaaattagccgggcgtggcagtgtgtgcct

SEQ ID NO: 12864 - DNA, 201 bp, Homo sapiens
agggagtaaatatttattaatttttaagatgcttcattttggagtaatttgctacacaccaatattaatacagagcccatatgcgctgcctacaggataaataatgtaatagcttaataacaattaaaatggaagaaaatgtaggagttcctcaatggttccacctgtttcttgaggttaaaaatgtacacatttgtgggc

SEQ ID NO: 12865 - DNA, 201 bp, Homo sapiens
ttttagacaactggacacaggtttgtctttgaaattgtcctggtttttcttgatgttttagtgctcctggatgtccaatgtcattcttgggctagttgaargaaagttttggctacccagttgttagctgctgaagtttaactgtgcattctaagcacaccagtattttattacatcatacctgggcagcagataatttta

SEQ ID NO: 12866 - DNA, 201 bp, Homo sapiens
aatcacttgaacccgggaggtggaggttgcagcgagtcaaggtcacgccagtgtactccagcctgggtgacagagcgagactccgtctcaaaaaaaaaaaraaaaagaaaaagaaaaagaaaaaggtgtttggaagccatgtcccatgaattccaaatacaattgaggactctataaaggactataaaaaaagttgtaata

SEQ ID NO: 12867 - DNA, 201 bp, Homo sapiens
ttcaagatgacttttcattctctcatctcattcattttgaggtcattttgttgttgaaatgttagagttcaaccttaaatacttaagagcatggcactgtstagagaaagggagatgagcttctgtggtagccagaggtcaagatggcctctagtgaccctcacttcctgggttttacattgcagtatatttctcttctac

SEQ ID NO: 12868 - DNA, 201 bp, Homo sapiens
agggattcgtaagcttaggactgatagagatttggcttttctgctgttggattgatagctccttgactgctgaagccattgcccatctgttcaactgttgkattcacgaggaggttagacccctgacccaaggcccaggtacctggctttcctcagttgggatcagaaggccacaaagttttcttatattttaagcatcaa

SEQ ID NO: 12869 - DNA, 201 bp, Homo sapiens
tatggagcctgttaagaccagtgatgctgtggcctgaataacaacaggataggaacattcccttcttctcataaatcttgtaaatttgcattgtttgtgcygaacagggcccgtgtgttctgatagcaaacatggagaggcccaaaaggctgatctgggaccatgtccccattgaacactgctctgtgctgagtctgcaga

SEQ ID NO: 12870 - DNA, 201 bp, Homo sapiens
tcatgcactgtcaagcaccgtaactttagctacattctattgattagaagaatactagtaaagaccatagttaggagaggggaacctggctccaccattgsaagggaggtctatcaaagaacttgtgggcatattctaagaccaccacactctgccactccacacaccctgactctcctaacacctgctcgcttcactggt

SEQ ID NO: 12871 - DNA, 201 bp, Homo sapiens
aaaataatgattataactatgacctccagaagcttttgctgagcatctatctgtagcactgcatgtcaagccaagctagagtacagtctcttaggagacayaggggaggaaaacatccttggcaggttcgcatattggtgatctcgtcgtaattttctcaaatacccttcctctttcctcacttttggtgataactacctg

SEQ ID NO: 12872 - DNA, 201 bp, Homo sapiens
taatttatgtaaagcacaaagcataatccctggtattcaataagtactcagtaaatactagtgaaaataatgattataactatgacctccagaagcttttrctgagcatctatctgtagcactgcatgtcaagccaagctagagtacagtctcttaggagacacaggggaggaaaacatccttggcaggttcgcatattgg

SEQ ID NO: 12873 - DNA, 201 bp, Homo sapiens
gttctgtgccaaggattttagaaagtcatgtctcattcagttcccctaacaggtctaggagtcattatcctccccaacctaaggaaactgagacccagagrttcagagtatcccaagatcctacaggaattgcagattgtagccaaaattggaactcctaattccagagctcctccctcctgctagcatttttctttgagt

SEQ ID NO: 12874 - DNA, 201 bp, Homo sapiens
atcatcacacctttcccttagcctgtactaggttctgtgccaaggattttagaaagtcatgtctcattcagttcccctaacaggtctaggagtcattatcytccccaacctaaggaaactgagacccagaggttcagagtatcccaagatcctacaggaattgcagattgtagccaaaattggaactcctaattccagagc

SEQ ID NO: 12875 - DNA, 201 bp, Homo sapiens
ttatatataataataatttaatttataactatatcatttattaaggtcctactatataccaaattctattggacacatgtcctaataataaacgtgatatmatctatcattatttacaaaacttcacactctgacctttattaattatgtgtgtgccaattatgtgcagggaactgtattaatcgtagttagcaatatcgt

SEQ ID NO: 12876 - DNA, 201 bp, Homo sapiens
tgggcatttttaaattatcattagtatataattatatataataataatttaatttataactatatcatttattaaggtcctactatataccaaattctatyggacacatgtcctaataataaacgtgatataatctatcattatttacaaaacttcacactctgacctttattaattatgtgtgtgccaattatgtgcagg

SEQ ID NO: 12877 - DNA, 201 bp, Homo sapiens
gagatggcgccactgcactctagcctgggcggcaagcaagacaccatttcagagaaaaacaacaacaacaaaacatatggccagcagccagtgttgttatytcaggatgggaaccaggcactgcacctcctcattaggagtcagagtaagggggctaagctggttgacatgactggggacagagttgctgttgaaattgtc

SEQ ID NO: 12878 - DNA, 201 bp, Homo sapiens
ctctactaaaaataaaaaaaaaaaaaaaattagccaggcatggtggtgcatgtctgttatcccagctacttgggaggctaaggcaggagaatcacttgaayctgggaggcagcggttgcagtgagccgagatggcgccactgcactctagcctgggcggcaagcaagacaccatttcagagaaaaacaacaacaacaaaac

SEQ ID NO: 12879 - DNA, 201 bp, Homo sapiens
gcggaggttgcagtgagctgagatcgtgccactgccctccagtctgggtgacagagtgaaacccatcccccaaaaaaataaataaataaaaattaaaaaayctaacactggtacgagaagaaattatgctctaaatccttctttgagcagtggcttacagacctaaatttatcaaaggtggtggcagtaatagtaataatt

SEQ ID NO: 12880 - DNA, 201 bp, Homo sapiens
gtaatatttaagtattaatacctctgtttaaggttcattttgaacgccttggtgaccctatgtttttttctttgttttttgttttgttttttttttttttkttttttttttttgtttttttgagatgaagtcttcctctgttgcccaggctggagtgcagtggcgcattcttggctcactgcaaccttcgcctcccaggtt

SEQ ID NO: 12881 - DNA, 201 bp, Homo sapiens
attaatacctctgtttaaggttcattttgaacgccttggtgaccctatgtttttttctttgttttttgttttgttttttttttttttgttttttttttttktttttttgagatgaagtcttcctctgttgcccaggctggagtgcagtggcgcattcttggctcactgcaaccttcgcctcccaggttgaagcaattcttc

SEQ ID NO: 12882 - DNA, 201 bp, Homo sapiens
gacttcataataaataagatgctgacagttgaaacccccttgaccgttgcctgtttggtatgacacagaccttcttggacttttgtagcctatacatgagyagatatgaatcctcagccttctccaaaataaggttggggtcactaggaggccttcttggaaagatgtcttaaattaaggcaccagtagatggatcaaaaa

SEQ ID NO: 12883 - DNA, 201 bp, Homo sapiens
aaaaaaaatgttttctggtcaagtcacatgcctctgaggtttttttttttctttctttcttttctttttttttctttttcccagactcctcatacccctcytaggagacagtgattccctggcttcaccaggcaggctcttgggggcttcctggtccctgtcactcttaaaatgcagcctgtctttggacatctactccaa

SEQ ID NO: 12884 - DNA, 201 bp, Homo sapiens
ggcggagcttgcagtgagcggagatcgtgacactgcactccggcctgggtgacagagcctgaatccctctcaaaaaaaaaaaaaaaagaaagaaaacaacyacaaccacattttgagataggccttccttggcaaactttgatttcgtttctgtatttgaggacaaaacacagtatggttgtttccctccctagactagat

SEQ ID NO: 12885 - DNA, 201 bp, Homo sapiens
cgtgaacccgggaggcggagcttgcagtgagcggagatcgtgacactgcactccggcctgggtgacagagcctgaatccctctcaaaaaaaaaaaaaaaaraaagaaaacaaccacaaccacattttgagataggccttccttggcaaactttgatttcgtttctgtatttgaggacaaaacacagtatggttgtttccct

SEQ ID NO: 12886 - DNA, 201 bp, Homo sapiens
cggggaggacgcgcactccagcgcagcgcgtgcggtgcaaagtgaaagtaactgttaaggagcttcagggaaaagggtccagggttcccagtaggggccgscccccttggtgggcctcgggtccagcgggggtcacctggtggcttcccggcgcgccctctgctgttcaggatgcagcactgcgcggcgcggcgagggcaa

SEQ ID NO: 12887 - DNA, 201 bp, Homo sapiens
cagagggattcgtaagcttaggactgatagagatttggcttttctgctgttggattgatagctccttgactgctgaagccattgcccatctgttcaactgktgtattcacgaggaggttagacccctgacccaaggcccaggtacctggctttcctcagttgggatcagaaggccacaaagttttcttatattttaagcat

SEQ ID NO: 12888 - DNA, 201 bp, Homo sapiens
ggaatagagaaaaggtggcttggctgtttggtttatgtcctaaaaccttatcgtaatgtgattctccttaacagagggattcgtaagcttaggactgataragatttggcttttctgctgttggattgatagctccttgactgctgaagccattgcccatctgttcaactgttgtattcacgaggaggttagacccctgac

SEQ ID NO: 12889 - DNA, 201 bp, Homo sapiens
ggaaatggaatagagaaaaggtggcttggctgtttggtttatgtcctaaaaccttatcgtaatgtgattctccttaacagagggattcgtaagcttaggamtgatagagatttggcttttctgctgttggattgatagctccttgactgctgaagccattgcccatctgttcaactgttgtattcacgaggaggttagacc

SEQ ID NO: 12890 - DNA, 201 bp, Homo sapiens
gagttgacatacggaaaacaagtaagagtaactttgtacaccgtgggctcccaatcagtgctgcttttcgttgttgatgttgttgttaatgttgaaaaaaatcttcaagtcatgtttgcccccacagaccttcccagacagtctaactaaatgcactgtatttgctaactgttggaacttggcttttggactagaccagca

SEQ ID NO: 12891 - DNA, 201 bp, Homo sapiens
ttcccagtaggggccggcccccttggtgggcctcgggtccagcgggggtcacctggtggcttcccggcgcgccctctgctgttcaggatgcagcactgcgyggcgcggcgagggcaaagcggcctcatccccgccaaaaaataaagatgttttaaaaagcgcacatgctcagctccctcctgcaggctctgggttgcaggg

SEQ ID NO: 12892 - DNA, 201 bp, Homo sapiens
ctacttccttcttatatctggctatctgggagagaaaaaatttaatacaattgattactttttagaagagttaatttttacttattactgtggattttttkttttttaacagtcacaccgaggagaagactcagtgggaacatccaaaaactggaaaaagaaaacgagtggcaggaggtttgtatgttgttgtctaaggat

SEQ ID NO: 12893 - DNA, 201 bp, Homo sapiens
tcatatggtcctctgcagccttgcaaagtcgattcctgacatttccgtagactgttttttttgttttcagcaatactctccagcagcaaaacccaatccgytcatattcttgcatttgctgcagcaaaacctgacctctctttgtgttacctgagtcttgacgaagaagactgaggaaaggcccccccccccccccaccaa

SEQ ID NO: 12894 - DNA, 201 bp, Homo sapiens
tggtagctcatgcctgtaatcccagcactttgggaggccaaggtgggtgggtcacctgaggtcaggacttcgagaccagcctggccaacatggtgaaaccscatctctactaaaaataaaaaaaaaaaaaaaattagccaggcatggtggtgcatgtctgttatcccagctacttgggaggctaaggcaggagaatcactt

SEQ ID NO: 12895 - DNA, 201 bp, Homo sapiens
cacagaggaagtggagctggagtctctgtggctccagggtcaggtgtgtagtctcgaaggctgttttctgttctgcaagtttctccttaacacatttccarccccattttctggcagggagaccccaggactgaaaggagctggaagagtgaggtctaagagaaaaaggggctgggtgtggtagctcatgcctgtaatccc

SEQ ID NO: 12896 - DNA, 201 bp, Homo sapiens
tctgtatttctcagggcagcgtgggacctcagggtttgtcatggaccacacctttctcctttgtccctttttataactcataggctacctccaacttgacrcttatttaagtttttatttattttatttagcattcagaaaactctatagcctcagtctctcgggatgtaaattaaagcaatttcattttcatagtttctc

SEQ ID NO: 12897 - DNA, 201 bp, Homo sapiens
attacattttttgaatatgtttcttctttgcctcttgaggactaaccagccgggtttagattatttcctccccgtgtcgctttcctgcccccacatgttawagatggtgcaagggaaccagagagctttgatccctggtttctctggtcacaaacctgctctcctctccagaactccaggctgcctttctgtgggggctaa

SEQ ID NO: 12898 - DNA, 201 bp, Homo sapiens
ctgcctccatctccctttctctgtaagtggaagtggtattcattgatcacacactacatgccggacaccaagctattacattttttgaatatgtttcttcyttgcctcttgaggactaaccagccgggtttagattatttcctccccgtgtcgctttcctgcccccacatgttaaagatggtgcaagggaaccagagagct

SEQ ID NO: 12899 - DNA, 201 bp, Homo sapiens
tttgaggggtggtatgaggtcacagtcacagccacccctctcaccagctgtgtgacaattctggatttccttagctgtcctctgcctccatctccctttcyctgtaagtggaagtggtattcattgatcacacactacatgccggacaccaagctattacattttttgaatatgtttcttctttgcctcttgaggactaac

SEQ ID NO: 12900 - DNA, 201 bp, Homo sapiens
ggggccataggctgccaagctgtggtttctaggagactctgaggacagagggtcaaatccatgagtttgtggatggcctgatgatccccagcggagaccaygttaactagtacattgatgctgttgtgtgccatgtgctgctcagatagggttttctgggcatcaaggtgaaggtcatgctgccctgggaccccgctggta

SEQ ID NO: 12901 - DNA, 201 bp, Homo sapiens
gctacaaaacctggcattttacttctctcattttccccaaatgatctaggtgtcttttgctcactggtgataaggggtgacattggtatcacaggtaaaartgagtaaatttgagattattgtcgtcttgctttaaaggttggagatacagcttcaaaaaccttttactacccacacacccaaggggagtcaaatggattt

SEQ ID NO: 12902 - DNA, 201 bp, Homo sapiens
gtacaaactcctaggagggcttactgtgcggagggcctgcgatggtgggctgtggttcatcatgaataggggggccataggctgccaagctgtggtttctrggagactctgaggacagagggtcaaatccatgagtttgtggatggcctgatgatccccagcggagaccacgttaactagtacattgatgctgttgtgtgc

SEQ ID NO: 12903 - DNA, 201 bp, Homo sapiens
cattcagccctcgggttaccattggtagcacatctaggagcaagttttaattttttagtcatagtgactgtgctggatttggtaggtcgtacgaattgggkaagaggcataggacaccaaggattttgcaaaaagcaggcaactaacatttgttttccacctactatgattatgttaggctctcaatatatgtttaccact

SEQ ID NO: 12904 - DNA, 201 bp, Homo sapiens
gagaggcacaatctgctttccttttgatggtgtgcagcagcatgatggccgcgcgaatttccaagaagaggatgttggtcgctgatggcatcttcaaagcygaacggaatcagtttcttactccggagctggctaaagacgcttctctgaagctcaggttcaagttacacccatcacgacagtaacaaatatcttagccaa

SEQ ID NO: 12905 - DNA, 201 bp, Homo sapiens
ctgggactacaggtgggtaccaccatacccagctgttgaaaaaaaaatggtggggtattactctgttgcccaggctggtgttgaactcctggcctcaagcratcctcctgcctcggcctcccaaagtgctgggattacaggcttgagctactgccccaggctcttcccccgtttgttaatacataccatgaccttggcctt

SEQ ID NO: 12906 - DNA, 201 bp, Homo sapiens
aaaagagtgtttggctaacttgcataaaaaggatctcatttttctttgtaacacattactacatacagtgaccatagtgtttctctaatttcttcaggacktactttgaagatgaagaagtatgtgtatccgctttttgtctttcagaataacatactgctgtctgtaaaaatacagataatttctctcttaaattccata

SEQ ID NO: 12907 - DNA, 201 bp, Homo sapiens
caccactgtacagcatctttacttaatctgccctctttcacgtgtgtgcatccctggcatgcttaaacaagaaaggcaaatgagagagagcgagtgagtgygagcgagagagccctgaggtgccagaaggctgtggttcctttgtgtctacagaaaagatataacgattgaattagactcttaaatatctgtggatgtcag

SEQ ID NO: 12908 - DNA, 201 bp, Homo sapiens
tgtttacctgtttatgataaaggatattacaaagagtacagatgaagcggtacatagggccaggcatgcggaggggatgtggagcttccataccccctccyggcatgcccctctccaggcaccacatgctcagcaatctggaagctctccaaaccctatcgtttaggtttttgttgttgttgttttgagatagggtctcgc

SEQ ID NO: 12909 - DNA, 201 bp, Homo sapiens
atataattcaagttgagatttcggtggggcgcagccaaaccatatcagacacaaacattcaattcacagcattctaccccagccctccaaaattcatgttyttctgacatgctaaatacatttattacatccaaatatccccaaaatcttaactcattccggcatcagctgtaaagtctatgtctttttaatttttttaaa

SEQ ID NO: 12910 - DNA, 201 bp, Homo sapiens
gcagaaaggtgcctatcatgtcttcagtgtcagtgccctggtatggagctagctggccttccacaggttctggagttaatgctggagagaagtaggggtgkcagagcctaccctgtgttcctaggggggttcatctggagctagtccctgacccttaggtggaagatgcagctatgcccaaggttctgaagaccctgtaaa

SEQ ID NO: 12911 - DNA, 201 bp, Homo sapiens
ttaaggaaactcggctcaaactagcttcggggactcgctgtggccataggtgccctaggctgcagtctgagagtgaaactgaggtctcactcccttcatastctgctctccgtctctgcctcatctggcttctcagggtggtggggcgtgggcactaatttgatttgatcacttagagacaacagcttacaaaatgctacc

SEQ ID NO: 12912 - DNA, 201 bp, Homo sapiens
atgtttacatggggctgtggaccattttgtatcattggaggagaagccagggcacttggcaggggtgttcatgatgataatcaggtggctgggtggagtcrccatttgtggcatcctcaaagacttgccaacatagacatttttggggagacagaaacacagaaataattctgcagtgctttaaagaatctgttaaaaatc

SEQ ID NO: 12913 - DNA, 201 bp, Homo sapiens
ttgatgtaaaggactacctgaggctggctaatgtataaagaaaagaggtttaattggctcatggttccgcaggccatacaggaagcccagttagggaggcstaaggaaacttaaaatcatggcagaagatgaaagggaagcaggcatgttctgcatggctggagtaggaggcaaggagcgaaggaggaggtactacccact

SEQ ID NO: 12914 - DNA, 201 bp, Homo sapiens
caccgctcccgacggcctctagatattttgagtgattcagcaaacctcctaaagttgaccccgtagctggggtcacagtcctctttctccttcttcccccyacttccttcttatatctggctatctgggagagaaaaaatttaatacaattgattactttttagaagagttaatttttacttattactgtggattttttgt

SEQ ID NO: 12915 - DNA, 201 bp, Homo sapiens
attggaaatggaatagagaaaaggtggcttggctgtttggtttatgtcctaaaaccttatcgtaatgtgattctccttaacagagggattcgtaagcttargactgatagagatttggcttttctgctgttggattgatagctccttgactgctgaagccattgcccatctgttcaactgttgtattcacgaggaggttag

SEQ ID NO: 12916 - DNA, 201 bp, Homo sapiens
tttcggatttatattattgcttacttggcacatcttccattggaaatggaatagagaaaaggtggcttggctgtttggtttatgtcctaaaaccttatcgkaatgtgattctccttaacagagggattcgtaagcttaggactgatagagatttggcttttctgctgttggattgatagctccttgactgctgaagccatt

SEQ ID NO: 12917 - DNA, 201 bp, Homo sapiens
tccacctcctttgagcctctgccaaacacaactgatggtggctgactgcctggctgcaggaagttctgaataagtgacctctatttgttattatttgggtyccctttgtttatttttacactagctttgcactaggttaattttttcccacatggcttttcctgtttgtttctttgattgtttttaattaataattagttt

SEQ ID NO: 12918 - DNA, 201 bp, Homo sapiens
ttattttcaaatgcatgtctttagaaccagaatgtgtgtagctgttttctggcctgaatttgggctgagatgatgagaagtttagttgccactttcagctwagtggaagtgttttccccatttggactccgggtcattgacaaacgtcatcactgtttttagttgaaatgtgcttccatgtggctgttcatcagcacaccc

SEQ ID NO: 12919 - DNA, 201 bp, Homo sapiens
tttatactcctctttgcacgttgcagaagatcaggaatttgcacattatagccacaaccatacccagaaccagattgtctaacactgaatctcgaatccamattcctggatttggatggactcaatctggacccagtatctacatttggtccagtcatctgtatccggcatcggggtcttgttgaaaaaccatggcttagc

SEQ ID NO: 12920 - DNA, 201 bp, Homo sapiens
agatccagtggagtgtggggtgctgagagaacaagtctatgttttcttgagacaaagtcttgatctgttgcccaggctcgagtgcagtggcagcatcttgrctcactgcaacttctgcctcccgtgttcaagtgattctcctgtctcagcctcctagggagctgggattacaggtgtgcaccactatgcccagctaatttt

SEQ ID NO: 12921 - DNA, 201 bp, Homo sapiens
caaatggaaaaccttcattccaaagggtcgttgtctcctcctatttaatagccctgcattcatgcacttttttttatcttgctgtctttttttttttttttaatcaaataccaaagtacttctatggactggtcttaaaaaaaaaaaagaatccattcataactgtgaaaaaatactgcctattagtctgctattgtggct

SEQ ID NO: 12922 - DNA, 201 bp, Homo sapiens
cctacttggacccaagactggcgtttactgtggatgataatccgaccaagccaaccacccggcaaagatacgacggcagcaccactgccatggaaattctscagggccgggatttcactggcaaagtggttgtggtcactggagctaattcaggaataggtaggctcttcacttagttatttatctttgggactgctataa

SEQ ID NO: 12923 - DNA, 201 bp, Homo sapiens
aatatagtttgctgtgtgctgggtgggtgggagggagcgtccacattagtgaacagccaggcagtcgctgcctcaaatttctttagggttatcctttcatkccagcaattgaatttgatttgcactgtttcacttctctacaagggtgtaaaaagtagaggttcctcttgaaagaatttcctccccatctaattaggaata

SEQ ID NO: 12924 - DNA, 201 bp, Homo sapiens
ttcattgctgtgggttcactgctttctcttttgggcagccatataaataaaagaaccacctacttggacccaagactggcgtttactgtggatgataatcygaccaagccaaccacccggcaaagatacgacggcagcaccactgccatggaaattctccagggccgggatttcactggcaaagtggttgtggtcactgga

SEQ ID NO: 12925 - DNA, 201 bp, Homo sapiens
taagcatatttatatatatatacacataaaacatatatgtacatattatcataatgcctacctgctcttgagaaagtagtgccgtatggctgggggtttckctcactggtttctatggctctcccctcccccactttttctaagaagtggtagtacctatctgactattttcttggctgcctgaagaggcctcaaaattag

SEQ ID NO: 12926 - DNA, 201 bp, Homo sapiens
cacagggcagctgtattccaggtacttggtgactcttggttgcgatctgatgactggctcacagtaggaccatgacgtgagcagatttgtagtcctgcatraatgaaggaaagaaagaaatctgacaactcattgattcagattcacagactctgcattttgaaccagaatacacccgagcaattacctagcacaaaatct

SEQ ID NO: 12927 - DNA, 201 bp, Homo sapiens
tcaagagtctttctcttccttttgagcccagctctccctttgtgacccagcaacttccttccccgatgatggccaagccttgaggatgtgaaactgcccartgccccaatctggagtccaccatcctgggtctagctggggacatccttgaatcagcctctgggaatcactgaaccaacatgagtcacttgctactgtgag

SEQ ID NO: 12928 - DNA, 201 bp, Homo sapiens
tgaaaaaaaataaacaaaatacttctgcaacagcagcagcaagagctgccgcaatgaaagaagaaagaaaaggagggacaggatgaaggaaagaagcagtrttaacattctagtaatatttgcatctgaatgatatttatatggggttattgtcctccctttgtgtatgtttaaaattttcataataagcatatttatata

SEQ ID NO: 12929 - DNA, 201 bp, Homo sapiens
agtcatgtccctagtccctgtctccgtatattttctccttctcttattagtttatcttttccaaaatgggctgtttcgtctctgatcctgatttatttttrttttaattaaataatttatttttctgagacagactgtcgctctgtcgccaaggtggagtgcagcggtgtgatcttggctcactgcaacccccgcctcccg

SEQ ID NO: 12930 - DNA, 201 bp, Homo sapiens
ctgaaggaaaggattcgatgactatctttttttggcacaaatgtgatccttctggaggccagaagatagattcagtgggccccagttctttcaggtttaakgaataagcattttggtctatgaaaaatggggttttcctaaagtataagattgtcttatatttataaatgcctgtgttcattgctgtgggttcactgcttt

SEQ ID NO: 12931 - DNA, 201 bp, Homo sapiens
aaggtcatagagcaaccaagtggcagggctgactcccacccaggtgtgttccatgggcagcgtcttcttactgcactgtcctgacttgctctagtgagatmtaagagaggcacaatctgctttccttttgatggtgtgcagcagcatgatggccgcgcgaatttccaagaagaggatgttggtcgctgatggcatcttcaa

SEQ ID NO: 12932 - DNA, 201 bp, Homo sapiens
ttattcactatcacgaggatagcgcaggaaagaccggcccacatgattgagttacctcgccctgggtccctcccacaacatgtgggaattctgggagatayaattcaagttgagatttgggtggagacacacccaaagcatatcagggtcctaggcaactttgtgtgagaacagaacagagaggaagcgacacacctttcc

SEQ ID NO: 12933 - DNA, 201 bp, Homo sapiens
gcaaagtacttcagggcctgtattagtttgtttttcacgctgctgataaagacacacccgagactgggaagaaaaagaggtttaattggacttacagttcygcacggctggggaggcctcagaatcatggcaggaggtgaaaggcacttcttacacggcagcggcaagagaaaatgaggaagaagcgaacgtgagaacccc

SEQ ID NO: 12934 - DNA, 201 bp, Homo sapiens
gaagagaggagttgatgatcacattattgtgtcagccgcctgtgtgaataaggaaggacagactcccaccccatcccatcattccaggttcaataagaggyaggtgcttcctaaagcagaaaaatgtaagggaagtcatcatcgcttatcatcacctgaatgttcaccatggtgacccacatctcaggatgctgcaaaacg

SEQ ID NO: 12935 - DNA, 201 bp, Homo sapiens
ttttattgcatgctttgaagtttgaatacactttcagtagctcttcgttatctcaaattaaatcttaaattgagcttgtggttctgtgaattaatactccrgcctttcagccctgctgctgaggtcattcaaatctaatggtggaaacggtcacagggtcaggccttggatggtgctgtatagaaatgccttaatgatgct

SEQ ID NO: 12936 - DNA, 201 bp, Homo sapiens
tatttaggttggaatgcaagggaactaaaggtaggggagattcttaaggaagtctactttctcttcaagaatgctatcaaattgaaaggtaattcctaaasaagagtcatttgtaaattagggaggaagagctaaaaaagattcctagcaagaaacatcataaaggggcttgataaagccaaaaaactaaaagaaaaaaaa

SEQ ID NO: 12937 - DNA, 201 bp, Homo sapiens
ccaagcgccccccagcccccaccccacaacaggtgtatgtggcctctggtttatccttctttccccctgctcaccacatggcttctcattttgaaaacccrgtggctaataaagtagatgagtttcaggattgcaaaatattgtgatcctggcctttgtccattgtgtaatcttcacagtgaccagagtgtttgcagttcc

SEQ ID NO: 12938 - DNA, 201 bp, Homo sapiens
gccacaggactatagcctgggcagttttgagtgctgcctctaccatgtaactagcttgccagtcaagtcattaactattcggggccttagtttcgtctttyctgaattggagccagtatacgtaattccaaaggttgcttttaagcgtaagtgagaatattggcagaaattcgttagcactgagagagggaatgtaaagtg

SEQ ID NO: 12939 - DNA, 201 bp, Homo sapiens
gcagtgaactaagatgccacaggactatagcctgggcagttttgagtgctgcctctaccatgtaactagcttgccagtcaagtcattaactattcggggcmttagtttcgtcttttctgaattggagccagtatacgtaattccaaaggttgcttttaagcgtaagtgagaatattggcagaaattcgttagcactgagag

SEQ ID NO: 12940 - DNA, 201 bp, Homo sapiens
gaaaagaggtttaattggctcatggttccgcaggccatacaggaagcccagttagggaggcctaaggaaacttaaaatcatggcagaagatgaaagggaarcaggcatgttctgcatggctggagtaggaggcaaggagcgaaggaggaggtactacccacttttaaacaaccagatctggtgagaactcactcactgtca

SEQ ID NO: 12941 - DNA, 201 bp, Homo sapiens
agtgcaagtttgttgtgaagaacacgtgccttggaattaacacctatggaagggaagaaaacgaagatggagtgggcagagggagaagctgactgagatgsagtccagcaagggtctcagtcaaccttatgaagctaaaagggcccatcagagctaatccctattgggctaatgtggccaggcttttataaacctgccttg

SEQ ID NO: 12942 - DNA, 201 bp, Homo sapiens
aattgcacaattcacacaccaggctgccactttggcccctgcgtcaccttcaccaccacccaatgtgtcctgctcatcactgaggtttgtcatttttactytgagtctgtccattgtcatcatctccaccatcaccccttttgttttcattgccacccttgcctggggtgagtgaagacgctcttctctggcttccaccct

SEQ ID NO: 12943 - DNA, 201 bp, Homo sapiens
agaagtggtggaacaaaggcactgtgtacacctttgaaacaattaacttcaccaaaattactaaactgtcctctagaatggttaaaccaatttcctctctwccattcacacgtgagaatgcctgtggccccccagaaattatctccagcagcagcaacagagaggactggaatgccattgacaggtcccacaagtcagcaa

SEQ ID NO: 12944 - DNA, 201 bp, Homo sapiens
cacgcccggctcaaatccttcttacttttcctcaagaactcacttcccacccaaacctttcctattgtggcagctgttatcttgtccagcacatgtgtccrcacttggtattaatagctccatcttaggaactatgaaagtgaggggggtggtggtaatttgcatgaactggtttgggccagttatggtctgttacatcct

SEQ ID NO: 12945 - DNA, 201 bp, Homo sapiens
tggtagtagtagtagtgaatgccctgactttggggtttgcagtaagctaggattaagtgcttcacagtgaggcacagtggggagctactctgaggatgaawtgcctagtaaataagtgaggtttgtataaccgaggccagatcttagaacctcctgctatctgtacatagaagaatgttttagtcagaggcaaggcaaggt

SEQ ID NO: 12946 - DNA, 201 bp, Homo sapiens
agacagtaagaaaggtgacgtcaatctgagatgagagagagagcaaaacagttcttttgaccaccttgaccccgaccttgaaataaggtggaactaataamtcccgctttgtgctggagcaagttttggctgagtttctgtcacttgcaaccaaatcagtcctatccagtatacctagtgactctctggtctccaaaggct

SEQ ID NO: 12947 - DNA, 201 bp, Homo sapiens
tgaatgccctgactttggggtttgcagtaagctaggattaagtgcttcacagtgaggcacagtggggagctactctgaggatgaattgcctagtaaataartgaggtttgtataaccgaggccagatcttagaacctcctgctatctgtacatagaagaatgttttagtcagaggcaaggcaaggtcaccaggattcactg

SEQ ID NO: 12948 - DNA, 201 bp, Homo sapiens
gaatgccctgactttggggtttgcagtaagctaggattaagtgcttcacagtgaggcacagtggggagctactctgaggatgaattgcctagtaaataagkgaggtttgtataaccgaggccagatcttagaacctcctgctatctgtacatagaagaatgttttagtcagaggcaaggcaaggtcaccaggattcactga

SEQ ID NO: 12949 - DNA, 201 bp, Homo sapiens
aagaatgttttagtcagaggcaaggcaaggtcaccaggattcactgagagtgttggtcagcatttcatctgcatatacaggactggaaaataagagagcgyaatgagacatctagtttttttctctttcgtttgttctgtttcccactgagagaattttctagctttatgtggagaaaacagtattggaaattattactca

SEQ ID NO: 12950 - DNA, 201 bp, Homo sapiens
gtaagaaaggtgacgtcaatctgagatgagagagagagcaaaacagttcttttgaccaccttgaccccgaccttgaaataaggtggaactaataaatcccsctttgtgctggagcaagttttggctgagtttctgtcacttgcaaccaaatcagtcctatccagtatacctagtgactctctggtctccaaaggctatgcc

SEQ ID NO: 12951 - DNA, 201 bp, Homo sapiens
attatagtgtctggcatacaataaatactttgtaatgttactggtgttttcttaccgttattgtctcactggtgaccgtttgaaatgttgaagctttattrttacagataatggtggatatagtctcttccttgtttattttttgacagaatctttttttaaaaaagtttttatttgtttggtgagaatttacttgttaca

SEQ ID NO: 12952 - DNA, 201 bp, Homo sapiens
aaagggggttaaaagggtttaggggaagtttagttgtcttccttttatctctaactctaaaacccaactgctggctgaattaaaagtctcttacataatgrtcagaggagttttgagtatcggatctttgtgtacttgctttttaaattcagtcacgtcttaaatagtacttttcactctcctcctctccacaccacttta

SEQ ID NO: 12953 - DNA, 201 bp, Homo sapiens
ctctctagaaaaaagtaagaaatatggaaagaaatctaatttagaaaaatgcacgcacccacaggcacgcttcacaggactggcaggtggagaggatgtttgttaacagggctggctattttactttaagtgctgcaaacattgcactaatgtttgggtctttgcttttggcaatcacttctcttgttaatttttttttgg

SEQ ID NO: 12954 - DNA, 201 bp, Homo sapiens
ctccttctagaactagaacataagctctctgaagtcagggaccatgcctagaatcgccttccttttatctcccatcagccgaaactaactctgctgtgtcrcgctgtgttaggctgtgttggctgtgagtaagagaagtctcacccaactagctgaagcgaggtgggttggaggggggatgccttgtggaagtgacaactc

SEQ ID NO: 12955 - DNA, 201 bp, Homo sapiens
tttgcctccttctagaactagaacataagctctctgaagtcagggaccatgcctagaatcgccttccttttatctcccatcagccgaaactaactctgctrtgtcacgctgtgttaggctgtgttggctgtgagtaagagaagtctcacccaactagctgaagcgaggtgggttggaggggggatgccttgtggaagtgac

SEQ ID NO: 12956 - DNA, 201 bp, Homo sapiens
caggcagcttctactcatggtggaaagtgaaggggagccagcatgttcagagaacatatagggagaaagggagcaagagaggggaggggaggtgccagagmctttaaaagaaccaactctctgggaacaaatagagggagaacattaatctagccatgagggatccacccccgtaacctagactcctgtcatcagccacgg

SEQ ID NO: 12957 - DNA, 201 bp, Homo sapiens
ctccgagctagagtacaatggtatgatcatagctcactacaacctccaatgcctgggtttaagtgatcctgccacctcagcctcccaagtagctaggactrcaggcgagagccaccatactgggctaatttttgttttttattgagatggggtcttcctatgttgcccagcctggtctcaaacttctggcctcaaagcaat

SEQ ID NO: 12958 - DNA, 201 bp, Homo sapiens
ttgcattgcatagttaaagttctttaaattcttctctaaaccccaaggctaagcaatatacaatctagttacaatggtctgcttgctgttaccagaatctrtcaagctctttcctatctaagggttttttccatgtactggtttctctcctgcgtggtcttgttctacccttgaggagggtaccacttcctcattgcttag

SEQ ID NO: 12959 - DNA, 201 bp, Homo sapiens
ttagttatttatctttgggactgctataatgagatccacttagatctagctataatggaattttgtttagtggttctctgatttaaacatgacttttatcyttttcagatatcgtttcattaacatcactacctctttttaaatcctaatgttgtcatggaagcctgtgtaggggctgaccttgaagtctctgaaagctga

SEQ ID NO: 12960 - DNA, 201 bp, Homo sapiens
tacaaaattagccagacatggtggtgcatgcctgtaatcccagctactcagaaggctgaggcgggagaatcatttgaacctgggaggtggaggttgtggtragctgagatcacgccattgcactccagcctgggcaacgagcgaaactctgtctcaaaaatgaatgaatgaatgaatgaatgaatgaaatactacttctcc

SEQ ID NO: 12961 - DNA, 201 bp, Homo sapiens
gaagcagtgtcacgcattttagaagaatgggtaagcgcttgactgttgttgttttttttaattgtcaaatacacatgccgggctaaccatatggagatttyagtggagtgtgtaaagtttattgctcttggaatcatgtctttatttttaaagtcatcttcactttgtttgtcttatgaatgaaagcatgagcaagtccat

SEQ ID NO: 12962 - DNA, 201 bp, Homo sapiens
atggattatccttggttgtagtgtttatgtccacatcacatgggatattttatttttcaggcctcttcatgtgcttgtgtgcaacgcagcaacttttgctstaccctggagtctcaccaaagatggcctggagaccacctttcaagtgaatcatctggggcacttctaccttgtccagctcctccaggatgttttgtgccg

SEQ ID NO: 12963 - DNA, 201 bp, Homo sapiens
ccacaggacactactgtgcatttgcctgtgatttgccattgggttggagtacttctcctgagtttctgcagtgttctaggtatggtcttaggccctggaawaagacagtgtaggaaacacagaaggtgcctgatttcctgggcctagctaaggggaaaaagcgagacaatggggtcagaggaagctcagctgaacagatga

SEQ ID NO: 12964 - DNA, 201 bp, Homo sapiens
gggtattggggatgagtctttgtgtggtggcaaacgggccctgtcttcgcttggcttcctcctaaaattcccaggacctcttcgggtcccagccctttctsttcccctgagattgcgcctcctcaccctctgtcttggatggaaagagttccaaggcagtccagtcaccccagtgaaaagttttctgatgaggtcaagcct

SEQ ID NO: 12965 - DNA, 201 bp, Homo sapiens
caagtgtgtttaatgtgaaaatagaaatggagggcttttaaaagagcttactcaaaatcctgccaattactgaaatctaccagacaagaaggagccactcyttttttttttttttttttttttttttttgatacaatgaggggaaatgtttcttccacaaaagcctggccgtttgtctttaaaaattttcatcttttgggt

SEQ ID NO: 12966 - DNA, 201 bp, Homo sapiens
cagtgcaggacagtgtgtcattgcaggagaagacagaacccggccagatcctcccgctgccggcaagcggagtcagttactgggaagccataataattctktcttctagagaattttggcaaaaatgtgcctccatcttacatcaacaatttttcatctttctggaatttttatttccccttcccctcttgttccttttta

SEQ ID NO: 12967 - DNA, 201 bp, Homo sapiens
agatatataatgatgcctatctgattctgtggtggtctggctttgatgtatgtatatgtgggcaggaatgtgtgtgcgtgtgtgtgtgcatgtgtgagctyctgtgtgtgtgttcatcacgtatccattgtgtctccaaggtcttatcaacagcaacaaaaggcctcctttgagatcaatcacattcattcgatgtttgtt

SEQ ID NO: 12968 - DNA, 201 bp, Homo sapiens
ctaatttctggggacacatattttgtcctggttagagagatatataatgatgcctatctgattctgtggtggtctggctttgatgtatgtatatgtgggcrggaatgtgtgtgcgtgtgtgtgtgcatgtgtgagctcctgtgtgtgtgttcatcacgtatccattgtgtctccaaggtcttatcaacagcaacaaaaggc

SEQ ID NO: 12969 - DNA, 201 bp, Homo sapiens
cgtctagttataggaaaatactgagatacttgtgagatgttttctttttttttttttccaacttgtatacacgttgttctataagtggttgattgtttttyaggaaaaaaaaattcagcatctcaaatgtacctttaatattgcttctgatttttgttgttttgctatcatagcgttacctacctcacagagatgttttag

SEQ ID NO: 12970 - DNA, 201 bp, Homo sapiens
acatatgaatgaggggtagagggacacaaacattcagtccctaacacttggtcaagttacttaagcttggtaagcctctctcttcttactgagtcatgagsataataagatatacctgttagggttcttttgaggaataaatggaatttttaaagaattgtgccagacatgtaataattacttgataaactatagctatta

SEQ ID NO: 12971 - DNA, 201 bp, Homo sapiens
ttttgtgacattcttagttgtgatctaccttatgttgtatacacatggtcactcacatacataggtatattattctgcaattgctgagtaattgatgatcsttcattctctctgtgattcataggctctctgggttggataaatcacttcggggaattatatctactagtatatttatgtcactagaattcctttgagaag

SEQ ID NO: 12972 - DNA, 201 bp, Homo sapiens
ttccttttatctctaactctaaaacccaactgctggctgaattaaaagtctcttacataatggtcagaggagttttgagtatcggatctttgtgtacttgytttttaaattcagtcacgtcttaaatagtacttttcactctcctcctctccacaccactttatgtgtttgctagtagcttccatgaaactctatgggtga

SEQ ID NO: 12973 - DNA, 201 bp, Homo sapiens
ctttggtaattcagtatccgaaaaacaatcagtgttttgtgacattcttagttgtgatctaccttatgttgtatacacatggtcactcacatacataggtrtattattctgcaattgctgagtaattgatgatccttcattctctctgtgattcataggctctctgggttggataaatcacttcggggaattatatctact

SEQ ID NO: 12974 - DNA, 201 bp, Homo sapiens
atcagtggttaccaggcagtgttgcattttttccatcccatacctctgtgtgtgttccttatctgtttctaggatgtgccctctgccccgtcacatcacaytctgtgctgctctcagccaaagctcttcttaaatacactagccatcaaaaccatacaacttggctgggtgcggtggctcacacctgtaatcttagcattt

SEQ ID NO: 12975 - DNA, 201 bp, Homo sapiens
atatgaaaacaggaaaacacatggagtcttggagggtagggaagtcttgatgagtaagattgggtctgagataaacctaaaagagggtcaagattttgacrgagggctggaagggaggaacgataggaaactgaccttttttcagatctcttcttgtgcgtggcctggggttaagtgctttacatgcatcccctcattgac

SEQ ID NO: 12976 - DNA, 201 bp, Homo sapiens
tttgtaagagcctttttctgggccccacttccagagggtttttcttttttttttttcttttgagacggagtcttgctctgtcgcccaggctggagtgcagyggcgcgatctcggctcactgcaacctccgcctcccgggttcacgccattctcctgcctcagcctcccgagtagctgggactacaggcgcccgccaccacg

SEQ ID NO: 12977 - DNA, 201 bp, Homo sapiens
gaggctgaggcaggagaatggcgtgaacctgggaggcggagcttgcagtgagccgagattgcgccactgcactccagcctgggcgacagagcaagactccrtctcaaaaaaaaaaaaaaaaaaaaaaaaaaagtgccatgtatattttgattacaaaaaatttcatgcggtgttactttctttttattggtagagggtctt

SEQ ID NO: 12978 - DNA, 201 bp, Homo sapiens
aacacggtgaaaccccgtctctactaaaaatacaaaaaattagccgggtgtggtggcgggcgcctgtagtcccagctactcgggaggctgaggcaggagartggcgtgaacccgggaggcggagcttgaagtgagccgagatcgcgccactgcactccagcctgggcgacagagcgagactccgtctcaagagaaaaaaaa

SEQ ID NO: 12979 - DNA, 201 bp, Homo sapiens
gaaactgttttctctggccaggagacaggcttcgttttcgaaactcacccaggaaggcagtgttcttcttttcaaaaggcatttttctgttgactgtgcaygaagccacatagtaataaacagtttccatatccaagcagctaaggcttgtgccttgcaagttaagtggaacatcacgatctatatctcagttttccttat

SEQ ID NO: 12980 - DNA, 201 bp, Homo sapiens
aaaacttaacaattgtggaagcaatgaattgaaggactagggtcaccagtggagtcccataaataggttgtttatgatccctgtgaaacaagaagaccctyttaatttcatgcttcttaaactggggtatgagtggccccaggtttccctgttgggggtactgataccagagttcatttgaagtcattggaaaccaaggca

SEQ ID NO: 12981 - DNA, 201 bp, Homo sapiens
gccacaggacactactgtgcatttgcctgtgatttgccattgggttggagtacttctcctgagtttctgcagtgttctaggtatggtcttaggccctggartaagacagtgtaggaaacacagaaggtgcctgatttcctgggcctagctaaggggaaaaagcgagacaatggggtcagaggaagctcagctgaacagatg

SEQ ID NO: 12982 - DNA, 201 bp, Homo sapiens
ccttttagaagctgaggcaggaggattgcttgaggccaagaatttgagaccagtctgggcaacataggcagaccccatctctaaaaaaaaaaaaaaaaaaattaaattagctgggcttggtggtgcacacctgtaggctgagctgctcgggaggccaagatgggagaattgcttgaggctggatgtgtgtggctatggtga

SEQ ID NO: 12983 - DNA, 201 bp, Homo sapiens
tcagttggcatgcgatatgcttctcaggcagtaatttagagactgtcaattcctgagagccgctggggaactgagcaatcgtctgcatttcgtcgctttarcccgagctgggtctttgagctggcagagaccaagatctttttctgggaagggatggtcctatttaaggaaggccctggattttgtcaagtttgaaaggtt

SEQ ID NO: 12984 - DNA, 201 bp, Homo sapiens
ggagttcattttcaaccgattcagcagtggaacacttgaagaggaggaagtcaaaattcaaaatgggttgggtgcagtggctctctcctgtaatctcagcscttttagaagctgaggcaggaggattgcttgaggccaagaatttgagaccagtctgggcaacataggcagaccccatctctaaaaaaaaaaaaaaaaaaa

SEQ ID NO: 12985 - DNA, 201 bp, Homo sapiens
aaaatatttgtatctccccacaataaaagtctgtaccaattaagcagctactacccattcctcttccctaccattctaccttctgtctcagtaggtttgcytatttgggatattttatttaagtgggatcatacaatagcatcatgtgttcaaggttgacccacattgtggcatgtatcagtacttcattcccttttatca

SEQ ID NO: 12986 - DNA, 201 bp, Homo sapiens
atattgcttctgatttttgttgttttgctatcatagcgttacctacctcacagagatgttttaggtcataagtatttttcatttaattttttttccccttmatttcctttttttccctcctaagctataaatatacagccttaaaaaaaacactcagaaatttaagtccaagaagcctgcttttcttgatacctttcaagt

SEQ ID NO: 12987 - DNA, 201 bp, Homo sapiens
aaattcagcatctcaaatgtacctttaatattgcttctgatttttgttgttttgctatcatagcgttacctacctcacagagatgttttaggtcataagtrtttttcatttaattttttttccccttaatttcctttttttccctcctaagctataaatatacagccttaaaaaaaacactcagaaatttaagtccaagaa

SEQ ID NO: 12988 - DNA, 201 bp, Homo sapiens
atggattatccttggttgtagtgtttatgtccacatcacgtggattcccgaaggagcatggattatccttggttgtagtgtttatgtccacatcacatggratattttatttttcaggcctcttcatgtgcttgtgtgcaacgcagcaacttttgctctaccctggagtctcaccaaagatggcctggagaccacctttca

SEQ ID NO: 12989 - DNA, 201 bp, Homo sapiens
gaggagagtcaaatgggagtttctaccgatgctcttgaaaggatcttgttactcagatgtctctaagacaatgatcagtacccatctctcagagcctgtgyagccgtccatgcttgaggcatgagatgctgaagataaaggtccccagtggtccaggtttttccttctcagcttggaaagcagcaggaaaactgcactgca

SEQ ID NO: 12990 - DNA, 201 bp, Homo sapiens
catggtgggaatctagaagacggagaaagaatttctcattcccgaaggagcatggattatccttggttgtagtgtttatgtccacatcacgtggattcccraaggagcatggattatccttggttgtagtgtttatgtccacatcacatgggatattttatttttcaggcctcttcatgtgcttgtgtgcaacgcagcaac

SEQ ID NO: 12991 - DNA, 201 bp, Homo sapiens
gaagctgaggcaggagaatcacttgaactcagaaggccaaggttgtagtaagctgagattgcaccactgcactgcagccttggcaacagagcgagactccmtctcaaatcaatcaaccagtcaatgtgtgcccccttttcctccaactcccaccccaaatccttgctgaatcatacctatccttcacctttataagcatct

SEQ ID NO: 12992 - DNA, 201 bp, Homo sapiens
tggagtacagtggcgcgatctgagctcactgcaacctctgcctcccaggttcaagcaattctcctgcctcagcctcccaatagctgggattacaggtgcaygctaccatgcccggctgatttttgtatttttagtagaggtggggttttgctgtattggccaggccagtctcaaactcctgacctcaagaaatccgcccac

SEQ ID NO: 12993 - DNA, 201 bp, Homo sapiens
tcctaataagcctctcatcctcagcaacggaggacagttgcccactcaaagccttgtgacattctagggtatcctatttctacatggtgggaatctagaaracggagaaagaatttctcattcccgaaggagcatggattatccttggttgtagtgtttatgtccacatcacgtggattcccgaaggagcatggattatcc

SEQ ID NO: 12994 - DNA, 201 bp, Homo sapiens
ctgagtttcttgtggaagtgggcttgtgttttgcttttgtagactgacactgagaatagcatccaaacatctttttcccaccaaggcatcaaactccatcrttaggaattccttcatagaatcaaagaatcagaaagagctgaaacatagaccacggacactcaaattgtttatcctgaaatgaatgggaaaacctaagct

SEQ ID NO: 12995 - DNA, 201 bp, Homo sapiens
aacacacacaagccactgttagattttacaaaactttaaaaagtaattatcttaaagatatctaagatagtgatctggttacatagattatcagagatacttttttttttgattatcagagatacttttaaaaaagcaactacaaggtaaggattatccgttaatttagtgtttttctattaaactcaatttgctttaaag

SEQ ID NO: 12996 - DNA, 201 bp, Homo sapiens
tttatgcatttagagctcccctcttgtgtttcagaaaggaggagttgttgttttcttttcacttgagtttaataaatgaaaaaggggaagggagagggaargaagaggaaaaagcacaaatgtgcttgtttttggatcagcccctgtactgggcacatggatgcagtcagtcctcagtgtaccccaggaaagaggaaactg

SEQ ID NO: 12997 - DNA, 201 bp, Homo sapiens
cccaacctctgctttggaaggcctaactcagttaaacattacaagttcatgcagcacggtgtgatggctcacgcctgtgatcctagcacttttggaggctyatgtgggtggatcgcttgagctgaggagtttgagactgggcaacatggtgaagccgtgtttctacaaaaaatacaaaaaaaaaaaaaaattagccaggcg

SEQ ID NO: 12998 - DNA, 201 bp, Homo sapiens
gagggggacatttgggaatggcatttttagtactcacaaggtaactggggcactcttggtcttggggaggggaggtggctggggacgcagagggtcctgcrgtgggtggatacttacaacatagaaatgtcctggctcttgatgctggctacaccctcagtaagagatactgtcctagggtcatttttttcaacccacact

SEQ ID NO: 12999 - DNA, 201 bp, Homo sapiens
ggactgtcttagtcagtccaggctgctataacagaataccgttgactgggtggcttgatttttttttttttctcccagttctggaggctggaagtcagatrtcagggcaccagcatggttggtttctggtgagtgctcttttctgcatttgtggacagctgccttcttgctgtgtcctcacttagtagacagagagagaga

SEQ ID NO: 13000 - DNA, 201 bp, Homo sapiens
gcaacagagtgagatgctgttttgtttttgtttttttttgtttgtttgtttggttttttttggaaaaagaaagaatcaccataaaaaagatgggtaactcrgaaatttcaaatgcttgaatttcttgggttgggaagaatatcccaaaatgtgtttccaactacctcactgattttgacttcacagggagaatattttgat

SEQ ID NO: 13001 - DNA, 201 bp, Homo sapiens
ccaacacccgacaggcatcttagaaagtggagggtgtaagttataaagagagattacttccaacacgtttctttaaagcctgctggctaaattaggtgggrccttctttgtgtcctctctgttcttgctagtctggcctttgtataatagggaagcagatatatctggaagcctctaagtgtgcatcatggaaattgtttg

SEQ ID NO: 13002 - DNA, 201 bp, Homo sapiens
acccgacaggcatcttagaaagtggagggtgtaagttataaagagagattacttccaacacgtttctttaaagcctgctggctaaattaggtgggaccttmtttgtgtcctctctgttcttgctagtctggcctttgtataatagggaagcagatatatctggaagcctctaagtgtgcatcatggaaattgtttgaaatg

SEQ ID NO: 13003 - DNA, 201 bp, Homo sapiens
ctacctgtggtcccagctgcttgggaggttgaggcaggaggattgcctgagcctggtagaggtggaggctgcagtgagctgtgattgtgccactgcacttyagcctgggtgacaaagtgagactctgtctcaaaaaaaaaaaaaaaaaaaaaaaaaaaagctagtagcacaccccaaaacttctagacagggcatggtgtg

SEQ ID NO: 13004 - DNA, 201 bp, Homo sapiens
gtgacaaagtgagactctgtctcaaaaaaaaaaaaaaaaaaaaaaaaaaaagctagtagcacaccccaaaacttctagacagggcatggtgtgagctggartagacaactagttcatggtaacaggaccagcagagctccgtcttgatgctgttattatttggtatctgttaggagctgaattatgtgtccccaaaattca

SEQ ID NO: 13005 - DNA, 201 bp, Homo sapiens
tatttggtatctgttaggagctgaattatgtgtccccaaaattcatgtgatgaagccctaattcacagtacctcataatgttactctatttggagatacarccttttaaaggatggttaagttaaaatgaggttgcttggatggtccctaattcagtttaatttgggtccttataaaaagaggaaatttggatgcacagag

SEQ ID NO: 13006 - DNA, 201 bp, Homo sapiens
cctccggagaagccaaacctgctgacaccttgaccttgaatgtgcagccttcagaactgtgagaaaatcaatttctgttgtttaagccacctagtctgtcrcattttcttatggcaacccctgtagataatacagtcccattctctggggaaacagatacctccgccagggtcctgatctgaatatgatttggggtgatgg

SEQ ID NO: 13007 - DNA, 201 bp, Homo sapiens
caacgctttgggaggctgaagcaggaggatcacttgagcctaggagttcgagacctgggcaacatggtgagacccccatctctacaaacaacaacaacaamaaaaaaaattagccaggcgtgggggtgcatgcctgtgctcccagccactcaggaggctgaggtgggaggatggctcgagcccaggaggccaaggctgcag

SEQ ID NO: 13008 - DNA, 201 bp, Homo sapiens
tcattttgggcttctgatacactcctgtccgagaagttacctttgaaaatgtgtactattttattgtcaattatgttttctttaaaaaaaatttatgacakattacttttgctaattatgtgtgtgggtagattatgttattcatgaattttatttcaggaccttggtaaggggttatacaatatttcttttgaaacgagg

SEQ ID NO: 13009 - DNA, 201 bp, Homo sapiens
cagggacagcaaaagcacacacaatgatggccagagacactgctcagtgtactgtcttccaccgggacagcccactcaccaagggttaggtcctgtgctgmctgggtcccgggtctcctcggaggtcggtttgcatcacgtggatacactaatctacccaagttgacttggagaaccaatctgaaatcagatgggagctcc

SEQ ID NO: 13010 - DNA, 201 bp, Homo sapiens
aagactttagtcttttcaagaggcaaagtaatataccacttttcgcttttttaatggtgagagccaaggtcaatctgaatttttctttttctttcttcctttttttttttttttttttttttaaaaaaaaaaaggtgcttgaattagaaaggtagcacattgtccacatggacagtgcaggatggggctggctttttcatt

SEQ ID NO: 13011 - DNA, 201 bp, Homo sapiens
atctgccagcaggctgtgctggggagtggtgagtagtacagggatgtgtctgaccccaggagaactgccccgatccctatcttgtctctgctcagttctgrtaactcttttatcttccctggagttatttttttcccttctttctttctctttttctgtgtgctcttctaagagtaaaacgcatgtccccccatgaagtca

SEQ ID NO: 13012 - DNA, 201 bp, Homo sapiens
tgtggcacatacccctgtacatgtttgccaagactgctatatggtagagcttggaattcttaggagctttatcaggtaattgcaagtcccccacctccaasaaagcactctctaggtcaagaatcagcaaatgttttctatagaggcccgtaaaattaatattttatactttgtgggtcatatagtctctgtttcaattac

SEQ ID NO: 13013 - DNA, 201 bp, Homo sapiens
ttgatcttggacttcccagcttccagaaccatgagcaataaatttctttttttcaaagctccccaggagtctctctcggtctgttctggctcaggaagctkccttatttgtaacaaacaaataaacaaaaaacaaaataaataaaagctacccagcttagattattttgtcataaaagccccaaaagactatgacaaatcc

SEQ ID NO: 13014 - DNA, 201 bp, Homo sapiens
aagttagtttcttcccagagagaaagaccggtggctgtagtctgtgccccactcccagcctgtcctttctcagccgtggcttgtgtgcatccctggggccrgcatgttgctgcgagccccaatcgatcagtggagaaacgagctctggtgggcagtcaggcaaagcagatacacgtgcttcttttcagctttgttggaagg

SEQ ID NO: 13015 - DNA, 201 bp, Homo sapiens
aagaagaatatccatgaatctatgaggaggcgggactctggccagacattgaatttgctgcttccttgatcttggacttcccagcttccagaaccatgagmaataaatttctttttttcaaagctccccaggagtctctctcggtctgttctggctcaggaagctgccttatttgtaacaaacaaataaacaaaaaacaaa

SEQ ID NO: 13016 - DNA, 201 bp, Homo sapiens
ttcactgagggactaagagaaatagaaacagaggggattggccacacctgaagtcattctgtgttcaaatcttggctctaccacctatgatctgggagctsttagaggagttaatcgatgtagttaagactcaatttcttagtatatacaataggtgtaatagtaaaaattagatgactttgatgtgtgtaggtaagcggc

SEQ ID NO: 13017 - DNA, 201 bp, Homo sapiens
catagctcactgcagcctccaacttctgggctcaagtgatcctcccacctcagcctcttgagtaactgggactgcaggtgcatggcactgtgctccacaattttttttttttttttagagatgggatctcactgtgttgtccaggctggtctcaaacccttgggtttaagtgatcctcttgcctcagcttcccaatgtgct

SEQ ID NO: 13018 - DNA, 201 bp, Homo sapiens
agaagaggatgtagggcaggtagggctcagaaggacccatgccatatagcaaagttcttagtaacacaggctttgggttacagcaggctagattcaaatcytgctgtggtcagaatgtctgtgtcaccccagcattcatttgttaggagatggggtcttttgggagatgatttggacatgaagacagagcctgcataattg

SEQ ID NO: 13019 - DNA, 201 bp, Homo sapiens
gagttcaagacctcctcatctctacaaaaaataaaatatttgaaaaaaaaaagtgaaatttttgatatagaagaggatgtagggcaggtagggctcagaargacccatgccatatagcaaagttcttagtaacacaggctttgggttacagcaggctagattcaaatcctgctgtggtcagaatgtctgtgtcaccccagc

SEQ ID NO: 13020 - DNA, 201 bp, Homo sapiens
ttttttttttttgccaagcaccctgcctttttgcttgtctgtttcgtctttatctctccttccagtaaagttcttggcccagaggttctgctgccactcartgacatttgtgaaatgcaagggagcttgcaccatgggttcaagctcctgcagatccctgagcctgctacccttgtgcttctctgtccacgcaaagccaag

SEQ ID NO: 13021 - DNA, 201 bp, Homo sapiens
tttagtaaaacgcagtatcttcttccccagctgaaatagcgaaagggtctcttcaggctcctgggataaaaaccaggatccttcatgtgtctgagcaggcytcccaccatttgactgctgctcctttgtccagacacatttaacaccatctccctgcaccccttcactgggctccgaagctgcgttcacacggcacgtcat

SEQ ID NO: 13022 - DNA, 201 bp, Homo sapiens
tctagaataagtccgtctcacgttacagtgcttaggaagtgttagatgtactgtcatttcttcaacatatatgtcctatattagtctattctcacactgcwagtgaagacatacctgagatggggtaatttgtaaaagaaagaagtttaacggactcatagttgcacatggctggggaggccacacgatcatggcggaagg

SEQ ID NO: 13023 - DNA, 201 bp, Homo sapiens
tttaatttttgtgggtacctagtaggtgtgtatgtacatatatatgtatatatatatgtggttttttcaaaaaaattgtgggcacttagtaggtatatatttttgtggtctgtgtttcttataaattggtgatcccccaggggatgcctgccttgttggtccaggtaacacacttggagtagcaaacatctagacgtagtt

SEQ ID NO: 13024 - DNA, 201 bp, Homo sapiens
cacggcacgtcattggcagctcatctcagaaggttccagctttgcctggcaaattctcctccttcctttagatcccatctctggtagacagagtaatgagycccgaagatgtccaggccctactcctaattccatggaacctataaatatgggaggttacatggcagatggggaattaaggttgcagatggagttaaggtt

SEQ ID NO: 13025 - DNA, 201 bp, Homo sapiens
ttagatcccatctctggtagacagagtaatgagccccgaagatgtccaggccctactcctaattccatggaacctataaatatgggaggttacatggcagwtggggaattaaggttgcagatggagttaaggttgctattcactcatcttcagattgaaagatcatcctggattatctgggtaggcccagtcgaatcagag

SEQ ID NO: 13026 - DNA, 201 bp, Homo sapiens
tacagatacacactcacatatatatttctgtttgcggctcacacagacataaatatatatatatatatacaaacgtacatttctgcttgtagcttgcacayatatatatacacacacacacatacatgtagacacacacatttatacatatacatgtcaacacatacacatacatatttctgcttatggctcaggatactt

SEQ ID NO: 13027 - DNA, 201 bp, Homo sapiens
cactcacatatatatttctgtttgcggctcacacagacataaatatatatatatatatacaaacgtacatttctgcttgtagcttgcacatatatatatayacacacacacatacatgtagacacacacatttatacatatacatgtcaacacatacacatacatatttctgcttatggctcaggatacttctttttttgg

SEQ ID NO: 13028 - DNA, 201 bp, Homo sapiens
tcttacacagtttgtaagtcttaaaactcagtatctactctagtagttgctccaaatgtgatgtcctcataaatcaccgagggatcttgttaaatttggaytctgattcagtaggtctaggtggggcccgagcttctttgtttccttttcttatttaatttttgtgggtacctagtaggtgtgtatgtacatatatatgta

SEQ ID NO: 13029 - DNA, 201 bp, Homo sapiens
gttacatggcagatggggaattaaggttgcagatggagttaaggttgctattcactcatcttcagattgaaagatcatcctggattatctgggtaggcccmgtcgaatcagagatggggaaaagagaggcagatgggtcataatcagagaggtggctgagtaaagaggacttggcctgatgttaccagctttaaagaggga

SEQ ID NO: 13030 - DNA, 201 bp, Homo sapiens
cacatatcccacatccaggtgccagtcagggagctgcgatttaatttgctgctgaatgcacttttgaataaagggcctagaagatgcagtctcgaggaacsgaggccggttagagacaggctggcagctttgcctcctctcccaagacaaaggcctccccgcccccctaaatccagcacacaatcagctgctctccctccc

SEQ ID NO: 13031 - DNA, 201 bp, Homo sapiens
tgccccttatacattaaggtgcatgcaataaatcacttatgtaataaactactctatattatgtgggaaaaaaaaaaggagctggtggcagggggagagayttcaaattgagccagacctcaggcatgaagggaggggagagagggggaaatgtggaggaagggggcgtttgtgcagtgggaagttggagaaagtacaaat

SEQ ID NO: 13032 - DNA, 201 bp, Homo sapiens
tggaaagttactctctaagtcagggcttcttttcttcaactttggtgtgagactccgctggagagctggttagaaaaacacaagtctcgggccccaccccscagagcccctcattctctagttctgggttggggcccaggagtctgcttttctagcaagcgcccagatgtcactgatgcttacagctctcagaccacagtt

SEQ ID NO: 13033 - DNA, 201 bp, Homo sapiens
tccatgctccaaatgactgtgacgactgagaaaatgcatgtatgtaaagtctgcagctggtgacattgtagacactcagcaaatggcctttggtgttactrttattttatttttactaattattttttacacctacaaatcaggatctgctacaatcgcttgatatttgaaaattgggcctaacccactatgccactcttc

SEQ ID NO: 13034 - DNA, 201 bp, Homo sapiens
agtggggcactcgattccggcaagagaaggcaaacaaaagaagccacaacagtctaggaagaaatctttaatttctattcagctttaaagagtttgagagmgttttttcccctctgttaacaaacgagttcaagtacatgccttcatattataaaagtacctgaaattgcctagaatagcagcatgcatagcttgttagta

SEQ ID NO: 13035 - DNA, 201 bp, Homo sapiens
gtctgcgtggttcttacctagaaactgtttattggtgaaccaaatattttgtatcttataccaagaaagaggggctgacaaagattgagtgattagaaatycaagtgaatttctatttattattttgacttggtaatttgtaataacaatagccaccatctatctatacttcctagatttgggcatggtgttaggagtctt

SEQ ID NO: 13036 - DNA, 201 bp, Homo sapiens
ttaaggtgcatgcaataaatcacttatgtaataaactactctatattatgtgggaaaaaaaaaaggagctggtggcagggggagagacttcaaattgagcyagacctcaggcatgaagggaggggagagagggggaaatgtggaggaagggggcgtttgtgcagtgggaagttggagaaagtacaaatgaaagcctctctg

SEQ ID NO: 13037 - DNA, 201 bp, Homo sapiens
aaggcagagggtgtcacttccactgcatctttggggaaggcagtcaccactgtatagtcctgagctcactgggattaaggggaagggacacagactccacytctcgatgagaggagaagcgaattgatgggcagattttatcactgtcctggggcctttgctctttgcccttccctttgccaagaaagttccctgtactct

SEQ ID NO: 13038 - DNA, 201 bp, Homo sapiens
cctggggcctttgctctttgcccttccctttgccaagaaagttccctgtactctgcaatgctgagtacttctcatccttcaggtctactgcaagtgtcacytggccaacacaccatgccttcccagtctctggtgttactgtctgcatactgtagaccatcatcttgtttgcatacttgtctgttatctctttatcatccg

SEQ ID NO: 13039 - DNA, 201 bp, Homo sapiens
ctggccaacacaccatgccttcccagtctctggtgttactgtctgcatactgtagaccatcatcttgtttgcatacttgtctgttatctctttatcatccktctacccacatcaggcaattccaagagagaagaccactggttttgtttgatctagtccctgttgagtccctgtgcaccttcagaaccacatctagcaata

SEQ ID NO: 13040 - DNA, 201 bp, Homo sapiens
tattcacagttgccgcccacactcaagagaggggattctataggaaatggaagtcttgggggccatcttgaatcctgactaccatagtctgtgaaatcccyatttcacagatgttgaaactgagacttagaagcattatgcaccatgccaaaggccatggaaggacagagcttgggcatgctcccgacaccaggtcatact

SEQ ID NO: 13041 - DNA, 201 bp, Homo sapiens
ccatagtctgtgaaatccccatttcacagatgttgaaactgagacttagaagcattatgcaccatgccaaaggccatggaaggacagagcttgggcatgcycccgacaccaggtcatactgatgtcactctccctactcccttcactccctccagcacctggccttcacctgaaggtgctgaccttgctgtttgttggttt

SEQ ID NO: 13042 - DNA, 201 bp, Homo sapiens
gttttgtttgtaagaatcagttgaggacagatgggactatttgcatggattggtgtcatgtttgaagtcagttaccagagggtttctttcaacagagtatmccaaaaaaaaaaaaaaaaaaaaaaaaaaaaaagtaaattgcacagaccccagcttaggacctggacttaatcttcatgatgtttgtaaagtaatacttct

SEQ ID NO: 13043 - DNA, 201 bp, Homo sapiens
agagaataaaacgttagttaatccctttgtctgtcaatcacagtctcagttctcttgctttcacattgtacttaaacctcctgctgtgcctcgcatcctaygcttaataaaagaacatgcttgaatatcatcacctgaagtttgtattgtttctttaaatgtttgtttcagtttgtttttgtttttcattttttagaaaag

SEQ ID NO: 13044 - DNA, 201 bp, Homo sapiens; identical to SEQ ID NO: 2530

SEQ ID NO: 13045 - DNA, 201 bp, Homo sapiens
cagtaccctttgctatgccaagatccagctgaaactgaaccaggtgggggaggcctgctaatgcccaggcagtcgaaatgacgccatctcatcactccttytcttaaaatttttttttgtctttcttcttggatttccagcaacagggagctgccaccaccgtgtactgtgctgctgtcccagaactggagggtctgggag

SEQ ID NO: 13046 - DNA, 201 bp, Homo sapiens
atgttataggcagttctgaaggaaaggattcgatgactatctttttttggcacaaatgtgatccttctggaggccagaagatagattcagtgggccccagwtctttcaggtttaaggaataagcattttggtctatgaaaaatggggttttcctaaagtataagattgtcttatatttataaatgcctgtgttcattgctg

SEQ ID NO: 13047 - DNA, 201 bp, Homo sapiens
gggttttctacctgatggaccacaattaagagtggttggtttgtcagacagaaggttctacaaacgatttggtatcgaattacattatacatggagaagtygaggggttggatgaatttgttcttgcacgttcagaaggataccatctttttctctgtgtggaagaggcgcctgccacgacgtattgatatgtgtatttat

SEQ ID NO: 13048 - DNA, 201 bp, Homo sapiens
agcaaagtgatttcttgccctctttatagcatccctgacagtattctgtcagtttggatgatatgatgcctcatcactgcacacgtccctagccacagccscaactgttactcaaaaggtgaatgaaagtgatcagctgcactctttgcaacttacattttgaagtgggctgggaggaaatgtacccccttacctgtggtc

SEQ ID NO: 13049 - DNA, 201 bp, Homo sapiens
accttgtatgcacacatgagaatttagagatctatatataccgcctggcctcttctttgtaagggtataacagcagtggttaacatgcattttttttttttaacagttagatttactcttcctttgcacagactaatagcacactgaggtaggatccagggacggctccttggcaagttgtactgctgtggcctagggagg

SEQ ID NO: 13050 - DNA, 201 bp, Homo sapiens
gttactaaactgtcatcacatctgatcatattaagatgtcactcagaggttgccattggtacggctgaaaattctccaagagaccaaaggtgtggtgtgtrtgggaccaacaagatattgttactgcttaattgtccagcaagggaggaaagtagagtgagtacccatgagcaccaagcatgaatctgagaaggagaattt

SEQ ID NO: 13051 - DNA, 201 bp, Homo sapiens
aacaacaaaaaatgtattgccaaaaaattgctagcagacatctagaaaaatgtcttcaacttcttttggtaggaaaagaggaaaaattcaaatctgaattyaacatatttatttttttgtttctgactttttacgtaaacagagctctgagttgtatcctcagatatatttgagactaacaacaaggaaatataaaattat

SEQ ID NO: 13052 - DNA, 201 bp, Homo sapiens
ttttataacggagttgttaacattatttcctttagatggctccttcatcttttctgcattatgaactgatgccccaaaaggtggtatgaatgaaagtcatstgatggtgattaaagtgctctttaaatttttttttttaatcagtttaagaatgctttctcttttattggcagtacctgcttgtttactattgagatttca

SEQ ID NO: 13053 - DNA, 201 bp, Homo sapiens
caaattttcaaaggaagaaatggaatggtgcaaccatggtacatgggaaggaggagggggacacacaagactgtacctatcatgggggcttcgacctcatstgggaaggtggttggagagagtgagtcctgacctgagctttggaacttatcaagttgagagagaaatttgataatttgtctattaacgtgtgaccttggg

SEQ ID NO: 13054 - DNA, 201 bp, Homo sapiens
atttatcacaatggatcagtaagcattgatgacaactggcaaggtattgcttcagatattttataacggagttgttaacattatttcctttagatggctcyttcatcttttctgcattatgaactgatgccccaaaaggtggtatgaatgaaagtcatctgatggtgattaaagtgctctttaaatttttttttttaatca

SEQ ID NO: 13055 - DNA, 201 bp, Homo sapiens
caagtcattgaccttctctgaacctcagtatcctaggacttcagaagcgaaaggaagaataatgggtcttgagtatgcctagaattgagcaagctgctatscttgcaaaggccttggccagctgctcacccaccatgtccctctgttcccactccaccttactcatgcctagacttcttgctttttaaaaataatccaccc

SEQ ID NO: 13056 - DNA, 201 bp, Homo sapiens
gttttgttttgttttgcttgttgagcaagggaatgcggttcccctgtgtcggacttgtttcagaaagacaatgtcactgaggctggggcagggagattagstgagaggctcttgcagttatctgggaaggagctgtccataaaggcctgagttaagacagtagccctttgggttcgatttagtggtggctccccaaaagat

SEQ ID NO: 13057 - DNA, 201 bp, Homo sapiens
tgtggactgtagtttgctgacatccaggctagatccttaatatacaatgaagtagtaaaacacatgtaaaagtaaaaagcaggcgaaatagaataaaatasacatttgcacaccacagtatccaaaaaggttatgtactggggctaaagatttggcttggagtttcctggtagtcaaggcaaaaaagggaaacaaaactag

SEQ ID NO: 13058 - DNA, 201 bp, Homo sapiens
atagccttaaagtttctcctgctctttgcagatgaatgaaggggcgctttctggaatctttgtggctggggctgctgctctgcactgctgtggctcttttycacaaatgcttatggagctctaactgggggcaaggaactgtgctacggttgggaagagaggagtgggcaaaaggagacactggggcttctgtgactttag

SEQ ID NO: 13059 - DNA, 201 bp, Homo sapiens
aaatcagccatcagccttattagagtggttgattttttttttaatctaagagctttcttggttattttctgttcttaatcattgttgtatatccttaatgygcaggacatgacaccgtataacaagtgttttaaaaatatttacaattctgatcttataaaggaaaaagttacatatggtcctttgaactaattgctaaaa

SEQ ID NO: 13060 - DNA, 201 bp, Homo sapiens
ccatctcattgtctttatagtttaaccctttgaagttgtgactgccaacgtgctagtcttgtcgtcttacacgttaatggtaatgatctttttagatttaytgtgaacctctaggaatgttttttttaaccagtaaatgcactgaaacatggaatcaaagtctctttcccgtgggccccttttcattgggaataaatgcta

SEQ ID NO: 13061 - DNA, 201 bp, Homo sapiens
gaatgactgtgttaggaatcattggaggagagggagtcagagggatggatcagtattttctctgcaaacctgatgaaacactccagagcccgcacctacaygcgtgggaactgataagatgggggttgtgtccacttcacttgtatgggatgtcggtgctttgaaaaaattctatcatcaaagagtaggtttcttagttct

SEQ ID NO: 13062 - DNA, 201 bp, Homo sapiens
actcatgtcttttgtcagggagaatggcatggcctttgtatgacacttccttctagccagactcggatttgggggcatcatatttgggatggctgcaccgyaaacaggaaaggccacaggacagctcacaggttctctctgaacagaagcctgtgagcacgtgcctgtcatttaaaagctgcatggcactcttccccctgc

SEQ ID NO: 13063 - DNA, 201 bp, Homo sapiens
gaattctttccagctttccatcctgaacctgctggtctccaggctcgttcctgcaaatatttcacagaggagtaagagccacattcttgctggctttccarttcattctcctctcttcgagtccacctcttaaaacttcttagtgctcttgcaagaaactcatgtcttttgtcagggagaatggcatggcctttgtatgac

SEQ ID NO: 13064 - DNA, 201 bp, Homo sapiens
tgcatgatagaatgcaaactttgaaaaagacatacctttgtaactttctatgctaaggtgttgcataatcaaggttaatttttgtttgtttctagtctatkggcatcaagtgctttaaaatgctcactaacaccgaggcagaattatttacccgggcaattaaagcaacagcacacacgatcatttcctactaactagcaa

SEQ ID NO: 13065 - DNA, 201 bp, Homo sapiens
ggaagagaaaggcagcctaattgtatttcctaaaatacagtagatgagtagtcagcacatgcatatttagataatatttgcatgatagaatgcaaactttraaaaagacatacctttgtaactttctatgctaaggtgttgcataatcaaggttaatttttgtttgtttctagtctatgggcatcaagtgctttaaaatgc

SEQ ID NO: 13066 - DNA, 201 bp, Homo sapiens
aaaggcattaatctttttggtatccaacatcttgaatgcttctgtgtcattttcctttctttttttttttcaaagcacttaattatttaaaaacaaaaatmcttctctgatcagagcatacctgccgtgctcaaagcacttgcttacttggaatgccataaattacatgaaggaattattcattgtatcacgaaacatacc

SEQ ID NO: 13067 - DNA, 201 bp, Homo sapiens
ttgacaatgtaatttgtcagaggaaggcagcctgttttataagctcaggtgatttcatttttgttcacctgtttatttcatgacacttgcaggaaaaagargaattttcatttgatcaaatcatttccatgatccatcaaacacacaagttaaaaagggaaatgctctcagtctttaataacagtcttaatcgtgtgtaga

SEQ ID NO: 13068 - DNA, 201 bp, Homo sapiens
atgagcagttgggagagtgcaggatccagttcaaaaggatctgtccccccgtgaaccccaggacagggtgagaggccacctgcacactttttttttgtcasctcacaccctgttggccctttgcaaatatttgtctttcctcatgcacgtggttattcccagaaagatccagtgaattgtctcctgaagataaaatacata

SEQ ID NO: 13069 - DNA, 201 bp, Homo sapiens
ccttccaagaaccacatgaaggttatattattatgtcgactttccagatgaggagactgaggctcagtggcttgtcataggtgtcaaagacaggagtccartgtaaggacttctggcttcagcacaggggattttcctaccatcccatattgccaccccatctgcaaaaatacctggatctatcttcctcctgctgattct

SEQ ID NO: 13070 - DNA, 201 bp, Homo sapiens
tgaaccccaggacagggtgagaggccacctgcacactttttttttgtcagctcacaccctgttggccctttgcaaatatttgtctttcctcatgcacgtgkttattcccagaaagatccagtgaattgtctcctgaagataaaatacataaaagggcgtttcaaagtataaacagtgattttaatgaaaaataagaagaaa

SEQ ID NO: 13071 - DNA, 201 bp, Homo sapiens
cccaggaaatggccaaatgttatcactcatccttccaagaaccacatgaaggttatattattatgtcgactttccagatgaggagactgaggctcagtggyttgtcataggtgtcaaagacaggagtccagtgtaaggacttctggcttcagcacaggggattttcctaccatcccatattgccaccccatctgcaaaaat

SEQ ID NO: 13072 - DNA, 201 bp, Homo sapiens
tttgagttattattttcccatgggcaattaaagccctggcctccactgcagttttcacatcaaacctaagagtctcaggtgccccttggtggagcaacctmactagagacattaatcatactacgggataattgacaaatgcattgtgagtgtctgatttctgtggctcaggatgcttagtagcagtggggtcaagggcac

SEQ ID NO: 13073 - DNA, 201 bp, Homo sapiens
tgttaagatatttaacgggtgtttcattttcccagcaatgctataggacacagaaaggaacataaattgttacagagagaaagagggtaggtctgtgaatrgaattgaacaggtaggttgaacaagataaatgccgaggaagcaagtgtatttaaataaacagtagtttatggaaggctttggaaatccactatattaatc

SEQ ID NO: 13074 - DNA, 201 bp, Homo sapiens
ttttttgtcagctcacaccctgttggccctttgcaaatatttgtctttcctcatgcacgtggttattcccagaaagatccagtgaattgtctcctgaagawaaaatacataaaagggcgtttcaaagtataaacagtgattttaatgaaaaataagaagaaaatgcttatgatacaacattaggtggaaaacgaaggaaga

SEQ ID NO: 13075 - DNA, 201 bp, Homo sapiens
aacatggataaactgaacttgatttcctgcattaaaaaaaattaaagaaatgaaagttctgactgttttattgtagctggggaattctttttgcaggtgaygctcatgttacggttttgaacccaggactttgcgttgcagttttgttcaggggttgcagaataccgatctgactttgcaggaatgactgtcttggtgcat

SEQ ID NO: 13076 - DNA, 201 bp, Homo sapiens
aggcccaagcgatcctcctgcctcagcctcatgagcagctgggaccacaggatgcaccaccatggccagataattgttttgcatctttggtagagacaagscttcactatgttgcccaggctggtctcgaactcctgagctcaggtgatctacctaccttggccccacaaagtgctgggcttacaggtatcagccactggg

SEQ ID NO: 13077 - DNA, 201 bp, Homo sapiens
cttggtaatgtagattttggaggacttgaaaggttcctgctacctttggctggggatggagggaacatggaagatgggtctttgtttagaggaagctcttyatcctggtacgctggaagttggcatagtcttagcagttagtccagatgtgaatttcaggattattctgtgagtcttccaagtcctgtctcagcagtgaaa

SEQ ID NO: 13078 - DNA, 201 bp, Homo sapiens
agaaatggggcttctaaaataagtggaactgggacctcttctctctcaggctgttacttgttgtggttccagcctattttctgagctgtggagcagggagrgatctcacaggaaacttggtaatgtagattttggaggacttgaaaggttcctgctacctttggctggggatggagggaacatggaagatgggtctttgtt

SEQ ID NO: 13079 - DNA, 201 bp, Homo sapiens
agaggcatggctcccctgttatgtatttgggacttactgcagatgcttcctctggttcagggtgttgaggcttcgtgctgttaatattggaaggtgggtcrtttgtactgggcatctgtcctgtatcttggagatgtttagtaacatccctgacctctagccattagataccatctctcccagtagggataataaaaacat

SEQ ID NO: 13080 - DNA, 201 bp, Homo sapiens
agctactcgggaggctgaggcaggagaatcgcttgaacctgggaggcggaggttgatgtaagccgagattgcgccactgtactccagcctgagtgagagasagactgtctcaaaaaaagagaaaagtaaagaaaagaaaagagtaagattaaaaacaagtaaagaaaataaatcctcccgctttttttgctccttcatggg

SEQ ID NO: 13081 - DNA, 201 bp, Homo sapiens
gagcatctttcaattccttgaacttcagtctcctcatctctgaaatggggttattatctacctgcagaggtgctgcagtattaactgaggcaacgttgcamcgtttctagaatgatatttagggctcatattgacccagtaggaagtatagttaccttgggccaggggagctacctgagtggagtcaacttttaggttata

SEQ ID NO: 13082 - DNA, 201 bp, Homo sapiens
tgcgtcactgtttttcttatttggagatgctgttcctctcaagtgggaaaaatttggttatctcaggtggtaaagatgcctttgtttaaaatattcttctsttagtggggacaataatactactaatttctagtactgacgcttctcatgcaatttaatcagtaggaacctgtttgcatgttcatttgaggaagtaccaaa

SEQ ID NO: 13083 - DNA, 201 bp, Homo sapiens
tgttgtaggttgggtaccccaggaagtagattctgcaactgagattggcatgtaggaagattactggggagtgttctaggatccacacctgtaggggaacrtagcaagcaggatggggtggagggaggattgagctgtgctgtgggagatgcgaatgctccagtcaatcccaaggaaactctgaagctggattattcttca

SEQ ID NO: 13084 - DNA, 201 bp, Homo sapiens
actgagttggattgatatatttttcctttggccttcaaaggaaatttgagcattcattcattcatccttttagagaaatattctctaagcacctaccgtgygccaagctttgggttggatacctggaacccctctcagtgagatcacagtctaacagcacacacccaactatgaaatatagatggactgtgaagatgaaga

SEQ ID NO: 13085 - DNA, 201 bp, Homo sapiens
cagtgctttctgaagacagaggtgggacctggtgctggagacaatccattcctttcacaaagactgtaagccttacccaagcattaattttgctgcatagrcggcctgttctcccacaaagcactgagtaagaagaaaaggggcccggataaaccagcagggcctggcagacaacttctggctcccttgccatttaaggtc

SEQ ID NO: 13086 - DNA, 201 bp, Homo sapiens
ttatgaagattctgtgtgtgtgtgtctgtgtgtgtgtatgtgtacaaagaaagtttagagcagcgtgtggcacgtaatgcatattatgtaagtgtagctcyaatgtgagttgttacttgtagagaacagctatgtcaaaaccacaccaaaaacgatttggaaaggaaataatttgactggtcattttgtttatccatcaac

SEQ ID NO: 13087 - DNA, 201 bp, Homo sapiens
caccccttccctcttatcagcttcttgctaccatgcagaaaagtgctgaaggtggcctgccctaaggcagtagcactagagcagggatggggaggacttgstggccagatgcatgtggacatgatggaaagggaagagaagaactgtcaagattttcactatcagtggtataagccccgtagtaatatgcctagtgttcca

SEQ ID NO: 13088 - DNA, 201 bp, Homo sapiens
gctctgccacttagtaattgtgtagatttgcacatgttgctggacctctctttgtctcagttttctgtaaactggggaaaatcttagtaaatctagctaaygtggttgttatgaagattctgtgtgtgtgtgtctgtgtgtgtgtatgtgtacaaagaaagtttagagcagcgtgtggcacgtaatgcatattatgtaagt

SEQ ID NO: 13089 - DNA, 201 bp, Homo sapiens
tagagacaaggcttcactatgttgcccaggctggtctcgaactcctgagctcaggtgatctacctaccttggccccacaaagtgctgggcttacaggtatsagccactgggcctggcctgagttgataatttttgtcatttctttctcacttttctcaggaaaatcatgactgtaaaacagatcagttttgctttagttcc

SEQ ID NO: 13090 - DNA, 201 bp, Homo sapiens
ggtgagatcccactggtttggaggaaggagaggaaagtccccacttgggcaaaaacaatttaggatacctgaagattgcaaagcccagctcctcacaaagrgggtggcagctggggagaagctgaatcagtagacagacaagattgtggtttaacgagttcagggacaagagaaggccccagtaacctacagaagcaacta

SEQ ID NO: 13091 - DNA, 201 bp, Homo sapiens
tctcgaactcctgagctcaggtgatctacctaccttggccccacaaagtgctgggcttacaggtatcagccactgggcctggcctgagttgataatttttrtcatttctttctcacttttctcaggaaaatcatgactgtaaaacagatcagttttgctttagttcccaccctcatcatcaacccctccccagctaccctg

SEQ ID NO: 13092 - DNA, 201 bp, Homo sapiens
caaaaagcggctggaggaaaaagagctttgccaccgggcagtactgctgggtcttgcgtcacagagatgccttctgctcccttcttcagggagacctcagrgtatgaaagtgctgcttacccagcagatgagatttagtccagtcatccatctgcgtggtctctgtggataaagtaagcgtttcattcaacttttaaaaat

SEQ ID NO: 13093 - DNA, 201 bp, Homo sapiens
ctcctgagctcaggtgatctacctaccttggccccacaaagtgctgggcttacaggtatcagccactgggcctggcctgagttgataatttttgtcatttmtttctcacttttctcaggaaaatcatgactgtaaaacagatcagttttgctttagttcccaccctcatcatcaacccctccccagctaccctgcaaaaga

SEQ ID NO: 13094 - DNA, 201 bp, Homo sapiens
agctcaggtgatctacctaccttggccccacaaagtgctgggcttacaggtatcagccactgggcctggcctgagttgataatttttgtcatttctttctyacttttctcaggaaaatcatgactgtaaaacagatcagttttgctttagttcccaccctcatcatcaacccctccccagctaccctgcaaaagagtcaca

SEQ ID NO: 13095 - DNA, 201 bp, Homo sapiens
gaaactggaggagcccgggaactgctttctcctctctaagagtcttggtggtttcttgtgtggaaatgaatgggaagttcaccctggttctgcaaaatggktgcgaaatgtaaaatgtatataccttctatcctactctttatgttccacaaattttggagggaaactgattaactctctagctaccatgttccaggtgcc

SEQ ID NO: 13096 - DNA, 201 bp, Homo sapiens
tgcaaatgataccatcacgaaagtgtacagatgacctacagaatgggggaaatacttacaaattaaatattaaataagggatttgtatctagaataaagamcttttacaattcaataatgaaaactcatttaaaaaatgagcataagatctaaatagatattcctccaaatatgatacacaaattgccaatgaatacataa

SEQ ID NO: 13097 - DNA, 201 bp, Homo sapiens
ctgggtttaaggaattctctgccttagcctcccgcgtagctgggattacaggtgcatgccaccatgcccagctgatttttgtattttcagttgagataagsgtttactgtcttggccaggctggtcttgaactcctgacttcgtgatccactcgcctcggcctcccaaagtgctgggattacaggcatgagccaccgcccc

SEQ ID NO: 13098 - DNA, 201 bp, Homo sapiens
caaaccctgttttgtagtatttgctgattactgtggtgtaaatactcacaccttggctgatttcaagttgcagcttggaacttggagttagaaagagatgygtagtcccataccattttatgtatgtaaagtatttgcactatgccgactaatagacataaataacctcatgagcatagataatagtcacatctactaaga

SEQ ID NO: 13099 - DNA, 201 bp, Homo sapiens
aatttccttgtgaatgctgttaccatattcctggtgtctatgtgagggggtgtgtggtggtatgccggtaagtgttgaacaacctgctctgttggcgggarctaggggaaacaaaccctgttttgtagtatttgctgattactgtggtgtaaatactcacaccttggctgatttcaagttgcagcttggaacttggagtta

SEQ ID NO: 13100 - DNA, 201 bp, Homo sapiens
cctcaagtgatccgcccaccttggcctcccaaagcgctgggattacaggtgtgagcccccaggccctaccctgggcccctcctttctggcccctcaacctrttttcttccagccatgccctagggagagcttggctgtggccttgcagaccctctcagatgccactcaacaagggccaactggagagaaatctctagtcta

SEQ ID NO: 13101 - DNA, 201 bp, Homo sapiens
tatacacttgagcttggcatttttcttaacgcagggctattttaggtgcactgcgcatgttggaggtgcccttgcaggtataggtaggcattgtccatccrtggtaaaaagcaatagaagaaattcttacccgatgcttaatgaattgccaggctggttaaaaaggataacccttgaaacctagggtgtccaactgctaat

SEQ ID NO: 13102 - DNA, 201 bp, Homo sapiens
gttttccgggctgtttgtgtactacacagcctgtgtacctggcaaggcacgctctgctctgccctgccttctgatgagctgactaacaccttatagatgargttcccttagaaccaaagatgccccatgaaactccctaggatgaatgttggaagtccttccaactgggattcccagccggaaaggaaacagttcatctga

SEQ ID NO: 13103 - DNA, 201 bp, Homo sapiens
gtgtccaactgctaatttatatagactggagatatttccatgcctcgcagcaaaatttttctttaaattcacagaagcagcagctatccagcattgtccarttgtgctgagtagctgtcattattgataaacatgtaactggtcatttgtattgttttgagtaggatatggcttatcaggatgcatagtagagaaaaatga

SEQ ID NO: 13104 - DNA, 201 bp, Homo sapiens
gtgagccaccacacccagcctgggggagggtttgttaaagaactgtctgttttatcacatgaccacaagttaaaatgttgggcaatgtccctgaatgataycttttcattagtaactcacatggacccataatctctgaatttaacatgcttttcaggaatgtgttcatattttccacctataaaacctgttttagtaatt

SEQ ID NO: 13105 - DNA, 201 bp, Homo sapiens
tttttgtacttttattgaccattcacatttcttcttttctgaactgcctttccatattctcggtccagctttctataagattgctctcatttactggtgakagctctgtgtaaattaaggaaaccatcaccaccttcgaatggctgactattgtaaatattttaatgtttgtcgtttgtttgcaaccttgtaattttttcc

SEQ ID NO: 13106 - DNA, 201 bp, Homo sapiens
ggccttactcgttttcaaatactcaaatgccattgagtcagatttcagaggcaaatggtgatacctcaggtttgaagttgcaagaagtcaccacatgcttrttatggaaatcgtcagggatatttattccctctcctgagaagcataattgagcctccaaaccacccatcaagatatccacctgtaaaatatttaagaact

SEQ ID NO: 13107 - DNA, 201 bp, Homo sapiens
atttaagaactggtactatgaagacatttcccttatgcaatttgttttccatctaagagcagaacaaggaaaatatagctgactataagttacaaaggcasactcttaagctacaaaatacatctcttcacaggagcacttggagaagggctgaaggcaaaccaaaagtgagcaacaaggagactagtgttctgaaacaga

SEQ ID NO: 13108 - DNA, 201 bp, Homo sapiens
ttacacgtttatggattgaaatggttctgctgaaattttaagtgttaacattgttcaaattttcattactaacacctctcacattgttagaaaacagtttyatgtttgacattttgatcatactaacctgggacattttatgctaaagttctcatttcatgccttaggaatcccctgcttattttgatttcagcacctttc

SEQ ID NO: 13109 - DNA, 201 bp, Homo sapiens
tgtttatgtaagatccataatgactcttgccaattagcaggctgctctcttccaagtggtaacccagggactcaagctcttttcatcttgtggctcagccrtctgacacatgtggcttccagcactgccctgctgttgtctgcacaaagctggtggaagaagtaggaatttgcaggaccatgtgtggagcattttaaggat

SEQ ID NO: 13110 - DNA, 201 bp, Homo sapiens
tctaaaccgatcatcacagaagatattttgtagtgatgaagaaagcttaaatgtctcatttgtcagattggtttaggtagaaaataaggatttccaccccytcatcgtggttcccttttagattttcttgtttgcttttctttaaagctgctgttactcaaacgacagtccgtaaactgcactttattttttataacagct

SEQ ID NO: 13111 - DNA, 201 bp, Homo sapiens
aagggaaggatggaaggaagagagggagagacggagggagatggaggatgacagggagatggagggaggcaaaaagaaaaagggagaaggaaagagaggaragaggggaagggaggaaggaaagaagagagagaaggaggaagagagggaaggaggcacagaggtagagaggcagggagataatggagatcctggccaaaa

SEQ ID NO: 13112 - DNA, 201 bp, Homo sapiens
gtggattacagaattgtgctgggtcctatggagtgtcagaaatagtgaagcttctggagcttcactgtccaatatggtagccacgtgtgactattaaaatrtaaattaattaaaattaaaagttcaattgctctgaaatagcagccacatttcaaatcttcagtagccagatgtggttattggctaccatattgggtagca

SEQ ID NO: 13113 - DNA, 201 bp, Homo sapiens
gactattaaaatgtaaattaattaaaattaaaagttcaattgctctgaaatagcagccacatttcaaatcttcagtagccagatgtggttattggctaccwtattgggtagcaccgatatagaacatttctaccatagtagaatgctcttttggatacatctgctttaaagcattagtccccaaagtgtgaaggatgaacc

SEQ ID NO: 13114 - DNA, 201 bp, Homo sapiens
agtacaagttggtaatgggtaacaggctaaaccatgtggcaccccttccctcttatcagcttcttgctaccatgcagaaaagtgctgaaggtggcctgccytaaggcagtagcactagagcagggatggggaggacttggtggccagatgcatgtggacatgatggaaagggaagagaagaactgtcaagattttcactat

SEQ ID NO: 13115 - DNA, 201 bp, Homo sapiens
gtcccgtacttttcaatgtaagcatattggctctcaatttaaaaatgttattttttacagatagtacacagatgcactgacacaggtaccctctccagtcytctgatggtcaggaattgtgtgcagtatgcagtacattccaaagtcaggctggccatttccccagggagagggtccatgttggaacctttgctccttgtg

SEQ ID NO: 13116 - DNA, 201 bp, Homo sapiens
tgcctataaacataaaattaaaagcctgctgtctgcttagttcaggtattgggtcagcgtcttgtgactatggacaagaggtgtttgactctaggactcasctacctcatctgttaaatgggcaaactgggagggtgtttatctgcatgcaacatctccttccatttgaaaacttttatgaatgtatggaatattattgag

SEQ ID NO: 13117 - DNA, 201 bp, Homo sapiens
tgcttttataaaaaaagtcacagaaacaattatattgtacacagtcctatataatctgctttcttttgtttatagaatactgtgaatgtctttttgttttktttttttttgtttgcgagacagggtctcactctgtcactcaggctggagtgcagtagtgcaatcttggctcactgcaacctccatctcctggatgccagc

SEQ ID NO: 13118 - DNA, 201 bp, Homo sapiens
acttgtttcctgtgagggtgccaggaaactttacaatgaacttcgtgaattaaacctctaccagatgaatagaggtggtggcatggtagcagaaattaggrttaaaaaaatggtttttgatttatgaaaaatttttctgcaggaaattttgatttgttctttgtggattctgaggataaaattaagaccaacattgaggat

SEQ ID NO: 13119 - DNA, 201 bp, Homo sapiens
tggaagggatatttaatttccattaaaacatgaatttcattctgcccttgccatgcttttcttggtcttagcccaacctgagctgctgatattaaggaatrataggataattccataattttcattttaccttttgctttttgttttccatagcagttatctagaggattcccattatgcttcttcattacccggtgccca

SEQ ID NO: 13120 - DNA, 201 bp, Homo sapiens
tgaagttgtttagataaatgtgccaggtgctaagctcagggttattaggaataataattcagtgaaaggaaatttggatgacatgaactcatttccattakacttgagccacacaaatcaatgggaaaagaaacagctgaatccaggataatatctggctatttggagtgggcatgataatggagggagattggggaggta

SEQ ID NO: 13121 - DNA, 201 bp, Homo sapiens
ggcagtgtgcactgtggctgggagttgacacagatccttgtctcccagacccccagtttctatcgagctactgtaactttaaaaagatttaacaaagactmcctccactagctaagctgaaataagaatgtctccggagtttaatggatcaagtagcggtgataggttttatggctcttttttactttagggcatagggaa

SEQ ID NO: 13122 - DNA, 201 bp, Homo sapiens
acagcttctggcgccgcaaacaccttgggtcctagagaaacctgcacacttgtgtctccacctttttacctcttgcgggcatgagtctggtctcagtaatmacattgtccagcccatcataaagggctcttgaacacattttcatcaactttaggttaagtctgtttgggtaaatgcgtcttggagggctgggtagaagat

SEQ ID NO: 13123 - DNA, 201 bp, Homo sapiens
ttacatatactctcaagattgattgcacagttctcctctggcagctcacaaatgtttgactagatcggaaatggcattcgggcatgattaaaaagattctwctgggcttcccagaaattctcagtcctgtgtcgtcaacaacctaactcattgccattgctgcgggatagacacctcccccgtttcccatgattagcaacc

SEQ ID NO: 13124 - DNA, 201 bp, Homo sapiens
tggagcacttgaaaactgctgttttgtgtcagtaggtaaacaacaaacattggtgactactgaattttcagcagatgtgattcctttgtttcacagaaaawctgtatcttttgttctaaatttttttcttctaatgggtataatcctctgttggagagtcctttgatagctaggagtgtgttttcttctttactttcccaa

SEQ ID NO: 13125 - DNA, 201 bp, Homo sapiens
caatgcattacaaatatcaatatgtgggtgcttttttttttctttaccatatattgtttatcagaaacctctgtaccctttcctttaaaggagtcaatatkcatttgtattctgtgctgacaactataaattgatggctagcagttatcaaatgaatgttgatgaaaagcagctacttaacattttcatcccaacaccgag

SEQ ID NO: 13126 - DNA, 201 bp, Homo sapiens
tgaaaactgctgttttgtgtcagtaggtaaacaacaaacattggtgactactgaattttcagcagatgtgattcctttgtttcacagaaaaactgtatctkttgttctaaatttttttcttctaatgggtataatcctctgttggagagtcctttgatagctaggagtgtgttttcttctttactttcccaaagacaattt

SEQ ID NO: 13127 - DNA, 201 bp, Homo sapiens
cactgaaaaagccgggcagtttgcagggctgaggactttggagtagacatctctgttctcgtctgctgcttcccatcattttggtggaagttggtgtgttsgttggttagcacttattccaaattgaattgtataatttcattatagaagtatcacggtggaagaagagggtgacttactggtgtggtcacctagccaggg

SEQ ID NO: 13128 - DNA, 201 bp, Homo sapiens
ggctgttggtggcaagaaaagaagggtgatgggttgggcttatattgtttagtggagcaaaagagatgtgaaacatttgtgtcttaaagtgttttggtcargagaaactaaattggttagaaagtgtgcaattttgcaagctttataaaaatataaaccaatgagtctggactctgttccctaaaggggatgaggaatgaa

SEQ ID NO: 13129 - DNA, 201 bp, Homo sapiens
ggatcttaaagtccaacctcaaggcccagcgctgccacttaacagctctgtgaccctgtaaagtcactcagcctcattgagtcccccatcctcccctgtgyagaatgaggctaatgctagtgctcatttcatagagttgctacaataatcaatgagataatgtgcataaagatttacatacataataactgctcaataaag

SEQ ID NO: 13130 - DNA, 201 bp, Homo sapiens
gaaaactgctgttttgtgtcagtaggtaaacaacaaacattggtgactactgaattttcagcagatgtgattcctttgtttcacagaaaaactgtatcttwtgttctaaatttttttcttctaatgggtataatcctctgttggagagtcctttgatagctaggagtgtgttttcttctttactttcccaaagacaatttt

SEQ ID NO: 13131 - DNA, 201 bp, Homo sapiens
ggtaggcttctctctaaataaatggaaatactaactgtccctggctcatagagctctgtgagggttaggcaacaatgcttacaaagctctccatgcagagmctggcaaatcgtaacctctcaataaatgctagtcattgatgtcacttgaatagtactcgttggctacaactcactgaaaaagccgggcagtttgcagggc

SEQ ID NO: 13132 - DNA, 201 bp, Homo sapiens
tccctaaaggggatgaggaatgaaaatgaaggtttgcaaagacatcttgccagacccttacatattttaatttaaggtggtattactgtcctcattttcargctgaagaaccaagctctgagagagttaatgattttctccagatcattcacattcatttctgttacacagctgggattataatccatgcctgtctgactc

SEQ ID NO: 13133 - DNA, 201 bp, Homo sapiens
aagtatatgtagcaaccaaacagtttcttctttcctaaaactcaaagtgagtcagacttcttaggcttgtagatgttgaggactaagctttgctctttatmttctctttatggatttccctttggaagcagggataagaagagggaaggtctcccagatgtaaatttctcataaatatttgagctccatttcagtaattct

SEQ ID NO: 13134 - DNA, 201 bp, Homo sapiens
tactgtggttacatttggaagtgtttacaaaggtgataagatgtttttatagtttggtgttcatttatcgaccatattaagaaccttcttctatgaaatgsttttagtaggaagtattttgaatgaagaaagcgtattttccacaatatatttggtagattatttttcaaaaccaaaggacttcaaaaatgtcttcctatt

SEQ ID NO: 13135 - DNA, 201 bp, Homo sapiens
taattatctgtatggctttggacgagttgcttttgatctctgatatcaggtaggcttctctctaaataaatggaaatactaactgtccctggctcatagarctctgtgagggttaggcaacaatgcttacaaagctctccatgcagagcctggcaaatcgtaacctctcaataaatgctagtcattgatgtcacttgaata

SEQ ID NO: 13136 - DNA, 201 bp, Homo sapiens
gtagggagtcccaactttttgaatccatccgtgtggcaaatgtagctggacccttgggatgaagacccttcctgcatcctcccaaggagacaagttctggrccataactctagagcaaccccaacccccaggccatggaccaagtgtcaacaatgttgacattgtgaatccctgatctggaggaacatagctttggggcag

SEQ ID NO: 13137 - DNA, 201 bp, Homo sapiens
aaagtgagtcagacttcttaggcttgtagatgttgaggactaagctttgctctttatcttctctttatggatttccctttggaagcagggataagaagagrgaaggtctcccagatgtaaatttctcataaatatttgagctccatttcagtaattctttcattctctgatctgttgcctaatcttctatttagcaagtac

SEQ ID NO: 13138 - DNA, 201 bp, Homo sapiens
ggaagtgtttacaaaggtgataagatgtttttatagtttggtgttcatttatcgaccatattaagaaccttcttctatgaaatggttttagtaggaagtaytttgaatgaagaaagcgtattttccacaatatatttggtagattatttttcaaaaccaaaggacttcaaaaatgtcttcctattagtggacaccagtatt

SEQ ID NO: 13139 - DNA, 201 bp, Homo sapiens
tctacctttgtgaacctgttgctagcaaagaaatatttttccttgtggcaaaagatcaacatctaaacacattgtccacgtctaatttgttagggagggcrtgttctcttctggagggctaagagttggcatgggatctaaatggattctccagaacactttctcacacttctaaagcctgaaaacaaatatttgctttcc

SEQ ID NO: 13140 - DNA, 201 bp, Homo sapiens
acagagcctcccttctacctgctcttacccgggcaccacagttgatgagttattttttggaccatcagcaacacacccaatcattgtacatggaatacttyggggatgcttttttctatattgattttacttcattaaactgagctccagaggagcagaaactttggctaatacatcttggtcttagcttgtaatatctgt

SEQ ID NO: 13141 - DNA, 201 bp, Homo sapiens
gttgtggtctgtgcttgaacctgttgcatttatggtgatggactggcactttactctctctgagccacggccatcaagcccctgtcatagacactgtcccyagtgtcacctggggaatgacactcttcacctgtcatgggagaggcaactgaaaaggagcctgaggtttttctacctttgtgaacctgttgctagcaaaga

SEQ ID NO: 13142 - DNA, 201 bp, Homo sapiens
cctgcccttccctaactggtttcctatgctgtcatgcccacctttgagtgttgccttcactttaaccttctgtgcatgctcacaaagtaattagcatgtaycctccattctgagttaatataaggccccagacccagccacatggggcaactttactgccttcaggtaggggaaccacccccaccacattccctctccact

SEQ ID NO: 13143 - DNA, 201 bp, Homo sapiens
ctcatctctttagattagtgattctatattggtgagggagtggaagagaaatgtgggtgtgttgactatattctccacagaaactttttgaagtagcatcstcactcagcacagaacattttgacaatacacttccagggcaggtggtttcttactatgtccctccctacccccacatactttgggactcagaatgtaggg

SEQ ID NO: 13144 - DNA, 201 bp, Homo sapiens
tggcatggcctttgtatgacacttccttctagccagactcggatttgggggcatcatatttgggatggctgcaccgcaaacaggaaaggccacaggacagytcacaggttctctctgaacagaagcctgtgagcacgtgcctgtcatttaaaagctgcatggcactcttccccctgcatgcgtttctctcaaggtgtccct

SEQ ID NO: 13145 - DNA, 201 bp, Homo sapiens
ccccccatggcttcgtccttattcttataacctgtatgcactgctgaacctgctgaataaccatgtcacagtggcaggagagggactgggtgaacttgagyctcgatgcctggattaaagccttgtaatgatgtttgcaaagcaccagggtgataactgaatggttggcacaggcttcgatgaagcttgtgtccaccacag

SEQ ID NO: 13146 - DNA, 201 bp, Homo sapiens
tgacaatacacttccagggcaggtggtttcttactatgtccctccctacccccacatactttgggactcagaatgtagggagtgtactctcgagggatgcrgcccatacgtgaatgcatggaggcagcatataaggttgcaaagcactgaccttctctttttatgattcccatttattccatagactgtgaagtctgcctg

SEQ ID NO: 13147 - DNA, 201 bp, Homo sapiens
ctgctgatagcccaagttaacatcctcccatgccttggccttcccagaacaaacatggctttggacgcctttgggtggttgggactggctgcctatttttytctaaaacttaagttttaggaaagaattctttccagctttccatcctgaacctgctggtctccaggctcgttcctgcaaatatttcacagaggagtaaga

SEQ ID NO: 13148 - DNA, 201 bp, Homo sapiens
gaccctcaataaggagaatcagagaaagaagaaataaaacatattactccattcccatacttctgtgaagaaatacccgagactgggtaatttataaagaraaagagatttactgaactcagtcgtttcacctggctggggaggcctcaaaattatggcagaaggcaaaggaggagcaaaggcacatcttacatggcagca

SEQ ID NO: 13149 - DNA, 201 bp, Homo sapiens
cacctcccggtttcaagcgattctcatgcctcagactcctgagtagctgggattacaggcatgcgccaccatgcccagctaattgtgtatttttagtagaracgggatttctgcatgttggtcaggctggcctcaaactcccgacctgagatgattcacttggccttggcctcccaaagtgctgggattacaggtgtgagc

SEQ ID NO: 13150 - DNA, 201 bp, Homo sapiens
gagatttactgaactcagtcgtttcacctggctggggaggcctcaaaattatggcagaaggcaaaggaggagcaaaggcacatcttacatggcagcagacmagaaagcgtgtgcaggggaactgccctttataaaatcaccagatctcatgagatttattcactatcaagggaacagcacaggcagatcccatggctttga

SEQ ID NO: 13151 - DNA, 201 bp, Homo sapiens
ttaactgattgcagcaggttagagcacagcatgaagagctgacaatattgaccgactggccctctcagacaaagtttgccaacacccaggtgagcagatayacttatctgtgagcagacgtgattcaggggagattgttgtccctcctttcctaagaaaatgtggaaagatgagaatgttgccaccagtgctgatatggag

SEQ ID NO: 13152 - DNA, 201 bp, Homo sapiens
atatgtcccacaattggcaagtgccataaatatattataggccattatactttctacagtatctttaattgatatgccccatgtctaagaaaaaaagtagyttttcatgatgaaggtgatgaactacttctttccattattctatttcccccttttcttcttcaggctttaaagatatcataataccatttacatttactg

SEQ ID NO: 13153 - DNA, 201 bp, Homo sapiens
atcaaggctgggaggaggtctttccactggttttccgggctgtttgtgtactacacagcctgtgtacctggcaaggcacgctctgctctgccctgccttcygatgagctgactaacaccttatagatgaggttcccttagaaccaaagatgccccatgaaactccctaggatgaatgttggaagtccttccaactgggatt

SEQ ID NO: 13154 - DNA, 201 bp, Homo sapiens
ccccaactccttactcatgcttcctctgtaaaatgatcactccccagtttgacaggaattgcccctggaatcccatctggtgttctaattgttaccaaatycaggcaaatcttgcctgtgatacaggtggtgaagctactggatagaactggagcatctaactggtgtgagatggtatctcattgtggttttgatttgcat

SEQ ID NO: 13155 - DNA, 201 bp, Homo sapiens
ttgtctccatttctgtcccagttacatcaaggctgggaggaggtctttccactggttttccgggctgtttgtgtactacacagcctgtgtacctggcaagrcacgctctgctctgccctgccttctgatgagctgactaacaccttatagatgaggttcccttagaaccaaagatgccccatgaaactccctaggatgaat

SEQ ID NO: 13156 - DNA, 201 bp, Homo sapiens
catgtaccctagaactgaaaatataataaaaaatacatattaaaaaaaaaagaactggagcatcgactttcgttttcatttcaagacccgtcccccatgaycacagaggatgaaaagtctgcttaaattataagctagctaattgcttcttcagttgaagacctaaatgagttttaaagtgaaatgcatatctctaagggc

SEQ ID NO: 13157 - DNA, 201 bp, Homo sapiens
tggggcagcacctttgcttgaacgctggctccagatgaaagaacagattgccgcggagccgcttttccaaggatccctctccccagcatggggcttcatayattattgagagcaaacctactttccaccgccactcctggatgcacttattttgcgagccttattcagaatgtcagcatggatcacttggcaacaaaggcc

SEQ ID NO: 13158 - DNA, 201 bp, Homo sapiens
ggttgtctcgaactcctgagcttaggcagtctgcccacctcagcttcccaaagtgctaggattataggcatgagccaccatgcccggcctaatctaatcarttcctttaaatctgaaactgtccgcctgattctggtttaccacaaccaccagagtcttaagtgtcccaatagccagggtctcatagactctgcttatggt

SEQ ID NO: 13159 - DNA, 201 bp, Homo sapiens
agtgagctgagatggcaccactgcactccagcctgggcaatggagcaagactctatctaccccccaccctgcaaaaaaagaaaagaaaggaaaaaaaatcytggtgcttgtaggagaggcatttatttcttttaggactggacggggcttggagggtttccaggaaacagcctcaacctaaaaatagtagacacagttcat

SEQ ID NO: 13160 - DNA, 201 bp, Homo sapiens
ggctccgagaagctcacccatcaccatttgctctactgcaaaacaggactcattagcaggagctcataaaatgaaactggcagtgagctcatatggaagargcatcacgggcaactcggcttggctcaccagcccctgagctgcccccgagtgaccgctccagccttctttccttccacctctccctcttggccaacttca

SEQ ID NO: 13161 - DNA, 201 bp, Homo sapiens
acctgccatcatggggataaccggaattgatacaatgtcttgattcaagattcagagctcattttttctgtgtcagattaaaaaaaaaacaaaaaaccctyactgatcttttaaatatgtaattcttcctcctcttctccccttgtctctcttctcacccctaccaatgtaatcagttctttttttcttttttggagacgg

SEQ ID NO: 13162 - DNA, 201 bp, Homo sapiens
accacaagcattatcttctttaatcatctcacaatcttatgaaggagatactaatattttgcttgcaaagatgagggaagtgagtttccgaagttgctaartgcgtaaaggaggtggtggtgtcagaatgttatcctgctcagatggttgcatgggacagtgtccagaggaaggcctctgattccttccccagcattaggc

SEQ ID NO: 13163 - DNA, 201 bp, Homo sapiens
taagtctccattccgcttgccaagattaaattgaattattcccgctgccattcagttttactctgcacaaaatacagccaacatttttgcatttctttctyccttcctccttttcttctttctttccttccttccttcctttctcccttcatctatctttgttccgcttttgtttgtttttttttagatcgctgcatgctg

SEQ ID NO: 13164 - DNA, 201 bp, Homo sapiens
gagattcacatatgtagattacattgttatgaaccaacatttataagcaagcttgatctctcagaatgcgtttgtctatctcagattttcaagaatcctcrtacaaattgtccagggtttccacctcgcagttttcttccagggttgctatggcatggaaagtacattgctattttgttatgtaaatgctcaacagactgg

SEQ ID NO: 13165 - DNA, 201 bp, Homo sapiens
gcagaatggaagggaaggatggaaggaagagagggagagacggagggagatggaggatgacagggagatggagggaggcaaaaagaaaaagggagaaggawagagaggaaagaggggaagggaggaaggaaagaagagagagaaggaggaagagagggaaggaggcacagaggtagagaggcagggagataatggagatcc

SEQ ID NO: 13166 - DNA, 201 bp, Homo sapiens
ttccagtttctcaattgcaaaagtgaggctggtcatggggcttggaaccacgccacggacgcatgaagcctccccgtttacatgccaaatccagagcttakgcatccatgctcagggctctctgtggtaggcaacagctggattatttactttctagaatatctcgagttcttaatctgagcagtttcgaaaccaagccca

SEQ ID NO: 13167 - DNA, 201 bp, Homo sapiens
atggcttaccttactttttagacataatttttgttttctgttaaagggtcagttatagataagtatgctcccttgcaatgaaatgaacccactttatcaaytttgaaggaatcaaaattaacttgaatacattgtctttttgcatatgtatgtagtgctttgtataaacatatgaatttgtaggagctgctcttaatgatt

SEQ ID NO: 13168 - DNA, 201 bp, Homo sapiens
ttatactgtgggctgcatcgcttaccaatatttcatctgtttcacttagctgctgttacttactcaataatgtgtggccaatctcacaagatactaattcwttttttcaaatgcagcatcgcttgaagctgtgataaaatatcacacctttggaaatcaaggctcttcttgtttatttatttaactcacattaattagcct

SEQ ID NO: 13169 - DNA, 201 bp, Homo sapiens
tggggcactgagatctatgcatgttgtgggcccactttaagaaaaggagtcaaacatttagtgtggaatactggaaggggtccctagacatgaagggcctyttcaacctaccttttgttggcttcaaggttatgccatattttgcaaagtcaagttggagatggctctcgatatgcatgagtgtgttagactgcttttctt

SEQ ID NO: 13170 - DNA, 201 bp, Homo sapiens
tcttttttttttctaaccactttcccagtgagacttcagttttcattctccccttagcagctttcaaatatgtacgtaacacaaatgttacatgtttgagmatttaaactgaatttggacagggcttctatttccagaaccttctaactctatttctttgtgacctgatagtcttgctctccagggtaaaagaagaggatg

SEQ ID NO: 13171 - DNA, 201 bp, Homo sapiens
ctcctaacatgtcatctgaaatctgggaccacagttccggctggaacacttgtcactaaagctgctgataagcaaagggtgtatcactggtatgggtaacwgttgtgggaggaggaggggtctgacagatagccggatgattttaatgtttatattccactggggtaagctctaacaaagacccatcatttcccagataac

SEQ ID NO: 13172 - DNA, 201 bp, Homo sapiens
ataattaaccctctggggagactaatattagtttattagagacaatttctagttctgtttatttttaacactaaacgatttgttcagattggggaaaaaawttttttttttttttttggttgtggtggcgttggcttttacttggggttgacctttccttatcaaggacatacaaggtgaatagctgggtgataatatatg

SEQ ID NO: 13173 - DNA, 201 bp, Homo sapiens
ggctctccatccttcaaaatccagctcttggcctcatatcttccacaaagccttcccagacctttactcacctgggccattaatcaccttccctctcagtyagctcctacaccatgagtgcttttgtatggtgactgtctggttacaaggtcatcttttcccctggatgagacgccccttggggaaaggaccaagttttat

SEQ ID NO: 13174 - DNA, 201 bp, Homo sapiens
tccatccttcaaaatccagctcttggcctcatatcttccacaaagccttcccagacctttactcacctgggccattaatcaccttccctctcagtcagctsctacaccatgagtgcttttgtatggtgactgtctggttacaaggtcatcttttcccctggatgagacgccccttggggaaaggaccaagttttattccct

SEQ ID NO: 13175 - DNA, 201 bp, Homo sapiens
ctgtatcatgatatcggagtgttagctgttttgggagtacgtgtgctcaggacttgggctgagtggaaaaccagagtatggggttagaaatggaggcagarggactaccatgtcggggaggatgcacaatgaattggacgaaggttgcaactcagtgagcaccgtacctgtagtgtgtcttagtaatagcagatgcccaac

SEQ ID NO: 13176 - DNA, 201 bp, Homo sapiens
ggcctcatatcttccacaaagccttcccagacctttactcacctgggccattaatcaccttccctctcagtcagctcctacaccatgagtgcttttgtatsgtgactgtctggttacaaggtcatcttttcccctggatgagacgccccttggggaaaggaccaagttttattccctgtttaaccttggcctgacaaccta

SEQ ID NO: 13177 - DNA, 201 bp, Homo sapiens
ggtggtgtttttactctaacacctctttcagtacatacatacagtaggtgcttagtagatgtttactgaatgaatggataaacatgtacaaaattatgatmccttgtgttaaatatggtagggaagcaacataatgtgccctggagtttcacagaagaaggggctttcttccagcttggggatggaggtgagctgtcattc

SEQ ID NO: 13178 - DNA, 201 bp, Homo sapiens
aagcaggaggctttgaggtctttttttccctcctgattcggagggaaaaaaaatgttgtttgtgttcatttatggaaattagatctatcacatactcttakgcaatttatgaaatgttaagcaatacccctgaatgtcctagtcccaggaaagttgagagttgagtgcaagacggggacacccaggagccagtaaatcaac

SEQ ID NO: 13179 - DNA, 201 bp, Homo sapiens
acagtggacctcacagctctcctgctaatggtgctgatggctaagctcagctcttacccttgaccactggaacaacttagacatgtcaccagctttctgascctgtctcattacgatgaaaattgtgatacaggttagtgtaaggaccgacaataatgcatataacatcaataatgatggatatagaatttctgcagttat

SEQ ID NO: 13180 - DNA, 201 bp, Homo sapiens
acatacttcttcctgccctggattaacattaccattggttttagtagtcttacgtcattatgtccaaagcttttaagtttacagtgcttgcttagtccagygaccaatggatgtaagtaagttggaaaagggcaaaggatttagaatcatgagggttgtattcaaactgcagcctctactcccttttagttacataatttt

SEQ ID NO: 13181 - DNA, 201 bp, Homo sapiens
gccacaacagcctcttcttttctcttaaatcttccagcaattcttcaactttgcctgtatatttatcatacaacataatcctagtatttagtaaatgcttrgtctttgatttcttattttcaaatgcatgtctttagaaccagaatgtgtgtagctgttttctggcctgaatttgggctgagatgatgagaagtttagttg

SEQ ID NO: 13182 - DNA, 201 bp, Homo sapiens
ccattggttttagtagtcttacgtcattatgtccaaagcttttaagtttacagtgcttgcttagtccagtgaccaatggatgtaagtaagttggaaaaggrcaaaggatttagaatcatgagggttgtattcaaactgcagcctctactcccttttagttacataattttgaaatcatttgacatttctgaggttaatttt

SEQ ID NO: 13183 - DNA, 201 bp, Homo sapiens
attctggaacacgaaggaggtatgaaaagggcttcactcgtttcatggaaaagctcagaacagtttgtcgacttggaaacacaggccctgacagcgtaccmaggtcaccctgcccttcaatcctgctgatagcccaagttaacatcctcccatgccttggccttcccagaacaaacatggctttggacgcctttgggtggt

SEQ ID NO: 13184 - DNA, 201 bp, Homo sapiens
gcaagaattctggaacacgaaggaggtatgaaaagggcttcactcgtttcatggaaaagctcagaacagtttgtcgacttggaaacacaggccctgacagygtaccaaggtcaccctgcccttcaatcctgctgatagcccaagttaacatcctcccatgccttggccttcccagaacaaacatggctttggacgcctttg

SEQ ID NO: 13185 - DNA, 201 bp, Homo sapiens
tttacagtgcttgcttagtccagtgaccaatggatgtaagtaagttggaaaagggcaaaggatttagaatcatgagggttgtattcaaactgcagcctctrctcccttttagttacataattttgaaatcatttgacatttctgaggttaattttctacatcagtttagctgctttaggccgcaagttattaacacccact

SEQ ID NO: 13186 - DNA, 201 bp, Homo sapiens
tgagagaacaagtctatgttttcttgagacaaagtcttgatctgttgcccaggctcgagtgcagtggcagcatcttggctcactgcaacttctgcctcccrtgttcaagtgattctcctgtctcagcctcctagggagctgggattacaggtgtgcaccactatgcccagctaatttttatattttcagtagagatggggt

SEQ ID NO: 13187 - DNA, 201 bp, Homo sapiens
attttttcctgtgcagcaattttaactttctatattcaaatatactctgaatgcacagtgaatttggcagaataccatttaagtcttgtattttccaaagytagtcaacgtccaactgccaatgttgcctgaacaggaaatatttatacctgaaagcgtccaggtgagagtcaggaaagccatgaaggtgcaactggcata

SEQ ID NO: 13188 - DNA, 201 bp, Homo sapiens
atggcaagaattctggaacacgaaggaggtatgaaaagggcttcactcgtttcatggaaaagctcagaacagtttgtcgacttggaaacacaggccctgasagcgtaccaaggtcaccctgcccttcaatcctgctgatagcccaagttaacatcctcccatgccttggccttcccagaacaaacatggctttggacgcct

SEQ ID NO: 13189 - DNA, 201 bp, Homo sapiens
ggatagggtaatggtgttgacacaggcactgttgaatacgtatgtacatattttaatagttttctcattaatcaaatggaaatgctatcgattttataggrtcgttgtgagaagaagtgagaattgaaatgaaaggcatctagtcttccccggtccccatccacttgacccaccatacctcaagccacttctggctccatg

SEQ ID NO: 13190 - DNA, 201 bp, Homo sapiens
aaggcccagatttagttctcattgtaggaaaaagggccagaataccttgcccatttttgccttgggaagtgagctcaatgaaatacatcttcatatgcccrttttacagaagcagcaactgagggctgttgtactgaggcttgcaatggccacctcaacttttaggtctctgaggcagcaatgggacccttgccggggcct

SEQ ID NO: 13191 - DNA, 201 bp, Homo sapiens
tgtgcagcaattttaactttctatattcaaatatactctgaatgcacagtgaatttggcagaataccatttaagtcttgtattttccaaagctagtcaacrtccaactgccaatgttgcctgaacaggaaatatttatacctgaaagcgtccaggtgagagtcaggaaagccatgaaggtgcaactggcatactgatgtca

SEQ ID NO: 13192 - DNA, 201 bp, Homo sapiens
tgacccacatggattgccttgaagccgtttctttttccttccctcgttaggagtaccctcaccctaaccccagcaaagcatgtctagggtctcacaataayagcaggtctcagaaagataaaataattctgaatgttacaactcgtcccatttaaggctagacataaatctatcacagatcctttggaacatcgatggcaa

SEQ ID NO: 13193 - DNA, 201 bp, Homo sapiens
ctcccaggttcaagcgattctcctgtgtcagcctcctgagtagctgagattacaggtgtgcaccaccacgcacggctgatgtttgtatttttagtagagaygggatttcaacatgttggccaagctcgtctcaaacctgcctcagcctcccaaagtgctgggattacagatgtgagccactgcacccagcctgtagtttct

SEQ ID NO: 13194 - DNA, 201 bp, Homo sapiens
ttcaaaagttgctgccttccaaggggaaaaggtctggtcttgtaatttctggtctgtgcgtgctgtataaggaagaaggtttgggtagggaagcaacagastacccactagtgagagggaggacaccgctggtctgtgctcaacagccaggccagcaccacatgaataaagcatgatggcaattgcctgactctgtcctcg

SEQ ID NO: 13195 - DNA, 201 bp, Homo sapiens
ctgtttgtaacatgatttaagcactaagctattgaattttggagtgcattaaaaaaaatatcgagtggaaaaaggaatatttcttagggaggaaaaaccckacttttgactttataatattaagttcgttcatatctctcttagattcttatataaattttattgacctaatgttctgtacagtagtccttatttacagtt

SEQ ID NO: 13196 - DNA, 201 bp, Homo sapiens
cttcagtgctttttcaggactatgttatagaatacttatggggcatacgtgtaaatgaactgtcaaccttaaaatctaaacaaacagcttgtttgtggttygtcctgaaatcctccctgctcacaaaacagccagctacttggttttctaaaagacgtaattttgcaggcagacttcgtagagccattctgtgcagaagaa

SEQ ID NO: 13197 - DNA, 201 bp, Homo sapiens
agacgggatttcaacatgttggccaagctcgtctcaaacctgcctcagcctcccaaagtgctgggattacagatgtgagccactgcacccagcctgtagtktcttatttaatgtctgtccccccttctcttgacagtggtgtttttgccttcacactactgtatccctggtccataccgtaaatgttctgtaaatgtttgt

SEQ ID NO: 13198 - DNA, 201 bp, Homo sapiens
tacagagaataggagagaaaatagagctccaaggtggaggaaaagacaactgagaggaggctattgtgatgttttattaccataaactgccaagggttagycgtagccctccatctgccagctaattccggtttcattaatatgaatattctcacgcttccagaaggaaattcttggaatgttatggatctctgtagcagg

SEQ ID NO: 13199 - DNA, 201 bp, Homo sapiens
aaaaaccctacttttgactttataatattaagttcgttcatatctctcttagattcttatataaattttattgacctaatgttctgtacagtagtccttawttacagttttggtttccaaggtttcagttatacattgtcaactgtggtacaaatatattacttacaatacgatattttgagagagagagaccacatttat

SEQ ID NO: 13200 - DNA, 201 bp, Homo sapiens
ttttttttttttttttcttcagtgctttttcaggactatgttatagaatacttatggggcatacgtgtaaatgaactgtcaaccttaaaatctaaacaaamagcttgtttgtggttcgtcctgaaatcctccctgctcacaaaacagccagctacttggttttctaaaagacgtaattttgcaggcagacttcgtagagcc

SEQ ID NO: 13201 - DNA, 201 bp, Homo sapiens
acgggatttcaacatgttggccaagctcgtctcaaacctgcctcagcctcccaaagtgctgggattacagatgtgagccactgcacccagcctgtagtttsttatttaatgtctgtccccccttctcttgacagtggtgtttttgccttcacactactgtatccctggtccataccgtaaatgttctgtaaatgtttgtaa

SEQ ID NO: 13202 - DNA, 201 bp, Homo sapiens
gatctctgtagcaggcacatgcaacgtccagtgcttccctgctggtaatgtggcggttttattatgcatgccatacccatgctctctatttcctcgatagrccttatagaaatcaccatgcttccttttagaagaaaatgatggtatcacatggagaacgagctgaggagcttgacaatcttggcaaggcttatcaaaaga

SEQ ID NO: 13203 - DNA, 201 bp, Homo sapiens
tgattctagatgttttttaggaaacccaaagaaagtatgaaaaagcccaagccaagtccttccactgttgttcccgggcctgtgtgtgctgtgtgtctttsctgggagaaggtcagagctggagtggggcactcgattccggcaagagaaggcaaacaaaagaagccacaacagtctaggaagaaatctttaatttctatt

SEQ ID NO: 13204 - DNA, 201 bp, Homo sapiens
agccactgcacccagcctgtagtttcttatttaatgtctgtccccccttctcttgacagtggtgtttttgccttcacactactgtatccctggtccatacmgtaaatgttctgtaaatgtttgtaaatgaatacatgaaagatgaccaggtgctgaatcagtgagagtccttaatgtacttcttatcatttatccctctga

SEQ ID NO: 13205 - DNA, 201 bp, Homo sapiens
gaagcacacacagctgttatcttccagaaacactgcttacagaggtaattgctcacagattttagggtttacagcaggtatcacaggatttcaaatttaaraggggggtgggggcctgtgttcaaagtcttaagaatatccaagggatgtatgatgtatgcataattacctgaaattgaaactactgtagtttaaacactt

SEQ ID NO: 13206 - DNA, 201 bp, Homo sapiens
ggaaatgctctcagtctttaataacagtcttaatcgtgtgtagagcagagattgacaaactatggcctgccggctaaatctggcccagtgccttttttttwataaataaagttttattggaatacagacacgttcatttgggtagacgttgtcgatggccgctttcacaacaatagcagagttgagtgatcgtgccagaca

SEQ ID NO: 13207 - DNA, 201 bp, Homo sapiens
aacatgatcccacttaatcctccacttcacaattctgaaaagtcaacaaatttggcccatggtagagaggaggaaaccaagacttgaaacattaaataacrtgtccaaagtctcccatttcagagacaggggcatttggctccaggtttttctgactctagacagtagtttgtttttagcacatcaaatgtctgagacttg

SEQ ID NO: 13208 - DNA, 201 bp, Homo sapiens
ttactgtaaggtatctaagacttctgggtgtgggttttaaatatattttggatgagctttgttcatgtttacacatggccaccaggtcggccacaaagctrtggctctggtcagtctgactctctttagcaggaatcacgtgacaatctgtgtctgtgattagctccgtggatattactaggtagatttctcacttgtcct

SEQ ID NO: 13209 - DNA, 201 bp, Homo sapiens
tactctcctgatagccactaaagggggaattggatattgtctatcaattggttggtctctgaactaaggctgtatctaattacaaggcattgtatcggttstgatttattaaccatttacttggctttggagaaggcagcatttttagtagtactgttgagcctgcatgtagcttttccaggagggcagggtgcctggata

SEQ ID NO: 13210 - DNA, 201 bp, Homo sapiens
gagcctcacactccctggacaaagacatgaaaaactctggatgatttggaagggagatctagaaatggtgaaaggactggcaagtgcctctgtgctgataytgtacctgggctcagtggtctggctaaaggagaggtgctggggccaggtgacaggcgagtctctatacggcaggcccaaaaaatggaggtgcaggcttca

SEQ ID NO: 13211 - DNA, 201 bp, Homo sapiens
cggttgtgatttattaaccatttacttggctttggagaaggcagcatttttagtagtactgttgagcctgcatgtagcttttccaggagggcagggtgccyggatatctgatcttacagttattactttgtgtcatatataattttgttttctccctgcaacaaataaatctttgggactccggaagaaaaaaaaatggga

SEQ ID NO: 13212 - DNA, 201 bp, Homo sapiens
ttctcaattgcaaaagtgaggctggtcatggggcttggaaccacgccacggacgcatgaagcctccccgtttacatgccaaatccagagcttaggcatccrtgctcagggctctctgtggtaggcaacagctggattatttactttctagaatatctcgagttcttaatctgagcagtttcgaaaccaagcccacattaat

SEQ ID NO: 13213 - DNA, 201 bp, Homo sapiens
gagaaggacccggttggctctgcaaaccgcatttccttggctgaacgccagaggagagaaatgatccggcaagaagacacaccattccccgtcagcccctwcccgacccttgcacccctggatcttctgctgagtatcggattggtctgcgtccaagagctcctcgcttggccagcaggggctgcctggagaaggggagga

SEQ ID NO: 13214 - DNA, 201 bp, Homo sapiens
ttctgctgagtatcggattggtctgcgtccaagagctcctcgcttggccagcaggggctgcctggagaaggggaggacaggcttcgagttttttgggtagkgacttctgtggacgtgaaaagactgcaccagaaatcggaggcagccctccaaacataacttggcctcttcgttctccctgtggacacacaggctgtgttc

SEQ ID NO: 13215 - DNA, 201 bp, Homo sapiens
aaaaataatgataaagattgtgtgatcaagtatagcagccctgtggtgtttcctcagaatggtgtattacagaaaaggaaaaagccatatacatggagaaraaactcccgatatttaatattatcaattgctggttcctgtaaatttgcatttatggatcacattataaaagcaattactcttatggattgttcatgcaga

SEQ ID NO: 13216 - DNA, 201 bp, Homo sapiens
tgaagatgctgaggttgagggaagaaataaatgttaatgcaaagtgcccagtttagtgcctgccaagagtaactggtgggtctgtgtcaccttctgacatkatcagtgtgattgtctccaacgcatccatggaagtgaaaccgttggaggaagctaatgccgtgagccagctgttggttatgtttttgttttgtttttctt

SEQ ID NO: 13217 - DNA, 201 bp, Homo sapiens
cccccttcacatacttatactgtgggctgcatcgcttaccaatatttcatctgtttcacttagctgctgttacttactcaataatgtgtggccaatctcamaagatactaattctttttttcaaatgcagcatcgcttgaagctgtgataaaatatcacacctttggaaatcaaggctcttcttgtttatttatttaactc

SEQ ID NO: 13218 - DNA, 201 bp, Homo sapiens
gtaagaggtttgagggaaaaataatactgagttttgagtgtttctgattttaaaaatgtgttcagtagaattaaacgtgttcaccaaaacccattttatcmctttaaattattgggcaattaattgtatttacttagcattgaatgcatgattagaaatggaatttttaaaaaagcaatactcaagtggagtgagttcatt

SEQ ID NO: 13219 - DNA, 201 bp, Homo sapiens
taaatgttaatgcaaagtgcccagtttagtgcctgccaagagtaactggtgggtctgtgtcaccttctgacatgatcagtgtgattgtctccaacgcatcyatggaagtgaaaccgttggaggaagctaatgccgtgagccagctgttggttatgtttttgttttgtttttcttttttacttgctggatagtgggttctgt

SEQ ID NO: 13220 - DNA, 201 bp, Homo sapiens
agtggtggcctacttacagtgcatcgcccactctgatttagatgagcaagagctgctgagttgtagatttctagtttctaaacaacaataagtcttgcccscagatagcctcttagcagagccaaaagccagcagagagaagactcagcatttgctttggagtaagtttgtgtgtgtatgtttatctcccttttactcatg

SEQ ID NO: 13221 - DNA, 201 bp, Homo sapiens
tatccactgccctggtgggggaatcagtgaggctaggaatcactggaaaatgacattccttgagactccttcaatgggtagagtttgctttagcttttcawgtatcttactgtatgatggttgcttttgggttgaattccaccttgggttcaattcaacatgaaagttaaccttttggtgaaggaatgatccacgggaaat

SEQ ID NO: 13222 - DNA, 201 bp, Homo sapiens
atgccgtgagccagctgttggttatgtttttgttttgtttttcttttttacttgctggatagtgggttctgtttattgagaaatatttacatccgtctaawtcaggtgcttgctagggttcttggcacacagagcatcccaccaataaactgtggttcccaacaaggcttgcaactgaatctgggcaacaatgaacatgac

SEQ ID NO: 13223 - DNA, 201 bp, Homo sapiens
ggagtggtggcctacttacagtgcatcgcccactctgatttagatgagcaagagctgctgagttgtagatttctagtttctaaacaacaataagtcttgcycccagatagcctcttagcagagccaaaagccagcagagagaagactcagcatttgctttggagtaagtttgtgtgtgtatgtttatctcccttttactca

SEQ ID NO: 13224 - DNA, 201 bp, Homo sapiens
ttgtcagttcaggagggtagaggataggggggaaaaggtgctactggcatctagtgggcaaaggccagggatagtgctaaggatcctgcagtgcaaaggascatgcccaccacaaaatatcagcagtgccgaggttgggaagctctgtgccattgtgcaaagattcaaggtggctatgtcacaggactggtacatgtcctt

SEQ ID NO: 13225 - DNA, 201 bp, Homo sapiens
ccttgtatctactgctgtcgtttagattaggaacagattgccagatgtggaagaaatagcctcattagtaacttttctgtaagcaatctccttatttcttkttttttgttcttttgttttttgtgtgtgcttctgcgtgcacctcctctatggctccccccaccaaatttctgtgtcttcatttgcaactctcttttctcc

SEQ ID NO: 13226 - DNA, 201 bp, Homo sapiens
tagtttagaatgaaattttaaatacactagtatatgtaattaaaattgtatatacgttttagtcaaccatcagctgacttattcatgttctgtggactctrtggtgggtggggtccaagcctccctgaagcagatctctatcctgtcaccctgctggaaatgaaacacttaggggttagaaggggatcaaggaaagtccga

SEQ ID NO: 13227 - DNA, 201 bp, Homo sapiens
tggatttggcagctggttttgtctggatttgaaagggaggtaatcaggggtgtgctgggagggccagaacgatccacccacgtgttggtgccacccggcartggaaaagcctctggcctcggccttctccggaaggttgtccgcggtgccagtgagagctgcttttcaccttacagcagccccggcctatctctcaggagg

SEQ ID NO: 13228 - DNA, 201 bp, Homo sapiens
tcattatatgcctccaaagactttgtgtttcctgtgtttgacatcgagatagaatttttcataaccctttactagtaataaatttgattgttaagggaccrggttaatcttatttctaataccagcatctgattttaaaaccctgatttaggagcattttctttctgctaccttcctaaaacgcatgggtggaaatgtata

SEQ ID NO: 13229 - DNA, 201 bp, Homo sapiens
gatatccagtatattccatgaaacaaatatcatgaatttattccatgaaacaaatatcgtgaatatattccatgaaacaaaatactgtgaaatcataccastgatttttgaagaaacctaatgaaaacagcatgctcctatatcttttttctgggtgatctttagatatctcgtcttccaaacttttgtgtagcattgtct

SEQ ID NO: 13230 - DNA, 201 bp, Homo sapiens
aagcagaatggaagggaaggatggaaggaagagagggagagacggagggagatggaggatgacagggagatggagggaggcaaaaagaaaaagggagaagkaaagagaggaaagaggggaagggaggaaggaaagaagagagagaaggaggaagagagggaaggaggcacagaggtagagaggcagggagataatggagat

SEQ ID NO: 13231 - DNA, 201 bp, Homo sapiens
aaggggtccctagacatgaagggcctcttcaacctaccttttgttggcttcaaggttatgccatattttgcaaagtcaagttggagatggctctcgatatkcatgagtgtgttagactgcttttcttctattttttaaaaatgcacccaaatgtaaaagacacttttacctttttgatttgatgttgaaggtcatttgaaa

SEQ ID NO: 13232 - DNA, 201 bp, Homo sapiens
cgatgtgttgttttctttgttcttttttttgagacagggttttgctgtcacccaggctggagtgcagtggcagagtctctgtgcactgcagcctccgcctyccaggttcaagtgatcctcctacctcagcctcctgagtagctgggactacagttgtgcgctaccacacctggctaccgtgtcttgttttcaatgcagtat

SEQ ID NO: 13233 - DNA, 201 bp, Homo sapiens
gacaggcgtgagctgccttgcctagccaaataactccattatttaagaaaaattaaccagtatttattgaatacttactgggccctgtgctaagtgctttscatgtgatttctaatttcctgaccattctatgaagtggctactataattatcctgatttcccaggcagagaaactgaggcttagagagttgaagtaatca

SEQ ID NO: 13234 - DNA, 201 bp, Homo sapiens
aaagtcatatcttacatggttggcagcaggcaaagagtgagcttgtgcagggaaactcccccttataaaaccatccgatctcgtgagacttgttcactatsacgagtaaagcacaggaaagacttgccctcatgattcagttacgttccaccggggccctcccacaacacatgggaattgtgggagcgacagttcaagatg

SEQ ID NO: 13235 - DNA, 201 bp, Homo sapiens
ttttttttattattttttgagacagagtcttgctcttttggccaggctagagtgcagtggcgcgatcttggctcactgcaacctctgtcgattctccttcmtcggcctccgtagtagtcaggactacaggcatgcaccaccatagctggctaatttttgtatttttagttagacaccaggtttcaccatgttagccatgct

SEQ ID NO: 13236 - DNA, 201 bp, Homo sapiens
cctcttcattgtccccttcatacaaatagatagcttttagtgagcagctactctgcctggcactgttctaaacacatgacaccaatagctcactcagattsccgcctctcaacagggaaactgaagcacaggaagtttcagtgatgcacttaggcaaccagtaagtggcagggtcggcattgaggtcaagactggttggac

SEQ ID NO: 13237 - DNA, 201 bp, Homo sapiens
aaacccctaaattgtggtgcctcagtgatcttctataacataagttgatagtcaataattgcttaatgggaatcataaatatgagtttatttatatgtgtrtatatatatatatataaaatatatttccatgaatatactgaatgctaagccctccccactttttttttcttttttaaattcagaaatttctagttgtgtt

SEQ ID NO: 13238 - DNA, 201 bp, Homo sapiens
attctacggtggctctttacccattgccatcattttgtaggcagtgagtgcccgcatcagtgggcgttttatgttgcaccattttctgagcaatgtctttsgtccaccattaagcatttgtggccgcccaccccacaatatgctttgctttctgctttcagaaacaatactggtgacctgttttaagaaaagctgaaaagc

SEQ ID NO: 13239 - DNA, 201 bp, Homo sapiens
ccaaagcctgtgtttttcttgctcacatgtgagtcttctccttgcttcaaccctccccgctgacagccacaagactctgcctccctgcagcctgtggaacrtaatattcgttgggatcatacattgaccaaagatccgccatgtctttgcaactaacatactcactcatgacttcacgtggctatgtacaagaccacatct

SEQ ID NO: 13240 - DNA, 201 bp, Homo sapiens
agatttggagtcagatgtcatattcctgccagcaggtttagcagtcgtgggactagggaagtggcaatggcaggagcaactggaaatgtcttttttttttyctcctttttcctgaatatggaaccaaagcctgtgtttttcttgctcacatgtgagtcttctccttgcttcaaccctccccgctgacagccacaagactct

SEQ ID NO: 13241 - DNA, 201 bp, Homo sapiens
atctctcttagattcttatataaattttattgacctaatgttctgtacagtagtccttatttacagttttggtttccaaggtttcagttatacattgtcamctgtggtacaaatatattacttacaatacgatattttgagagagagagaccacatttatgtaacttttattacaatttattgttataattgttctattat

SEQ ID NO: 13242 - DNA, 201 bp, Homo sapiens
tcctttcacaataaccctatccttactgttgaagacttgtggaaaagggacatggcccagggaaccagagtggtttgggaaagcactttgtcaagaggctkggggaccccagggtggaagctgccatgcgcatgaggctgtgttagcagaggcagtggcagaagaagacattgcaaacctgcaaaagcaacctctgaggat

SEQ ID NO: 13243 - DNA, 201 bp, Homo sapiens
ttgacctaatgttctgtacagtagtccttatttacagttttggtttccaaggtttcagttatacattgtcaactgtggtacaaatatattacttacaataygatattttgagagagagagaccacatttatgtaacttttattacaatttattgttataattgttctattattgttgctcatctcttactgtgcctaattt

SEQ ID NO: 13244 - DNA, 201 bp, Homo sapiens
gcacccagcctgtagtttcttatttaatgtctgtccccccttctcttgacagtggtgtttttgccttcacactactgtatccctggtccataccgtaaatkttctgtaaatgtttgtaaatgaatacatgaaagatgaccaggtgctgaatcagtgagagtccttaatgtacttcttatcatttatccctctgaggtaggc

SEQ ID NO: 13245 - DNA, 201 bp, Homo sapiens
taatttataagtatactttattgtaggtatgtatgtataggaagaaatgaaatatatgtagggtttggaaccatctgaggctttaggcatctactgggggwcttggagtatatcccctgtgcagaagcggaggctactgtacatacatttgcctgtaagtgagcgcgttcttggattttgttgaatggtgccactgattat

SEQ ID NO: 13246 - DNA, 201 bp, Homo sapiens
tccctctgaggtaggcaagggattatagtttagaatgtgtaaatacgtaaaagataaggcaaggagacctgctgagagtcacacagcaagcccccaaggtyccccaggctcatggtcaaatgacatgtaagggacgtatccagcggtgtgggtatgtttggagggaatgaatgtaaggagagagaggtgaggcacaggaga

SEQ ID NO: 13247 - DNA, 201 bp, Homo sapiens
aagaaatgaaatatatgtagggtttggaaccatctgaggctttaggcatctactgggggtcttggagtatatcccctgtgcagaagcggaggctactgtayatacatttgcctgtaagtgagcgcgttcttggattttgttgaatggtgccactgattatgggtcagagcttgttgaaagggtattaatccattatttact

SEQ ID NO: 13248 - DNA, 201 bp, Homo sapiens
tacgtaaaagataaggcaaggagacctgctgagagtcacacagcaagcccccaaggtcccccaggctcatggtcaaatgacatgtaagggacgtatccagyggtgtgggtatgtttggagggaatgaatgtaaggagagagaggtgaggcacaggagagacaggatgagctttagaggtagacagctctcgggtccagccc

SEQ ID NO: 13249 - DNA, 201 bp, Homo sapiens
gtccctttttcttggaatgtcagcctgaccctgaaggtattctcctaccagcagagccttctttgatgccccgtcttcaacctgccatgttttcccatctstgaggcttctattttagagacttttcctccagaactggcttatatcatcctgtgttgctgcatccgatcacaggtctgtggctgacctgggcagcgtagt

SEQ ID NO: 13250 - DNA, 201 bp, Homo sapiens
aaccctccctaagcagctattgagcctcacactccctggacaaagacatgaaaaactctggatgatttggaagggagatctagaaatggtgaaaggactgscaagtgcctctgtgctgatattgtacctgggctcagtggtctggctaaaggagaggtgctggggccaggtgacaggcgagtctctatacggcaggcccaa

SEQ ID NO: 13251 - DNA, 201 bp, Homo sapiens
ctagatgcttaagaaatgttaactactattgttattggcttgcagtagaaattaaagattatgaatgttcagcattcagaatatactagatactcaataascattattgctgtcattattaacattattttccccagctttactgaggtatgagtgacaaaaatttcatatatgcgcatgagtgtgtgtgtgtgtgtgtgt

SEQ ID NO: 13252 - DNA, 201 bp, Homo sapiens
cctaagagactctcagtaaccagcagtcatcaccaccgtcgtcgtctttttttttggccattacagttgggattagactaaccctccctaagcagctattragcctcacactccctggacaaagacatgaaaaactctggatgatttggaagggagatctagaaatggtgaaaggactggcaagtgcctctgtgctgatat

SEQ ID NO: 13253 - DNA, 201 bp, Homo sapiens
cgaatcacgaggtcaggagattgagaccatcctagctaacatggtgaaaccctgtctctaccaaaaatacaaaaaaattagccaggcgtggtggtggggcscggtcgtgggtgcctgtagtcccagctactcaggaggctaaggcaggagaatggcgtgaacccgggaggtggaggttgcagtgagccaagatcgcaccac

SEQ ID NO: 13254 - DNA, 201 bp, Homo sapiens
cattacacgtcaacaagaatatgggttttgaacccagacctcagtttgaatctgagttccagcactgccccgttgcttggccgtgagttacttcacctccwttagcctctgtctcccctccactacaataacacctgcctggtggggagtgaggatattgtgcgaatcagaagtaataacaggtcgttggcacctaagaga

SEQ ID NO: 13255 - DNA, 201 bp, Homo sapiens
gcaccactgcactccagcctgcgtgacagagcgagactccatctcaaaaaaaaaaaaaaaaaaaaaaggctgtgtgtggtgactcgtgtctattgtcccasctacttgggaggctgagacatgaaaatcacatgaacctgggaggtggaggttgcagtgagctgacatcgcatcactgcactccagcctgggtgacagagt

SEQ ID NO: 13256 - DNA, 201 bp, Homo sapiens
ccacgcctggctaatttttgtatttttagtagagatgaggtttcaccatgttggccaggctggtctcgaactcctgacctcaagtgatccacctgccttgscctcccaaagtgttgagatcacaggtgtgagccatggtgccaggcctctcctgtctttaactggggataatgtgtgcagaattccccctaaaggatctat

SEQ ID NO: 13257 - DNA, 201 bp, Homo sapiens
cgagactccatctcaaaaaaaaaaaaaaaaaaaaaaggctgtgtgtggtgactcgtgtctattgtcccagctacttgggaggctgagacatgaaaatcacwtgaacctgggaggtggaggttgcagtgagctgacatcgcatcactgcactccagcctgggtgacagagtgagactgaaaaacaaaaaaacaaaaaaaaac

SEQ ID NO: 13258 - DNA, 201 bp, Homo sapiens
aagttatgcttcccagcctctaggaaagcataggagttaaggagaactgaaatctggggcagttataaatcttcccttatgtgtacaacagtttaaatcarttggtcatctaccaaaatctgaggaacaagagcagctttagaaaatgggctgggcatggtggctcatgcctataatcccagcacttggggaggccaagac

SEQ ID NO: 13259 - DNA, 201 bp, Homo sapiens
gcacctcatcaatgtattttttctgccttgctttatagtgttttaaatccgcctcggcctttgttcctgaatgagcacccgagaaggggagaaagtgactmtctggccttagtatgtgtaacaaattatttaatgaacatttaaccaagatttgcaattcccctagttttatcttcccggtttccttttcttctgtgtgcc

SEQ ID NO: 13260 - DNA, 201 bp, Homo sapiens
gcagacactgtgaatcaaacccaccccctgcactgcccccctccagtgagcgagttcttgaacacttactggtacaccactgtcaccaaccctgctttttrtagacatgtcctttaagcaaagcaattcatgggaaagtaaatttaattatcagaccatttcattagattcctcactgccacaaacaggtggttgtggtga

SEQ ID NO: 13261 - DNA, 201 bp, Homo sapiens
agaacagtttaacttgaaaggaaataaaaaaaggagactaacatgggcccacagacattgtatttcataaattttggatgaaaactgaacctaccatcatktattaagagaatggatattttcatgtcagaaattataggaaggatacagttatgggatgaggagcaattcttttttttttttttttgaggtggagtctca

SEQ ID NO: 13262 - DNA, 201 bp, Homo sapiens
ttcttatttggagatgctgttcctctcaagtgggaaaaatttggttatctcaggtggtaaagatgcctttgtttaaaatattcttctgttagtggggacawtaatactactaatttctagtactgacgcttctcatgcaatttaatcagtaggaacctgtttgcatgttcatttgaggaagtaccaaagccaaaagtagct

SEQ ID NO: 13263 - DNA, 201 bp, Homo sapiens
ccctggacctcgctctgctccgtagcgtgcagcattttgctgaagcattcaaggccaagaatgtgtgagtgttccagtggagggttatagatcataatttyttgctattgtaatatctttatcagatgaacacaattgggagaatgcaaggctgttgtgttgtcttggcgtccaaacaggaggctcatttatattggccct

SEQ ID NO: 13264 - DNA, 201 bp, Homo sapiens
attgtgagccacacatgcaagggatctaggctgcatgctccttacgaaaatctaatgcctgatgatctgtcactgcctcccatcaccttcaagatgggatygtctagttctaggaaaacaagctcagggctcccaccgattgtacattatggtgagttggataactatttcattatatattacaacgtaataataatagaa

SEQ ID NO: 13265 - DNA, 201 bp, Homo sapiens
ccataacacatttactgtaacttgataccatgaactacacttgctgttatttatcatttctttttattttctctcattgcagcataaagccaaggtagaarcaatgaccctggacctcgctctgctccgtagcgtgcagcattttgctgaagcattcaaggccaagaatgtgtgagtgttccagtggagggttatagatca

SEQ ID NO: 13266 - DNA, 201 bp, Homo sapiens
tgcaaatgtgtgaggaattatagttgaaaggggaaagaacatttcagtttttcatttcctgcgtcactgtttttcttatttggagatgctgttcctctcamgtgggaaaaatttggttatctcaggtggtaaagatgcctttgtttaaaatattcttctgttagtggggacaataatactactaatttctagtactgacgc

SEQ ID NO: 13267 - DNA, 201 bp, Homo sapiens
cacacatgcaagggatctaggctgcatgctccttacgaaaatctaatgcctgatgatctgtcactgcctcccatcaccttcaagatgggattgtctagttstaggaaaacaagctcagggctcccaccgattgtacattatggtgagttggataactatttcattatatattacaacgtaataataatagaaataaagtgc

SEQ ID NO: 13268 - DNA, 201 bp, Homo sapiens
aaattagttatctctgccctttgggaggctgaggcaggtggatcacttgaggtcaggagtttgaacctagcctgggcaacatggtgaaaccccgtctgtascaaacatacaaaaattagctgggtgtggtggcgtgcctgtaatcccagctattggggaggctgaggcaggagaatcactcgaacccgggaggtggaggtt

SEQ ID NO: 13269 - DNA, 201 bp, Homo sapiens
caagaagtgtgttttggggaaacactccaggtagtggtacatagaatcctagcacaagatcagtgactgggtgagtttgacattgtagatgcaaatgtgtsaggaattatagttgaaaggggaaagaacatttcagtttttcatttcctgcgtcactgtttttcttatttggagatgctgttcctctcaagtgggaaaaat

SEQ ID NO: 13270 - DNA, 201 bp, Homo sapiens
cctgtaggtttagcagaatcccagcctcacatcctccccgaacttggcagtaaaagccctgttcttccattcattccgatgatttatattctctctgggcrtcttatattaaacaggggaattccgacatgttccataacacatttactgtaacttgataccatgaactacacttgctgttatttatcatttctttttatt

SEQ ID NO: 13271 - DNA, 201 bp, Homo sapiens
caaaaattagctgggtgtggtggcgtgcctgtaatcccagctattggggaggctgaggcaggagaatcactcgaacccgggaggtggaggttgcagtgagycgagatcacaccactgcactccagcttgggaaacagagtaagactccatctcaaaaaaaaaaaaaaaaaaaagttattgattaaaatttaaatataaatt

SEQ ID NO: 13272 - DNA, 201 bp, Homo sapiens
aggagggactcataggacagcctagcatctgaggaaatgagtgcctcctggcccagaatgggggatctcagcagcacactacaatatccactacagtttcytgggcttgctctgaagccatgcctctctaacttcagggtatattcatgtaagtgaggtgcagggatgggggaaagggagaaggtaaagctacaaaggtaa

SEQ ID NO: 13273 - DNA, 201 bp, Homo sapiens
aatggtgaataccctcggcgggaggcaggcacctgatgccactgcccccgccccacctgcccccgccccgtttctcagatcacacaggcaggctgaggagygcttaacaccccagcctcccatgaagcatcctgaaaaagcagactttgtcttcctccatcagctttgtttgtcctctgccgagactccagggacatgatt

SEQ ID NO: 13274 - DNA, 201 bp, Homo sapiens
tgggagatgagttaagaggttttattcttatacatgcggaagaattatgccttcttgagccatgctcaggagatgtcagccttttccattgtctccccgcycccaccgccagccctgcttaaattatcccctctttttaaacagaatatcctaatcttgcaagtggcatatcatgttccttcttttttaagagagaaggag

SEQ ID NO: 13275 - DNA, 201 bp, Homo sapiens
aaacagaaaccactttcagctttcccgttccagggttaagtgcccaagcaggtgttgtttctgttatgtggtttgcagtgagcaaaaccaccccctcttamctgtggcagcaaaggcagggagactttgagacctggggagggctctctgctgtgttaacagaactggctcttggttggggggtggggggcacccattctt

SEQ ID NO: 13276 - DNA, 201 bp, Homo sapiens
attatgccttcttgagccatgctcaggagatgtcagccttttccattgtctccccgcccccaccgccagccctgcttaaattatcccctctttttaaacaraatatcctaatcttgcaagtggcatatcatgttccttcttttttaagagagaaggagaaattcctgcagatcatcagggactgaggctaactgaaacttt

SEQ ID NO: 13277 - DNA, 201 bp, Homo sapiens
gttgtcacattcttctgcctagagtatgccttttccttcaccaaaccaagtggctctttcggaagacttgcctgaatcctagaccccttctctctacaacmttcagtctgagttgggtaccttgcatcctcctttgttcccatactaacccctacaaccatggtcattttgtggttatctgtttaattctctgctggctat

SEQ ID NO: 13278 - DNA, 201 bp, Homo sapiens
gatcttaccctgacagtcacagaaagcactgggagcgtttatgaatgttgtggtatctcacataataaggggaccatgcatgtattttagaaagagccctytggcttcagggaagaacgatggatttgtgagggtcaggactggtagcaggtgggctcctagaatagtcccggcaagagatcatggaggccagagccaggg

SEQ ID NO: 13279 - DNA, 201 bp, Homo sapiens
ccgggaggattttcttttctttttctttttaatcctcctcctcaagggaaacattcttctcacaatagcttcctggtagaaagttctaactaatgactttratcgtgtgaatgtattgcagaaatggacaggacaattctcagcccattcatcttacagacctcaagtgaacaggcacaaaacaacaggctccaccctcct

SEQ ID NO: 13280 - DNA, 201 bp, Homo sapiens
ttttcttttctttttctttttaatcctcctcctcaagggaaacattcttctcacaatagcttcctggtagaaagttctaactaatgactttaatcgtgtgmatgtattgcagaaatggacaggacaattctcagcccattcatcttacagacctcaagtgaacaggcacaaaacaacaggctccaccctccttcccccctc

SEQ ID NO: 13281 - DNA, 201 bp, Homo sapiens
tcctcctcctcaagggaaacattcttctcacaatagcttcctggtagaaagttctaactaatgactttaatcgtgtgaatgtattgcagaaatggacaggrcaattctcagcccattcatcttacagacctcaagtgaacaggcacaaaacaacaggctccaccctccttcccccctctatctcatactttacctcaattt

SEQ ID NO: 13282 - DNA, 201 bp, Homo sapiens
tgtgaaaactgtgaagacataacacatatctatgaaccttttctattaatcttcttggggctggagctttaaaataaaataaataacttttctgcagagasagaacctttccttacccaaagatttcgtaactttctcacatccttggttaaggctgagctgcctagctgtctgcatttctgataggttttgctttcatac

SEQ ID NO: 13283 - DNA, 201 bp, Homo sapiens
gaaggatatcctttcaatagaggtgaaaatcctgaaataaaaggtttcataaatggggaaaaaagtcattgattgaaagagtcatggcatagatgctgaasttttgatgggaactttgcaggatgttcgtttgtttatcattagccctgggagagtcatccctcgcctcccaccaccccttaatttaaagggatttaaaat

SEQ ID NO: 13284 - DNA, 201 bp, Homo sapiens
gcaagtaaagaattataattaagagaaccagaagggcctgtctctcaggaaagcagtgatttcctttcacaataaccctatccttactgttgaagacttgyggaaaagggacatggcccagggaaccagagtggtttgggaaagcactttgtcaagaggcttggggaccccagggtggaagctgccatgcgcatgaggctg

SEQ ID NO: 13285 - DNA, 201 bp, Homo sapiens
cacatttcaaatcttcagtagccagatgtggttattggctaccatattgggtagcaccgatatagaacatttctaccatagtagaatgctcttttggatasatctgctttaaagcattagtccccaaagtgtgaaggatgaaccacttgggttccgagaggaaacattataacttctgtttatccattaaactctttcatt

SEQ ID NO: 13286 - DNA, 201 bp, Homo sapiens
ccaaagtgctgggattataggcttgaaccaccatccctggccttgatactgatattttattgtcctaactgacagttttgtctgcccagcattttcccccrtcacccttgtactatcccattttcctttgccatgcacctgtcttcctcttcaggattgatcacaaaatcaaaaccattcctaccagccagaggtgggcac

SEQ ID NO: 13287 - DNA, 201 bp, Homo sapiens
caaaccaggtgtcattgccctccccaccctaccttgctcccctggagtgtatcctgattcttttgaggatcacttgatcctgattttttttttatgtgtawagatgggatttcattatattgcccagactggtcttaaactcctggcctcaagcaatccagccacctcggcctcccaaagtgctgggattataggcttgaa

SEQ ID NO: 13288 - DNA, 201 bp, Homo sapiens
cgaatatttgggacccactgggagtttgtgccaaaccaggtgtcattgccctccccaccctaccttgctcccctggagtgtatcctgattcttttgaggawcacttgatcctgattttttttttatgtgtatagatgggatttcattatattgcccagactggtcttaaactcctggcctcaagcaatccagccacctcgg

SEQ ID NO: 13289 - DNA, 201 bp, Homo sapiens
ctttagccaaggaagaaatgacaacgaatatttgggacccactgggagtttgtgccaaaccaggtgtcattgccctccccaccctaccttgctcccctggrgtgtatcctgattcttttgaggatcacttgatcctgattttttttttatgtgtatagatgggatttcattatattgcccagactggtcttaaactcctgg

SEQ ID NO: 13290 - DNA, 201 bp, Homo sapiens
cagttgtaacagtggtatgtgtatatctcaacatatctaaacatagaaatagtacagtaaaaatatgatattataatctttgggaccgccatcatatatgyagtctgtcattgactgaaagttgtcatgtagcccatgactgtcgtctcttttaggggaaaaaacaaaagcagaaagcaagcaagctggtatcctgcgtat

SEQ ID NO: 13291 - DNA, 201 bp, Homo sapiens
tgagtctcagctgaccaagctctaaaatgagcataaccatatcagtttgtgtttcctgttacagggagaaaagactgagataactaaagtacctgattgastaactgctctctgaaggtggaggctggactgcttcactggacagggtggcctggggttattctagtgcagtggtagctggtgacaaaactcaaagaagat

SEQ ID NO: 13292 - DNA, 201 bp, Homo sapiens
caagggaacctttccccaaagcccctcaacacacttaggctgacatctccttgaccagaactgtatcaaatttacatagcctcaaatgaagcatctgggamcaccaggattgggtgtttaggccatggaagagtaacagcccagtacacaactgtctccagtggccagcacgtagaccttccctcacactttccactctct

SEQ ID NO: 13293 - DNA, 201 bp, Homo sapiens
taaggcagatggaaatgtcttgtaactcagtaaaacagtttagaaatttaaagcctttggagagagtaagtattgagaaggcacatctctacgttgttgaygtgaaggagttgcaaggtcgggtagatgggatcagtgccaggtctaatgggcttcatttgcaagacctaatttctagcagatcatggtgtaagcctcaaa

SEQ ID NO: 13294 - DNA, 201 bp, Homo sapiens
gtctcccatttcagagacaggggcatttggctccaggtttttctgactctagacagtagtttgtttttagcacatcaaatgtctgagacttgtgatgtgtyagaaagcacaaaggactttgatcacaagatcaagccccagagggccatgactgcataaaccacaacaactgcgtggctgcctgtcacgtcttcatctgca

SEQ ID NO: 13295 - DNA, 201 bp, Homo sapiens
tgcttcttacgtgtcacgcactgtgataagtcctaggattatagaagtcaataagctatgatgcctatccttaaggagagaaacacatataggataggaamatagcttgccatgtctgatagatattaggcattcagtctctctctctctctctctctctctgtttattatagatagaaataaaaaaattataaatagaaa

SEQ ID NO: 13296 - DNA, 201 bp, Homo sapiens
ccatcatttattaagagaatggatattttcatgtcagaaattataggaaggatacagttatgggatgaggagcaattcttttttttttttttttgaggtgsagtctcactctgtcaccaggctagagtgcagtggggcgatctcggctcactgcaaacctctgcctcccgggttcaagcaattctcctgcctcagactccc

SEQ ID NO: 13297 - DNA, 201 bp, Homo sapiens
tattaagagaatggatattttcatgtcagaaattataggaaggatacagttatgggatgaggagcaattcttttttttttttttttgaggtggagtctcaytctgtcaccaggctagagtgcagtggggcgatctcggctcactgcaaacctctgcctcccgggttcaagcaattctcctgcctcagactcccgagtagct

SEQ ID NO: 13298 - DNA, 201 bp, Homo sapiens
cgatctcggctcactgcaaacctctgcctcccgggttcaagcaattctcctgcctcagactcccgagtagctaggactacaggcgcgtgccaccacacccrgctaattttttgtattcttagtagagacgaggtttcacggtgttagccaggatggtctcgatctcctgacctcatgatccacccgcctcggcctcccaaa

SEQ ID NO: 13299 - DNA, 201 bp, Homo sapiens
aggaggtcaggaagtcattgatgtgggctccctcctggagtgcgtgttgctttggtagggagctcgctttggctgtgggcagttcctgaggagggactcayaggacagcctagcatctgaggaaatgagtgcctcctggcccagaatgggggatctcagcagcacactacaatatccactacagtttcttgggcttgctct

SEQ ID NO: 13300 - DNA, 201 bp, Homo sapiens
ccaccagccttggcctcccaaagtgctgggattacaggcattagccaccacacccggcccaaattttcttataaagtcaaatgggagatacttgtttgcargaaatagttcttttggttcttacttttccataaggattgagtctcaaaatgtctggtagcatccactgcattttgtaggggacaataacaaagaagatgc

SEQ ID NO: 13301 - DNA, 201 bp, Homo sapiens
ctgcgtactgtaggcagttgtaacagtggtatgtgtatatctcaacatatctaaacatagaaatagtacagtaaaaatatgatattataatctttgggacmgccatcatatatgtagtctgtcattgactgaaagttgtcatgtagcccatgactgtcgtctcttttaggggaaaaaacaaaagcagaaagcaagcaagct

SEQ ID NO: 13302 - DNA, 201 bp, Homo sapiens
ctgtgctgtgggagatgcgaatgctccagtcaatcccaaggaaactctgaagctggattattcttcagagatgcaaggaggtcaggaagtcattgatgtgsgctccctcctggagtgcgtgttgctttggtagggagctcgctttggctgtgggcagttcctgaggagggactcataggacagcctagcatctgaggaaat

SEQ ID NO: 13303 - DNA, 201 bp, Homo sapiens
tgcagtttgctgatccctgttttattaattagttaatattattgattgagatagggtctcactgtgtcacccaggctggagtgcagtggtgcggtcacagstcactacagcttcaacctcctgggatcaagcagtcttcttgccttagccacccgagtagctggatgacaggtgagcaccaccatgcctggctaattttct

SEQ ID NO: 13304 - DNA, 201 bp, Homo sapiens
atgctaaccaggatggtctcgatctcctgacctcgtgatccaccagccttggcctcccaaagtgctgggattacaggcattagccaccacacccggcccarattttcttataaagtcaaatgggagatacttgtttgcaagaaatagttcttttggttcttacttttccataaggattgagtctcaaaatgtctggtagca

SEQ ID NO: 13305 - DNA, 201 bp, Homo sapiens
ttggagccaaagccaaatagtgctctgtaaacattatgatttgtcagtaatcaatgtgatttgtataatttgtgagcaatcagatactttatccaaaagcrgattattgacctctgtgcccatcttgggagaaattgccacttggtctgtgtctacacagacccaagaggagaagggatttgacaatggtctgattaattg

SEQ ID NO: 13306 - DNA, 201 bp, Homo sapiens
gtgcggtcacagctcactacagcttcaacctcctgggatcaagcagtcttcttgccttagccacccgagtagctggatgacaggtgagcaccaccatgccyggctaattttctaaattttttgtagagacaaggtctcactgtgttgtccaggctggtctcaaactcctgagctcaagtgatcctcccgcctcgacctctc

SEQ ID NO: 13307 - DNA, 201 bp, Homo sapiens
gggctggatttgtcctgtggactgtagtttgctgacatccaggctagatccttaatatacaatgaagtagtaaaacacatgtaaaagtaaaaagcaggcgwaatagaataaaatacacatttgcacaccacagtatccaaaaaggttatgtactggggctaaagatttggcttggagtttcctggtagtcaaggcaaaaaa

SEQ ID NO: 13308 - DNA, 201 bp, Homo sapiens
actttttatttcctttgtggagtccagcccctttgcttattctcagcacaaaagaggcagtagagtgagaagaacgtgaacttcagagcccacgcatcccktttcacatttgaatcgcaactctgtcattcaccagctgtgcatccttgggaaagtcacttagcctctctgagctctaatttcctcacagggccgcaggac

SEQ ID NO: 13309 - DNA, 201 bp, Homo sapiens
tgcggtcacagctcactacagcttcaacctcctgggatcaagcagtcttcttgccttagccacccgagtagctggatgacaggtgagcaccaccatgcctrgctaattttctaaattttttgtagagacaaggtctcactgtgttgtccaggctggtctcaaactcctgagctcaagtgatcctcccgcctcgacctctca

SEQ ID NO: 13310 - DNA, 201 bp, Homo sapiens
gcctctcactttttatttcctttgtggagtccagcccctttgcttattctcagcacaaaagaggcagtagagtgagaagaacgtgaacttcagagcccacscatcccttttcacatttgaatcgcaactctgtcattcaccagctgtgcatccttgggaaagtcacttagcctctctgagctctaatttcctcacagggcc

SEQ ID NO: 13311 - DNA, 201 bp, Homo sapiens
gattcctgttttacatattaaaaatttcatctctccaatcttcgaagaatccgtagtccatttttaagtagctcttgtcttccaaaggtatgggatgtgcmtacctaatgctcttcctggatgggagaatattaccaaaaacgtttggtcgactaattttatgacagtttccaactacaatttttttcctctttgctttct

SEQ ID NO: 13312 - DNA, 201 bp, Homo sapiens
atggccgctggaaaagaagccaactcccagggggcacgaggggctaagctgtctcctgggaagtttgagggaggccaagtgttttccagttcatttccaaygcgtatttcttcagggccaagggcccagctgtgcctcattaggggtgagagtttggctgtgacacgacttaatagaaaaaaaaaaaaaaaaaggagaagt

SEQ ID NO: 13313 - DNA, 201 bp, Homo sapiens
tgcttctagctggtcgaaggtcctgtgggagctcacgtttttctcaatcactgatgaccatttgagacataatttggagaaggtttctatcaaatcctagytggactgcagtgaaatgttttcaaactagagaagcaccaaataggccatgataaagaataaataccacctaccccaacctggcaaatgtgtgctcaccca

SEQ ID NO: 13314 - DNA, 201 bp, Homo sapiens
tcttctccctctccgttaaaatgcaacttaattggtaaagtttagttgactagagatttcatttatttatttatttatttatttatttatttatttgtttrtttgtttgtttgagatgagtcttgctcttttgcccaagctggagtgcagtggcatgatctcggctcactgcagcctctgcctcccgtgtccaagtgattc

SEQ ID NO: 13315 - DNA, 201 bp, Homo sapiens
ggctggagtacagtggcacgatctcagctcactacatctctgcctcccgggttcacgccattctcctgcctcagcctcctgagtaggtgggactacaggcmcccgccaccatgcccggctaatttttttatttttagtagaaacggggtttcaccatgttagccaggatggtctcgatctcctgacctcatgatctgtcag

SEQ ID NO: 13316 - DNA, 201 bp, Homo sapiens
tctcccgtctctgcagttcaggagattatattagaaaatattctatacaaaaaatatgcatagtagggcttttctccagctagtagctcagaataagtcaktactactgaaacaggtaccttttgtggaattgattctgaaatctgtttggatctgaaatctttctttcttgcctttgagtaagatacggcagagaaaaac

SEQ ID NO: 13317 - DNA, 201 bp, Homo sapiens
tggactattttgccaaatgcatttttattggtagaacgtaagcaaatttaaaaaagcaacaaaagcagtttttatgaatacctagcgtactttttttttttaatgaaccatgagctgtttttgcattcaaattctcgtaggcattatattgcatctacacataaggacacagtgtttacagaccccaaagcttgctgtccc

SEQ ID NO: 13318 - DNA, 201 bp, Homo sapiens
cccgtctctgcagttcaggagattatattagaaaatattctatacaaaaaatatgcatagtagggcttttctccagctagtagctcagaataagtcagtaytactgaaacaggtaccttttgtggaattgattctgaaatctgtttggatctgaaatctttctttcttgcctttgagtaagatacggcagagaaaaacaat

SEQ ID NO: 13319 - DNA, 201 bp, Homo sapiens
ttttgttcctgcattgccctccattcagatcttgtcacttaggccttggtagcatgagctattaacagccctccatatttactatttttttttttttttttaactctgggagttcctgttgcagaaattggatcacttacctaaaaagctccccacccccacctttggtgactggtgggtttcatcaccaggaaagcacat

SEQ ID NO: 13320 - DNA, 201 bp, Homo sapiens
gactgcaactgaaaagaggagtaatggaaggacatgtactcttcccatatatttttaaacaattactgtatctgatttttcatttttcattttttttttttctggaagaaagagcagatctggataaagtcagtatacaatgtggtctttggtgacagacccaagttcaagaccaaggtgtatgcatgggtttgttcaagt

SEQ ID NO: 13321 - DNA, 201 bp, Homo sapiens
gctcagaataagtcagtactactgaaacaggtaccttttgtggaattgattctgaaatctgtttggatctgaaatctttctttcttgcctttgagtaagayacggcagagaaaaacaattacactagctgctggtctgtatttactggttagaatagaatattattaccatcaagaataacattagtggccaggtgcggtg

SEQ ID NO: 13322 - DNA, 201 bp, Homo sapiens
acttagcagttcacattcacatcttgtttattaactacaattctctagatcagaagcctagacacaatgtgactggcttctctgctcagggtctcttgggkacaaaataaaggtgtccgctggaggaacatcctttcctgcatgctctgtggaagaatccactgccaagctcattcaggatgctggcaggattcagatcct

SEQ ID NO: 13323 - DNA, 201 bp, Homo sapiens
tggcaacctttggtgtttggggcatgttgtcacctcattgccatctctgcctctgtcttctcaccaccatcttccttgtccatgtctctctatgtcttcartgttcttcttataaggacaccagtccttggatttagagtccaccctaattcactgtaatcacatcttacctaagtccatctgcaaagaccctatttccaa

SEQ ID NO: 13324 - DNA, 201 bp, Homo sapiens
cacttgtgacagagggaggaacatagggtgcataagagagatgtggggaagcactccccatccaactcgttccaaccagttcatcttttttttttttttttcttttttcgagaaagagttttgctcttttccccaggctggagtgcagtggtgcgatcttggctcactgcaacctctcccttccaagttcaagcaattgtc

SEQ ID NO: 13325 - DNA, 201 bp, Homo sapiens
actgccaagctcattcaggatgctggcaggattcagatccttgaagttgtaagactagggcccctgtttcctactgacttctgctggtggctgccctcagytcccagaggcaacccacattccttgacttttggccccctgcatctcaaagccagcaacagaaactctcttgtgcatggagtcccctcctgctttgaatct

SEQ ID NO: 13326 - DNA, 201 bp, Homo sapiens
cactagggggatggtgattagaaagcacctcatgatcccgtctacttcctgcagagaacagactagccccctatgcagcacacacctttgtgaggtccctyctccaacacagggattacaattcaacctgagacgtgggtggggacacagagccaaaccacactggaaggtaaaaaagttggcaaccagaggcttagagga

SEQ ID NO: 13327 - DNA, 201 bp, Homo sapiens
cttcaagtcagttacttaatggaataatacatgtttcctgcttccattgtcttcctggacctgacactcactctttaaccataagcagaagacacatacamaaatgtcctatgttaagaatctttatttaagacaggtggctagcattatttgggtccagaagcttccctggaaagaaaggattcactgcaagatcgacag

SEQ ID NO: 13328 - DNA, 201 bp, Homo sapiens
aaaatggaaaactccaggggaagagggtctttacttagggagttggcatttgttggaatttcccaagaacatttcatgattagtgacaggttatcttctastttacctgaaggctatggtcactcaacaaattttgtgttgcttcttacgtgtcacgcactgtgataagtcctaggattatagaagtcaataagctatgat

SEQ ID NO: 13329 - DNA, 201 bp, Homo sapiens
aaataaagacttgtgaaggtaaaactgtagcttacagtgtgcgactgtttaccttcttttggtttcttctcatttaataggttggtcatctctctgctggstttttcccccttttttctcccttctgtagaataacatgtggaccattaactatgatgctacttcttagctgcaaggggggaaaaatggaaaactccaggg

SEQ ID NO: 13330 - DNA, 201 bp, Homo sapiens
agaggaggaggaggaacttctcaggaagaagtggcagttccctcctttgtttcttatctctactgtttagcagccactctccaaagcctcttgctgggaaygtggccatcatagaagtaaatgagacatctctttcatctgcaccaacctccttattaagaccttatcagttacctgtagattctcccactgttgtacttg

SEQ ID NO: 13331 - DNA, 201 bp, Homo sapiens
gaaacaattcagcaactctcttacagatttttatcatcatcccattcataattgattccaaacgtgcatgaatctttcaagataagtgtcttattgattaycctgaaaacaagcgatcacttggtgtcctgagattcgctcactgccctcccctgattaccgtaaacagagatgttgatgagaagaaatgtcactttcttt

SEQ ID NO: 13332 - DNA, 201 bp, Homo sapiens
ccttttttagagataaagcctcaccctgttgcccaggctggagtgcagtggcgtgatcacagcccactgtagccttgacctcccaggctcaacctatcctyttacctcagcctcttgagtggctggaaccacaagcagatgccaccatgcctggctaactttttttttttttttttttttttgtagaaacagagtctctct

SEQ ID NO: 13333 - DNA, 201 bp, Homo sapiens
tatagcatctgaatttgaaaacctctactaattcatgaggcaatctatttgataatggcatgatttagttagtgttccttttttagagataaagcctcacyctgttgcccaggctggagtgcagtggcgtgatcacagcccactgtagccttgacctcccaggctcaacctatcctcttacctcagcctcttgagtggctg

SEQ ID NO: 13334 - DNA, 201 bp, Homo sapiens
aaccttacctactcaagtgtaagatgagatgccactgtggtatcttcaaaggaatttagaatcatgtcttaatggctccattaagaagaattctttttctsttttctctgaaaagcatcccaggtcataaaatgtaatgtgggattgtaggttttgtgggaagatgcacttggcagcaattccttgagaggaggccttgaa

SEQ ID NO: 13335 - DNA, 201 bp, Homo sapiens
tcaaatgcgcgtttaatcttcttaagctcaacttcatgcaagagacctaggaattcacagagtgaagatgatttctccattcccttctccgagcagagctsttgaagaagatgggagttaggagaagtgaatcttttgttttcgaagcctttgtccttgtgagtctcttaattggggtgtcttgtaatgcaaagtctttaa

SEQ ID NO: 13336 - DNA, 201 bp, Homo sapiens
ataagtctaatttagtagccagctaaaggatatctgtgaacccttcgcaaagagtaatctattgaaaaggaacaacaaaaaagtatatctgtgaacttatkaaatgactttaatcatatgaaaatcagccatcagccttattagagtggttgattttttttttaatctaagagctttcttggttattttctgttcttaatc

SEQ ID NO: 13337 - DNA, 201 bp, Homo sapiens
tgcttacttgacttggaccagggtggtgaatgaacataaaaaccgattacaacatttttccatttttatgtttcctctgaaaccagccatgagaggtactsttagcaaatcacgccttattcctaggcagacttcttgggtacactttccaccctccccagcagtaatgcctgaccaactaatggaatcctaactaatgca

SEQ ID NO: 13338 - DNA, 201 bp, Homo sapiens
gaacaaattgccaaatgcaaggcctgagcaaaagacacagaaaggatttctttatcgtaagcacacttctctacattacctttataatccaacaactctgstattagtaaattatagaaacaacttttgtaacactatcttgtttgcagagtatatgaaaaatttgaagttaaaattcagctccacgaatactgcagtggt

SEQ ID NO: 13339 - DNA, 201 bp, Homo sapiens
tactgttagcaaatcacgccttattcctaggcagacttcttgggtacactttccaccctccccagcagtaatgcctgaccaactaatggaatcctaactawtgcagtatgtgacgcctggcagctccagtccgaaccaagggaaaacctgcaaacatgcaatccttcatgcttttgtttttgtttttccttcagcctagct

SEQ ID NO: 13340 - DNA, 201 bp, Homo sapiens
ctattgtgcacttttgcccagttcaacaagaaagaatctttgctatgttagaagagactctggggaatccagagtcttggtcacgggtacatcaaaacgaygctggtgcctaacttctagttccagacaaagaaggagagagagagagatcagtaatttataggctgacattttccttgggtccttataatacttgtttat

SEQ ID NO: 13341 - DNA, 201 bp, Homo sapiens
tagaagagactctggggaatccagagtcttggtcacgggtacatcaaaacgacgctggtgcctaacttctagttccagacaaagaaggagagagagagagrtcagtaatttataggctgacattttccttgggtccttataatacttgtttattacagataatttgcttaagtgtgcacaaggtggaaggtcacgcaagga

SEQ ID NO: 13342 - DNA, 201 bp, Homo sapiens
atttccacccccattatttgcataacaaattacagattatccagaacaggtgggctgtacataaacaggctggtgggctggatttgtcctgtggactgtastttgctgacatccaggctagatccttaatatacaatgaagtagtaaaacacatgtaaaagtaaaaagcaggcgaaatagaataaaatacacatttgcaca

SEQ ID NO: 13343 - DNA, 201 bp, Homo sapiens
ctcttccccacttgcccacgagcagcaactcctgtttcttgtttttttccttttctttttcttttcttttgagacagagtctcgctccgtcgcctgggctrgagtgcagtggtgcaatctcagctcactgcaacctctgcctcctgggttcaagcgattctcatgcctcagactcctgagtagctggtattataggcgcac

SEQ ID NO: 13344 - DNA, 201 bp, Homo sapiens
atccagtgttataggagacaaaccatagcaagcaatggcctctcacccttcccttcacaccctccactctgtccacttgtttgttccttcaataaatactratggagaatgggctctatgccagtgtttctctggatgttggctgcagggatgaacaaaggcaacttctaggagaaatttctgtttttgatgctctcgtgg

SEQ ID NO: 13345 - DNA, 201 bp, Homo sapiens
ttttgctctcctccttttgtcagttggcatgcgatatgcttctcaggcagtaatttagagactgtcaattcctgagagccgctggggaactgagcaatcgyctgcatttcgtcgctttagcccgagctgggtctttgagctggcagagaccaagatctttttctgggaagggatggtcctatttaaggaaggccctggatt

SEQ ID NO: 13346 - DNA, 201 bp, Homo sapiens
gtatggggtggggaaggggggggggataaagatattaatttggaagcatttgattgctccattattttatcatcttcccatggaaatgttttcataacgcsttgttttttaattattattattattttttgagacagagtctcactgagtcgcccagggcggcggtgtgatctcggctcactgcaacctcagtctcccagg

SEQ ID NO: 13347 - DNA, 201 bp, Homo sapiens
ttacagcaaatttgtagttatggtggagcaaagggcagttttcactcctcttccctaaaactgtagtttaactaaaaagtggccactgtctcctggtagcrgttggtaagccatccagtctctgcaggcatctacgctccaggtctccagtctgaggagtctggctcctggggcaggtgcctctgggggtctctgccaggc

SEQ ID NO: 13348 - DNA, 201 bp, Homo sapiens
gagctgagtgattttagtaggtagtttaactccttaaaaacttccagtggtttcatattctacctagttttaggtgacagctggtatggggtggggaaggrgggggggataaagatattaatttggaagcatttgattgctccattattttatcatcttcccatggaaatgttttcataacgccttgttttttaattatta

SEQ ID NO: 13349 - DNA, 201 bp, Homo sapiens
tcccgctttgtgctggagcaagttttggctgagtttctgtcacttgcaaccaaatcagtcctatccagtatacctagtgactctctggtctccaaaggctrtgcctgctgggtactgagtgtctccccgaccgaccccatgatggctacagtgcacatcccttccagccaactctattgtgcacacatattcgtagggtga

SEQ ID NO: 13350 - DNA, 201 bp, Homo sapiens
ggagctgagtgattttagtaggtagtttaactccttaaaaacttccagtggtttcatattctacctagttttaggtgacagctggtatggggtggggaagsggggggggataaagatattaatttggaagcatttgattgctccattattttatcatcttcccatggaaatgttttcataacgccttgttttttaattatt

SEQ ID NO: 13351 - DNA, 201 bp, Homo sapiens
tttgacaatagatgttagctaggagagataagaaatggagcaagggaggggtttcatcccgccgtgttcatttgcttggctgtcctgaaattgcgaatacrcagttgttacctgctcccggtgggaggggggggatatttatttggcatcttgcaattgataggagctgagtgattttagtaggtagtttaactccttaaa

SEQ ID NO: 13352 - DNA, 201 bp, Homo sapiens
tggaagagttgacagagatttgcaggtgaaaaagaaaagaaaaaaaatacagatacgtgtatatatagagaaagacaaaaacttgtctgctagaaacctasggagagagatggtattgcccctgggacattggactttctgtttccagcatggtctgtcgtcttccataatggcatttaattttggaaaaattgcctgagc

SEQ ID NO: 13353 - DNA, 201 bp, Homo sapiens
cagtcacagaaatgaggtagctgtagccaaggatgatggcatagcacattcgtttcttaggcgtgccacgtactaggtggcttcagtcagcagaactgtaytttcccacagttttggaggctcaaatttgcaagtcgaggtttcggcaaggccatcctctctctgaaaactctatgggggcgtcctctttgcctcttcccg

SEQ ID NO: 13354 - DNA, 201 bp, Homo sapiens
ttttggattctgtgtggaagagttgacagagatttgcaggtgaaaaagaaaagaaaaaaaatacagatacgtgtatatatagagaaagacaaaaacttgtstgctagaaacctagggagagagatggtattgcccctgggacattggactttctgtttccagcatggtctgtcgtcttccataatggcatttaattttgga

SEQ ID NO: 13355 - DNA, 201 bp, Homo sapiens
aggctaggtagagcatattgctccctggcagcaaacatgtacagcatgtttctgtcctgaatactgtaggcaattttaatacaatgctaagtatttgcatwtacaaacatagaaaaggtacagttaaaatatggtattacaatcttctgggatcaccattgcatatgtggttcattgttgatcaaaatgtcattatgcagt

SEQ ID NO: 13356 - DNA, 201 bp, Homo sapiens
atgggagttaggagaagtgaatcttttgttttcgaagcctttgtccttgtgagtctcttaattggggtgtcttgtaatgcaaagtctttaaagatgtgtgytcctgaaactcaggaggctgctctatcccatggttcaaccaaagaaccagggccaaagcagtgctgaaggaacaactgattctcttggccctccttagag

SEQ ID NO: 13357 - DNA, 201 bp, Homo sapiens
ccttgctgaaatggttggtgctaagatgagcacttggcttaggccagaccagtccctagcctgtggagaaggggcaatctcttatctgaaggcctaggagstgcagggatgtttatatgggctgctagcgcttagtttcctgccacagggagacagtaagaaaggtgacgtcaatctgagatgagagagagagcaaaacag

SEQ ID NO: 13358 - DNA, 201 bp, Homo sapiens
cacctttcctttgggagcaatttttgggttgcttttgtttttatttgttgttttcattcctggtagtaatagtaacagtagaaaatggcagcgttatagcyataaacaaagtgctctgtggtttctctctcaccatcccctaaaccctacaaggctaggggaaaatggtaatactcatgaacaactccacttcataaatga

SEQ ID NO: 13359 - DNA, 201 bp, Homo sapiens
agtggccctaggatggctcctcagatagctgctggcagaaacctgcactcagtacatctatacatggtgtaatgattgactcaagataattagcatagccrtcatctcaaacctttattatttgtgatgagaagattcaaaacccgctttttgaactgttctgaaatatgcaataccttgttgttaactgtattcaccttt

SEQ ID NO: 13360 - DNA, 201 bp, Homo sapiens
aaaatgaggaagaagcgaacgtgagaacccctggtaaacccatcagatcttgtgacacttattcactatcacgaggatagcgcaggaaagaccggcccacrtgattgagttacctcgccctgggtccctcccacaacatgtgggaattctgggagatataattcaagttgagatttgggtggagacacacccaaagcatat

SEQ ID NO: 13361 - DNA, 201 bp, Homo sapiens
acacaggctgctgtggcaacccacagcaggaatagccagtcctgccccagcagggcgtatcaggggtgctaaggtgacttccaagattgaggttggcgagwtcgtgacaggtgtgcaagatggggtgttccaagactggggacaggacaggtgtgcaaggaccagccagctgaggtagaggaaacctagacctatggaaca

SEQ ID NO: 13362 - DNA, 201 bp, Homo sapiens
ggacaattcattggcttatcgtatagtcacaaacttgtgcagacatcaccactatctaatttcagaacatttttatcacccctaaaagaaaccctgtacccttcagccagcattccctattttatacccccgatctcttgacaactactcattgactttgtttctatgactttacctatttcgggtaattgatataaatgg

SEQ ID NO: 13363 - DNA, 201 bp, Homo sapiens
tagccccctgtacagcacacaactcggggaattttaggtctggtgatttactgctgttggagcctggccttcttcctgggagaaggctggaaaaacttcawgtcagttacttaatggaataatacatgtttcctgcttccattgtcttcctggacctgacactcactctttaaccataagcagaagacacatacaaaaatg

SEQ ID NO: 13364 - DNA, 201 bp, Homo sapiens
cagagaacagactagccccctgtacagcacacaactcggggaattttaggtctggtgatttactgctgttggagcctggccttcttcctgggagaaggctsgaaaaacttcaagtcagttacttaatggaataatacatgtttcctgcttccattgtcttcctggacctgacactcactctttaaccataagcagaagaca

SEQ ID NO: 13365 - DNA, 201 bp, Homo sapiens
accatcccggtaaagtgacgttttgatgaaaacagcatggatcttcctgcagagaacagactagccccctgtacagcacacaactcggggaattttaggtytggtgatttactgctgttggagcctggccttcttcctgggagaaggctggaaaaacttcaagtcagttacttaatggaataatacatgtttcctgcttcc

SEQ ID NO: 13366 - DNA, 201 bp, Homo sapiens
ttgtgagaaatgaggagataatatctttaaatctcctacggtgatacctggaacatgatggtgcttgggaaatgtctcttcttctgaaatgaggctgcctsgaagactcactggaacccaagcaaagtgtctctgcatttcactccgagccatcgacttctgttctgaatgttaaaatgcaggtggctgtgagggagtctt

SEQ ID NO: 13367 - DNA, 201 bp, Homo sapiens
gaaggatcatgggaggggaggagcgtgagttcctcttaagtgaatataaaccagggggtaggaaacaacatgagatgaggctggcgagagagaaggatgcyaggtgaggtgctgtggtgcgccagagactgcggaagtggctttctaattaagaaacagaagccaggaaactcctgtacttcaaggttttggagtgggaaa

SEQ ID NO: 13368 - DNA, 201 bp, Homo sapiens
gtagctttgttgattgttgatattacttatgaactttcttgcttttcagaaaccaccaccacaaaagaggcagtaacattagtattacattatacatcttmggcatttttttcctttgcccttttcgtaggtttttgtttgtttgttttttcttgtcagccacttcatcatgtttggtctctcgtctttggctgtgttttt

SEQ ID NO: 13369 - DNA, 201 bp, Homo sapiens
aattatatattatacacacaaacatacacacacgcacacaccaaatttaaaaagacagatacataggcagttgttatgcagtgtttgaaataaatttattkccagctatgggtcatttggaaaaagatcaatatgatgcatcaacataacaagtaaatggaaatgaatacaaccgcatggttttctgaaagcacggtttcc

SEQ ID NO: 13370 - DNA, 201 bp, Homo sapiens
ggtgagaaggagctggcagtgtgaatagccaggggaaaagtgttttgggtagaaggaacagaaagtgaaacggtgccctggcaaggcaaagattattcatkgctgaagagactatgttgcccagatgacttgttcatgtaatctgtgatttttaaatttagaattgaggtttgaagggaagtattgctcctttctttatct

SEQ ID NO: 13371 - DNA, 201 bp, Homo sapiens
gaaggcgggcggggcaagctttggaaagcacgggcaggtaaggacagggtttcaaaggtgagaaggagctggcagtgtgaatagccaggggaaaagtgttktgggtagaaggaacagaaagtgaaacggtgccctggcaaggcaaagattattcattgctgaagagactatgttgcccagatgacttgttcatgtaatctg

SEQ ID NO: 13372 - DNA, 201 bp, Homo sapiens
actgattaatcacagttatagagtagacataacatttttattaaactctcagtgagcaggaaaattagcacttcctgcaataacgatactaatttcattastgaacgttttcatttataaagtgcttcttccttatcttgaaccttttatcctcttcttattgaccaaagagagggcatatctttgggagctgctaataaa

SEQ ID NO: 13373 - DNA, 201 bp, Homo sapiens
gttggagaaaagggggaaaaagttaaatgttaatgattcttttcgtaactgcaattttatcggctcctttttgtacatatatgattatgaagcaatttgtrtgaaatttacaccttttcaaattttgaaaattgccttgttgaaaaagaatcgctgtacttctcaatactacactgattaatcacagttatagagtagaca

SEQ ID NO: 13374 - DNA, 201 bp, Homo sapiens
agttggagaaaagggggaaaaagttaaatgttaatgattcttttcgtaactgcaattttatcggctcctttttgtacatatatgattatgaagcaatttgygtgaaatttacaccttttcaaattttgaaaattgccttgttgaaaaagaatcgctgtacttctcaatactacactgattaatcacagttatagagtagac

SEQ ID NO: 13375 - DNA, 201 bp, Homo sapiens
atgtgtctgaccccaggagaactgccccgatccctatcttgtctctgctcagttctggtaactcttttatcttccctggagttatttttttcccttctttstttctctttttctgtgtgctcttctaagagtaaaacgcatgtccccccatgaagtcactcaaagctcaggcgtgtgcaacagggacagcaaaagcacaca

SEQ ID NO: 13376 - DNA, 201 bp, Homo sapiens
gattacagacaagagccactgcgcagacggacatatgaatttttaatttgatatcattgtgatcaatttgaagatccacatatggctgagggctactctawtgagtggtgcagctccaaggcagagagatggctgtgattaaccaatgaatgagggaacaaatatccaggcagaatgaatagtctatggaaagggctggaa

SEQ ID NO: 13377 - DNA, 201 bp, Homo sapiens
gcggcgtgatctctgctgactgcattctccatttcccaggttcaagcgattctcctgcctcagcctcccaagtagctgggactacaggcccctccacaccscacaccgccaccacgcccagctgatttttagtggagacagggtttcaccatgttggccaggctggtcttgaactcctgacctcaagtgatcggcctgcct

SEQ ID NO: 13378 - DNA, 201 bp, Homo sapiens
cagcggcgtgatctctgctgactgcattctccatttcccaggttcaagcgattctcctgcctcagcctcccaagtagctgggactacaggcccctccacascgcacaccgccaccacgcccagctgatttttagtggagacagggtttcaccatgttggccaggctggtcttgaactcctgacctcaagtgatcggcctgc

SEQ ID NO: 13379 - DNA, 201 bp, Homo sapiens
ttttaaggcagcaggactaagaaggtaaagacatgtactaggcgggtcagcatagtggtggccctcgtctgacacacatatttcaggaggggtcacccctsccgtcttccatgttggggtgctcttctctggcaacccactatgggtactccactgctggccttcatgcaggtggaaccacaccgggaagacccaagccga

SEQ ID NO: 13380 - DNA, 201 bp, Homo sapiens
ggcacagaacgagcactgtgtgtgtgttacagaaatatatgtgggtgggtgtgtttctgttttccgtaattccagctaggcaaagacatatttaacaaaarccttctgggctgatgagcatcctcagaaagtaggctgagggagctcttttaaggcagcaggactaagaaggtaaagacatgtactaggcgggtcagcata

SEQ ID NO: 13381 - DNA, 201 bp, Homo sapiens
agcatctggggctgtacacgtctttgtactgcacactgtagggtatccaggattcctggccctgccccatgatataccagcgccatgttgtcatcaaaacraccggaaatgccttttgtgtctccctacttccctttttaacatgtcagcccttggtctcgatattcacatctatatttttccttatcccgttaatatatg

SEQ ID NO: 13382 - DNA, 201 bp, Homo sapiens
tcatgccctgtgtcacctgactcaggcaccattagcatctggggctgtacacgtctttgtactgcacactgtagggtatccaggattcctggccctgcccsatgatataccagcgccatgttgtcatcaaaacgaccggaaatgccttttgtgtctccctacttccctttttaacatgtcagcccttggtctcgatattca

SEQ ID NO: 13383 - DNA, 201 bp, Homo sapiens
ttaacactatgcagaacgatttcctcgtattgttgaaaactcttggtaggggttttttttttaattggctggaagcacttcatcatatagttgtaccaaartttgcttaacatcccccttattactcagcctttgggtggtatccagttctttgctttgataaataatgctgagatgaacatctttctgcatggctctttt

SEQ ID NO: 13384 - DNA, 201 bp, Homo sapiens
atgctctacctcttccctttgctaagtggcaattttggaccttctgtgaccgtgcaaacatgcagattatacatgcactataggagtggaatgtatgtgayttaatagcgtaatattttgtccattattttaaaacttgctttatttggtcaagacatacggaacacgtatagatcaaacaaaaatttttaaaaatgcttg

SEQ ID NO: 13385 - DNA, 201 bp, Homo sapiens
tccccaggctaagcacagtcacagaaatgaggtagctgtagccaaggatgatggcatagcacattcgtttcttaggcgtgccacgtactaggtggcttcastcagcagaactgtattttcccacagttttggaggctcaaatttgcaagtcgaggtttcggcaaggccatcctctctctgaaaactctatgggggcgtcct

SEQ ID NO: 13386 - DNA, 201 bp, Homo sapiens
aattcttaaagttctggagcctgggaagtccaagagcaaagcaacggcagattcagcttctgttgagggctcgttccctggctcatagatgatgacttctygctgtgtcaacttagtgggaggggataaagcagctctctggggcttcttttagaaaggcacaaatccactcttgtgatctaatcacctttcaaaggccct

SEQ ID NO: 13387 - DNA, 201 bp, Homo sapiens
aacagcacacgtcaaggaagcagttttggtctctcagattatatgaagctctccaatatgttctttcagaacagccagtgcctagaatactgcctgactcstagtagcactccttatgtgttgaatgagtaaatgaagagtccctggaatttcttcttcataacattgaacacaactgcagtttgaaaacataatttctgt

SEQ ID NO: 13388 - DNA, 201 bp, Homo sapiens
aatggcatctatgatcttagatttagtaaaacgcagtatcttcttccccagctgaaatagcgaaagggtctcttcaggctcctgggataaaaaccaggatscttcatgtgtctgagcaggcttcccaccatttgactgctgctcctttgtccagacacatttaacaccatctccctgcaccccttcactgggctccgaagc

SEQ ID NO: 13389 - DNA, 201 bp, Homo sapiens
cagaaatgtaattcttaaagttctggagcctgggaagtccaagagcaaagcaacggcagattcagcttctgttgagggctcgttccctggctcatagatgrtgacttcttgctgtgtcaacttagtgggaggggataaagcagctctctggggcttcttttagaaaggcacaaatccactcttgtgatctaatcacctttc

SEQ ID NO: 13390 - DNA, 201 bp, Homo sapiens
ccctggaagatggatcttgccttgtggatgtttttctaccgtgacagaagatagaaaggatgaaatagaaagagtgtgagtgaattctgcacccacccccrccccccagcttccccacctgtaaaatgatttgctcaaagtttgcaaagaatggaggcatattcaaagtgctcagcactgggccggacccatgggtatgaa

SEQ ID NO: 13391 - DNA, 201 bp, Homo sapiens
tatgagcacggcatctaccgggctgttccacatcctccctgtgggactaggggccagggcaatgggaatcagtgcagaaataaagctcatgctgtttgctstgccatgagtaacgaagtcctctgtatctgatcctgggtctcctgttttctgctagcttcctcaaaacttggtagctaactcattaacttacaaggaaga

SEQ ID NO: 13392 - DNA, 201 bp, Homo sapiens
attctcagattcccagccaactggtttcacatgacaagtaaatgagcaacctggaagatgagtggcgtttccacacacagggaagcagatagttccattasgtgacagtgtgtgcacagtttatggaggatgaagcggaaaacctgagccacaaggcagtagaggttggacgagacactcattccgaaggcgggtgtgtat

SEQ ID NO: 13393 - DNA, 201 bp, Homo sapiens
cctgactttctccctggtccaggtgcattttaagcatggaaggtgacacttgccattctcaatggacaaagggagtggggagtgtgggggtgtgctttggrgttagtctctgggttttcgaaacttagcattctcagattcccagccaactggtttcacatgacaagtaaatgagcaacctggaagatgagtggcgtttcc

SEQ ID NO: 13394 - DNA, 201 bp, Homo sapiens
actgcattgactcctgttttctacacagtggtcttcagctacaccttaccaagcaccccttacccagcaaacgtggcttctcttccccaggcagagcagtycgttacttagactaggaaatggctccgagaagctcacccatcaccatttgctctactgcaaaacaggactcattagcaggagctcataaaatgaaactgg

SEQ ID NO: 13395 - DNA, 201 bp, Homo sapiens
ctgtagcaaagatgtactgtttcccactgagaagaatcaaaaatagaaaagtgcttccttgtctctctatattgttattaaaacaagtagatgcattttcrttgaatcaaggcagttttcctttataaaatgtcctatttcatatcactgttcaaacttgacatccacatttgagttggtttaaaatatcactgttttgtt

SEQ ID NO: 13396 - DNA, 201 bp, Homo sapiens
agttccagctcatccaccctgcctctgtggctgagtcggggagaaaaggacaaagtttttctcccgcaactgggccaccaaaccagcagagcctccagccrgggtggtctcgaggaggcccattaccggctggagtgacagagtgtgtcaagcctgcagctcgtcccgtgtctaatggaacagaaacaagcaccctgctgc

SEQ ID NO: 13397 - DNA, 201 bp, Homo sapiens
tgtaatcatagcagaaactcacatgtgtgtgctttctatgtgccaggcatgaggctgaagtcatacattcattatttgttaatcccaccctaagtgatagktgtattcatcattctcagtatcagaagaagaaactgaggttcagaatgacccagtaaagatcacaagcccaaccctggtgaagggcgtgattggcagaag

SEQ ID NO: 13398 - DNA, 201 bp, Homo sapiens; identical to SEQ ID NO: 2534

SEQ ID NO: 13399 - DNA, 201 bp, Homo sapiens
caagttcaaaatcagtctcacctggtcaagatgtcagtagggcttgttccttctggaggctctaggggagaatctgtttccttgcgtttttcatcttctasaggcctcctgcattccttggctcttggccccttcctctggcttcaaaccagcagtttaatatcatcacatctcctttactgattcctcttccgttgtccc

SEQ ID NO: 13400 - DNA, 201 bp, Homo sapiens
caccgaggtatctggagatgacctctgcactgttctgggagagtggttatagcctctcctgggggagtgttactgggagacagggaaagacagggcgtgtrgacggccatctattccacctgtgacatgagggctcaccccctcatctccaccgcagcagctctctgataaatgtagctctctgataaatgattctgttcc

SEQ ID NO: 13401 - DNA, 201 bp, Homo sapiens
gatagctgatttgttataaacaaattaccaaaaacgtactggctttaaacaacacatgcttatcatgttgcagttctggggagtcacaagttcaaaatcastctcacctggtcaagatgtcagtagggcttgttccttctggaggctctaggggagaatctgtttccttgcgtttttcatcttctagaggcctcctgcatt

SEQ ID NO: 13402 - DNA, 201 bp, Homo sapiens
tttattgtgtgaaatgagcctggtcatatgactgccctgcctccctggaggcctccctgccctcctccttcccacagacacttatgggaggtactggccarctctgtatggccagtactgccctaagcaagaccaagaagcttagtctcaatttcagagagttattttggcaacatatttgggaaaatgatagttagatgc

SEQ ID NO: 13403 - DNA, 201 bp, Homo sapiens
tgcctctaagtttgaagtctaactccatcactgtgtttctttcctcttgctgatagctgatttgttataaacaaattaccaaaaacgtactggctttaaasaacacatgcttatcatgttgcagttctggggagtcacaagttcaaaatcagtctcacctggtcaagatgtcagtagggcttgttccttctggaggctcta

SEQ ID NO: 13404 - DNA, 201 bp, Homo sapiens
tccctccctttattttttctagcctttatagaaatgacaaagggtcaggtggtcttaaattccaaatctgggcacatgaatggtctgacctcggaaacttmctatatgctcgaaacgatttaactagcagcaataaaatctctactctttttatgacaaataatctagcatgtctggggagcatatttgattcttcatatt

SEQ ID NO: 13405 - DNA, 201 bp, Homo sapiens
tctccctcacaaggatcaggtggcaggatctaatgggaggggtagagagtgagtgttaacacacagagaacccaggagacctttctcagaggtctcatatsaagaaaagatcatttctcctaagcaatcaatttctttttaaatctgaacctcatatctgagaatattcccttcttttatctggccactcgggagctcaaa

SEQ ID NO: 13406 - DNA, 201 bp, Homo sapiens
actgtggaagggtcaagtgcagggtcaccaacccgttccatcttcctgtcagttggcgtccacccttggtttcaaagggaacaggcattactgacatgacsggacctttacagttcccagctgctcatttggagtactgcggacccaggacaactaaagccggggtcgcctgccctccaggggttcctgggttgaagtatc

SEQ ID NO: 13407 - DNA, 201 bp, Homo sapiens
atttgtgtcctggttggcagatattaagtccacagataccaataattaatatctatggttgattgtaaaaatggccaccaattcttccctgtcccctgcayatgtacatccttgcactgtgaaattgtagatctcgccctccaaaggtgaagttcgtttgtccactccttgaaccaggatggcatgaaacttgatttgacc

SEQ ID NO: 13408 - DNA, 201 bp, Homo sapiens
cttactctgtgctcttgccccaggcagagtggaagttgccttataaagctgcgacttggccacagtgttttccctttcagcagggaaaccggagttctccstgctgttgggaggttcaagagccactctgtgcagaaatgcccagaaagagttaagtgaggtaagttcgtcagacttctgcagacccatactgtggaaggg

SEQ ID NO: 13409 - DNA, 201 bp, Homo sapiens
tatccaggaggaatgattagtgatctgattcattaatatcccttgttattaagaactgtctgtatttgtgtcctggttggcagatattaagtccacagatdccaataattaatatctatggttgattgtaaaaatggccaccaattcttccctgtcccctgcatatgtacatccttgcactgtgaaattgtagatctcgcc

SEQ ID NO: 13410 - DNA, 201 bp, Homo sapiens
gactctgcagatccctactcggagtttttcagccctgttttaagtgccgagctgggttttgcctcatgatccaattgttttattagcgaaatcatcatctrtttcattttgctttggtaatagtgcagtgtctgtctaacaataaattatagagtcaggcaaacaatggtttcgtattagggatataatgaaatatcttat

SEQ ID NO: 13411 - DNA, 201 bp, Homo sapiens
gttcaggaacagaactgacaggtattgaagccaaaaattgaacaataacaacgtaggagggagaatccaaagatagtatgtgttcaggatacgggcactcrtgtgggtgaacacacacacacacacacacacacgcttttttttttttttctttttttttttctcctattgcaatagaacgtaaaggtagatttttagaac

SEQ ID NO: 13412 - DNA, 201 bp, Homo sapiens
tcctttcttcttcagtgccacctgccttattttactcacccagaaggaagccgggtccctctttgcccctttgggtgtttgtgaaaagcaagttgtaaacwctgaattctataaactgttggagacagattctggagagacactcaggcttagctctagaaagaaacgggtaagacagaggaggttcagggcaactgtgtt

SEQ ID NO: 13413 - DNA, 201 bp, Homo sapiens
caaaagtactaaatgttaccattttccttactttgttcaggctgctataacagataccataaactaggtagcttataaataacagaaatgtaattcttaamgttctggagcctgggaagtccaagagcaaagcaacggcagattcagcttctgttgagggctcgttccctggctcatagatgatgacttcttgctgtgtca

SEQ ID NO: 13414 - DNA, 201 bp, Homo sapiens
aagattcctttcttcttcagtgccacctgccttattttactcacccagaaggaagccgggtccctctttgcccctttgggtgtttgtgaaaagcaagttgyaaacactgaattctataaactgttggagacagattctggagagacactcaggcttagctctagaaagaaacgggtaagacagaggaggttcagggcaact

SEQ ID NO: 13415 - DNA, 201 bp, Homo sapiens
tcaggcactttatatccctcatccaggaggatgcaaaaacctggtgtttttcttttttttttttttgcattttccagacgagccaagggatggctcagaarggtgaaggaactcacccgaattgcacagctggtgagctcagagtcaggctccttgcttggtccatctggcttccaaactccaagtctgtctgctccaccc

SEQ ID NO: 13416 - DNA, 201 bp, Homo sapiens
cttgttcttttacaaaaagggtcagcagactttctgaaaagggacagatagtaaatattttaggctttgtggaccatagggcctgtgtcaaaagtactaawtgttaccattttccttactttgttcaggctgctataacagataccataaactaggtagcttataaataacagaaatgtaattcttaaagttctggagcct

SEQ ID NO: 13417 - DNA, 201 bp, Homo sapiens
tacttgttcttttacaaaaagggtcagcagactttctgaaaagggacagatagtaaatattttaggctttgtggaccatagggcctgtgtcaaaagtactmaatgttaccattttccttactttgttcaggctgctataacagataccataaactaggtagcttataaataacagaaatgtaattcttaaagttctggagc

SEQ ID NO: 13418 - DNA, 201 bp, Homo sapiens
acaaaacaccgagggctttaaggaggcatagtggtatgttcagctgtattttctcataatatagagtcataggaaacctgagccttggcatttgtaaggcraaaagacccctggaaaagagtaatatagtaattcatctttatttgaaaagtatatcatcatccatttatttccccactggcataatccaggccgactttg

SEQ ID NO: 13419 - DNA, 201 bp, Homo sapiens
aagttaaactgatgtctgtgtgtcttcatgtcattaaactttgaatctacggacatgtctttttctttctggcatagtttggaggtcttcattttgtgatwgaatacaaaacaccgagggctttaaggaggcatagtggtatgttcagctgtattttctcataatatagagtcataggaaacctgagccttggcatttgta

SEQ ID NO: 13420 - DNA, 201 bp, Homo sapiens
tgagaaagttaaactgatgtctgtgtgtcttcatgtcattaaactttgaatctacggacatgtctttttctttctggcatagtttggaggtcttcattttrtgattgaatacaaaacaccgagggctttaaggaggcatagtggtatgttcagctgtattttctcataatatagagtcataggaaacctgagccttggcat

SEQ ID NO: 13421 - DNA, 201 bp, Homo sapiens
cccccaaagggggatttctaacacagaaagcaacataagtgggtagtcctggccaatggcagctacgttccacaaagtgactcagggatccaggctgcagmcacttagtggttccattctccctgctgatatctgcatccagtcatctggtatttcttaccagccttaacctcattctattggtaagcactagtcacatgg

SEQ ID NO: 13422 - DNA, 201 bp, Homo sapiens
tgtttgcacacctgtgttgcaaatgtattagttaggataggctgagctacagtaagaaatagcccccaaaatgcattatagctgaaacccccaaagggggrtttctaacacagaaagcaacataagtgggtagtcctggccaatggcagctacgttccacaaagtgactcagggatccaggctgcagccacttagtggttc

SEQ ID NO: 13423 - DNA, 201 bp, Homo sapiens
ttccttagcttcatgcctttgaattttagcagaaatgttacctgctctatgaaactggattttccctttgtctccattccctaagctgcacattagagcasctgttacagtttgaagtgacccctatatggattgtttgcacacctgtgttgcaaatgtattagttaggataggctgagctacagtaagaaatagccccca

SEQ ID NO: 13424 - DNA, 201 bp, Homo sapiens
cccatgggagctccaactctgtttggtcccaatgtgccctttttgtctcactccttcctcccacacatcctgctccccactcccctaattactcatgattscactaacagccacatcctttcacacctctgagcttttggtcatgctgtaatctctacctgagttccattcctgcctccacccttgcctgtcaaattcctt

SEQ ID NO: 13425 - DNA, 201 bp, Homo sapiens
taaatattttaatgtttgtcgtttgtttgcaaccttgtaattttttcctgtgcagcaattttaactttctatattcaaatatactctgaatgcacagtgartttggcagaataccatttaagtcttgtattttccaaagctagtcaacgtccaactgccaatgttgcctgaacaggaaatatttatacctgaaagcgtcca

SEQ ID NO: 13426 - DNA, 201 bp, Homo sapiens
gtttggggcatgttgtcacctcattgccatctctgcctctgtcttctcaccaccatcttccttgtccatgtctctctatgtcttcaatgttcttcttatarggacaccagtccttggatttagagtccaccctaattcactgtaatcacatcttacctaagtccatctgcaaagaccctatttccaaataaggtcacattc

SEQ ID NO: 13427 - DNA, 201 bp, Homo sapiens
ttatctttgggactgctataatgagatccacttagatctagctataatggaattttgtttagtggttctctgatttaaacatgacttttatccttttcagmtatcgtttcattaacatcactacctctttttaaatcctaatgttgtcatggaagcctgtgtaggggctgaccttgaagtctctgaaagctgaacactcag

SEQ ID NO: 13428 - DNA, 201 bp, Homo sapiens
ggcagcaccactgccatggaaattctccagggccgggatttcactggcaaagtggttgtggtcactggagctaattcaggaataggtaggctcttcacttmgttatttatctttgggactgctataatgagatccacttagatctagctataatggaattttgtttagtggttctctgatttaaacatgacttttatcctt

SEQ ID NO: 13429 - DNA, 201 bp, Homo sapiens
tcagtgggccccagttctttcaggtttaaggaataagcattttggtctatgaaaaatggggttttcctaaagtataagattgtcttatatttataaatgcytgtgttcattgctgtgggttcactgctttctcttttgggcagccatataaataaaagaaccacctacttggacccaagactggcgtttactgtggatgat

SEQ ID NO: 13430 - DNA, 201 bp, Homo sapiens
gcattaatatcacctgggaattcaataaaaatgtacattcccaggcccccaccccagacctactgaatcagcactggggtggggcttgcaatctgcgctckaatagtcatccaggggatcctgatgttccctagcttgagagcctcccgtctagagcaggggctgtctcctttgcctgtaaagggctagataatatgtttt

SEQ ID NO: 13431 - DNA, 201 bp, Homo sapiens
tgtagttcccgcaaatctatttacggttttcacaaggaggtcacgaacatgcgttgttttcaatgctgggctagtttcagacttctggcttgttgtgggayggaggagaaagaagacagggcattttgatgtggcccagagaccaaatgaaacaaacgatcctctgattgctcagatgtcctctttgacttggaaagcacc

SEQ ID NO: 13432 - DNA, 201 bp, Homo sapiens
actaaacgatttgttcagattggggaaaaaaattttttttttttttttggttgtggtggcgttggcttttacttggggttgacctttccttatcaaggacrtacaaggtgaatagctgggtgataatatatggtcccatgatcatcaaccaagcaccaacggaagccttttggaagtgcacagtattgtttaacacacaaa

SEQ ID NO: 13433 - DNA, 201 bp, Homo sapiens
aaaaaatatgagaaggttcctgcccttaagaggtttaggatccagctgaagaatcaacatgtgcacatgaaaaaaaatggccgtgccctctaatgtcatakgaggtcagcgtatgaatgacgttgggtgcctgccctgcatatacatatgttctttgagctcattcaagggagaattcccatggattggcacaaccagtat

SEQ ID NO: 13434 - DNA, 201 bp, Homo sapiens
ttgaacccgggaggtggaggttgcagcgagtcaaggtcacgccagtgtactccagcctgggtgacagagcgagactccgtctcaaaaaaaaaaaaaaaaaraaaaagaaaaagaaaaaggtgtttggaagccatgtcccatgaattccaaatacaattgaggactctataaaggactataaaaaaagttgtaataaattat

SEQ ID NO: 13435 - DNA, 201 bp, Homo sapiens
gcccctgagaccagtgctaggattatttccattttgcagatgaggggatggagattaaggagtggggtcacttgaccaaaggtgcacagcgcacagctagrtgccctatgggaaggtcttactgcatctcttaactacctcttgggaccagttaggaaccagtgcttaatgaaacactttgaagttacatctgtggaaaga

SEQ ID NO: 13436 - DNA, 201 bp, Homo sapiens
cattcttcttaaaatacggagcgacataattaaccctctggggagactaatattagtttattagagacaatttctagttctgtttatttttaacactaaaygatttgttcagattggggaaaaaaattttttttttttttttggttgtggtggcgttggcttttacttggggttgacctttccttatcaaggacatacaag

SEQ ID NO: 13437 - DNA, 201 bp, Homo sapiens
acttgaacccgggaggtggaggttgcagcgagtcaaggtcacgccagtgtactccagcctgggtgacagagcgagactccgtctcaaaaaaaaaaaaaaaragaaaaagaaaaagaaaaaggtgtttggaagccatgtcccatgaattccaaatacaattgaggactctataaaggactataaaaaaagttgtaataaatt

SEQ ID NO: 13438 - DNA, 201 bp, Homo sapiens
tattgacctatgtttttaattataactttgggtggtggtctgaaatgaaatgttaagtttgacgcaaaaataggactagtttgtgtaactgatttgttcaraataacagcttacatttctcagagctttttgtatgccaagtgctatgcgaaaccctggatgtacaatattcttatagtagcccctgagaccagtgctagg

SEQ ID NO: 13439 - DNA, 201 bp, Homo sapiens
tgctttaaacttgtaaaaatcagagttatagctgcttttgaactagtacttgttgtgtgcccaggaaatggccaaatgttatcactcatccttccaagaamcacatgaaggttatattattatgtcgactttccagatgaggagactgaggctcagtggcttgtcataggtgtcaaagacaggagtccagtgtaaggactt

SEQ ID NO: 13440 - DNA, 201 bp, Homo sapiens
ttatttcttttcaatactctgaatatcactggagcagctgcagattcagggcagtatggggtggttcaggaacagaactgacaggtattgaagccaaaaaytgaacaataacaacgtaggagggagaatccaaagatagtatgtgttcaggatacgggcactcgtgtgggtgaacacacacacacacacacacacacgctt

SEQ ID NO: 13441 - DNA, 201 bp, Homo sapiens
ttgacaatactttcctttcagtctattttcctgtgtatggggtaagtgttgcccttctgcaactttccttttattttatttatttatttcttttcaatackctgaatatcactggagcagctgcagattcagggcagtatggggtggttcaggaacagaactgacaggtattgaagccaaaaattgaacaataacaacgta

SEQ ID NO: 13442 - DNA, 201 bp, Homo sapiens
catttgcaaaacactttgacaatactttcctttcagtctattttcctgtgtatggggtaagtgttgcccttctgcaactttccttttattttatttatttmtttcttttcaatactctgaatatcactggagcagctgcagattcagggcagtatggggtggttcaggaacagaactgacaggtattgaagccaaaaattg

SEQ ID NO: 13443 - DNA, 201 bp, Homo sapiens
tttatattgctgaaaatgtcatttgcaaaacactttgacaatactttcctttcagtctattttcctgtgtatggggtaagtgttgcccttctgcaactttmcttttattttatttatttatttcttttcaatactctgaatatcactggagcagctgcagattcagggcagtatggggtggttcaggaacagaactgacag

SEQ ID NO: 13444 - DNA, 201 bp, Homo sapiens
ttggagaggcctgtttccatacatagctctttgtcagttgctcacactcggtcaatacttgccttcctttgaggccatctgcactcactgacaatctgatygctcccctgaatggaggtgaaagcatgcaagctaggagttaagatctttaactcagggaagaccctgtctatggaagtgctgagctcttcagtgtcatca

SEQ ID NO: 13445 - DNA, 201 bp, Homo sapiens
ttatatgcctgttccatatgagaacattatgcatatggtgtgatttggtcattccggatggctaaagtgtgagcatacccgtatctcagatttacagaggwgaaaacagaggctcagactggttatgtatatttctctaagtcccccagctattgtttgttgtaggttgggtaccccaggaagtagattctgcaactgaga

SEQ ID NO: 13446 - DNA, 201 bp, Homo sapiens
tctctggaaatctctagcttctcaaactgtttcgtggtggagtgccttttgggcacaggagaaggaaataagagcctcgcgaggtttgggaatgctgcctstagctctcacactgcatgcagaattcctactctgagagctcactttatctcaaaaacccatgcatattctgcatctactctgaattccgcagtgttgtgt

SEQ ID NO: 13447 - DNA, 201 bp, Homo sapiens
attatatgcctgttccatatgagaacattatgcatatggtgtgatttggtcattccggatggctaaagtgtgagcatacccgtatctcagatttacagagragaaaacagaggctcagactggttatgtatatttctctaagtcccccagctattgtttgttgtaggttgggtaccccaggaagtagattctgcaactgag

SEQ ID NO: 13448 - DNA, 201 bp, Homo sapiens
tctgactttccttgactttgatgtctaggtctggatttcaagggctcagaaactctctcatgcatgtagttccctcctgctttgaatctctctgactttcmttgattttgatgtctaggtctggatttcaagggctcacgtgatgaggatagtttctttatcttaagggcaactgatgtggagtcttaattaacactggca

SEQ ID NO: 13449 - DNA, 201 bp, Homo sapiens
ccaagctcattcaggatgctggcaggattcagatccttgaagttgtaagactagggcccctgtttcctactgacttctgctggtggctgccctcagctccsagaggcaacccacattccttgacttttggccccctgcatctcaaagccagcaacagaaactctcttgtgcatggagtcccctcctgctttgaatctctct

SEQ ID NO: 13450 - DNA, 201 bp, Homo sapiens
tcccttgaacctgggaggtggaggttgcagtgagctgagatcacgccattatactccagtctaggcaacaagagtgaaactctgtctcaaaaaaattaatrataataatgttacaataataataatgttagtgatacatatcattttgaaaccagttcttaagcaattaaaaaaaagcagctatggtgattgagtttttgt

SEQ ID NO: 13451 - DNA, 201 bp, Homo sapiens
aagtgctgggattacaggcatgagccaccatgcccggcccccttttttaaaaaacaaaaaaacaaaaaactcttttgtgttttagaaatggggtctcactmtgttcttcaggctagtcttgaactcatggcctccagtgatcctcccgcctcagcctcctgagtcactggaatttcaggcatgagccactgtgcctggcct

SEQ ID NO: 13452 - DNA, 201 bp, Homo sapiens
gatcctttcagagttactcatacgacttacacattcccatgggagctccaactctgtttggtcccaatgtgccctttttgtctcactccttcctcccacayatcctgctccccactcccctaattactcatgattgcactaacagccacatcctttcacacctctgagcttttggtcatgctgtaatctctacctgagttc

SEQ ID NO: 13453 - DNA, 201 bp, Homo sapiens
aaattgctgaagtgcttctcagtgatgaaatgttacagatcagtttgaaatccaactttattcaacataagaaagcctatatactctggagcttaaagacwgaccttttcacttactgtaaggtatctaagacttctgggtgtgggttttaaatatattttggatgagctttgttcatgtttacacatggccaccaggtcg

SEQ ID NO: 13454 - DNA, 201 bp, Homo sapiens
taaaagttgaacaactctgccttaatggcgctaatttttaatatgcctcattctagttgcttgaattgaacgaaggcatttgaaaattgctgaagtgcttstcagtgatgaaatgttacagatcagtttgaaatccaactttattcaacataagaaagcctatatactctggagcttaaagactgaccttttcacttactg

SEQ ID NO: 13455 - DNA, 201 bp, Homo sapiens
atcccagctctttgggaggctgaggcaggtggatcacctgaggtcaggagtttgagattagcttgaccaacatagtgaaaccccgtctctactaaaaatamaaaaattagccaggcgtggtggcgcatgcctataatcccagctactctgggcctgaggcaggaaaatcacttgaacctgggagacagaggtttcagtgag

SEQ ID NO: 13456 - DNA, 201 bp, Homo sapiens
cttcaagattaagaagggactagccgggtgtggtggctcacgcctgtaatcccagctctttgggaggctgaggcaggtggatcacctgaggtcaggagttygagattagcttgaccaacatagtgaaaccccgtctctactaaaaatacaaaaattagccaggcgtggtggcgcatgcctataatcccagctactctgggc

SEQ ID NO: 13457 - DNA, 201 bp, Homo sapiens
gtcatatgctgtgtcaggcactttatatccctcatccaggaggatgcaaaaacctggtgtttttcttttttttttttttgcattttccagacgagccaagrgatggctcagaagggtgaaggaactcacccgaattgcacagctggtgagctcagagtcaggctccttgcttggtccatctggcttccaaactccaagtct

SEQ ID NO: 13458 - DNA, 201 bp, Homo sapiens
cttattacctggtgacacgtgtttctagttattgacctatgtttttaattataactttgggtggtggtctgaaatgaaatgttaagtttgacgcaaaaatmggactagtttgtgtaactgatttgttcagaataacagcttacatttctcagagctttttgtatgccaagtgctatgcgaaaccctggatgtacaatattc

SEQ ID NO: 13459 - DNA, 201 bp, Homo sapiens
ttctcctgcctcagcttcccgagtagctgggattacaggcatgtgccaccacgccaggctaattttgtatttttagtagagacagggtttctccatgttgktcaggctggtcgcgaactcctgacctcaggtaatccgcctgccttgccctcctgaagtactgggattacagacatgagccaccgcgcccggccacagagc

SEQ ID NO: 13460 - DNA, 201 bp, Homo sapiens
gtgaagtctagatctccctgctaacttacactgtgctcaaaacacacacacacacacacacacacacacacacacacacacacacactggctgtcctcacygtcaactctagatctccctgctaacttacactgtgctcaaaaaacacacgcacgcacgcacgcatgcacgcacatacacacacacacacacacccatagg

SEQ ID NO: 13461 - DNA, 201 bp, Homo sapiens
aattatgtagtgtctacagagccagtggtttattttgcattgtttatgtcagcattaagcagtattcttacacagtttgtaagtcttaaaactcagtatckactctagtagttgctccaaatgtgatgtcctcataaatcaccgagggatcttgttaaatttggattctgattcagtaggtctaggtggggcccgagcttc

SEQ ID NO: 13462 - DNA, 201 bp, Homo sapiens
ccttgtttgcccttccccgtgcctcttatgaagctcaggccttttggcagtcagaggcctcaatggtgcctgtgtccacagggctggctgtcctcaccgtsaagtctagatctccctgctaacttacactgtgctcaaaacacacacacacacacacacacacacacacacacacacacacacactggctgtcctcactgt

SEQ ID NO: 13463 - DNA, 201 bp, Homo sapiens
ggatcacctgaggtcaggagttcaaaaccagcctggccaacatggtgaaacccccgtctctactaaaaatacaaaaattagccgggtgtggcggtgcatgmctgtaatcccagctacttgggaggctgaggcaggagaatcccttgaacctgggaggtggaggttgcagtgagctgagatcacgccattatactccagtct

SEQ ID NO: 13464 - DNA, 201 bp, Homo sapiens
cgtgtgaatgtattgcagaaatggacaggacaattctcagcccattcatcttacagacctcaagtgaacaggcacaaaacaacaggctccaccctccttcycccctctatctcatactttacctcaatttatgacttggcttacaatccgttgcagaaagcctagctccccagcttctcctgaatctacgtttttctattt

SEQ ID NO: 13465 - DNA, 201 bp, Homo sapiens
tgggtaccttgcatcctcctttgttcccatactaacccctacaaccatggtcattttgtggttatctgtttaattctctgctggctattccaggctgtcasctccctgactacaaggactttgttgctcacaatcatatccacggcatccacacaagatctggccgctacgtggaaggacacatagttccgtctggcttgg

SEQ ID NO: 13466 - DNA, 201 bp, Homo sapiens
gtgtttcaccaggttggccaggctgctctcgaactcctgacctcaggtgatctgcccaccttggcctcccaaagtgcagagcaggaatttcattggatttstacactgctgctttttcagagcctggaacagtgccaagcacatagtcggccctcagtgagcatttgttgactaacttaggtcacagatgtggggctgtga

SEQ ID NO: 13467 - DNA, 201 bp, Homo sapiens
tttgagacaggagtctcactctgttgtccaagctggagtgcagtggcgcgatgtcagctcactgcaacctccgcctcctgggttcaaacaattctcctacstcagcctcctgagtagctgggattatagtcacctaccaccatacccagctaatttttgtattttttagtagaaacagtgtttcaccaggttggccaggct

SEQ ID NO: 13468 - DNA, 201 bp, Homo sapiens
tgattgtgagaagtccacattgctccatttggacttcctttttgtagtgggctattagattttgcctctgcttgtttctgaatacccaagcttgctaacamagggaaagaccaattatcatgattattattatttaccttaagacctgattctacctatctatgatcacatagacatttggaagcaaagagaaatgctttt

SEQ ID NO: 13469 - DNA, 201 bp, Homo sapiens
cagcctcccaaagtgcagggattaaggcgtgagccaccgagcccagccggcaaacttactttaaaacacattgcaataaaataaaaagaaaagggattgtsctaagtgagaagcagagatgaaaatgtggaaggatgattgtgagaagtccacattgctccatttggacttcctttttgtagtgggctattagattttgcc

SEQ ID NO: 13470 - DNA, 201 bp, Homo sapiens
gcacgatctggcttacgatgatttctaacatctcaccatctttacttctgtatataaatatatgataagtatacctttatatatgtgacatgtatctttayatatgatatgtatggttacatatctactcactcacacatccacacacacacacacacacacacacacacacacacaccttttttggaaccattgaaaagt

SEQ ID NO: 13471 - DNA, 201 bp, Homo sapiens
aggctggtcttgaactcttgacctcaggtgattcacccacctcagcctcccaaagtgcagggattaaggcgtgagccaccgagcccagccggcaaacttaytttaaaacacattgcaataaaataaaaagaaaagggattgtcctaagtgagaagcagagatgaaaatgtggaaggatgattgtgagaagtccacattgct

SEQ ID NO: 13472 - DNA, 201 bp, Homo sapiens
gagaagacagtggattgtttctctgggtggtcaaggaaggcttccaggcagaggaggtttggccatgggtaccaaggggtagagatgggaaccttccaggkacatggacccgatgctgccagcagaggggaaaccatggccctaagggcagagcacactggggcgggggtgggggttcagtgacagtctggtggcctgtgt

SEQ ID NO: 13473 - DNA, 201 bp, Homo sapiens
ctacccccgcccccgggttcaagcaattgtcgcacctcagcctcccaagtaactgggattacaggtgcccaccaccaagcccggctaatttttctattttmaatagagatgaggttttgccatattggtcaggctggtcttgaactcttgacctcaggtgattcacccacctcagcctcccaaagtgcagggattaaggcg

SEQ ID NO: 13474 - DNA, 201 bp, Homo sapiens
tcaggctctcaggccctatccacagatgacctcacaacatgactgttggcttcttcaagactgaaggaggctcccccatgctctgagtcactctcttcagygagggcccagccccttttaagggcctagcgattagatcagtcccacttaggattgaatcccttttgattaatgcaaaaccaactgcgttcaggcctccat

SEQ ID NO: 13475 - DNA, 201 bp, Homo sapiens
caataaaaataaaaagctgtgtgggaagtcagaacttggttgcttcatgtcatatttcctatttttaagatttacagatattaacgactccttgggaaaastggacttcagtcgcctctctccaacaaaaaacgactattgggcgatgctggcttataacaggtccaagctctgcaacatcctcttctccaacgagctgca

SEQ ID NO: 13476 - DNA, 201 bp, Homo sapiens
ctgacccagtgctaggcacgtgagagtgagagggatggaatgcttgcaggagttgccttggatatcacacactgacttgggagacacacatagcgacagawaattacaacatagggacacccggggaaaatgtagacgaggtttaggggttgctcagaggaggaattaactctataaggaagtattctgataatggctttc

SEQ ID NO: 13477 - DNA, 201 bp, Homo sapiens
tcaacttgcactctttcctgcatacagcttgtttctctaatgtggctgttctcatgtttacttaatggcccagccatctcctcctcctcctcctcctcctyctcctgctttctattctccttcctcatcattgtcctcttctgcgagttcagaaaattgggttacaatacctacaacgtgcagtgaggacactcttttatc

SEQ ID NO: 13478 - DNA, 201 bp, Homo sapiens
ttcttcatcaactttggccaaaccttcgtggattcctgtgtgctgattattagtgccttgcctacaaatttttaatacattgacttatctaaatattcctscatgcacactccccaatctaagaaaaatgtgagatgttgggaaatgtttccaagaatagaccaaaggattagtcagcctagagaagtgaactttaagagg

SEQ ID NO: 13479 - DNA, 201 bp, Homo sapiens
gtctgactccagaagcactttcctcttttgcctcctaatacattttcttatagggagcatcctgcaatacaactgttaagaccacttaatgttatctttgrattaaaaatggtaccactctcataaatcaatgagtttcataccctaaattatgccagattaagaaaatgaaatctgactgtaaattacttctctaggagc

SEQ ID NO: 13480 - DNA, 201 bp, Homo sapiens
aaaagttgctatcatgtccttcaataacccagtctaaccatgtttttccagtggaaatgattcccggtagaatgtcctatgttccttttgcacatttctcmttacaaacatcatctcatttaatcctcaccacaaaactgatagtgtcatctccaatttatagttgaggaaatagaggatcagagaagctacgtgatctat

SEQ ID NO: 13481 - DNA, 201 bp, Homo sapiens
tccaggtactttcacctctaggctcttacctggcttttgtgaagcccctcagggaagaggaggaaagctgggcaagggggaggggtaaaccaagtcccagsaaagtcattccagtttcccaagatcccggagcttgtttgtatccagctgagatccagttgagaccagaattcactctctccacacctccatcagctgtgg

SEQ ID NO: 13482 - DNA, 201 bp, Homo sapiens
gtatacaagtttctgtgtggacatgttctcacttttcttgggtatatacttaggggtggaattgctgggtcatatgatcagtctaggtttaactttttgaygaactgacaaactgctatccacagtggctgcctgtaccattttacagaaaatctctgcttttaatacttctggatgtgttctaaggcactaggcttttca

SEQ ID NO: 13483 - DNA, 201 bp, Homo sapiens
aacttctgagtggtgagtataagtgtgattattatattattcttagtatttggtttttttctgtagtgtgtagtttccctccatgacactgagggctcagrtggctctgaccttggagacagggagacatttagtgaaggaatgggaggtaaggagctggcatctctggtgtgtccatcatgcactgacctgcactagatg

SEQ ID NO: 13484 - DNA, 201 bp, Homo sapiens
tccacccacctcggcctcccaaaatgctgggataacaggcatgaaccaccatgcccggccatcagaaatattttatttcactattttaaaaaattagcaargaagcaaatatgacaaaatgctaacaattccaaaatgctaataacttctgagtggtgagtataagtgtgattattatattattcttagtatttggttttt

SEQ ID NO: 13485 - DNA, 201 bp, Homo sapiens
gattacaggtgtgtgctaccacggccggctaatttttttgtattttattagagacggggttttgccatgttggccaagctgatctggaactcatgtgctcragcaatccacccacctcggcctcccaaaatgctgggataacaggcatgaaccaccatgcccggccatcagaaatattttatttcactattttaaaaaatt

SEQ ID NO: 13486 - DNA, 201 bp, Homo sapiens
tgactcactgtgttgatgttatgttttctaacattgactttcctttaaaccatagggttcgaaaccgccaagtcttttgccctccatggtgcacatgtgaycttggcctgcaggaacatggcaagggcgagtgaagcagtgtcacgcattttagaagaatgggtaagcgcttgactgttgttgttttttttaattgtcaaa

SEQ ID NO: 13487 - DNA, 201 bp, Homo sapiens
gaccttgtgtccgtccccgctggccctcagttctctggatcagggttgaaaggctgaaattctttgggtgttagcttaggatgcctctgatccatcctaasccgacattcccttgatctctcctgatctgtgagcatcctggcccttcttttcttttcagttttaatttttgcgctggctccaaccccttttcattcctga

SEQ ID NO: 13488 - DNA, 201 bp, Homo sapiens
ttcagtggagtgtgtaaagtttattgctcttggaatcatgtctttatttttaaagtcatcttcactttgtttgtcttatgaatgaaagcatgagcaagtcmattattattcacgcatttgtttgtagttcattgtcagtgtcatctgctttattagtcaggggtttgagaatgtttcttcctttaactcatttattaagaa

SEQ ID NO: 13489 - DNA, 201 bp, Homo sapiens
gcgtctcctcctttgccactcagccccagaggtgcttctgcttccctgcaggcttgccctggagcctggcgctagggccctggggctcccttgctcctgcktgccccctgcgcctgccttcctgctgcctggcctttctcccatctgctttcttcctgagtggcccctggccaggggactcgggtgcatacatggtttcca

SEQ ID NO: 13490 - DNA, 201 bp, Homo sapiens
gaaaggctccttctcatccttcagagctgagcttacatgtcactgcccaagagaccttcttaactgtgggtgtcccctcgaccttgtactagtcaccttgyttctctgcttcttcgtgcttagccttggctgtgtactcctccttgttggccctgtctcccttgcccaggttgcagatgtcatggggcagcttgttcatct

SEQ ID NO: 13491 - DNA, 201 bp, Homo sapiens
agtctaggtagagggaacagtgagaggagagaccccctgcatggcctgtccaggggcctgtgatctttgtgagggtccaggaatgtgaaggttaaggcagsgaagggaggacccatttcaaggatttctgtgccttgccgagaagcttgggctctgttggcagagccagagagtggcattcattcagcttgtgaattctgg

SEQ ID NO: 13492 - DNA, 201 bp, Homo sapiens
gggtcagttcaggcactgtgcgtaaagcacatagcaccgtgtctagtaggtactctctgttccttaactgtcgttccttgattgctcttaagatacgacartgcctcttatatcggcaccttagaatcacctaggaaatgtcctaaatacacgttttgggtctccatagagaacctactgtagccgactctcaactttggg

SEQ ID NO: 13493 - DNA, 201 bp, Homo sapiens
aaaatgggttgatatgagggtcagttcaggcactgtgcgtaaagcacatagcaccgtgtctagtaggtactctctgttccttaactgtcgttccttgattrctcttaagatacgacagtgcctcttatatcggcaccttagaatcacctaggaaatgtcctaaatacacgttttgggtctccatagagaacctactgtagc

SEQ ID NO: 13494 - DNA, 201 bp, Homo sapiens
ttttcacctgtaaaatgggttgatatgagggtcagttcaggcactgtgcgtaaagcacatagcaccgtgtctagtaggtactctctgttccttaactgtckttccttgattgctcttaagatacgacagtgcctcttatatcggcaccttagaatcacctaggaaatgtcctaaatacacgttttgggtctccatagagaa

SEQ ID NO: 13495 - DNA, 201 bp, Homo sapiens
ctgcaaactacccccgcccccgggttcaagcaattgtcgcacctcagcctcccaagtaactgggattacaggtgcccaccaccaagcccggctaatttttstattttcaatagagatgaggttttgccatattggtcaggctggtcttgaactcttgacctcaggtgattcacccacctcagcctcccaaagtgcagggat

SEQ ID NO: 13496 - DNA, 201 bp, Homo sapiens
tatttttcgagatggactttcgcttttttgcccagcctggagtgaagtggcatgatctcggctcactgcaaactacccccgcccccgggttcaagcaattstcgcacctcagcctcccaagtaactgggattacaggtgcccaccaccaagcccggctaatttttctattttcaatagagatgaggttttgccatattggt

SEQ ID NO: 13497 - DNA, 201 bp, Homo sapiens
cctggtggcagtattggtggtcacagctggcaaagggaagtgtggctgcccggagagcttggctgaggttggaacgtgggagtttaagagagcaaactccmacagcttggtgcagagagaaaagtgtagaaaggtcgggtgtcatacagcagagggctgtgatgctctactgaggagtggaagtgtttttctgagggcatc

SEQ ID NO: 13498 - DNA, 201 bp, Homo sapiens
caggttttaggcaataataagtgagcagtatggcgccctaatagaaggagggatgcctgtggccaatatacacggctcaaagttgaccatgatagagaagytttccctagaaggtctgtgagggaggaggcctgggagagacagcagggtgaccagagtaagtgaagtcaccgaggtgccaatgagtgtggccctgcaggt

SEQ ID NO: 13499 - DNA, 201 bp, Homo sapiens
gcaggttttaggcaataataagtgagcagtatggcgccctaatagaaggagggatgcctgtggccaatatacacggctcaaagttgaccatgatagagaasctttccctagaaggtctgtgagggaggaggcctgggagagacagcagggtgaccagagtaagtgaagtcaccgaggtgccaatgagtgtggccctgcagg

SEQ ID NO: 13500 - DNA, 201 bp, Homo sapiens
caaatatcttactcctgggctgtgctggggatggcagcagagtggggtggttggatgggaaggcgggaaagagctagcttggagatgatacgcttttccayccttgaataacttgggaaaaagtcaggagtgtggaatgaagaattggaatataaaggctgagggcggacctaattttttttttaaggattaagaaaaaag

SEQ ID NO: 13501 - DNA, 201 bp, Homo sapiens
aggttcacatgataaatattttctgctttgtggcctacaaggtacctatcacaactactaagctatcatgcattagtgaaagcacatagataatctataarccaatgggcatggttgtgtgacaataaaactttatttagaaaaacaggtggtagactggatttagcttgtgggttgtagtttgctggcctctggtcaaga

SEQ ID NO: 13502 - DNA, 201 bp, Homo sapiens
gaggttgcagtgagctgagatcacaccactgcactccagcctgggtgacagagcaagactgtctcaaaaaaaaaaaaaaaaaaaaaaaaattcaacatacsaattttgcgaggacgcaaacatttaatccgtagtactgatgtggatatgatttgagctaagactctgctgttgattctcttcaaaaacttggcagtagcc

SEQ ID NO: 13503 - DNA, 201 bp, Homo sapiens
ttttcaacgagagttcagaaccacaccatacgggcagtagtccgcattttcaacatttcctaacagcacaattgttaggtagctaacaattgaattgactrtgtcaggtagacttatttttcgagttgtgctggttaactgcaatccaagtttaggaagcaaactaccaatttcatttaatagaatgagctaaccaaggca

SEQ ID NO: 13504 - DNA, 201 bp, Homo sapiens
ttccaatgataaatcctccctcctttgtcacagagccactgtgtactttcatagaccatcctatttttcaacgagagttcagaaccacaccatacgggcartagtccgcattttcaacatttcctaacagcacaattgttaggtagctaacaattgaattgactatgtcaggtagacttatttttcgagttgtgctggtta

SEQ ID NO: 13505 - DNA, 201 bp, Homo sapiens
tataactatctgcatttcaggtacagtgatctcctttaaaaaggctgcgtcccagcagcatagaccagctttacctcccagcgtagtcttcagacaagttrgggtattgccgaagtccattcttgactttttttaatagtgcaaacaaatcatcttgtttttaggaaaacatgaaattataaagaaattgacttcaatcac

SEQ ID NO: 13506 - DNA, 201 bp, Homo sapiens
gccaaattgaagggtaaactgagttcaccaggcaaactgaggaagggtactcaggctgaaggatcatgggaggggaggagcgtgagttcctcttaagtgartataaaccagggggtaggaaacaacatgagatgaggctggcgagagagaaggatgccaggtgaggtgctgtggtgcgccagagactgcggaagtggcttt

SEQ ID NO: 13507 - DNA, 201 bp, Homo sapiens
aatctttcggtctaagcaaattaatgtcatttttataactatctgcatttcaggtacagtgatctcctttaaaaaggctgcgtcccagcagcatagaccarctttacctcccagcgtagtcttcagacaagttggggtattgccgaagtccattcttgactttttttaatagtgcaaacaaatcatcttgtttttaggaaa

SEQ ID NO: 13508 - DNA, 201 bp, Homo sapiens
ggccccctgcatctcaaagccagcaacagaaactctcttgtgcatggagtcccctcctgctttgaatctctctgactttccttgactttgatgtctaggtytggatttcaagggctcagaaactctctcatgcatgtagttccctcctgctttgaatctctctgactttccttgattttgatgtctaggtctggatttcaa

SEQ ID NO: 13509 - DNA, 201 bp, Homo sapiens
aatcaactcaattaccagccctctcagacattttcataatgttttctggtagttgctctcctgtgaaaatctttcggtctaagcaaattaatgtcattttyataactatctgcatttcaggtacagtgatctcctttaaaaaggctgcgtcccagcagcatagaccagctttacctcccagcgtagtcttcagacaagttg

SEQ ID NO: 13510 - DNA, 201 bp, Homo sapiens
acttttggccccctgcatctcaaagccagcaacagaaactctcttgtgcatggagtcccctcctgctttgaatctctctgactttccttgactttgatgtytaggtctggatttcaagggctcagaaactctctcatgcatgtagttccctcctgctttgaatctctctgactttccttgattttgatgtctaggtctgga

SEQ ID NO: 13511 - DNA, 201 bp, Homo sapiens
accaaggtcatactaatcaactcaattaccagccctctcagacattttcataatgttttctggtagttgctctcctgtgaaaatctttcggtctaagcaarttaatgtcatttttataactatctgcatttcaggtacagtgatctcctttaaaaaggctgcgtcccagcagcatagaccagctttacctcccagcgtagt

SEQ ID NO: 13512 - DNA, 201 bp, Homo sapiens
gttcagaggcagtgaaagcgtgcttctcaggactcattgtccagaagattctgcctacagctggttttacgcagagaagtagcacacaaacccagtccatsatttcttatttgactctgtcctgtttactctgtcagggtgaaaagcacaggccaagctcggctagtcaaagcattactttgtcacaggcaggcttggctt

SEQ ID NO: 13513 - DNA, 201 bp, Homo sapiens
gtattctgttccctctttgctagttcagaggcagtgaaagcgtgcttctcaggactcattgtccagaagattctgcctacagctggttttacgcagagaastagcacacaaacccagtccatgatttcttatttgactctgtcctgtttactctgtcagggtgaaaagcacaggccaagctcggctagtcaaagcattact

SEQ ID NO: 13514 - DNA, 201 bp, Homo sapiens
ttcccactgcagccggtagcatattgcttcataaatgtctataaaaaaatacgaaaaatagaatcagagcaaattcagcatagacctccttgggatgtttwttctttgtttatgttggtgttttgttttgtgttgtttcagctggggtgcagttgtattctgttccctctttgctagttcagaggcagtgaaagcgtgctt

SEQ ID NO: 13515 - DNA, 201 bp, Homo sapiens
aatatatggctttttcctattggaaaaaattagtcgtgtgaactttattcttcaagaaaaagtagtttttatctgccttggaaatgtcaaaaggattcacragtttcacaagtgatgatctgggttgattgctaggaactgtttttagttagtttttttttttttttttttttttcagacggagtcttgctctgttgccca

SEQ ID NO: 13516 - DNA, 201 bp, Homo sapiens
agccagacatggaatcctttcttatgattaatgcagctaaatttcccactgcagccggtagcatattgcttcataaatgtctataaaaaaatacgaaaaayagaatcagagcaaattcagcatagacctccttgggatgtttattctttgtttatgttggtgttttgttttgtgttgtttcagctggggtgcagttgtatt

SEQ ID NO: 13517 - DNA, 201 bp, Homo sapiens
cctaaggtcccagccacctatggttctttggacctgtgattttcgctgaccccgaatgactggaggaactgctgcctgcatccccaacccagccctccttrtcagtcacgtagaaagcagttattgtttccaagttccctgcccttgttaaatgtcagctttgagtgaaaatgttcctaattttactcagagtgcaaagaa

SEQ ID NO: 13518 - DNA, 201 bp, Homo sapiens; identical to SEQ ID NO: 2532

SEQ ID NO: 13519 - DNA, 201 bp, Homo sapiens
ccatgagtaacgaagtcctctgtatctgatcctgggtctcctgttttctgctagcttcctcaaaacttggtagctaactcattaacttacaaggaagaggktgaacgtgtagacccttcacagtttgaaaaatcacctgatcaataactgagattatgaaaaggtaggaatgaaccaattatggcccaaaggctaactcca

SEQ ID NO: 13520 - DNA, 201 bp, Homo sapiens
aaatatgtgtatatatatatttgttagggtaaaacaaagtctataaaaactgttttcctttgttattgcccccaccaaatatttatatatatatacacacctatgtatatatgtatgtatagagagtctattatatatattacatatacataatatatacataatatataatagactctataatatagactctaataatta

SEQ ID NO: 13521 - DNA, 201 bp, Homo sapiens
tttgggctgttattaggtagactctcctgggacattctacacagctcctgcctccttctgtatgtaatatatatattatatatatataaaatatatattakgtatagataatttatatataaatatgtgtatatatatatttgttagggtaaaacaaagtctataaaaactgttttcctttgtcattgcccccaccaaata

SEQ ID NO: 13522 - DNA, 201 bp, Homo sapiens
cctgagtagatgggactacaggcatgtgtcaccatgccaggctaatgtttaaaaatttttcttagaggtagagcctcactttgctgcctaggctgatctaraactcctggcttcaagtgatcctcctgccttgagctcccgaagcgctgggaccaatagagatttctctgagaattaggtcccccactattaataaggtca

SEQ ID NO: 13523 - DNA, 201 bp, Homo sapiens
tgcagactgtataggcttctgcctctcgggaggcctcaggaaacttacagttatggcagaaggtgaaggggaagcaggtaatgtcttcacatggctggcastggaggaagagagaaagtagggaggtggtagatgcttttaaacaaacagatctcaggagaactctttcacaagacagcactagggggatggtgattagaa

SEQ ID NO: 13524 - DNA, 201 bp, Homo sapiens
tcttatttatcctgcatttataaatacacaaattcttgtacaattaactcagtttttcactcctttcttgcttgcaacttgtcaggtcgttccctccccastagttgtgaacttctttatgctagcttcttccatcaggggctcacaaccagggactgtagaggtttgcagaggtaaatcttggtagataaggattttatg

SEQ ID NO: 13525 - DNA, 201 bp, Homo sapiens
acgagacactcattccgaaggcgggtgtgtatgtgcaaactgtataatttttttcttcttttctatctgctagcaaagtgggtaagttgacccatgacatsgtccactggagggaccacatttgtgactctagcaattaagcctcccttctcatctgtggataaaactgacctcccagtgtgctggagtcaaacatattca

SEQ ID NO: 13526 - DNA, 201 bp, Homo sapiens
acaaggcagtagaggttggacgagacactcattccgaaggcgggtgtgtatgtgcaaactgtataatttttttcttcttttctatctgctagcaaagtggrtaagttgacccatgacatggtccactggagggaccacatttgtgactctagcaattaagcctcccttctcatctgtggataaaactgacctcccagtgtg

SEQ ID NO: 13527 - DNA, 201 bp, Homo sapiens
gtctcagtttcataatatgtgtaaaaattatcatgcccattcattatttaaagtgctgtggctttttagtgaataccaacattaacaaaccatgttaacaygatttaaaatatgtaatgaaatttgcaatgcatcagatgatggaactatcaaattagttcacgtggcgttggctgatcacccttatgaagagttacttgc

SEQ ID NO: 13528 - DNA, 201 bp, Homo sapiens
gaaagagagggaactgaacgggatgctttttattttgggctgttattaggtagactctcctgggacattctacacagctcctgcctccttctgtatgtaayatatatattatatatatataaaatatatattatgtatagataatttatatataaatatgtgtatatatatatttgttagggtaaaacaaagtctataaaa

SEQ ID NO: 13529 - DNA, 201 bp, Homo sapiens
atctatatatagatatctatataatatatataatctatatatgatatatatatcttattatatattatatatatagatagatatctatatacagatatctrtatacagatatctatatatatagatatctatatatatagatatctgtatacagatatctgtatatatatatagaaagagagggaactgaacgggatgctt

SEQ ID NO: 13530 - DNA, 201 bp, Homo sapiens
tattttttctagtttttttgttttgcttaataggctctctctctgtctctttctttctatatatatatataatatatagaaagatatataatctatatattgatatctatataatatatataatctatatatgatatatatatcttattatatattatatatatagatagatatctatatacagatatctgtatacagata

SEQ ID NO: 13531 - DNA, 201 bp, Homo sapiens
taaatagtggatgtattttttctagtttttttgttttgcttaataggctctctctctgtctctttctttctatatatatatataatatatagaaagatatrtaatctatatatagatatctatataatatatataatctatatatgatatatatatcttattatatattatatatatagatagatatctatatacagatat

SEQ ID NO: 13532 - DNA, 201 bp, Homo sapiens
cctgggacagtctacacagctcctgcctccttcttttcttcaggattatctcgagttggtttgcaaagtgaaacgcattagacatcttcaagtgggctgaagaaagggactcaatttttgtgggtccatgttaatgtaattcttatgaatttgagataaagtggtcattaaagcctagaaggaagggaaaagctacacccc

SEQ ID NO: 13533 - DNA, 201 bp, Homo sapiens
cactgcagtcctgggacagtctacacagctcctgcctccttcttttcttcaggattatctcgagttggtttgcaaagtgaaacgcattagacatcttcaagtgggctgaagaaagggactcaatttttgtgggtccatgttaatgtaattcttatgaatttgagataaagtggtcattaaagcctagaaggaagggaaaag

SEQ ID NO: 13534 - DNA, 201 bp, Homo sapiens
cagtattttgtcctattcatgcaatataatttatataacctaattgataaaacattttggttgattgcagtctgtcgtagataatgccgtactgaatattmctcccacatatttgcaagtctatttgtaggataaatttctggttgtggctgggtcaaagagcatgtccacttcaaatttgatagctatgtcccaactgcc

SEQ ID NO: 13535 - DNA, 201 bp, Homo sapiens
acaagtcacagggcttatctccattgttctgaacgatctgtagctaaacaaaaagataaaagctattaatattattaatagttgtagattaccgggaagarcgcatcctaaatcagccattagatttgttcctcatttctttgctttacaaattgtttttctgtatagtattggattttcaataaataaagtatgatataa

SEQ ID NO: 13536 - DNA, 201 bp, Homo sapiens
gcaagtgtgatcattcaggtaatcaaagtaactacagaaacagaggtatggattagctagtcattgcagatgtggcattgagcatataagcgtggtgtacwtcttagaacttcatctggaaatgcctgtgggggagttggatttcaagatcatcgtcaatgtcatgtcactgtaatttcatttacattaatcagattagtt

SEQ ID NO: 13537 - DNA, 201 bp, Homo sapiens
tcccatcctggcactgcagtcctgggacagtctacacagctcctgcctccttcttttcttcaggattatctcgagttggtttgcaaagtgaaacgcattagacatcttcaagtgggctgaagaaagggactcaatttttgtgggtccatgttaatgtaattcttatgaatttgagataaagtggtcattaaagcctagaag

SEQ ID NO: 13538 - DNA, 201 bp, Homo sapiens
atgcggaagccttcgcccccttcttgagggtgtttagggattagatgagtgtcccatctgggtttcccatccctgcagagcccacgtgtggggtgctgagrggtacgtggtgggtgactccctggggagcactgtttggtactgatcactgtcccatcctggcactgcagtcctgggacagtctacacagctcctgcctcc

SEQ ID NO: 13539 - DNA, 201 bp, Homo sapiens
ccgaggctggggaggttgaggccgcagtgagccgagatcgagtcactgcactccagcctggacaacagagtgagaccctgtctcaaaaaaaaaaaaaaaaatccagtaggaaactatataaacactagggttgctttaaaatgtcaaggccaactcttatgatatgcggaagccttcgcccccttcttgagggtgtttagg

SEQ ID NO: 13540 - DNA, 201 bp, Homo sapiens
tacaagggccggatgcggtggctcacacctgtaatcccagcactttgggaggcctaggcgggtggatcacttgaggcctggagtttgagaccagcctggcyaacatggtgaaaccctgtctctactaaaaatacaaaaattagccaggtgcggtggcgcaaacctgtaatcccagctacttgggaggctgaggcaggagaa

SEQ ID NO: 13541 - DNA, 201 bp, Homo sapiens
cgaatggttttccaatcttcaaaccaacctatatcacaaaagcattctgaaaactgggaagagatcacttcacagtttcctgaaccactagaaaaaaaaaatgttcataaatttatagccgctgacattgaagttggagaaaagagcatatctagtacctatgctatgtggagaacactctccatgtctttgaaaaataag

SEQ ID NO: 13542 - DNA, 201 bp, Homo sapiens
gggttttaccatgttgcctaggctggtctcgatctcctgggctctagcaatcctcccacctcggcctcccaaagtgttgggattacaggcgtgagctaccrtgcccggccttacgtttcagcatctttcaatccatctaatacgcagtgccagggaaggtttgtgaaaacatttgaatcacagagtcacaaacagtgagaa

SEQ ID NO: 13543 - DNA, 201 bp, Homo sapiens
aaatcaggatgctcaggaaataccttgtttggaataggaataggctcctccctttttttctcacttgccttgattgctctgtattaaaattcataaaggcycatgaattatcaattagatagcatttggtttgttatttttagtttcttcctatagcaggcatgtatgcatgtgttaaaaatggaagtagcgtcgacatta

SEQ ID NO: 13544 - DNA, 201 bp, Homo sapiens
aaacaaaaaggaggataccaatttaagcttgtcaaaaagattttcccccaaaagaaaaacacattaaaaacaacgacaaaaatcaacaaaaactaacactrttcccccatcaacaatcaatattactttctaaaagcaagggcgttttgacaccagatattgtgaggacatccacctgctctaagggacagccatttcact

SEQ ID NO: 13545 - DNA, 201 bp, Homo sapiens
ttcaaaagctacagagataccgtaacatttaaaaaaataaattttcattgtggaaatcaactgccacaaaaacacaaccttttacgagacaacgtgatgtrcatgagaagccctgatgttgagaagctcataattcggtgtgagaaacacacaaggcatgatgccattcccatctgggatgaacagggaagacttcctggg

SEQ ID NO: 13546 - DNA, 201 bp, Homo sapiens
ggtcttctaattctctgtgatgaagttcaaactgaagactgttactagtgtcgtgtttgtttctttttctctctcttttgttttgtttgtataaaatgccrgggatgaagggatccacttaataaaaaggcccattgtgttcagggagcagcctgttctgccaaatcacacaagggcatgtgttttcatgacattattgct

SEQ ID NO: 13547 - DNA, 201 bp, Homo sapiens
gtgggcttttctttctcatttgctttcgcttagtattttccattattcatttggcttcttgaaccctccctatctgtaccccacacttactcttattcacycagaacaggtgtgtgccaccttggagaagatgaagccagagagaaaatcagtcagacaggaattatgttgaaaggtgactgaatacattaccacctccca

SEQ ID NO: 13548 - DNA, 201 bp, Homo sapiens
gctctttttttctctctcactctgagtatttagaggcttttattgctatttttctaaaaggcaacattagtaatcaactttgccaaaaatttcatatgaayggtgggcttttctttctcatttgctttcgcttagtattttccattattcatttggcttcttgaaccctccctatctgtaccccacacttactcttattca

SEQ ID NO: 13549 - DNA, 201 bp, Homo sapiens
gaaaagattactgacgatcaacatgctgaactgacatttcacagatatgcagatttattcatctctgttcaaggtatgccttttccaatcataatagccaygtagaggacattaaacaaatattttattgtggtaaaaacacttaacatgagacctacccttttaacaaatttttaaatatataatttattattattgttg

SEQ ID NO: 13550 - DNA, 201 bp, Homo sapiens
cactttctgttggactgcttttggaaaaagaaccacaagtctctatttttaaaatagaggtacaatgataaaacaaaacaaaacaaaacaaaaaaacaacaaaaaaaaaacccacacaggtctcatcagccaagggatttaaaaatcaaatttaacttcaaaaaactgaagttgatatagcaggatcttggagatgcagtt

SEQ ID NO: 13551 - DNA, 201 bp, Homo sapiens
tgtccaagaagcatggtgccaatgtatttctgatgagggcgtcaggcagcttctactcatggtggaaagtgaaggggagccagcatgttcagagaacatayagggagaaagggagcaagagaggggaggggaggtgccagagcctttaaaagaaccaactctctgggaacaaatagagggagaacattaatctagccatga

SEQ ID NO: 13552 - DNA, 201 bp, Homo sapiens
cacaaatgtgatccttctggaggccagaagatagattcagtgggccccagttctttcaggtttaaggaataagcattttggtctatgaaaaatggggtttkcctaaagtataagattgtcttatatttataaatgcctgtgttcattgctgtgggttcactgctttctcttttgggcagccatataaataaaagaaccacc

SEQ ID NO: 13553 - DNA, 201 bp, Homo sapiens
ccacctaatttttgtgtttttagtagagatggggttttgccatgttgctcaggctggtctcaaactcctgacatcaggtgatccacctgcatcggcttcccaaagtgctgggattacatgcatgagccatcgcgcctggctaggaactcctgtttctgtttttatcctcttcccaagtctgcaggccccgcctggcccacc

SEQ ID NO: 13554 - DNA, 201 bp, Homo sapiens
aaagcacacacaatgatggccagagacactgctcagtgtactgtcttccaccgggacagcccactcaccaagggttaggtcctgtgctgactgggtcccgkgtctcctcggaggtcggtttgcatcacgtggatacactaatctacccaagttgacttggagaaccaatctgaaatcagatgggagctcccggaagcaaag

SEQ ID NO: 13555 - DNA, 201 bp, Homo sapiens
tgaggcaggagaatcacttgaacccaggaggcggaggttgcagtgagccgagatcacgccattgcactccagcctgggtgacagagtgagactccgtctcaaaaaaaaaaaaaaaaaaaaaaatctgtgttcttgcctggcttattgagctccatggtaaatgttcagaggctgcaggaatgattcaaagtctgactgatt

SEQ ID NO: 13556 - DNA, 201 bp, Homo sapiens
cattaaataacatgtccaaagtctcccatttcagagacaggggcatttggctccaggtttttctgactctagacagtagtttgtttttagcacatcaaatktctgagacttgtgatgtgttagaaagcacaaaggactttgatcacaagatcaagccccagagggccatgactgcataaaccacaacaactgcgtggctgc

SEQ ID NO: 13557 - DNA, 201 bp, Homo sapiens
acaagggaatatgtgaggtagggtaggacattttggtagcagtcacacagcccaaagagcatggtgaatttaattagtctgccacacctgtatggccttaygttttccgggataacttaacaagcattgtgtgcagccaggtcaggcagatggaggttctaatccaggctgcacacctcatcagccaggagactacagata

SEQ ID NO: 13558 - DNA, 201 bp, Homo sapiens
aatcccagctgctagggaggctgaggcaggagaatcacttcaacccggaaggcggaggtttcagtgagctgagatccagcctgggtgacagagcaagactycatctcaaagcgaaacaaaacaaatgagggtcctcatcagcgtgcctttgacactgtcctctggtcctggtgatctgaatacatcaccacagaactgcca

SEQ ID NO: 13559 - DNA, 201 bp, Homo sapiens
agagcaagactccatctcaaagcgaaacaaaacaaatgagggtcctcatcagcgtgcctttgacactgtcctctggtcctggtgatctgaatacatcaccrcagaactgccagggtacgtgtttcctagcccatagcgagtcccagtgaaagcagagatgagaaagaaaggagggacacaaggtctgggtcctgagttcca

SEQ ID NO: 13560 - DNA, 201 bp, Homo sapiens
tgctggattatctagtccctgaacagccatttatatttttgttacgcttgtggtttttaaatcatcctcatttccttgatcgcatttgcttctcctggctrgaatgtgtaggagacgggtcggggagactgtgcccatttgacaggtgtgaatgcgaacagaggctgcagctggttagaccagggctgtgcaaccctagag

SEQ ID NO: 13561 - DNA, 201 bp, Homo sapiens
gcttgtggtttttaaatcatcctcatttccttgatcgcatttgcttctcctggctagaatgtgtaggagacgggtcggggagactgtgcccatttgacagrtgtgaatgcgaacagaggctgcagctggttagaccagggctgtgcaaccctagagccattgccttgaccacaaagccacagtctcctagtcctaatatta

SEQ ID NO: 13562 - DNA, 201 bp, Homo sapiens
ttaaatcatcctcatttccttgatcgcatttgcttctcctggctagaatgtgtaggagacgggtcggggagactgtgcccatttgacaggtgtgaatgcgracagaggctgcagctggttagaccagggctgtgcaaccctagagccattgccttgaccacaaagccacagtctcctagtcctaatattaagaggtaggag

SEQ ID NO: 13563 - DNA, 201 bp, Homo sapiens
ggagacgggtcggggagactgtgcccatttgacaggtgtgaatgcgaacagaggctgcagctggttagaccagggctgtgcaaccctagagccattgcctygaccacaaagccacagtctcctagtcctaatattaagaggtaggaggtagatagagattgtcccttaagccacattccattcttcatatttttgtaccca

SEQ ID NO: 13564 - DNA, 201 bp, Homo sapiens
gacttaatcttcatgatgtttgtaaagtaatacttcttggagaaacctcccaaatttctatcgacactagacatctcaggatttgaaatgttaagctaacraattgttcatcaggtgtatctccagccctccgtaaacactgccggatggatgaacctacgtaatgatctcctggtgccattttcctgactgtagatactt

SEQ ID NO: 13565 - DNA, 201 bp, Homo sapiens
ttcccttgcatttggttttcatcccccatagtcttcctttttttattttttattttatttatttatttatttatttatttatttatttatttatttatttattttttgagacagggtcttaatctgtcccccaggctggagtgcagtgacatggtgatggctcaccacagcctcagcctccctgggctcagtcgatcctcc

SEQ ID NO: 13566 - DNA, 201 bp, Homo sapiens
tgctgtttaggaaagaaaaatgatatcgctcagaaaatcatttaaaaacttcctggtgaatgcacccagctcgccaatgcatgccagccacagggcctcayagcacatttcaggagcaagacaattcagaccccactcttccccctgaaaaacctccttccagaaccctcttttgcagtgagcagagataagcctctccaa

SEQ ID NO: 13567 - DNA, 201 bp, Homo sapiens
gctccctggaagatggatcttgccttgtggatgtttttctaccgtgacagaagatagaaaggatgaaatagaaagagtgtgagtgaattctgcacccaccmcccccccccagcttccccacctgtaaaatgatttgctcaaagtttgcaaagaatggaggcatattcaaagtgctcagcactgggccggacccatgggtat

SEQ ID NO: 13568 - DNA, 201 bp, Homo sapiens
ccagatccaaaaagttattttggcaaaatgaaatcagaacgtggccccttccatgaaagtcagctcaggcgtagaatgttcttttttttaattttttttttaacgaaactcacatcttctttaaataaaatctccatttagaaatttttgaagacttgtggatagaagaagtaaccttgaaaagggcagagctgagccaga

SEQ ID NO: 13569 - DNA, 201 bp, Homo sapiens
agtttgtcttggctctgatcacccctttttgtgacttagctggctgggaagtagcaaaagtatcttccaagctcagcttctctctgcttgcattctttccmaatacgtgattccaaagcccatgcccaatccttgcactgaagcttttagcaggaaaggtgaacagaggcatctggatgcatcgcggccagtctgcccctt

SEQ ID NO: 13570 - DNA, 201 bp, Homo sapiens
gtgttcttgcctggcttattgagctccatggtaaatgttcagaggctgcaggaatgattcaaagtctgactgatttatgtgcattgggcattttgttgatrtcattcagattaatgatggcactgaaaatgtgtaatggaaatgagaagtttgtatcctgcctgctataccatgattccaatttaagagggggtaaaaata

SEQ ID NO: 13571 - DNA, 201 bp, Homo sapiens
agaaatactcccttctggacactggaagggcaaatgaggtgcaagccttttttttttctttcttttcttcttcttcttcttcttttttttttttttttttttgtttttcctcccagcctctctcctttcccattatgcacaatgcgctgagaaaggattcccagtccccctggtaaaaagtctgaaggatgccgaggagtt

SEQ ID NO: 13572 - DNA, 201 bp, Homo sapiens
gttcagaggctgcaggaatgattcaaagtctgactgatttatgtgcattgggcattttgttgatgtcattcagattaatgatggcactgaaaatgtgtaayggaaatgagaagtttgtatcctgcctgctataccatgattccaatttaagagggggtaaaaatattgcactttttaatctattgttttttgaaagagact

SEQ ID NO: 13573 - DNA, 201 bp, Homo sapiens
agagcccaggaagtctaggctgcagtgagccatgaccttgccactgcacaccagcctgggtgacagagggagaccttgtctcaccaaaaaaaaaaaaaaaagagagagaggttgagctcaactgatcagcatctcagattaagggcctccattccccccatgctttgtaattgctgcctgttttccatgaagcctgactgt

SEQ ID NO: 13574 - DNA, 201 bp, Homo sapiens
tacagtggctcatgtctgtaattctagcactttgggaggccggggcgagcaaattgcttgaactcaggagttcgaggctagcctgggcaacacggcaaagscctcatctctacaaaaaatacaaaaattagctgggcttggtgacagacgcttgtagtctcagctactcgggaggctgaagtgggaggatctttagagccc

SEQ ID NO: 13575 - DNA, 201 bp, Homo sapiens
gtcactccatagagaggggtttgtggaaatcctttttttttttttttttttttttgcttctttctgtggatctgtttggaaatgtaacattttaaagcccytcttggctggaggattttttatggtaaacataaaacgttcattgaaacattaaacattttacagctgtttttcagcacataaattttcatagacatccac

SEQ ID NO: 13576 - DNA, 201 bp, Homo sapiens
aaaacgttcattgaaacattaaacattttacagctgtttttcagcacataaattttcatagacatccaccccctcactgccacaccccctcatagatttcytcttttcctcctccttctcctcctccctcttcctcctctttttccccccccttcaaatagttccaagaccagagttgagggtgggtgggtagagggctag

SEQ ID NO: 13577 - DNA, 201 bp, Homo sapiens
gttgacctggaatgacctagaccagcagtcacaagctcctgcccatggacaaaatacagccggtacctctttggctatggcctgcaggctcagaatagttyttacattttcaatcatctgcaaaaaagaataaagaggagaatattatttcttgaaggaggaaaatgatatggaattctgatttcagtgtcataaagtttt

SEQ ID NO: 13578 - DNA, 201 bp, Homo sapiens
aaactataatctttctctctgcctcagtttttccacctgtcagtggaggggcatgctcttggatgcctgagtttttcttagactcagcatcctgcagccgmaataaccatgcttcttagtggtcctcttgcgtagcagcctaagaaactccaagtccatctgcgccgaagagtattgaacttggccagagcacttgggatc

SEQ ID NO: 13579 - DNA, 201 bp, Homo sapiens
taattatataaaaaaagcatggaaactgggcattttaattagcaagtacagccttgacacaaataaaggcatggctttggttatgcagtgcatttatttgrttttcttgaaataagaaaaaaagatttcttctccatcaccagagttgctgagtttgacagtgtgaatgagatgacctctaaggcctctacttatagatct

SEQ ID NO: 13580 - DNA, 201 bp, Homo sapiens
tgggcattttaattagcaagtacagccttgacacaaataaaggcatggctttggttatgcagtgcatttatttggttttcttgaaataagaaaaaaagatwtcttctccatcaccagagttgctgagtttgacagtgtgaatgagatgacctctaaggcctctacttatagatctgcacggttgggcctgggagctgtact

SEQ ID NO: 13581 - DNA, 201 bp, Homo sapiens
acagtctgtgctgtgtcctgcactgtccattatctgcaggggtggtactgctgtccccagggaagagaatgctgtccacaaagagccagccatttatactmttaaaagaatacacaggagttgaacaatgagaacacgtggacaacgggaggggggaacatcacacaccggggcctgtctgggggtagggggaaaggggag

SEQ ID NO: 13582 - DNA, 201 bp, Homo sapiens
tttcgagaaggcaatatagaaaatgcagtgggtagcccaggactcctggtccaggtaaagcaggccttgttgctattcccctggaccatgatattacatgytgggatgatggggtcttgtgatactgattaatttaaggctgcatgatgatgagggaggaacaaagatgttcttgagtcagtacctgccagagtggctgta

SEQ ID NO: 13583 - DNA, 201 bp, Homo sapiens
gtctcaagctgctgatttccgggagcaaagctgctgtgggacatgagactctttgaggcagaatacctctcatgcctggagagcattacaggctgcattastctgttttcactctgctgataaagacatacccaagactgtgcaatttacaaaagaaagaggtttaatgaactcacatttccccatgtctggggaggcctc

SEQ ID NO: 13584 - DNA, 201 bp, Homo sapiens
ggcctggtcacatcttctgacctcaagtagtttatagtccaaaaagacattggctctttgggatagaggcactttttgggggagagaaacatgaatgcaaytttttacatagagtatgaaactctgttccaaatctctcaaactcaggttctttgattcttaaggtatttttcactgccgagttgctgtcattgaaacaaa

SEQ ID NO: 13585 - DNA, 201 bp, Homo sapiens
tctctcaaactcaggttctttgattcttaaggtatttttcactgccgagttgctgtcattgaaacaaaatctgtcctggtcaccactgtatgcccagcacstagtacagtgccctgaacatattaggtactcattaaatacttgttccacgaagttgttatttggtattcacgagttttgtctcaattccttttgattctt

SEQ ID NO: 13586 - DNA, 201 bp, Homo sapiens
ctgggacaaggacgatggacaaagttatgggggtgctaaaaacctcagtaatgaagataaatgatattctaatctaatattttaaaaaatcgaggctaggygtggtggctcatgcctgtgattccagcattttgggaggccaaggtggacggatcaccagagttcaggagtttgagaccagcctggccaaaatggtgaaat

SEQ ID NO: 13587 - DNA, 201 bp, Homo sapiens
agttatgggggtgctaaaaacctcagtaatgaagataaatgatattctaatctaatattttaaaaaatcgaggctaggtgtggtggctcatgcctgtgatyccagcattttgggaggccaaggtggacggatcaccagagttcaggagtttgagaccagcctggccaaaatggtgaaatgccatctctactaaaaacacaa

SEQ ID NO: 13588 - DNA, 201 bp, Homo sapiens
cagcctgggcaacacagcgtgactccatctcaaaacaaacaaacaaaacaaaacaaaaaaggtttaagaaatgttctagtaccttgaaaccaaaataggtrtcagatacttggctgttttgttttttcttcttagccattttgacctgtgagattttatgtgatgaaaacataagaatgtggtattacaccctgtgatttg

SEQ ID NO: 13589 - DNA, 201 bp, Homo sapiens
ggtatcagatacttggctgttttgttttttcttcttagccattttgacctgtgagattttatgtgatgaaaacataagaatgtggtattacaccctgtgakttgaattttccatactccattccattctatatgtcagatgcatcttcctaaaacacacctttgtcacatcactcctctgctcaaaaacattcagtggctc

SEQ ID NO: 13590 - DNA, 201 bp, Homo sapiens
cagatggagggaaagagaggcgggggattccaggtacagtggctcatgtctgtaattctagcactttgggaggccggggcgagcaaattgcttgaactcasgagttcgaggctagcctgggcaacacggcaaagccctcatctctacaaaaaatacaaaaattagctgggcttggtgacagacgcttgtagtctcagctac

SEQ ID NO: 13591 - DNA, 201 bp, Homo sapiens
gagaggaagcaaagtgagacagaggtggtgtgtgagcgtgtgtttgtgtgtgtgtgtgtgtgtgtgtgtgtgtgtgtgtgtgattgagagagagagagacrgatggagggaaagagaggcgggggattccaggtacagtggctcatgtctgtaattctagcactttgggaggccggggcgagcaaattgcttgaactcagg

SEQ ID NO: 13592 - DNA, 201 bp, Homo sapiens
cgggaggcagaggttgcagtgagccaagatcacgctattgcactccagcccaggcaacaagagcaaaactctgtctcaaaaaaattaaaaaaaaaaaaaaagaaagaaaattaatttctcagaggtagtaataggggtggctgtcaccatccttggccaaggagagggagcagatactggagacagttgaaggtgccagga

SEQ ID NO: 13593 - DNA, 201 bp, Homo sapiens
attgcttgaatccaagagatggaggttgcagtgagccaaggtcgtgccactgcactccagcctgggcaaaagagtgagactccatctgaaaaagaaaaaagaataggcacagacaatttacctggatcctcacattgcaatgctgaccactccggaaggagtgtagaagttgcagctcatgcctgcattccaaatggctgc

SEQ ID NO: 13594 - DNA, 201 bp, Homo sapiens
ccatgtggcacatacccctgtacatgtttgccaagactgctatatggtagagcttggaattcttaggagctttatcaggtaattgcaagtcccccacctcyaagaaagcactctctaggtcaagaatcagcaaatgttttctatagaggcccgtaaaattaatattttatactttgtgggtcatatagtctctgtttcaat

SEQ ID NO: 13595 - DNA, 201 bp, Homo sapiens
gaggcaggaggatcacttgagcccagaagttcaacattatagtgagccactgtactccagctgggtaacagagtgagaccctgtctctgaaaaataaaaayaaaaaaaaaaattaagttagaagggagggattacgaccctcatgtgtatcaagaaacaagctccatgaagccccgtaggatggctcagcaccagaacgag

SEQ ID NO: 13596 - DNA, 201 bp, Homo sapiens
aggcaggaggatcacttgagcccagaagttcaacattatagtgagccactgtactccagctgggtaacagagtgagaccctgtctctgaaaaataaaaatwaaaaaaaaaattaagttagaagggagggattacgaccctcatgtgtatcaagaaacaagctccatgaagccccgtaggatggctcagcaccagaacgagg

SEQ ID NO: 13597 - DNA, 201 bp, Homo sapiens
tgtctgtgtgtgtgtgtgtgtgtgtgtgtgtgtttgaataatactcctatgaacattgtaccaatatctattcagatctctgctttcgattcttctgcatrtatacctaggagtgaaattgctgcgtcgtttcgtatctgtgtgcttaaccttttgagaaactgccaaactgtcttcaacagcagccgcatcattttacat

SEQ ID NO: 13598 - DNA, 201 bp, Homo sapiens
gtggattggtaagggacaggtggtgaagactgaaacagggtatccagttaggaagctaccacagtgatccaacccccagcttctgttgaggttgaagaacmtgcatgcccaacctaaatatatgttcaaaggtggttattactgtttgaggtgatgaaagagttttggagatagaagtgatggttgttcaacatcatgagt

SEQ ID NO: 13599 - DNA, 201 bp, Homo sapiens
agccctttcttgtttagtgttgtgtcttctgtgtcaacatctctggaacatagtcaatggcagtacccagtagaagccatatggatactttttctcaagtsttgaaataaattaatggtgtggccatggttctcgtacttcaggtccctgtgagcccctggggtcctacacaacttggggtaatgctatggtcacctgcat

SEQ ID NO: 13600 - DNA, 201 bp, Homo sapiens
cctggggtcctacacaacttggggtaatgctatggtcacctgcatcccctcctctccagccctcacctggttttctcttctccttccaagaaaaaacaccyataccattcttaacatctctggaagctgggggtcaggagagggagatccataaagttcttgtcttccccgactcaagaagcttaagggtacattcactca

SEQ ID NO: 13601 - DNA, 201 bp, Homo sapiens
tggtaccctgagcaattttaagttataaatatgagatcactgaaagtggagttggggaacacgttattatatagtattttcaccacacacaggatacagtmaatgacttcaagagcataggtaacagtaaaatgtagtaaaacaatttagaagtcatgagttttgagtacttagtactttttagtatgatttatttaatag

SEQ ID NO: 13602 - DNA, 201 bp, Homo sapiens
tgggattacaggtgtgagccaccgtgcccagctcagcattattatttttagtctacacacagtgaacttaaatctcctctagaaaagtcagaaggtctacstacaactttaagagttcagccaaaagagaccagtatctactaccgtggacaaccctatttaacatggaggagataagcagaaactgaaaagaggagcctg

SEQ ID NO: 13603 - DNA, 201 bp, Homo sapiens
ggctattatgtgaagttaggaaatatttaaaactctgcctttctaaagaaacagggacacggtgcagaaaagttcatctggagttaggcttgtgtcttgcygtctctttaacggagagttcatgggcagggtacagtctgtgagaaggaatgaaaaccccagggtagatgctaacaaaaatcacttttaaaaaatgtatgg

SEQ ID NO: 13604 - DNA, 201 bp, Homo sapiens
tggtgtccatctgggttagcaaacacatgctcacacgtctgtgcttgctggatttttaagaacttaccagcatttaagattttcttatgaaactgattttwctcaccagggatagagtctcaaagttggaggtattttatgttgttttaaataatatcgtcatcacatgtcattttagaccccaaaagtccactccgaatc

SEQ ID NO: 13605 - DNA, 201 bp, Homo sapiens
agttcctctccaaactgtcaaggacagtgccaagatctgcgaatatagaaagattaagagtttttttctgccttgttgggtcttctttctagcatgccagsaacatttttctcatcttttgaacattagggaataacacccaatgccaccctataatctcgagacagaagtggaggatcctcttaagacaagaaatctttc

SEQ ID NO: 13606 - DNA, 201 bp, Homo sapiens
agatctgcgaatatagaaagattaagagtttttttctgccttgttgggtcttctttctagcatgccagcaacatttttctcatcttttgaacattagggamtaacacccaatgccaccctataatctcgagacagaagtggaggatcctcttaagacaagaaatctttcaaagccaaataatgaattaatccaaagccact

SEQ ID NO: 13607 - DNA, 201 bp, Homo sapiens
cttcgcaaagggaaataactcttctgctaaccctcctgcccaacctgagatgaagtatcaggggatgcagtatggatgtattttcctgacgattggtcctkctgtcctgggacccaggtgtgagtgcatagggaaaagggaggagaaatttaatcctgtaactatctccttatggaaaacaggaaaccacaaatgaatcaa

SEQ ID NO: 13608 - DNA, 201 bp, Homo sapiens
tctaatattttaaaaaatcgaggctaggtgtggtggctcatgcctgtgattccagcattttgggaggccaaggtggacggatcaccagagttcaggagttygagaccagcctggccaaaatggtgaaatgccatctctactaaaaacacaaaaattagctgggtgtgtggtagtgtgtgcctgtagtcccagctactctgg

SEQ ID NO: 13609 - DNA, 201 bp, Homo sapiens
atttatgttattattatcatttttcatgtgtagatgtggtgatcgtttgtgctttgttaaatattcctcgtctgtccttctggggatgatgctttttctccctttttggtcaggcatagataggtgacttgctttagccaaagaagcatgaactgtcacttcaagggggagatttacaagccagtgcaggtggattccctg

SEQ ID NO: 13610 - DNA, 201 bp, Homo sapiens
gggcattaatgcatttagcaaagacttcctgagtgtctgcttggtcgagtgacacaaactggaacagagcatagcctgtcttccaggaaccggcaccagcratgtcgtaggctgagggagaagccacagaactgtgagtgacatgtttctttggctgctcccgacacaaggaactgcaactaaattgaaggcttgaggaca

SEQ ID NO: 13611 - DNA, 201 bp, Homo sapiens
ctgcttgaacctgggaggcagaggctgcagtgagtcgagatcacaccactgcactccagcctgggcgacagagtgaaactctgtctcggaaaaaaaaaaaaagagtttaattcatgcagagctggctgtgtgggagaccagagttttattattactcaaataagtctcccccaaaactcagggatagagatttttaaggag

SEQ ID NO: 13612 - DNA, 201 bp, Homo sapiens
agggagaagccacagaactgtgagtgacatgtttctttggctgctcccgacacaaggaactgcaactaaattgaaggcttgaggacaggaagcaccttagyggttcgcctttcatttgagtgggcccagggtccagaaaagggtagatattcaggaagaattgatcaccttttggatgccaccacacatgcctaggcacaa

SEQ ID NO: 13613 - DNA, 201 bp, Homo sapiens
aaatatttattttgagagcaagcacgggggtttatgtgatggctccacagagcagtgaaaagactcccgccctactgctcgcaacctcagatgtccctggscactagcccatctgtatgtctttaaaaaaaataaattaaatttttaaaaacatgactttctggccaggcgcagtggctcatgcctataaccctgcactta

SEQ ID NO: 13614 - DNA, 201 bp, Homo sapiens
tccggtgacatcctggattagaccctgaatcagaaaaaggactgtagtgggaaactcgtgaaatcctaaatacagtctgtcatttacttaatagtaacatwccattttcataagcataccatgggctgggcatggtggcttatgcccgaaatcccagcattgcgggaggctgaggcaagctgatcacttgaggtcaggagt

SEQ ID NO: 13615 - DNA, 201 bp, Homo sapiens
aaccatttcacaaatatttattttgagagcaagcacgggggtttatgtgatggctccacagagcagtgaaaagactcccgccctactgctcgcaacctcaratgtccctgggcactagcccatctgtatgtctttaaaaaaaataaattaaatttttaaaaacatgactttctggccaggcgcagtggctcatgcctataa

SEQ ID NO: 13616 - DNA, 201 bp, Homo sapiens
gactcatttaaccatttcacaaatatttattttgagagcaagcacgggggtttatgtgatggctccacagagcagtgaaaagactcccgccctactgctcscaacctcagatgtccctgggcactagcccatctgtatgtctttaaaaaaaataaattaaatttttaaaaacatgactttctggccaggcgcagtggctca

SEQ ID NO: 13617 - DNA, 201 bp, Homo sapiens
tttgtatatttagtagagacggggtgtcaccatgttggccaggcaggtcttgaagtcctgaccttaagtgatccaccctcctcggcctcccaaagtgctcrgattacaggcatgaaccactgcgcctgactgtacttttttttttttaaagtatacccatacccattgtacacatttggtattttttctttaaaaaaaaaa

SEQ ID NO: 13618 - DNA, 201 bp, Homo sapiens
gaacaagggttacgtttgctgtatctggagaaagtccatagtttatgatgaattttctattaatgtaaactcccactgtttataagtcacccaaattgttkgtattaaattagatgtgtaccatcttatgtctcttctttcagaaaatgaatctctgtttttttttctctttctcctaaatgttaggaattttctgaagtt

SEQ ID NO: 13619 - DNA, 201 bp, Homo sapiens
aattgctcctagggaaatacacatacacacacatgtacacacatacacatacacacattttttcctaaacaacatcaatgtcataacagttttgaagcacrtatacacactgacacatagattttgtaaatgaggcacatctattcttgaaatgcaattgcttaaaaatggaagttctgaaaataaataaaaagaaacatc

SEQ ID NO: 13620 - DNA, 201 bp, Homo sapiens
caatagaaacaccaagaacatggattcatcaaaggaaaaatgttgaagtttccatttttatgcttcctggtaatccttcagcccttgatggaaatttccaracctaaaccagtgaattaagagtatggggaagaggagccctcatacagttctgttaaatggtcctttaatattcttcttcagagtgacgggtaccccttg

SEQ ID NO: 13621 - DNA, 201 bp, Homo sapiens
ccacaatacgcctccctttggcgtgaaatggggcagaaagtgccccaaacagctgttattttcgcagtgattcattcattcattcattcattcattcatthattcatccacccatccattcattcattcactcatcacatggcaactcatcacccctgtataccagacccagtgccaaatactggggagatgtgtgtgaac

SEQ ID NO: 13622 - DNA, 201 bp, Homo sapiens
gggcctaggcccaagcaaccaggactccctgtagtcaaccccactcctcaatttttggcacccatgttattccacctcaagatcatgtcctcttttaaccyctctgaatatgctcctcctgtgatacccatagggaccctgaacctctagtcctcaagagcagtcattcacccctttggactatggatccctttgcaaccc

SEQ ID NO: 13623 - DNA, 201 bp, Homo sapiens
atgtcactgagtacatccttgctgtttttcatgaattttccactgagtcgcaacatgccactggccagtgaaggtcaggcaggaaacagattaacaacatstcataccacaatgtcaaaatacttaaaagtgtttacagatgccagtgacacccagtgaatctaaaacaagaggaccagagcagaagtaaaactattcttg

SEQ ID NO: 13624 - DNA, 201 bp, Homo sapiens
gcatccaccaagtgcctggtgcagactggatgctcaataagtctttggtgggtccatgtattgaattggaatctgcacattatggccattatttaggtttmttgtgtcctaatctatgtcactgagtacatccttgctgtttttcatgaattttccactgagtcgcaacatgccactggccagtgaaggtcaggcaggaaa

SEQ ID NO: 13625 - DNA, 201 bp, Homo sapiens
ttgtcttctcctctgagcgggaactgggcaattggaggttctttcccctcccgtgctggtgggagaattgtttagtaggtcataaagtggaatctccattycagtctgatccggtcaattctggtaggacttcatccaagcacaaagaaacctttgttttcattcaagacttccctaaaaggtggctgggtgcggtgctca

SEQ ID NO: 13626 - DNA, 201 bp, Homo sapiens
atcgtgtccagcctaaatggcattcttggaagtaaaaccacaggggatctgttggaagtggcatgatggaggaattttaaaagaattgaacaaataaaatrgtcagagctcaaaaattgagtactgcttcgtttctcccaaataaccatcaccagacaaacaggtgtgtgtgtgggtgggggaggtggcctggtggtactt

SEQ ID NO: 13627 - DNA, 201 bp, Homo sapiens
ctgtctgttttcttttctttcaaatgtttcacttaattccctgatataataaggcttccaaattcttggtgtttttctacaaccaagaccttgaacttttkcctctcaggatttctttcatgagaacccattttctggccatttggatatcattgatgagggaattgaagcatttccctattctttagagtttcattaaag

SEQ ID NO: 13628 - DNA, 201 bp, Homo sapiens
ttccagtaacaattgttgcataacaaaccacccccaaatttagtggcttaaaacaacaacatttattttgttcaggaatctgtagtttcagcagggctctsaggaacagcttgtctctgctccagcatcagctgaagcagcttgaaagccagggtctgagatcatctgaaggttgttcactcatgagtctgaggaatgatg

SEQ ID NO: 13629 - DNA, 201 bp, Homo sapiens
gtctcaaggaactatgataagtagcaaacaatatcccagaaaaatctccagtcaaaaatccactggaggccaggtgcgttagctcatgcctgtaatcccarcactttgggaggtcgaggcaggaggatctcttgaggctaggagctcgagaacagtctgggcaacatagcaagtctctgtctctacaaaaaatacaaaaat

SEQ ID NO: 13630 - DNA, 201 bp, Homo sapiens
gctctcaggaacagcttgtctctgctccagcatcagctgaagcagcttgaaagccagggtctgagatcatctgaaggttgttcactcatgagtctgaggawtgatgctgactggtgggtgggacccttgctggagggtctattggctggaacacctacacattgtctccatgtaccctgagcttcctcacaatatggcggc

SEQ ID NO: 13631 - DNA, 201 bp, Homo sapiens
gttttgagtacttagtactttttagtatgatttatttaatagtaaccttatataatgtttttcttttaattgttttattgagatgtatttcatacactttmcaataagcccatttgaagtgtaacattcaactttttttagtatattcgcatggttatgtaattttcatcaaaatctaattttagagtatctttttgtccc

SEQ ID NO: 13632 - DNA, 201 bp, Homo sapiens
actcaacagttgctaatgttttgccatgttttgtcagttcatctatctgtccatctctttgtccatccatccaactacccacttacccatccatccatacrtttatccatccatctacccacccatccgtccatccatccatccatgcatccatccatccatccatcatccatccatgcatgtaagttgcagacatcaaca

SEQ ID NO: 13633 - DNA, 201 bp, Homo sapiens
agtcaatttcatctaggagcattttatggcttatggaaagaaatattctcttagattgaagggcgccagcctgtaatgggcatcagctgattctcagaaaraagaaacaacgtactgttacataattggggcttctccaaagtggcctgaccaaactgtagagctgcttgtttgtctgatacggtagccattagccacatg

SEQ ID NO: 13634 - DNA, 201 bp, Homo sapiens
aaagtggagttggggaacacgttattatatagtattttcaccacacacaggatacagtcaatgacttcaagagcataggtaacagtaaaatgtagtaaaasaatttagaagtcatgagttttgagtacttagtactttttagtatgatttatttaatagtaaccttatataatgtttttcttttaattgttttattgagat

SEQ ID NO: 13635 - DNA, 201 bp, Homo sapiens
tccattttaaagcgttattgaatccatactaacctgatcattacatatttactaattgatgattactaaaaatgtggacctttgtgaatttccgatgtcayagaagggtgttcttaactggaaaagtcagtagccaacattctgggaagtagaggcctcttcctcactgcttcattggtttaaaataaactccaacagaaa

SEQ ID NO: 13636 - DNA, 201 bp, Homo sapiens
cgtggtgtgtgatcttgaccactagcctaaactgctattttatgtccacccatcaacctctacggctgcccctcatttgaacacacaaaatatagttgtgyggcttggtggagccatctaaattccgttaggccatttgccaatgctgctattaggggcgaaatgtcatgcgcttgatctaaatgtacttaggagaattct

SEQ ID NO: 13637 - DNA, 201 bp, Homo sapiens
cacctggatctgttaaatggcagcttagctatgaaatatcatgttctgcccaatcacctaccctgcctcatatgatcagccggtatatttatgtggacacrtgcagccacacttgtttttaacatttgagaatgacagcgtattggcagttcatataagctatcaaatattacatgtcaactcagaaaacatccctaggaa

SEQ ID NO: 13638 - DNA, 201 bp, Homo sapiens
ctgttgtacactgtcccttcaataaaagttgctaacaccaccaccttgcccttgaattctttcctgggcaaagccaagaaccctgttggcctaagccgcarttctggggttcgcctgccctgcatcaccagcacagtggaaggccacaagctcacagcattttcatccgtaaacaaagcttggcaatatctctgatggtta

SEQ ID NO: 13639 - DNA, 201 bp, Homo sapiens
ggctaataaagtagatgagtttcaggattgcaaaatattgtgatcctggcctttgtccattgtgtaatcttcacagtgaccagagtgtttgcagttcctasgaagttcacccattcccaacagtgtcccagggtcaagctcagatgacctgtggtatttttatacccatatatgtgtcaatgtttataacttttaaagttg

SEQ ID NO: 13640 - DNA, 201 bp, Homo sapiens
agggtcaagctcagatgacctgtggtatttttatacccatatatgtgtcaatgtttataacttttaaagttgttttcaggaagcactgaggcatgtggtcrttcacaggtgacaaagacagaggctcagggaactcagttggttgctgagctttaaacccaagtctatttctgaggctggactgagtctttgagaaaatgc

SEQ ID NO: 13641 - DNA, 201 bp, Homo sapiens
acattttttcctaaacaacatcaatgtcataacagttttgaagcacatatacacactgacacatagattttgtaaatgaggcacatctattcttgaaatgyaattgcttaaaaatggaagttctgaaaataaataaaaagaaacatcaataaataaaagccccattttcatattcttatttgacctcttgcctctccatca

SEQ ID NO: 13642 - DNA, 201 bp, Homo sapiens
ttaaacaattactgtatctgatttttcatttttcattttttttttttctggaagaaagagcagatctggataaagtcagtatacaatgtggtctttggtgmcagacccaagttcaagaccaaggtgtatgcatgggtttgttcaagttgtctacccttattatcccctcagtgaaacatgattaaccatgcttaccttgaa

SEQ ID NO: 13643 - DNA, 201 bp, Homo sapiens
gaaaataaataaaaagaaacatcaataaataaaagccccattttcatattcttatttgacctcttgcctctccatcattcttaaatttgacctccatcatkcttaaatttgacctccatcattcttaaatttgacctccatcattcttaatcctcatgttcttaatggacatccctcccaccctatctgggccttctgaga

SEQ ID NO: 13644 - DNA, 201 bp, Homo sapiens
tgctgtcctggttttcacactgaaagttccgtatcctaataagcctctcatcctcagcaacggaggacagttgcccactcaaagccttgtgacattctagrgtatcctatttctacatggtgggaatctagaagacggagaaagaatttctcattcccgaaggagcatggattatccttggttgtagtgtttatgtccaca

SEQ ID NO: 13645 - DNA, 201 bp, Homo sapiens
taagactggaatgtgggtgtgtgcactcctcatgttccggtttctgtgatcattcaggcatgcacaggtatcctgatgggtagccaggtcattaggcccaragtcggcagtgtagcatggcaagagaagtcattgcatctccaaactgtgcctaaattgcctgtaatgggttctttgcaacttgcagaaccagatcttacc

SEQ ID NO: 13646 - DNA, 201 bp, Homo sapiens
gacctccatcattcttaaatttgacctccatcattcttaaatttgacctccatcattcttaatcctcatgttcttaatggacatccctcccaccctatctkggccttctgagactgttcccccagccccagtcaggagggcttgtccacaagttgctgtctgaactgggcaagcctcctggcttccctgaaatggtgctga

SEQ ID NO: 13647 - DNA, 201 bp, Homo sapiens
ccgtgtcattgtggtctcctcagagtcccatcggtgggtttgaattgcatatttgttcacttatcccctttctcataccagctaatattcccccaaggctstcattctgaaaataattttcattagtcctgcttgagacatgtgggtggactcagcttggctcacttaatttttccaggtcttttttgttcgcctgtgatt

SEQ ID NO: 13648 - DNA, 201 bp, Homo sapiens
tgactaagactggaatgtgggtgtgtgcactcctcatgttccggtttctgtgatcattcaggcatgcacaggtatcctgatgggtagccaggtcattaggmccagagtcggcagtgtagcatggcaagagaagtcattgcatctccaaactgtgcctaaattgcctgtaatgggttctttgcaacttgcagaaccagatct

SEQ ID NO: 13649 - DNA, 201 bp, Homo sapiens
gcttgtccacaagttgctgtctgaactgggcaagcctcctggcttccctgaaatggtgctgatgtcttcacttcctgccaccttggcaacctttgtagttsctctctttttgccaggggaacaaattaagagagagaagagtgatagtgtctacatgtggtctgctcactcagccagtattttccacagccagtctttccc

SEQ ID NO: 13650 - DNA, 201 bp, Homo sapiens
caatatgatggctagtctgtttcatagtgaataaaaagtgatcctggatgaatgaataaagtgaaattcagataatttttctcaaaactgaaattgtttamatcttcctttagttctcttttttctgcctgccccttctttcatataccctgtttttcacctcttttgtctcagtcccatctgatatttgaataacaatat

SEQ ID NO: 13651 - DNA, 201 bp, Homo sapiens; identical to SEQ ID NO: 2535

SEQ ID NO: 13652 - DNA, 201 bp, Homo sapiens
aatttcatatatgaaggcaaaggaaaaaaaaattaaactttaaataatgaccagttatacttcatcaactctaacaaatgaaggagcagagttggttttcyggagtttgcttcagttctttgatatggtcagtgtaggtcggggaggtcttccctagcttgagaaatcataacctaggatatttaagctgtcagtaatagt

SEQ ID NO: 13653 - DNA, 201 bp, Homo sapiens
tcgcagctggtgggtgtacacactgctgtttaccttggcgaggcctttcaccaagtccatggtaagagaacagcttctggcgccgcaaacaccttgggtcytagagaaacctgcacacttgtgtctccacctttttacctcttgcgggcatgagtctggtctcagtaataacattgtccagcccatcataaagggctcttg

SEQ ID NO: 13654 - DNA, 201 bp, Homo sapiens
tcagtaatagtgttttaaaactccaggcctataataaagtaaaaagtgtgtctgataaaatgggtttttttccttgcttagtgaatgtcttctgtttctckctaaacattgtcacttgccaaaccatgttttctgtttcatactaattttctactggcagtgagaccagcggaatctaagaaattgcatacgaaattcaag

SEQ ID NO: 13655 - DNA, 201 bp, Homo sapiens
caggcctataataaagtaaaaagtgtgtctgataaaatgggtttttttccttgcttagtgaatgtcttctgtttctcgctaaacattgtcacttgccaaascatgttttctgtttcatactaattttctactggcagtgagaccagcggaatctaagaaattgcatacgaaattcaaggattggaaagaagaagaggaagt

SEQ ID NO: 13656 - DNA, 201 bp, Homo sapiens
accacatgctaaaataaaaaaaaatgaaccacatgctaaaatcaaatggcttctgcacctgtgtgcgttcctggactctggggtcacaggatggctgatgwgatgccttcgagaaattaatactctaatgagggaaacatcctttcatgttggtgcaagagacgttctaggcctggttctacctctagttggaacggtggt

SEQ ID NO: 13657 - DNA, 201 bp, Homo sapiens
gcgtgtgtgaaacacaaggtcacctgccaaaagcaaaacaattaggccagcattgggctaggtgaggatccattgtcttttgggcaggtgattgtgatacwataggagccggtgtcctgttgatggcatcccacaactttctaacctctgttgtagagttttgttagccacgatttggaccaacctgcagttaggccaagg

SEQ ID NO: 13658 - DNA, 201 bp, Homo sapiens
ttgaaccatttgacacatttcgctagcattgggaaaatccccattttcctcactatccatttttcttcctctctttccttcctcttttcccttcttcctcttttttttcttttctttccttccctttttccttttctttccttctttccttgccatttaaaacatactgataacttggcagcacagggcagtgattaaact

SEQ ID NO: 13659 - DNA, 201 bp, Homo sapiens
gaaattctttcacaactctttgattgtactaaaactttgaacactttaaatgggtgaattgtatggtatatgaatcatatctcaacaaagctgttaaaaaattgtatgaaaactgtgatgggattcaagtagtctaacgctcaaatttcccaagtgccctcatttaagtctggaccacgacaggaacccagatgtggcctg

SEQ ID NO: 13660 - DNA, 201 bp, Homo sapiens
gtttgctggctcatgcgtttcatgccttctctatggtaccatacaggcactttgtctcccagtggaatataagttctttgaggccaaggactgtgtcttaytctgtgttgcatccctttggcttcagcctcattgtcttgagtttattaagcatttggaacatttcagctgaatgagtgaatgagtgaatgagtgaagcca

SEQ ID NO: 13661 - DNA, 201 bp, Homo sapiens
tttgaggccaaggactgtgtcttattctgtgttgcatccctttggcttcagcctcattgtcttgagtttattaagcatttggaacatttcagctgaatgastgaatgagtgaatgagtgaagccatcagtcaaatcagaacactgctcacacatgcatcccaagtccagctgtcgaacgtctggaactgagcagtatggag

SEQ ID NO: 13662 - DNA, 201 bp, Homo sapiens
accatgtccccattgaacactgctctgtgctgagtctgcagaatatttaaataaggggttaatttataaagtgagctacgggaaagtttccaggattgtcrtgcgtgtgtctcataaatcggcacaaattgaatctaggtttctaggtttctgtgcccctcagctcctaagtaaaccaaaatttattgagaggtgtatagg

SEQ ID NO: 13663 - DNA, 201 bp, Homo sapiens
acttgcctaagaacacacagcagttctgaaactcaccctgtgctaatctgacctcgtgaagaaattgagcaaactaggctccagggagaaacgaaaacaayaacaacaaaaaatgtattgccaaaaaattgctagcagacatctagaaaaatgtcttcaacttcttttggtaggaaaagaggaaaaattcaaatctgaatt

SEQ ID NO: 13664 - DNA, 201 bp, Homo sapiens
tacatagtgacatgaaaattgtgtattcacattgttctattgatttcgttgagaaagtgaccttgtatgcacacatgagaatttagagatctatatatacygcctggcctcttctttgtaagggtataacagcagtggttaacatgcattttttttttttaacagttagatttactcttcctttgcacagactaatagcac

SEQ ID NO: 13665 - DNA, 201 bp, Homo sapiens
cagctctgagagcaaggccaaatcaccagattgatgcctttggctgtgtatctaaaggacgtgccattgcagctaagtggacctgaatgtacagtaagacytagtggtcaccagaatgcatgccaccccggtgcttctgcatgcaaagggtgcgggccatgtgccagtcacagtggaaaaggcatgcttcgtgtcagcaca

SEQ ID NO: 13666 - DNA, 201 bp, Homo sapiens
ccgaacatcaatcagggaagataaacaatgggaaatgataggtgtacaaaagggaaaatggcaacagcacatgtggagggaaagaccgcagaattctggcrgggttataaatcatacagtcaaataatttccgtgcaattaatatcctcaaattaaaacatacgtttttaaagaaagattttgcagacttttaagctgggc

SEQ ID NO: 13667 - DNA, 201 bp, Homo sapiens
cttccttcacccccaggagcactgaagcagacactgattcctctgcagttgttgggcttttgagctacttccctcctggggagatgcgtgttaactgtttmatgactggcaatgccgtaacagtgagcaagcaatgtgaccttacaaatacatgtgcagaaatgcagatgagtgggcctaaagaatccagactcaacttac

SEQ ID NO: 13668 - DNA, 201 bp, Homo sapiens
ttttattttagataaaatgaaaagatgttactatgcaggtaactttatttattatttgcatgcagtttatcaaatagaattccttggttcagcaaaatgamacctttaagtcttttagcaccaaatgtttgaaattatcatgaaacacattctaatttggcagtgagttcaggagatgaagactgtcctttagttaacatc

SEQ ID NO: 13669 - DNA, 201 bp, Homo sapiens
tgttattttccttttgtatctagcctaacattgactatcttgtcatttcattttcctataaaatgcctccaccaaggctgaatctttgaattgatcactasaggccttttccctagtagtaacattataataaaactttgactcatgctcataactcgattttccaaaaagttttcctttacaggagaaaagaacagctgc

SEQ ID NO: 13670 - DNA, 201 bp, Homo sapiens
gggtccaagcctccctgaagcagatctctatcctgtcaccctgctggaaatgaaacacttaggggttagaaggggatcaaggaaagtccgagagttggttstgattatcttcagtcagaaagtgcctacttttccaagcatccagactgcaacctgtctttcctactcaaaatggtttttatggattctattcttatttgg

SEQ ID NO: 13671 - DNA, 201 bp, Homo sapiens
cttaggggttagaaggggatcaaggaaagtccgagagttggttgtgattatcttcagtcagaaagtgcctacttttccaagcatccagactgcaacctgtytttcctactcaaaatggtttttatggattctattcttatttggcaattgcctggactacagtcaccaacacaagtttatacgcaagaagtgcacacagcc

SEQ ID NO: 13672 - DNA, 201 bp, Homo sapiens
gtgctggccttttcactcaagttctctgatgtaactgcccacagtaatcctgtaaggtatggctaatcatttccattttatagattaggaaaccaaggtcmaaagtggtgaattgatttgaccaaaatcacagacccaggaatttcctcagccaagagcctacagcagctgtgtcttaagactgtgccctttcatccaccc

SEQ ID NO: 13673 - DNA, 201 bp, Homo sapiens
gtgcagtgaggatgaatcaacaagtaaatatcatgagaatttcttagattgaagaaatattactcctatttggtgtcaactctgtgctggccttttcactsaagttctctgatgtaactgcccacagtaatcctgtaaggtatggctaatcatttccattttatagattaggaaaccaaggtccaaagtggtgaattgatt

SEQ ID NO: 13674 - DNA, 201 bp, Homo sapiens
ttggcttctccacagaggcctggttctggtcccttcccctgcaaccccaaggcagggggcagattcccgtatcatggtgctccttggcctgattctgtggsctttatattagaactcaccttctggaatcttttattgtcttgttctctcttccaagctgcgcatcttccttcccttcagaggtttggtgatcagcgtggt

SEQ ID NO: 13675 - DNA, 201 bp, Homo sapiens
tggattggtgattttgactaagactggaatgtgggtgtgtgcactcctcatgttccggtttctgtgatcattcaggcatgcacaggtatcctgatgggtarccaggtcattaggcccagagtcggcagtgtagcatggcaagagaagtcattgcatctccaaactgtgcctaaattgcctgtaatgggttctttgcaactt

SEQ ID NO: 13676 - DNA, 201 bp, Homo sapiens
accctggacagatggattttctaaaattacagaggaaactagatctgtaactctgtacatttactcctgtgccagtaacaatggcaatattttaatactgwaataaattttttcttatgcatttgctataaattagtaaatctgtgtaaagctgcttattgcatcatcatgtagaatttctacatcctgcagaagtttaag

SEQ ID NO: 13677 - DNA, 201 bp, Homo sapiens
gtcagctggtgggtgatctccactgaactcctattcagaggctcagtttctctgcaggacagaaatgagaggcacaaaatttcatagctgtcttgcccctyctgtggtctgtaagaatgggaccaggactcctagttgtgaacccgaaaggatttccattaggatcaggaagtgtgagttggcttagaaaaagtaaagaaa

SEQ ID NO: 13678 - DNA, 201 bp, Homo sapiens
cctaggcttggttacaaagggcaatgaagggtcttttctgtccttaagcactcacaggtagcttaacagtaatgccttggattccttccttcaagagcgayagcaggaagcccagcttctctggtagcagagcaggggtcctcaaagcagaccgtgaggtcagaggagcactggagtcaggagtttccatctccaccctgc

SEQ ID NO: 13679 - DNA, 201 bp, Homo sapiens
gtgcttgttaactttgcactctatagccaagtgcgatgatcagaaaatacatacattgaagacaccagaaaatagtgtatggattggtgattttgactaaractggaatgtgggtgtgtgcactcctcatgttccggtttctgtgatcattcaggcatgcacaggtatcctgatgggtagccaggtcattaggcccagagt

SEQ ID NO: 13680 - DNA, 201 bp, Homo sapiens
agaaaatgtctgtcatacattacgtgcctttctctgtctttccctgcccctctcaccttcatcgatcacacttttgcttcacagaggtaagaggaaatcamactcacacagtatcttttgttttctagcaagctagaacacaagattttctagatgcatcttttgagttgatatgcaatattttccttgacagatttgtta

SEQ ID NO: 13681 - DNA, 201 bp, Homo sapiens
gctgtttaccttggcgaggcctttcaccaagtccatggtaagagaacagcttctggcgccgcaaacaccttgggtcctagagaaacctgcacacttgtgtstccacctttttacctcttgcgggcatgagtctggtctcagtaataacattgtccagcccatcataaagggctcttgaacacattttcatcaactttaggt

SEQ ID NO: 13682 - DNA, 201 bp, Homo sapiens
caggaaggcccttccactgaagctacaactggagctaagcagatggataagccaaaaccacctccgttgctgtggccccatctccaccacaaggaagctgragaagggaccccagaaccggaagacaaaaaacttccttcacacactcccttgctaagaggagaagccccaaagaagctggatatggcccttccctcacat

SEQ ID NO: 13683 - DNA, 201 bp, Homo sapiens
taactcagttctcggaattttcaatcagaaattatctgatgacgggactaattcttattacgatagttccaatggatccacccaggatccacctccacaastaggtgtacagaagctggagatcccatcatgccgccgggcaccggtttacgagaactctatgtcttatcttggtagtacgattaggaaaacaaacacaat

SEQ ID NO: 13684 - DNA, 201 bp, Homo sapiens
tgggaagtcagaacttggttgcttcatgtcatatttcctatttttaagatttacagatattaacgactccttgggaaaactggacttcagtcgcctctctscaacaaaaaacgactattgggcgatgctggcttataacaggtccaagctctgcaacatcctcttctccaacgagctgcaccgtcgcctctccccacgcgg

SEQ ID NO: 13685 - DNA, 201 bp, Homo sapiens
agtttctgtgcatacaacatcttcctttctcattcccagtaccctagaaacacagccgttcactgaagaggatttgagtgttgtctcctctgtggggtcamaacatcatgcttctttctgttctgccccatggcagtggtgacgatggcctagcttccatcccgtagcttcttgtgtttttctattccaccagtctatcaa

SEQ ID NO: 13686 - DNA, 201 bp, Homo sapiens
aaagctgtgtgggaagtcagaacttggttgcttcatgtcatatttcctatttttaagatttacagatattaacgactccttgggaaaactggacttcagtygcctctctccaacaaaaaacgactattgggcgatgctggcttataacaggtccaagctctgcaacatcctcttctccaacgagctgcaccgtcgcctctc

SEQ ID NO: 13687 - DNA, 201 bp, Homo sapiens
tggcctagcttccatcccgtagcttcttgtgtttttctattccaccagtctatcaaccctgtatttgttgtcaaatttacactgtccacaggcaaagatcyattctcctttagaatttaataggagggtttggaaatgatgccatggaaaccctgagcagcttggcaatgctgaccccaaatgagaaataactatcattgg

SEQ ID NO: 13688 - DNA, 201 bp, Homo sapiens
gaacattccagggccaggttcagtggatcatgcttgtaatcgcagcatgttgggaggctgaggagggtggaccacttgaggccaggagtttgagatcagtytgggcaacagggtgaaaccccgcctccactaaaaatacaaaaaaaagaaaaaaaaaaagaaaaaaatagctggccattgtgacatatgcctgtaaccgta

SEQ ID NO: 13689 - DNA, 201 bp, Homo sapiens
tttgagatcagtctgggcaacagggtgaaaccccgcctccactaaaaatacaaaaaaaagaaaaaaaaaaagaaaaaaatagctggccattgtgacatatrcctgtaaccgtagctactctggtggctgaggcttgagtatcgcctgggaggcagaggttgcagtgagccaagatggcactgctgcactctagcctgggtg

SEQ ID NO: 13690 - DNA, 201 bp, Homo sapiens
tctcattctcctttccaataaatccttttattcccagaaacaagcattcttgtttcaatcattgtaactttgttttacctgttctagaacttcatttaatrgaaatcatacctactgctttgtatgtgtcgtcttctgcttaatgattcacataatgtttttgtgattcatccatgttgatgggtgtattaggggttctct

SEQ ID NO: 13691 - DNA, 201 bp, Homo sapiens
gcagtctgattgtgcgacagaaaagaaaaacccattttctggggagaaattcaagctggctgcagaaatttgtgtaagtggcaaggaacctaatgttaatstcgaagaccatgaggaaaatgtctccaggccatgtcagagactttcacagcagcccctcctatcagaggcctgaagtcccaggaggaaaaaatgatttca

SEQ ID NO: 13692 - DNA, 201 bp, Homo sapiens
aagcagagcatcaaggtttggaaaatttgcagtctgattgtgcgacagaaaagaaaaacccattttctggggagaaattcaagctggctgcagaaatttgkgtaagtggcaaggaacctaatgttaatctcgaagaccatgaggaaaatgtctccaggccatgtcagagactttcacagcagcccctcctatcagaggcct

SEQ ID NO: 13693 - DNA, 201 bp, Homo sapiens
gtgaggacacatcacttgcacctcagtgtgagtttgaaagtgttttctctggagaataattctgaagaaataggccctccagatatcagtagtgacagggstatcagtaatgttgattactaagttcttgccacaggtagaagccatgctactgcacaagtttcatacttgaagagtggacatctgacacagtgttggtgg

SEQ ID NO: 13694 - DNA, 201 bp, Homo sapiens
aagaggtgacttgggtgctgttaaaggcattcagttttataaaagaagcagagcatcaaggtttggaaaatttgcagtctgattgtgcgacagaaaagaaraacccattttctggggagaaattcaagctggctgcagaaatttgtgtaagtggcaaggaacctaatgttaatctcgaagaccatgaggaaaatgtctcca

SEQ ID NO: 13695 - DNA, 201 bp, Homo sapiens
ttattttaattttttaattgaattcagctttacagtatcttttgtagggggtaattttagcttctttctccgttgaaaacttcaagtaaggaaacacttayattgctagtgagtggccagctggagttgtaggtctaattctttttttttttttaagacggagttgtgctcttgtcacctaggctggagtgcaatggcatg

SEQ ID NO: 13696 - DNA, 201 bp, Homo sapiens
attcagaggttgtttttatagcagcaacacagtaagttgggaagagggacacatttttaacatagacaccaaaagagaggctggaagagttgaccacttaraaatgtcacgagtgtctgtgaatagtgttgggggctgagaggcaagagaagaaaatagtcctaatgttgtacaagtagcaatggaaacaaacttgttaaa

SEQ ID NO: 13697 - DNA, 201 bp, Homo sapiens
acccttctaaccagtgtttgaagtacgtaagacgttcatttccacttctaatgaggaattagaggaacggaattataaaggaattctggttataattgcakgtacttttagagacgatgtctaacagtgcaacccatagaaccaggctgcctggattcaaatcccagctctgctattactgagatctctatgagagctcag

SEQ ID NO: 13698 - DNA, 201 bp, Homo sapiens
ggtctaattctttttttttttttaagacggagttgtgctcttgtcacctaggctggagtgcaatggcatgatttctgctcactgcaacctccacctcctgkgttcaagcagttctgcctcagcctcctgagtagctgggattacaggtgcctgccaccatacccagctaacttttgaatttttagtagagatggggtttca

SEQ ID NO: 13699 - DNA, 201 bp, Homo sapiens
caatggcatgatttctgctcactgcaacctccacctcctgggttcaagcagttctgcctcagcctcctgagtagctgggattacaggtgcctgccaccatrcccagctaacttttgaatttttagtagagatggggtttcaccacgttggctaggctggtgtcgaactcctgacctgaggtgatccacctaccttggcctc

SEQ ID NO: 13700 - DNA, 201 bp, Homo sapiens
atgggcatgtgctgtgtgccattctctccccttatcagtgggttcccagctgcctggtgtacaggagggttaagtagatacctgttgagtgattgtgaatrttttcattcacgggggcagatttgtgtcctactaacaccagacatgtcctgttttcagattacttctttttcaacatctgagtacctataacatctaaag

SEQ ID NO: 13701 - DNA, 201 bp, Homo sapiens
gccactgcactccagcctggatgatagagcgagaccatgtctcaaaataatgataataattgtagtagtagtagtggtggtggtggtggtggtagtagtastagtgaatgccctgactttggggtttgcagtaagctaggattaagtgcttcacagtgaggcacagtggggagctactctgaggatgaattgcctagtaaa

SEQ ID NO: 13702 - DNA, 201 bp, Homo sapiens
ttttgataaatacctaggtgtgaaattattgactcttagtgtttaacttgtaagaatgctgccaaacagttgtctaaagtaattgtatcattttaaccccycgctagaagtgtgtaagagtttatgttgcttcacatcctcatcagcactttgtaatttcagtctttttaattatagcctttttgtgggtgagaaacgcta

SEQ ID NO: 13703 - DNA, 201 bp, Homo sapiens
tcctcttacagttttggttctttccatgagaaagtatttttaatagcaaagtaatgaacaagaaagtattaataagacccaaataataatataaactactmctttactaatggtcattatgtgccatgccctgctctaaacacttgccatgtagtcactaatttaatcctcacaagaattctgtaatgtagtgtagtttcc

SEQ ID NO: 13704 - DNA, 201 bp, Homo sapiens
tagtgtttaacttgtaagaatgctgccaaacagttgtctaaagtaattgtatcattttaacccctcgctagaagtgtgtaagagtttatgttgcttcacakcctcatcagcactttgtaatttcagtctttttaattatagcctttttgtgggtgagaaacgctatctcttgctagttttattttgcattttcctagtgac

SEQ ID NO: 13705 - DNA, 201 bp, Homo sapiens
gaaatacaaaaattagctgggtttggtgacaaacgcatgtaatcccagctgctagggaggctgaggcaggagaatcacttcaacccggaaggcggaggttkcagtgagctgagatccagcctgggtgacagagcaagactccatctcaaagcgaaacaaaacaaatgagggtcctcatcagcgtgcctttgacactgtcct

SEQ ID NO: 13706 - DNA, 201 bp, Homo sapiens
gtttctcataacatttgtgtgtgtgtgggtgggtgggtgtgtgtgaaaggtaggatcacctctctgtgcctcagtctccccatcatccttcggtggtagawcaatgctatctgatgaggccttttttgggatcacccactccaacatgcatgtcctttctctgtcccctcctggtgcctgtattagtctgttctcacattg

SEQ ID NO: 13707 - DNA, 201 bp, Homo sapiens
cagcactttgtaatttcagtctttttaattatagcctttttgtgggtgagaaacgctatctcttgctagttttattttgcattttcctagtgactaatgcmtctttttatgaactcattggccgttcatatattttctttctgtgaactgcttgtttatgtattggccattttctaaaaattagatagtctttttaatatt

SEQ ID NO: 13708 - DNA, 201 bp, Homo sapiens
gtccaatttatctttttcatttgtttagtgctttcttgttctaagaacctttaccaatcaccaggtcacaaaaatattttcctatgttttcttctagacastccataacttcaatctttacattcagatctatgttccatctcaaattaatttttgtatatggtgtgaggtaatggtagaggtttatttttctctccataa

SEQ ID NO: 13709 - DNA, 201 bp, Homo sapiens
actatttgttcaaagactaatcctcgcgctattcaatttccttggcatctttgtcaaaaatcagttgactatatatgtgtgggtgtatttctagactgttrtactccattgatctaattttttttcttatacttactgctcgattgcctggaagctaggtaataataaggattcaaactttgttctttatttcaagattgt

SEQ ID NO: 13710 - DNA, 201 bp, Homo sapiens
tttccttggcatctttgtcaaaaatcagttgactatatatgtgtgggtgtatttctagactgttgtactccattgatctaattttttttcttatacttacygctcgattgcctggaagctaggtaataataaggattcaaactttgttctttatttcaagattgtttgggttagtttagatactttccttttacatatata

SEQ ID NO: 13711 - DNA, 201 bp, Homo sapiens
aggttgtgtctgagattcagaggttgtttttatagcagcaacacagtaagttgggaagagggacacatttttaacatagacaccaaaagagaggctggaaragttgaccacttagaaatgtcacgagtgtctgtgaatagtgttgggggctgagaggcaagagaagaaaatagtcctaatgttgtacaagtagcaatggaa

SEQ ID NO: 13712 - DNA, 201 bp, Homo sapiens
tctttggagaagaggcccacgttcttttcagattctgatttctccgtgatataaatagttttttaggtgatcacttgtttttaatgtacctacctatctawacctttctctctctctctctctctctgtgtgtatgtgtgtgtgtgtataaaattacatatccagtatgaaacctaaaaataagattttggggcctgtgaa

SEQ ID NO: 13713 - DNA, 201 bp, Homo sapiens
ttggtattgaatctgttgatcaatttgaggaggatcaaaatcctgaaagtgttgagcgttaccatccatgagcatgcatctctccatttatttaaggcttstttatttataaacatttcagtgatatttgatgattttgaatgtggaggtcttatacttttttgttaaattaactcttacacatttgatttttttatgcta

SEQ ID NO: 13714 - DNA, 201 bp, Homo sapiens
aagatatccctaaagacatcctgctggtttcagtggctcatgcctgcaatcccagcactttgggaggctgaggcaggcggatcacttgagctcaggaattygagaccagcctggccaacatggtgaaaccttatccgtaaaaaaaataaaaaattagccagacatcgtggtgcatgcctgttgtcccagctatttgggagg

SEQ ID NO: 13715 - DNA, 201 bp, Homo sapiens
cttcttctccaatttttatggcttttgtttctttttcttgttttaatgcactggctatagcctgtaggacagtgttgaacagaggttttgagacagacatmattgctttattcaggacttctctattatatgtgatcctagttgtatgttttctgtacctatacttcattagattaaggagtttgaatttatttctagttt

SEQ ID NO: 13716 - DNA, 201 bp, Homo sapiens
cttgttttaatgcactggctatagcctgtaggacagtgttgaacagaggttttgagacagacatcattgctttattcaggacttctctattatatgtgatsctagttgtatgttttctgtacctatacttcattagattaaggagtttgaatttatttctagtttgctgagagttcttttataaatgtgttcatatatata

SEQ ID NO: 13717 - DNA, 201 bp, Homo sapiens
cttgtctacattttgaggctcttctattatggaagagggctagagaggccatcagaatttggtttcactagcctttgatccttcctgtttaaggagctcarcatttagcttcacttccctgtcattcatcagaattcattctcagattggaattgtccagtcttagagtgatttttgtccccagtgacacttcccttatat

SEQ ID NO: 13718 - DNA, 201 bp, Homo sapiens
tggaggaggattcaagccccttgcaacggactgaagtgcccaagctctaaatccctgccacccacagcctctgttggccccaggttgtgtctgagattcaraggttgtttttatagcagcaacacagtaagttgggaagagggacacatttttaacatagacaccaaaagagaggctggaagagttgaccacttagaaatg

SEQ ID NO: 13719 - DNA, 201 bp, Homo sapiens
agggggtggaggaggattcaagccccttgcaacggactgaagtgcccaagctctaaatccctgccacccacagcctctgttggccccaggttgtgtctgarattcagaggttgtttttatagcagcaacacagtaagttgggaagagggacacatttttaacatagacaccaaaagagaggctggaagagttgaccactta

SEQ ID NO: 13720 - DNA, 201 bp, Homo sapiens
attttactcacccagaaggaagccgggtccctctttgcccctttgggtgtttgtgaaaagcaagttgtaaacactgaattctataaactgttggagacagrttctggagagacactcaggcttagctctagaaagaaacgggtaagacagaggaggttcagggcaactgtgttgccttccttgactggtgcatgggaattc

SEQ ID NO: 13721 - DNA, 201 bp, Homo sapiens
tgtcgggccatttgttttttaacgaattgccctttcatcttatatgcatgactattggatatgtatcgattactaattgattgcttgcctcatgtgctatmatttaattttcaaaatgtcccttagaagttaatttataaagtgtctattactttaagtacctgttcaatcctgtgatcaagaggaaattcacagagaaag

SEQ ID NO: 13722 - DNA, 201 bp, Homo sapiens
tagaaacttggacagaggaaaatgaaaatgttctattaattccactagcatgagataatcactcttaatattttgttgcatgttcttttctttcttctgartgatagcatttttttcaacaaattgggctcgtaatatataggcacatagatatataattaaaaaaacaagaatttctcatgtcattaaacattgcttgaa

SEQ ID NO: 13723 - DNA, 201 bp, Homo sapiens
accctctgattcaggctcagcaggagcgggagaggatgcataggactacatgttttctgggccaggactggaagcagcatatctcagatccaacctctttmccttggcaaaaattcaggatgtgcaggacgaggaggaaaatgggagtagtgactatttagccagtctttgccacatcccggttcatatctcactccgtca

SEQ ID NO: 13724 - DNA, 201 bp, Homo sapiens
aaggagaagaaaatgaagaaaaatttagaaacttggacagaggaaaatgaaaatgttctattaattccactagcatgagataatcactcttaatattttgktgcatgttcttttctttcttctgagtgatagcatttttttcaacaaattgggctcgtaatatataggcacatagatatataattaaaaaaacaagaattt

SEQ ID NO: 13725 - DNA, 201 bp, Homo sapiens
ttcttgttctcgtatcactcagactaagcagttgatgtaacagataacccccaaatttcagtgatttcacatttaatctgtaaaaaatgaggatttgtttrtagccccaaagacagtctagtttggattatttgaggacctagacttcacctgcacagtggtttcaccatccatccccccatggcctccatggtaccctct

SEQ ID NO: 13726 - DNA, 201 bp, Homo sapiens
cctgtagataatacagtcccattctctggggaaacagatacctccgccagggtcctgatctgaatatgatttggggtgatggaacagaaacacccgaggastgtcgttggggaacaggaaacctgtctgtagtcctggctctgtctccaattggctacgagggcttgtgtgtactctagttctctttccgtgacactgcat

SEQ ID NO: 13727 - DNA, 201 bp, Homo sapiens
tgagttctccataaatgttagttattattttaatattacagcatctgtggaaacagtgggtttatatttcagcgtcctgagaaacactcatcctgaacaaygggaacattggccacatccgccattgtcaattttaaataaaagatatgatgactagttggtgagttgatcttgtaagacttttacagatacccagaacgg

SEQ ID NO: 13728 - DNA, 201 bp, Homo sapiens
agttattattttaatattacagcatctgtggaaacagtgggtttatatttcagcgtcctgagaaacactcatcctgaacaacgggaacattggccacatcygccattgtcaattttaaataaaagatatgatgactagttggtgagttgatcttgtaagacttttacagatacccagaacggctctacttcttcatattcc

SEQ ID NO: 13729 - DNA, 201 bp, Homo sapiens
aggcatttttctgttgactgtgcatgaagccacatagtaataaacagtttccatatccaagcagctaaggcttgtgccttgcaagttaagtggaacatcasgatctatatctcagttttccttatgtttccccagttggcacatcatggccaacaagagagtagggatcattaaggagtttattttcatctttattttatc

SEQ ID NO: 13730 - DNA, 201 bp, Homo sapiens
ctttttctgactagctgattctgctgctgctggatttattcattcttctccctcacaattttggctcgcacatgcttcctttttagctcatgaccgtgcarttcaactcaacctcatggcatctttttatcagctgtccctgctgcaacaggcttagagttggtttcccaattccctagcgcagaaatccactggcatgag

SEQ ID NO: 13731 - DNA, 201 bp, Homo sapiens
cctcctgttttgtgtcagctcagacactgaaggggaaagtttccagcctggtttctccatacactgaacatgttgaaatctatgccttaagcccaaatgarctgtcactcaagtatgcacgctcatattattaaaaactgtgcatgtaatttgctgggcacccaaataatttgttttttatttttccttaaaaatgagact

SEQ ID NO: 13732 - DNA, 201 bp, Homo sapiens
tcttctcaggcttccaaccactatgtttggaaatgaaatatgccttgaaggaaaaaagctgccaaatgctggccttgcagtttttgcagatcttggccccmaaaattcttagtcatagtgcccttctgatgccttcaaacagatatgggtgtgtatgcacgtgtgttattttgtccatcttttctaattgttctcagtagg

SEQ ID NO: 13733 - DNA, 201 bp, Homo sapiens
ggcgttctctttttctgactagctgattctgctgctgctggatttattcattcttctccctcacaattttggctcgcacatgcttcctttttagctcatgrccgtgcaattcaactcaacctcatggcatctttttatcagctgtccctgctgcaacaggcttagagttggtttcccaattccctagcgcagaaatccact

SEQ ID NO: 13734 - DNA, 201 bp, Homo sapiens
caaataatttgttttttatttttccttaaaaatgagactttctgttaggaaagtgattcatgaaacagtgaagatcctgcctcacaactttcaagaaaccsacagaggtccctattcacataagaattttctaagcagaggttccaatttggatatttcgtggccttcaggttatttgtaaccagtacacaaaccacaaag

SEQ ID NO: 13735 - DNA, 201 bp, Homo sapiens
agatggttctatgttgtcaggggctgccctgttcatggtaagatgttttgtaatgcctggtgtttacccactagatgccagtaggactctaccccacaacygtggccactgaaaatgtctccagacatttgcttctgtcccctggggatcaaaatcacccctggttgagaacttggggtaatttaagtggtgctccggtaa

SEQ ID NO: 13736 - DNA, 201 bp, Homo sapiens
ccaagtcttttgccctccatggtgcacatgtgatcttggcctgcaggaacatggcaagggcgagtgaagcagtgtcacgcattttagaagaatgggtaagygcttgactgttgttgttttttttaattgtcaaatacacatgccgggctaaccatatggagatttcagtggagtgtgtaaagtttattgctcttggaatca

SEQ ID NO: 13737 - DNA, 201 bp, Homo sapiens
tccggttctcccagtcattacctttctccttcaagctgggattcagagtccattttcatagggcaaaatgcagagttcgggttccttcctatccatgagartaggtgctgaaggagataaaggaatgaagacatagactttgaaagcaatagtctggcaatcatccaaaggtttgtgggaggacaaaagatcacaaagtat

SEQ ID NO: 13738 - DNA, 201 bp, Homo sapiens
aggaacatggcaagggcgagtgaagcagtgtcacgcattttagaagaatgggtaagcgcttgactgttgttgttttttttaattgtcaaatacacatgccrggctaaccatatggagatttcagtggagtgtgtaaagtttattgctcttggaatcatgtctttatttttaaagtcatcttcactttgtttgtcttatgaa

SEQ ID NO: 13739 - DNA, 201 bp, Homo sapiens
acattatagaatattttcacggaaatatttcggatggaattttggctttaattctttctctttttttcctgttcttttccctctccccacaaccacttctstttcattttctgttttgctccttcttttcataagtagctggtagtcagtgttctctttttcttcctgtgagacaggatctccctctgttgcccaggctcg

SEQ ID NO: 13740 - DNA, 201 bp, Homo sapiens
tcctttaactcatttattaagaaaaataaaacgtggtgaacgcccatgattgcaactaggagactgttatgcttatggttgttaagattagaaagaaggargctttaaccctatctctgatttcttacttttctctgtctatgtagaagttgatgttgatacgtgtctacataaatatttactaagggcttgcattagtct

SEQ ID NO: 13741 - DNA, 201 bp, Homo sapiens
ttcccccgtgactgctgcgggggcctaggccaaagatatgcccgagtagaaaatctgacaccagcttcccagttttctcttctgctctctttggctgcaasgcttttaccatggctaaaccattaggccggctctgcagggagggcaagaccacagcagctcagtatttcctgctcagggaaaaaggccaggtcttttgtt

SEQ ID NO: 13742 - DNA, 201 bp, Homo sapiens
ttccctttggtggccatttaggttgtttgcattgttttgctatttgttattccaagcaatggtgtttcacagttctctctttcttgcatcagtctttcttrcgatatcatctgatattgggcctaaactatgctgctgtgagcattctttatttacgtatttgtgagtaaatgcctggggcagaatcttagcactggactc

SEQ ID NO: 13743 - DNA, 201 bp, Homo sapiens
tgcgggggcctaggccaaagatatgcccgagtagaaaatctgacaccagcttcccagttttctcttctgctctctttggctgcaacgcttttaccatggcyaaaccattaggccggctctgcagggagggcaagaccacagcagctcagtatttcctgctcagggaaaaaggccaggtcttttgttggtggaaatccactt

SEQ ID NO: 13744 - DNA, 201 bp, Homo sapiens
cgagtcattttcttttttcttttttttctttttcttttttattttttttttgagactgagtttcactctgtcaccaggctggagtgcagtggcacaatctygactcactgcaactttcacctcctgcgttcaagcaattcttctgcctcagcctcccgagtagccgggactacaggcacgcgtcaccatgcccagctaatt

SEQ ID NO: 13745 - DNA, 201 bp, Homo sapiens
gtctaatttatgtaaaataaattgcatccatttaaatatacaattcaatgagttttgacagatgcacatgcccatgaaaccaacacgaaaataaaaaaaawagaacatttacgtcacctcaaaaagatttcaaatgccacttctgtggtgtatgactctgagtccagacagcctcagctccaggaaaaccctggtctgttt

SEQ ID NO: 13746 - DNA, 201 bp, Homo sapiens
tttgatattttttaaaggaaaaatttgaggcattgacacatgccttttgcttacttgcttggattggtttgatcaactttgttgcggtctaatttatgtawaataaattgcatccatttaaatatacaattcaatgagttttgacagatgcacatgcccatgaaaccaacacgaaaataaaaaaaatagaacatttacgtc

SEQ ID NO: 13747 - DNA, 201 bp, Homo sapiens
aaaaaagtaaaataaagcatgggaagtcccttatacagtttgtgatatgggtacacactcagtgaaatggccattaatactgctgttcttaactctgaaarcagagtgggccatttgaatgctcactttgatattttttaaaggaaaaatttgaggcattgacacatgccttttgcttacttgcttggattggtttgatca

SEQ ID NO: 13748 - DNA, 201 bp, Homo sapiens
aaaaaaacaaacttgaaaagcatagcaggctgccaggacatgtctgagtaccgcgcagatagtggggaatagtctatggattctgcttacaccatggacarccaggctgggccatgggttgtgttttttttcctctcattttatagaaatgttaccaggcatattttccctgtttccctaagaagagcttcctctcagtgc

SEQ ID NO: 13749 - DNA, 201 bp, Homo sapiens
taactgtctcttgcgatcccctcctgcacaactgtggcgttctctttttctgactagctgattctgctgctgctggatttattcattcttctccctcacarttttggctcgcacatgcttcctttttagctcatgaccgtgcaattcaactcaacctcatggcatctttttatcagctgtccctgctgcaacaggcttaga

SEQ ID NO: 13750 - DNA, 201 bp, Homo sapiens
tggctgacagagggagactctatctcaaaaaaaaataataaaaataataaaaaaaaaattacatgaaaaatagagacaaagtctcgctttgttgcctaggstggtcttgaactcctgggttcacgtgatcctcctgcctcggcttcccaaagtgctgggattacaggcacgagctgccacgcctcacctcttgttttcaat

SEQ ID NO: 13751 - DNA, 201 bp, Homo sapiens
cagggctctgcccattagaatctctagggacagaccgaggtttgagagttcctgctcctgatctcaggggaatcctgaattacaggtgttaacctgattakccccagcccagctcttcgttaattacctgaagtgaatgggacagtttccaatactcagcacaaaggcgtgcgcagtgactctgtggcgtactatctattt

SEQ ID NO: 13752 - DNA, 201 bp, Homo sapiens
atggctaaaccattaggccggctctgcagggagggcaagaccacagcagctcagtatttcctgctcagggaaaaaggccaggtcttttgttggtggaaatscacttttccatccactgtcttctaagaatgaaagtaaatctgttgtgctttcctctgccctgtcctcaggcttagccttagtgggcctggtttttgcccc

SEQ ID NO: 13753 - DNA, 201 bp, Homo sapiens
ggcacaatctcgactcactgcaactttcacctcctgcgttcaagcaattcttctgcctcagcctcccgagtagccgggactacaggcacgcgtcaccatgyccagctaatttttgtatttttaatacagacggagtttcaccatgttggctgggatagtctcgacctcctgatctcatgatctacacacctaggcctccca

SEQ ID NO: 13754 - DNA, 201 bp, Homo sapiens
ctaaatactccctagaggtttcccattggccacttggggtacaccccttataaatgaagtggtggcctgcaatcagtcttattggttgcagaaagcaaccratcagaggctgaagtgaagttacaaatatcacactcctatgcaaacatctgattggttttggaaagcaaccaatcagaggctaaagtgaaattacagagt

SEQ ID NO: 13755 - DNA, 201 bp, Homo sapiens
ttctgcctcagcctcccgagtagccgggactacaggcacgcgtcaccatgcccagctaatttttgtatttttaatacagacggagtttcaccatgttggcygggatagtctcgacctcctgatctcatgatctacacacctaggcctcccaaagtgctgggattacaggcatgagccaccgtgcccgacctcccgagtcat

SEQ ID NO: 13756 - DNA, 201 bp, Homo sapiens
ttataactacagaaaatatattttcattccttccacttcatgctttcagctagaaatgtgagtctctgagacttgtattcttggggtcacttaaaacataytgcataatgaggccttcaatgactctgatttggaactgaccctctatgaggggttatacccctggacaccaagctgctggcctgagcatgaggttgatgg

SEQ ID NO: 13757 - DNA, 201 bp, Homo sapiens
accatgcccagctaatttttgtatttttaatacagacggagtttcaccatgttggctgggatagtctcgacctcctgatctcatgatctacacacctaggmctcccaaagtgctgggattacaggcatgagccaccgtgcccgacctcccgagtcatttcttatcttgttgctccaatttccattcccactgacagtgtag

SEQ ID NO: 13758 - DNA, 201 bp, Homo sapiens
tactcaaataagtctcccccaaaactcagggatagagatttttaaggagaatttagtgagaagggggtcagggaatggggagtattgattggtcaggtttragatggaatcagggagttgaagctggcctcttgcactgagtcagttcctgggtgggagccacaagaccatatgagtcaatttattgacctgggtggtgcc

SEQ ID NO: 13759 - DNA, 201 bp, Homo sapiens
gcttgcagtgttcttgggactagcaggagggcgtgtcaaaattgtaaaactctgcctatttgatgtaatatttgaaactagaaaggtaaaattccagggaygctagtgacactatggtaacctgattgtacagtgacattcatgtttaaaccagtcttggaagataatgctgtagcacaactgtttttgcatcattaaatt

SEQ ID NO: 13760 - DNA, 201 bp, Homo sapiens
agtgggttgcgcctgtaatcccagcactttgggaggccaaggcgggtggatcacctgaggtcaggagttcgagaccagcttggccatcacagtaaaacccygtctctgctaaaaatacaaaaattagccaggcatggtggtgtgggcctgtaatcccagctacttgtgaggctgaggcaggagagtcacttgatcccgggg

SEQ ID NO: 13761 - DNA, 201 bp, Homo sapiens
catcaattgcagggtctgcaaagtatctaaagtactgatgttcggttttaccatagtgacattatcccctggagcaatttggggaggttcagaatcttgcrgcctccggcagcatgactcctaaaccctaatttctaatcttgtggctaatttgttagtcctgcaaaggcagtctagtccccaggcaggaaggttgtttat

SEQ ID NO: 13762 - DNA, 201 bp, Homo sapiens
cccaagatgatgattatggaaactcaaattttgcaccagaagctgtagttaccatttcattccattgcaccattcataccctgcagagaggatgtgaagtygtaaggccttcttgctctggtgacatctgttaggcttcgtctctatatcatcccccaactccttgacccttgatatttgctggtctacttcccttcaggt

SEQ ID NO: 13763 - DNA, 201 bp, Homo sapiens
ccttagcagacatcatttctctgtttaatctgtctacttgctaattgtctcactgccctccccctccccactggagagtgaatgaaggcttaaggttttgyctgccttggtctctcctgggtcctgagtaccagtggccttacgtggcatttggtagattacatgcttaatgaaaagtgagtgaatgggctgggtgtggtg

SEQ ID NO: 13764 - DNA, 201 bp, Homo sapiens
ccatcccactaatatatttcttaccaggagtacatagtttgttctttaagcaaaaccatatgcatcgtattttaaatggaacagggaggttgttccatgcrtcaacttagtccaaatgtagagggtcaggaaaacaatgatatgagaaaagggccggttactgtctgggaatccataaatactgcttggcaaatggcacat

SEQ ID NO: 13765 - DNA, 201 bp, Homo sapiens
tttcttttttttttttttgcattttccagacgagccaagggatggctcagaagggtgaaggaactcacccgaattgcacagctggtgagctcagagtcagkctccttgcttggtccatctggcttccaaactccaagtctgtctgctccaccccatggcccatctttttaccatgtttagtatcaatgttcatactttgca

SEQ ID NO: 13766 - DNA, 201 bp, Homo sapiens
attcttgcaaatgtttttggtttctctgtctactcattacgtacactctgccagaggttgaaaactcaatgttgagatcacatacatcctgaaaacactgkttaaataaaattttggcctgcatcctgtttttgaaaacttgcaatggcttgccaacgttttcaagttgagaagtttcacaaaaaaaattcggatttccag

SEQ ID NO: 13767 - DNA, 201 bp, Homo sapiens
aagcaaaaccatatgcatcgtattttaaatggaacagggaggttgttccatgcgtcaacttagtccaaatgtagagggtcaggaaaacaatgatatgagaraagggccggttactgtctgggaatccataaatactgcttggcaaatggcacattgcatgcttattccttaggcatccgtttagcaaaataagatgtcaag

SEQ ID NO: 13768 - DNA, 201 bp, Homo sapiens
tggtgccctcacctcttaagacaagcacctatcgttttcctgtgtattccaagaggccagtgtggctggtggaataagatgttttcctgttttcaagatgsagtggactctcttttatttagcagcagtgtctatgtgttaggaatccatgtgagttctctaagtctgggacaacgataggtgtgtctgagtcctgcatta

SEQ ID NO: 13769 - DNA, 201 bp, Homo sapiens
aaggctacagtgagctgtgatcctgtctctacacctcagtctgggtggcagagcaagaccctgtctcaaaaaaaaaaaaaaaaaaaaaaaagtaaaataawgcatgggaagtcccttatacagtttgtgatatgggtacacactcagtgaaatggccattaatactgctgttcttaactctgaaagcagagtgggccattt

SEQ ID NO: 13770 - DNA, 201 bp, Homo sapiens
taactaccttgcttgcctatgggacatgttcccatttcagtgcatacttgacctttaccataaatcacatatttgtaaactgtaccctcctgctgttttaytgggcatggagaagcagtcttttctttttcttgatggcctgggttgaccagatcctgacttttgtggagacattaaagtgctagaaatgataatggtgaa

SEQ ID NO: 13771 - DNA, 201 bp, Homo sapiens
cagtatctattggagttgggcttctgttgctttatttctcggggtctggcatatcccactccctgtcttgagatctcaggacctctgaggggcattgcatktaaagaacaagagcttattaggtatcaaaacatacttcatgaacagctacagcaagacctcgacattccagtgtagagctcttgaaagaccccagtgggg

SEQ ID NO: 13772 - DNA, 201 bp, Homo sapiens
ttggtaattgaatgaaataagactcttaggaaaattctccccagtggcaatgttgtaagaaacaccaggccgggcacagtggctcacacctgtaatcccarcactttgggaagctgagacaggcagatcacttgaagtcaggagtttgagaccagcctggccaacatggttaaaccccatctctactaaaagtacaaaaat

SEQ ID NO: 13773 - DNA, 201 bp, Homo sapiens
tggtcagagagggctggtatgggaagaggggcaggtggctctcccttagagttactatttgactcacccctgacttcccagaatgtgtcttgagtctattmccctctcatatgggaggggtgacccaagtatgtttgtggcaaccaaaatgtctccaggcattgccagatgtctcttgggggtgcaaatcgtccccagttc

SEQ ID NO: 13774 - DNA, 201 bp, Homo sapiens
ttaaaagtcctggttcaggctgggacttctgctcagggtctcatgaggctgaaatcaaagcgtcagccagggatggggtcttatcagaggcccttggttaytaacagaattcattttcttgtaactgtaggactgaggtgcttgttttcttgctggctgttgactgagggccccttgcagcccctagaggctattctcagg

SEQ ID NO: 13775 - DNA, 201 bp, Homo sapiens
acctgtcccaggccttgtcttccagccccacaaacgtgcacctgcagccggagaccagggggccccgatcaggtggcagggcctttaattggagccacgtktgtataatgagcagcgcacacacacaaaggcgagctaaaaatgtctccacccttctaaatatgggatgccttggccaggtattgagtcagctctgtgacg

SEQ ID NO: 13776 - DNA, 201 bp, Homo sapiens
gagcagcgcacacacacaaaggcgagctaaaaatgtctccacccttctaaatatgggatgccttggccaggtattgagtcagctctgtgacgccagtgcarttatcccgattcagcatcagatttattcaccattaaacatgttctaacttgattgcaaacaagccttgtattatttagagggatccacggagctggcaga

SEQ ID NO: 13777 - DNA, 201 bp, Homo sapiens
gctggagtgcagtgacatggtgatggctcaccacagcctcagcctccctgggctcagtcgatcctcccacttcagcctcccaagtaactgggactactgtsatgtgccaccatagccagctattttttttgcattttttagagatgagtttttgccgtgttgccgaggctggtctcaaactcctgggctcaagctattcac

SEQ ID NO: 13778 - DNA, 201 bp, Homo sapiens
ctgggactactgtgatgtgccaccatagccagctattttttttgcattttttagagatgagtttttgccgtgttgccgaggctggtctcaaactcctgggstcaagctattcacctgctttggcctcccaaagtgctgggattacaggcatgagccaccatgcccggcccccttttttaaaaaacaaaaaaacaaaaaact

SEQ ID NO: 13779 - DNA, 201 bp, Homo sapiens
gatggatgtcttctatctctgccctgtccagtataaaagccacaagccacatctggctgtgtggcacttggcatgcaactagtatgacatcttaatttttytttttgagatggagcctcgctctgtcacctaggctagagtgcagtggtgcaatctcgactcactgcaacctacacttcctggattcaagtaattctccta

SEQ ID NO: 13780 - DNA, 201 bp, Homo sapiens
cagtgtttacagaccccaaagcttgctgtcccctgggcaggtgcatgagggggtcccaggcaatcaggctcttctcaaacctgaattatacccggcctcarggtataggggtcaggcagctgtttgacaggattcttgcaaatgtttttggtttctctgtctactcattacgtacactctgccagaggttgaaaactcaat

SEQ ID NO: 13781 - DNA, 201 bp, Homo sapiens
acctgtaatcccaacactttgggaagctgagacaggcagatcacttgaagtcaggagtttgagaccagcctggccaacatggttaaaccccatctctactraaagtacaaaaattagccagacgtgatggtgcgtacctgtaatctcagctactcaggaggctgaggcaggagaatcacttgaacccgggaagcggaggtt

SEQ ID NO: 13782 - DNA, 201 bp, Homo sapiens
cattgccctccattcagatcttgtcacttaggccttggtagcatgagctattaacagccctccatatttactatttttttttttttttttaactctgggasttcctgttgcagaaattggatcacttacctaaaaagctccccacccccacctttggtgactggtgggtttcatcaccaggaaagcacattgttccaactc

SEQ ID NO: 13783 - DNA, 201 bp, Homo sapiens
gtattgttccatttttgagtattactttaatacattattgataagttaatttagaagtatcaagtgaaaggggaagaaaaacagttttgaataaaaacggwgtttcctctggactattttgccaaatgcatttttattggtagaacgtaagcaaatttaaaaaagcaacaaaagcagtttttatgaatacctagcgtactt

SEQ ID NO: 13784 - DNA, 201 bp, Homo sapiens
acctgtaatctcagctactcaggaggctgaggcaggagaatcacttgaacccgggaagcggaggttgcagggagctgagatcacgctgatgcattccagcstgggtgacagagcaggactccatctcaaaaagaaaaactcaacgaaacaccccagcttctatcattctcaagcttagtgtgtgcaagactcatggatgct

SEQ ID NO: 13785 - DNA, 201 bp, Homo sapiens
tttcaatagagttgatatcgggtctatttattttgtgggagtgaagggatagggatagtactgacagcattatgtgattgcagcctcattgataagcatcrgaaataatgactttaacattattttcagatagggagcactcagtaccaaccattatattaggctcatgggctcaacattttgctgtgcttttcatagata

SEQ ID NO: 13786 - DNA, 201 bp, Homo sapiens
atttattttgagagcaagcacgggggtttatgtgatggctccacagagcagtgaaaagactcccgccctactgctcgcaacctcagatgtccctgggcacwagcccatctgtatgtctttaaaaaaaataaattaaatttttaaaaacatgactttctggccaggcgcagtggctcatgcctataaccctgcacttagaga

SEQ ID NO: 13787 - DNA, 201 bp, Homo sapiens
ggccaccatggtgaagccccgtctctactaaaaatacaaaaaattagccagctgtggtggcacatgcctgtaatcccagctactcgggaggctgggacagragaaccactggaacctgggaagcggaggttgcagtcagccgagatctatgccattgcactccagcctgtgtgacagagcaagactttgtctcaaacaaac

SEQ ID NO: 13788 - DNA, 201 bp, Homo sapiens
attgataagcatcggaaataatgactttaacattattttcagatagggagcactcagtaccaaccattatattaggctcatgggctcaacattttgctgtrcttttcatagatactgacacttgtgttttcattttgttgttgttgttgttttccctgccgggaaactgccgcatcctgtgttttcatggcatgatattaa

SEQ ID NO: 13789 - DNA, 201 bp, Homo sapiens
gatggcagctcaaggggtttttgcctgcgtcttcacccaaagccactaacacgggatctgtcaattgcattgctggtgatcaagaaatgccagctcctccrctcttccctgagtgccttgttggagacaaaaccagcaggattatatccccagcactgtaatttagtgtggcagtcaggggaaaacaccttgtagaatttc

SEQ ID NO: 13790 - DNA, 201 bp, Homo sapiens
tgactttaacattattttcagatagggagcactcagtaccaaccattatattaggctcatgggctcaacattttgctgtgcttttcatagatactgacacytgtgttttcattttgttgttgttgttgttttccctgccgggaaactgccgcatcctgtgttttcatggcatgatattaaggaacgatgggtaggatgctg

SEQ ID NO: 13791 - DNA, 201 bp, Homo sapiens
attggttagatgccgtatctttaaaacaccatcagcttggaaaacactatccattagcaagagatcagagcaagagaaacctcgaagggtcgaacggtccrttctgagggctccacaaagaactcggcatcccagaaggatgattagccttccatctctcgagttgtctcagagcacaacaggtctgagtgtttttttctt

SEQ ID NO: 13792 - DNA, 201 bp, Homo sapiens
cattttgttgttgttgttgttttccctgccgggaaactgccgcatcctgtgttttcatggcatgatattaaggaacgatgggtaggatgctgaggagtaarttgctcgcacttttaaagacttctgcaaaactccacctacttttaggctccttaaaattcagtgactttatgagctggtatagcttcactgtttgtggga

SEQ ID NO: 13793 - DNA, 201 bp, Homo sapiens
catagctcactgcagcctccaactcctaggctgaagccatcctcccaccgtagcctcctgaatagctgggactaaagtgtgcaccacaatgcccagctaasttttgtattttttgtagatacggggtcttgctatgttgtccaggctggtctcaaagtcctggcctcaagtgatcctcctgccttggcctcccaaagtgct

SEQ ID NO: 13794 - DNA, 201 bp, Homo sapiens
aaccatacacatccagtagaaaccgaactttacattttgagtttcgatttttttttttcacctgggctagtaatacgtggtaggatactctctcacaatgytaggccacagcagcgagctgcagctcccagtgatcacaagggcaaagaatcgatattctaccaggcacggtgttgcctgataaccttgcccagctgtagg

SEQ ID NO: 13795 - DNA, 201 bp, Homo sapiens
agtatcattctgatgtagggaggatatcacctcacaggagtctttcctggctatcctgtccaaagtcactactcacaatttctctatcccataactctatyttatttctctgtctagcacttatcactatctgatattttctgtctatccatccgtctattcattcattcattgctaatttattagtattgccttcccatg

SEQ ID NO: 13796 - DNA, 201 bp, Homo sapiens
ttctgtatagtattggattttcaataaataaagtatgatataaacaagtctgcaaaccagcaagaactatataagccacttgctcaagtcaataagcgcaygctcacaaaggaacgtaaagttctgaagttcttctttggggcgtttgcaaaatgtcctattattgtcacctgcaggtggggggttggatattcctatttg

SEQ ID NO: 13797 - DNA, 201 bp, Homo sapiens
tcacctgtcctttatcttggctggtccaattccataagaagtaaatgctgtgtgtctgcaattcaaaagacccctttcacgggaggctgggagatttttcyatctaaatagcttaattgttactctacagggcaatcataaatgtaaatcgacttaatatgacttgattgttagtaatgactgtgcctctaatgacgctgg

SEQ ID NO: 13798 - DNA, 201 bp, Homo sapiens
cacagctgggagataacggggtggatccaagatttgcagctggtgtgtgggtgatgccggaagattggcctttttcaaggacttagacaagtattgtactsatacattatttgcatttatttgtatgaatacttctgggttcctaatatgagggtacctaaaaagtacatccgctgcgcttcttgtaatctgagggagttg

SEQ ID NO: 13799 - DNA, 201 bp, Homo sapiens
ttgttctttgatcattgtctttgtgtcttctccttttttttttttttcctggccaccgctcgcagtcttgaaccgaatctttcaaactttatatccatgtracctttgtataatgagggctgtgattaactgcagagttttaaagagtgaaagtcaagcataggtggctggctctgaaccatcactcccaataatgtgaaa

SEQ ID NO: 13800 - DNA, 201 bp, Homo sapiens
ctattagcaaaataacagacagtgttatcagtcattgactcagaagatagtttcttaccgtttggggaaagtgcttgtctattcctctccaaagccatttwaaaaaaaaaattgcaccagttctcatcccatcatctgccttgatcaaacatttgcttattggaatcacttcgaaaaggaacttggtatcgttcacatgtg

SEQ ID NO: 13801 - DNA, 201 bp, Homo sapiens
gactgggaagaaaaagaggtttaactggacttacagttccacatggctggggaggcttcagaatcatggtaggaggcgaaaggcacttcttatatggtgtmagcaagagaaaaatgaggaagaagcaaaagcagaaactgcctgataaacccatcagatctcttgagacttattcactatcatgagaataggatgggaaag

SEQ ID NO: 13802 - DNA, 201 bp, Homo sapiens
agtgatttgcccaccttagcctcctaaagtactgggattacagacaagagccactgcgcagacggacatatgaatttttaatttgatatcattgtgatcartttgaagatccacatatggctgagggctactctaatgagtggtgcagctccaaggcagagagatggctgtgattaaccaatgaatgagggaacaaatatc

SEQ ID NO: 13803 - DNA, 201 bp, Homo sapiens
cccaccttagcctcctaaagtactgggattacagacaagagccactgcgcagacggacatatgaatttttaatttgatatcattgtgatcaatttgaagakccacatatggctgagggctactctaatgagtggtgcagctccaaggcagagagatggctgtgattaaccaatgaatgagggaacaaatatccaggcagaa

SEQ ID NO: 13804 - DNA, 201 bp, Homo sapiens
ggtatctccctgccctggtctgaaagctgccacttgccgcccaccgcacagccccagggctttagctcactgtgcaggaagaggccttcctctgtgcatcstcccacagggtcgagagtgaatgccttgcctttaaaaataaaatgcatacgcctgtcctcatgcgctctgatctgccagcaggctgtgctggggagtggt

SEQ ID NO: 13805 - DNA, 201 bp, Homo sapiens
ctaagagtaaaacgcatgtccccccatgaagtcactcaaagctcaggcgtgtgcaacagggacagcaaaagcacacacaatgatggccagagacactgctyagtgtactgtcttccaccgggacagcccactcaccaagggttaggtcctgtgctgactgggtcccgggtctcctcggaggtcggtttgcatcacgtggat

SEQ ID NO: 13806 - DNA, 201 bp, Homo sapiens
ctgggtcccgggtctcctcggaggtcggtttgcatcacgtggatacactaatctacccaagttgacttggagaaccaatctgaaatcagatgggagctccmggaagcaaagcaattgcaggttcatttgttacttttattgtctcatttcttcttatttttttagcccaattgcctcctacatggggaaggttggggtcct

SEQ ID NO: 13807 - DNA, 201 bp, Homo sapiens
gtatggtcttaggccctggaataagacagtgtaggaaacacagaaggtgcctgatttcctgggcctagctaaggggaaaaagcgagacaatggggtcagakgaagctcagctgaacagatgaagttgagatgaacagaattccagtgccaccatgatttccagccgtgtgaccttccacatgctttttgatttttcttgaa

SEQ ID NO: 13808 - DNA, 201 bp, Homo sapiens
agctcagctgaacagatgaagttgagatgaacagaattccagtgccaccatgatttccagccgtgtgaccttccacatgctttttgatttttcttgaactmacttttcctttgtttgcaaaatagtaacaatattttccttccaagtgatggtgaggatttaagagttaacctgagtgtctgctgcatagtaggtgctcaa

SEQ ID NO: 13809 - DNA, 201 bp, Homo sapiens
cgtgtgaccttccacatgctttttgatttttcttgaactcacttttcctttgtttgcaaaatagtaacaatattttccttccaagtgatggtgaggatttmagagttaacctgagtgtctgctgcatagtaggtgctcaataaactataacgtctttatttcttttccttccaatgagaagtcacttcctggagggaagcc

SEQ ID NO: 13810 - DNA, 201 bp, Homo sapiens
gtttgcaaaatagtaacaatattttccttccaagtgatggtgaggatttaagagttaacctgagtgtctgctgcatagtaggtgctcaataaactataacstctttatttcttttccttccaatgagaagtcacttcctggagggaagccacctccaggaacagtcctggttcaactcatgaggagggtcactggttgggt

SEQ ID NO: 13811 - DNA, 201 bp, Homo sapiens
ctctgagctctaatttcctcacagggccgcaggactgaggttaaggacctgctgtcactggtacagtggttgaagaaaaggtgaatgaaggaagggcctcrttttactccttgtctcacattcctttctgctacttctctttggctcaccaaaaggagacagaagtttgtgtccatggctgtgaactgccaaagagttgcc

SEQ ID NO: 13812 - DNA, 201 bp, Homo sapiens
gaatgggctgtcctctcctgctactttataaaagccaagtttttgcttctagctggtcgaaggtcctgtgggagctcacgtttttctcaatcactgatgaycatttgagacataatttggagaaggtttctatcaaatcctagttggactgcagtgaaatgttttcaaactagagaagcaccaaataggccatgataaaga

SEQ ID NO: 13813 - DNA, 201 bp, Homo sapiens
ctgcacaaagaatgggctgtcctctcctgctactttataaaagccaagtttttgcttctagctggtcgaaggtcctgtgggagctcacgtttttctcaatyactgatgaccatttgagacataatttggagaaggtttctatcaaatcctagttggactgcagtgaaatgttttcaaactagagaagcaccaaataggcca

SEQ ID NO: 13814 - DNA, 201 bp, Homo sapiens
tggtctcgaactcctgagctcaggcagtctgcccgcctctgcctcccaaagtgctgggatcacaggcgtgagccaccgcgcccagcccatgacttctcttyatgggagagaaaggccaccgagatagtaagtggacatcaggacatggattctattaaatctaacacctttatctttgcatttccatacattttgcttatt

SEQ ID NO: 13815 - DNA, 201 bp, Homo sapiens
acatatattgagcattgaccaggtgcccaatattttaatgtcccatgggtgtgcatcaggtacgctgtggaaggacagatgtcattccttaaaggggctgsactgaattagaccaggggttctcaaagtggggtccctggaccggcagcatcaccatcacctggaaacttgttagagatgcagatcttgggccccgcccca

SEQ ID NO: 13816 - DNA, 201 bp, Homo sapiens
cagggtttcaccgtgttgcccaggctggtctcgaactcctgagctcaggcagtctgcccgcctctgcctcccaaagtgctgggatcacaggcgtgagccascgcgcccagcccatgacttctcttcatgggagagaaaggccaccgagatagtaagtggacatcaggacatggattctattaaatctaacacctttatctt

SEQ ID NO: 13817 - DNA, 201 bp, Homo sapiens
cttttctgactgctcaaaacagggaataataaacagtcagagtgtccaagtaatctgagctagaaagttccttctttcagagaaaagttataaaaagtatwtttgccggatccaaaaaaaatactgtgtatcaactactgagacctgcataatgttttcttagtattctcactctttaaaagaaaaaagaaaacctgtaaa

SEQ ID NO: 13818 - DNA, 201 bp, Homo sapiens
ggggtactgataccagagttcatttgaagtcattggaaaccaaggcatattttcttaaagagacaactgtttttggtgaataggccatgttgtttatagtwaaaacaaacatgaatattctgtaatagaagatatcgtttgcatggtgttttaaagctaaaacttgagttattaaacacccttctctccctggggatgcct

SEQ ID NO: 13819 - DNA, 201 bp, Homo sapiens
aggcacctgccaccacacctggctaattttttttgtattttagcagagacagggtttcaccgtgttgcccaggctggtctcgaactcctgagctcaggcartctgcccgcctctgcctcccaaagtgctgggatcacaggcgtgagccaccgcgcccagcccatgacttctcttcatgggagagaaaggccaccgagatag

SEQ ID NO: 13820 - DNA, 201 bp, Homo sapiens
tcagagtgtccaagtaatctgagctagaaagttccttctttcagagaaaagttataaaaagtatatttgccggatccaaaaaaaatactgtgtatcaactmctgagacctgcataatgttttcttagtattctcactctttaaaagaaaaaagaaaacctgtaaaatttgggaacttaaactttttttgatattttaatat

SEQ ID NO: 13821 - DNA, 201 bp, Homo sapiens
agtgcagcctccgcctctcgggttcaagcgattcttctgcctcagcttcccgagtagctgggactacaggcacctgccaccacacctggctaatttttttkgtattttagcagagacagggtttcaccgtgttgcccaggctggtctcgaactcctgagctcaggcagtctgcccgcctctgcctcccaaagtgctgggat

SEQ ID NO: 13822 - DNA, 201 bp, Homo sapiens
acagtgttatcagtcattgactcagaagatagtttcttaccgtttggggaaagtgcttgtctattcctctccaaagccattttaaaaaaaaaattgcaccrgttctcatcccatcatctgccttgatcaaacatttgcttattggaatcacttcgaaaaggaacttggtatcgttcacatgtgtttataactctcaaatct

SEQ ID NO: 13823 - DNA, 201 bp, Homo sapiens
gccttaccccgctacagagaggccccaagagagaggcctcacaccctctggctccactgaaattcacttcacgtttccaacttggattaaactggcacgamagttcagtcaaatgtcaagtccattttgtcaagggagggaactcattcagaagatgaactagttggtgttacttagatgattaactacttggcattaggt

SEQ ID NO: 13824 - DNA, 201 bp, Homo sapiens
atatggtgtcagcaagagaaaaatgaggaagaagcaaaagcagaaactgcctgataaacccatcagatctcttgagacttattcactatcatgagaatagsatgggaaagaccggcccccatgattcaattacctccccccgggtccctcccacaacatgtgggaatcctgggagatataattcaagttgagatttcggtg

SEQ ID NO: 13825 - DNA, 201 bp, Homo sapiens
tgatcaaacatttgcttattggaatcacttcgaaaaggaacttggtatcgttcacatgtgtttataactctcaaatcttcttcttccaatttttaatcttsatcaccacagctttataacaggaagaacgctcaaagaagaaaaatagaagaagcctgaattttaatttgctatttcttcacacacaaaacaccccaagct

SEQ ID NO: 13826 - DNA, 201 bp, Homo sapiens
ggtatggggtggggaaggggggggggataaagatattaatttggaagcatttgattgctccattattttatcatcttcccatggaaatgttttcataacgycttgttttttaattattattattattttttgagacagagtctcactgagtcgcccagggcggcggtgtgatctcggctcactgcaacctcagtctcccag

SEQ ID NO: 13827 - DNA, 201 bp, Homo sapiens
agatcaggccactgcactccaatctgggtgacagagcaagactctgtctcaaaaataatagtaataataataataataataataataataataataataakaagaatctgactaaggttattaaccattaaggtatgctgtgctaaggagcagggggccccttccatccgtagagggcagaaaggtgcctatcatgtcttc

SEQ ID NO: 13828 - DNA, 201 bp, Homo sapiens
gggagtgtggttgtacttcaacctggaactgtctaactcctaaggttttattaatatctagtccatttctctcaatctaatagtaaatggaagagaagcamcaacttttgttttccaattccttttgaacatttgaaaggttttctgaaaggacttaaagaaaccatagcttccttaccagttcccaaagcttcagtcctt

SEQ ID NO: 13829 - DNA, 201 bp, Homo sapiens
tttgaactctaattagggaaagggaatttggaaccattgtcttctctgagtgtgcagacacgatgttatcattgtgtttacagaggtggtcagattcccakcacagtgtactcccgcacagataaccgtcccatcttgataaaacaatgctctcagccgaatcctaaacacgctgcacaaggaagaccttatgctgacagt

SEQ ID NO: 13830 - DNA, 201 bp, Homo sapiens
gagataagaaatggagcaagggaggggtttcatcccgccgtgttcatttgcttggctgtcctgaaattgcgaatacgcagttgttacctgctcccggtggraggggggggatatttatttggcatcttgcaattgataggagctgagtgattttagtaggtagtttaactccttaaaaacttccagtggtttcatattcta

SEQ ID NO: 13831 - DNA, 201 bp, Homo sapiens
tggctgattcatgtcatgagagatcctgagtcagaaccacccagcagctaagccacttctgaatccttgacccacaaaatatggtaagataccaaatggtkactgttttaagccactatgctctgggggaatttgtgatgtagcggtagataactatcacaggatccatggcctcaaggggagaaggatccttaagagaga

SEQ ID NO: 13832 - DNA, 201 bp, Homo sapiens
tatgtctttatcagcagcgtgaaaacggactaatacagtgaggaaatccatgtgttaggaagggagtgtggttgtacttcaacctggaactgtctaactcytaaggttttattaatatctagtccatttctctcaatctaatagtaaatggaagagaagcaacaacttttgttttccaattccttttgaacatttgaaagg

SEQ ID NO: 13833 - DNA, 201 bp, Homo sapiens
ctgataaattctgggaaagtttatccaattgttacaacccagggtcaggaaaactgttttcaattttctgctgtatgaagttgccagtgttaaaccctttygatagcaagtagaagaaatgttcattcaaacaggcttaattaactgaaagatataggtgtggtaaggggatcaggtaaagcttgacccaggggctaaact

SEQ ID NO: 13834 - DNA, 201 bp, Homo sapiens
ggcagctggagagcgtgcagactcaggagccaagacctgccttgccttccctggagttaatgaatcagtgtgaatgaagagcacagtcttcttttaaatgrcaggggaaccgtgcacttatttaccggcaattctcagattctaattgttccgactacaatgcgtcctgtaaaccgggtagctgggagaaacttcaatgca

SEQ ID NO: 13835 - DNA, 201 bp, Homo sapiens
ccaggacaggtgccctcctcagcggagacaactgtccccctccatcctgcaggagttttgcagccatccttccagccactgcttctctaccggggcaaatyttcccccaagggataattgataatgtctgaggcatttttaattgtcacaacttggggaaggggcaagggattgagggagagtgctcctggcatctggtgg

SEQ ID NO: 13836 - DNA, 201 bp, Homo sapiens
aaccacatctttccagattcaatatagtaggagaagaccagacttgctcttttcctggaatttagtctgacgtggctgggacaacatgcccactctcaacyaatttttgtagccatggagatttggaagtctggcaagtcttgggtcacatgatctaccttacagctgttactgcagacctcccaaagctcacgaactgag

SEQ ID NO: 13837 - DNA, 201 bp, Homo sapiens
tttattgtgggacatttagagaatctcagactagcaggtgttagattaaacagaggagaaacggtccttgtggtgataaaacttccctacgcaaggacaartagagaaacaactgtagatgaagcagccagtctcaggctggggcagcacgccctgcgataggttaaggtttattttagacaaatatttaaaatgcagcta

SEQ ID NO: 13838 - DNA, 201 bp, Homo sapiens
agcgtgcagactcaggagccaagacctgccttgccttccctggagttaatgaatcagtgtgaatgaagagcacagtcttcttttaaatggcaggggaaccrtgcacttatttaccggcaattctcagattctaattgttccgactacaatgcgtcctgtaaaccgggtagctgggagaaacttcaatgcatctttgtaatg

SEQ ID NO: 13839 - DNA, 201 bp, Homo sapiens
atccgtcgttccaaatatgagcactttctcttgtcttttctgagctacctattccaagaacacagaggagttgttattgtggttacttgtggtaagaagastacctttctgattggacccagggcagaaaaaagaactttcaggtggaaatacagtcgtggtgtcaggtagtgtgtaacttcgttaagttcagtcatagca

SEQ ID NO: 13840 - DNA, 201 bp, Homo sapiens
caaatgtttacatggggctgtggaccattttgtatcattggaggagaagccagggcacttggcaggggtgttcatgatgataatcaggtggctgggtggastcaccatttgtggcatcctcaaagacttgccaacatagacatttttggggagacagaaacacagaaataattctgcagtgctttaaagaatctgttaaaa

SEQ ID NO: 13841 - DNA, 201 bp, Homo sapiens
gttccaaatatgagcactttctcttgtcttttctgagctacctattccaagaacacagaggagttgttattgtggttacttgtggtaagaagagtaccttyctgattggacccagggcagaaaaaagaactttcaggtggaaatacagtcgtggtgtcaggtagtgtgtaacttcgttaagttcagtcatagcagccgctg

SEQ ID NO: 13842 - DNA, 201 bp, Homo sapiens
cacagaaataattctgcagtgctttaaagaatctgttaaaaatcaagtttctttcagtcatgtatgatccattgggctttatataacttttagcctttgcyttgcagggacagcaaagatgtgagcaaatttgtgcaaacctaatagggtgaaaaattgaggtatgaattagtaaagtcatttgtccttctggaaagagtt

SEQ ID NO: 13843 - DNA, 201 bp, Homo sapiens
cccgggatcaagcgattctcctgcctcatgctcccgaatagctgggattacaggcacacaccaccacacctggctaatttttgtatttttaggagagaggkgttttaccatattggcccagctggtctcgaactcgtgacctcatgatccactcgccttggcctcccagagtgctgggattacaggcatgagccactgcac

SEQ ID NO: 13844 - DNA, 201 bp, Homo sapiens
gcactttaaatgcattaattcagttcatctttatgacaacactatgagatagctaatattatgaatcctattttcagatgaaagactgagtcttagggaasaaacagccgagagatgaaatgccacagggatgtctaggttcaaacagcaacagaggtgcgtaccatagggatgtggaagccttgcttgtcttgttcctct

SEQ ID NO: 13845 - DNA, 201 bp, Homo sapiens
attgtatcagtcagcgtagactaggtttgccgcagtaacaaacgaccccaccatgccatagcttgcaaaaacaaagactgagttcttgtctacactgtagkgccgtcaagagctggctctgcttgctcttggtcttctccatgccaggatccagagtaaaagcacagcttctctctaggactccaggggaaagagaaaaga

SEQ ID NO: 13846 - DNA, 201 bp, Homo sapiens
gggatgtctaggttcaaacagcaacagaggtgcgtaccatagggatgtggaagccttgcttgtcttgttcctcttggtataaccccagtgagtagcatagygcctggtcaattggagggatttggtaaatatttactgagtgagtgagagggtaaaacagctgagccatgggagttataacttgggcagcagtaatcctgc

SEQ ID NO: 13847 - DNA, 201 bp, Homo sapiens
gctcttaatatcctataattgaaaaagagattgccattttcaaagacctttcacagtcattctcttaatcaagtctcataataaagatgtcattgggactkagcagcttactcacattctcatttcactgatgaggaaactggagctcagggaggttacatggattctggatgacctacaggtcatggaggtaagagagga

SEQ ID NO: 13848 - DNA, 201 bp, Homo sapiens
tcattctggagcagtgggagccgactgtgatgcagagtggactcataatccagcttgattttgagggacagaaacctgggcctttaggtagaatgaacagsttaaaaggctgcacctgagagtagggggcatatgggtaaatccagctgtacccaagagttgggggcatatgttagccctactgggtaaatccagctgcac

SEQ ID NO: 13849 - DNA, 201 bp, Homo sapiens
tactggggctaaagatttggcttggagtttcctggtagtcaaggcaaaaaagggaaacaaaactagttacagagtttctcggacctatgagcaaaaggatktccatttctaatcggaggcagaggtatcatggccttcaagaatcttccggttaaacacggtactgaaatttgattttattgtctatcgttgagtccctag

SEQ ID NO: 13850 - DNA, 201 bp, Homo sapiens
acttaattcactgggtgactgcatccataccaagcacacagccgtgatcagttagcctctcacttctctactaatccccactgtggggaagagctcatcaytaacatgccttatctgacatgtggcaataacttctgcctttcttatgtcatctgcatggttgcagtggatagtcactggacaattgatgaacaactacta

SEQ ID NO: 13851 - DNA, 201 bp, Homo sapiens
tcatcattaacatgccttatctgacatgtggcaataacttctgcctttcttatgtcatctgcatggttgcagtggatagtcactggacaattgatgaacamctactacatgctagatctctccctggggagagtgcttgtctttgaaacagtcaaaggaggaaggaagaaaagagaggcagaacaattataataaagcaac

SEQ ID NO: 13852 - DNA, 201 bp, Homo sapiens
ccttatctgacatgtggcaataacttctgcctttcttatgtcatctgcatggttgcagtggatagtcactggacaattgatgaacaactactacatgctaratctctccctggggagagtgcttgtctttgaaacagtcaaaggaggaaggaagaaaagagaggcagaacaattataataaagcaacttaacccattgaga

SEQ ID NO: 13853 - DNA, 201 bp, Homo sapiens
aaactatggagtcttaagtccaaccagtggttatgaattccggctctgccacttgctataatagctgtatcaccatgagcgataacttaacctctttgtgsctcagtttcttcatatataaaatggggatcatgatagtctctgtcccaggggagttaggaggattaaatgcaacagtaatccaaccacagtatgaaaaga

SEQ ID NO: 13854 - DNA, 201 bp, Homo sapiens
gtccagtgcttggccagtacaaggccattatatatttgttgaatgaatgaattcgtgaatatgtttataaagacaaggaaacgccattctgcaaatctacrtgcagtaaaatagtttttcagtcactttgccttcatttgtttgacattcttggaatatttgggctctacaaggtgctagggtaaggcacgcaggatgcaa

SEQ ID NO: 13855 - DNA, 201 bp, Homo sapiens
tgaggtggcacatgtcagcggctttgctcagaagcacccagggatgatggaaaaggcaaccgaaagggctcagcttctgcagatagagtctgtgctttgcrctttctggctttgtgacctttctgcaggttacttctctcccctgagcatcagtttactcagctgaaaaatgcatctgctaataatacctatggcataggg

SEQ ID NO: 13856 - DNA, 201 bp, Homo sapiens
ctgagcatcagtttactcagctgaaaaatgcatctgctaataatacctatggcatagggtttggggaggattaaataagataatgtaaatagagtttagcrtggtactgtgtatatagccagcactcactgctgttggcttattgaaaaaacaaaaataatacctacaataaccacaatatagcaacagcaatcatgttca

SEQ ID NO: 13857 - DNA, 201 bp, Homo sapiens
gcatagggtttggggaggattaaataagataatgtaaatagagtttagcgtggtactgtgtatatagccagcactcactgctgttggcttattgaaaaaamaaaaataatacctacaataaccacaatatagcaacagcaatcatgttcaagtctgtatttggtttaaggagggggaatgtgacccgggggctctgtcatt

SEQ ID NO: 13858 - DNA, 201 bp, Homo sapiens
gtcattagatatatgcacacacttgacctaatggaaagcttgaaagcaattggatgggaaaacagtccatcttgttggaaggctgtcaagctgtgtaatamaagaattactgttctccctttgcatttatgcattgcatgtctctgttgaattcagagtgctttatagacctctgatcagcttccagcatcctcttggtat

SEQ ID NO: 13859 - DNA, 201 bp, Homo sapiens
aggagagataagaaatggagcaagggaggggtttcatcccgccgtgttcatttgcttggctgtcctgaaattgcgaatacgcagttgttacctgctcccgktgggaggggggggatatttatttggcatcttgcaattgataggagctgagtgattttagtaggtagtttaactccttaaaaacttccagtggtttcatat

SEQ ID NO: 13860 - DNA, 201 bp, Homo sapiens
tttcctcccctgtaaaacgggttaatatcagcacttatcacatagtttttgagaaagctaaacgtgcttatctatagtggttattattactagaaagaatrtcgtggtgcccccaaacatggatttaacaagcattgatcaaatacctcctatgcccctacgaaccaggtactagaaatccactcctttcacttgcttttg

SEQ ID NO: 13861 - DNA, 201 bp, Homo sapiens
gcaacttgggtcatgccactacagatcgacacccactaaatccttttaatttagtctagtgcaacaagtatttgtgtaagtgtcctctgccctggacaccrgtgaggtcaccgtgggaatggctgggcaggaacaaagccttttgtttccagctgagtttccttttctgaagattgcctgtcctagacaccagttctctgt

SEQ ID NO: 13862 - DNA, 201 bp, Homo sapiens
acctctcctcggccttgcaaagtgctgggattataggtaccccgcctggctgatactttccttagttgttttcagtgtaataacctgtcttcagtctactytttgtccttttctctcctttcctccctgaatactcaagcttccagtgcacagatttctccaaccctgaatgtgactgataccaacaccatactagctctt

SEQ ID NO: 13863 - DNA, 201 bp, Homo sapiens
ttttgcatccctagacatcatcctttttgagagagaaaattccgagtgtcagttttcctttatcggaacctccttttatttgaactaaccacaatgggtcrtaatttataggcccagtcagcgcatcattgctcagatagagtcatttacctacaagtatccatcagttaggtgggggctgctagattttttaagtggaaa

SEQ ID NO: 13864 - DNA, 201 bp, Homo sapiens
ttccaagtagctggttttgcaggcatgcaccaccacacccagctagtttttctatttttagtagaggcggagtttcaccaagttggccaggttgttctcaractactgacctctcctcggccttgcaaagtgctgggattataggtaccccgcctggctgatactttccttagttgttttcagtgtaataacctgtcttca

SEQ ID NO: 13865 - DNA, 201 bp, Homo sapiens
tgcctctctttccttagtcctgtgtgcttccccttgatttcaccaggacaattttataccaatcccttgtattttagaagagcctgatacatttgcaaggwctctctttatattcctgaattttgcatccctagacatcatcctttttgagagagaaaattccgagtgtcagttttcctttatcggaacctccttttattt

SEQ ID NO: 13866 - DNA, 201 bp, Homo sapiens
gagattcttgtgcctcagccttccaagtagctggttttgcaggcatgcaccaccacacccagctagtttttctatttttagtagaggcggagtttcaccawgttggccaggttgttctcaaactactgacctctcctcggccttgcaaagtgctgggattataggtaccccgcctggctgatactttccttagttgttttc

SEQ ID NO: 13867 - DNA, 201 bp, Homo sapiens
ttgtccttactctgacacccactgcaagtttgaggtggtcctcaaacccatcctcatggctgatatttgctagaaggacttgtggcacttagcagaagctrttgtatttacagttacagtttattacagggaaaggatacaggttaaaattagatcggggaagagacaaatggggcaaagtccaagacaagtaccagatgt

SEQ ID NO: 13868 - DNA, 201 bp, Homo sapiens
atgcagtgttttccctgcaaaggagaagaaatatatttcttgcctctctttccttagtcctgtgtgcttccccttgatttcaccaggacaattttataccmatcccttgtattttagaagagcctgatacatttgcaaggtctctctttatattcctgaattttgcatccctagacatcatcctttttgagagagaaaatt

SEQ ID NO: 13869 - DNA, 201 bp, Homo sapiens
tgggcctttaggtagaatgaacagcttaaaaggctgcacctgagagtagggggcatatgggtaaatccagctgtacccaagagttgggggcatatgttagycctactgggtaaatccagctgcacccaagagtagggggtatatgttagggctagtgcgtaaacccagctgcacccgagatatggggtatacatgagtgct

SEQ ID NO: 13870 - DNA, 201 bp, Homo sapiens
atgagggccaggacctcatggtcataaaagtaacattagacctattcctagtaatttgatctaggttggcctgatttttgttgtggtggcagtggtggctrtggttgtcaatttaatggaatgtatttggaaagagcaagcttcttcccaatgcagtgttttccctgcaaaggagaagaaatatatttcttgcctctcttt

SEQ ID NO: 13871 - DNA, 201 bp, Homo sapiens
ggtatacatgagtgctattgggcaaatccagctgcacaggagagtaaggggcatatgttagggctagtgggtaaacccagctgcacctgagagtaggggtrtatgttagggcttgtgggtaaatccagttgcacctggcagttggggcatatgttagggctagtgggtaaacccagccgcaccggagagttgtgggtatat

SEQ ID NO: 13872 - DNA, 201 bp, Homo sapiens
gactctttttttcaggaatatattctgcatatatttcagtgatttttttttttttttgagacagtctctcattctgtcgctcaggctggagtgcagtggcrtgaccttggctcactgcaatttctacctcccgggttcaagcaattctcgtgcctcagcctcctgagtcactgggattacaggcatgcacaacaacaccca

SEQ ID NO: 13873 - DNA, 201 bp, Homo sapiens
tacatgagtgctattgggcaaatccagctgcacaggagagtaaggggcatatgttagggctagtgggtaaacccagctgcacctgagagtaggggtatatsttagggcttgtgggtaaatccagttgcacctggcagttggggcatatgttagggctagtgggtaaacccagccgcaccggagagttgtgggtatatgtta

SEQ ID NO: 13874 - DNA, 201 bp, Homo sapiens
tttttttttttttttgagacagtctctcattctgtcgctcaggctggagtgcagtggcatgaccttggctcactgcaatttctacctcccgggttcaagcrattctcgtgcctcagcctcctgagtcactgggattacaggcatgcacaacaacacccagctaatttttgtatttttagtagagacagggtttcaccatgt

SEQ ID NO: 13875 - DNA, 201 bp, Homo sapiens
agctgcacctgagagtaggggtatatgttagggcttgtgggtaaatccagttgcacctggcagttggggcatatgttagggctagtgggtaaacccagccrcaccggagagttgtgggtatatgttagggccagtgggtaaatccagctccatctgagatatggggtatacatgaatactagtgggtaaatccagctgtac

SEQ ID NO: 13876 - DNA, 201 bp, Homo sapiens
cctcccggattcaagagattcttgtgcctcagccttccaagtagctggttttgcaggcatgcaccaccacacccagctagtttttctatttttagtagagrcggagtttcaccaagttggccaggttgttctcaaactactgacctctcctcggccttgcaaagtgctgggattataggtaccccgcctggctgatacttt

SEQ ID NO: 13877 - DNA, 201 bp, Homo sapiens
attggtaaaaacatatatcagagtccttttgactgtttagaaagtgttaatttactccacgattatccattcaacatttattagttggcttctgtgtgggwgagtaaccattaataccttgaataagtttataatctggtcattctgtagagcttcctatatgatgtcttctgtttaagtatttctgtaataccttataga

SEQ ID NO: 13878 - DNA, 201 bp, Homo sapiens
cacctgagagtaggggtatatgttagggcttgtgggtaaatccagttgcacctggcagttggggcatatgttagggctagtgggtaaacccagccgcaccsgagagttgtgggtatatgttagggccagtgggtaaatccagctccatctgagatatggggtatacatgaatactagtgggtaaatccagctgtacacgag

SEQ ID NO: 13879 - DNA, 201 bp, Homo sapiens
tgttttccttaaactctgtgcacatgaatatttgtggtatatggcttaattgtaagcgatcaggcatcaatggctttttatgaggcaaaatctactttctrcatttgcgtgtgccattattatagattgctgatgtttgccaatggatattcttggaagtcgtcttctggtttaaatgcagttaagtatttaaaaataata

SEQ ID NO: 13880 - DNA, 201 bp, Homo sapiens
gtccttttgactgtttagaaagtgttaatttactccacgattatccattcaacatttattagttggcttctgtgtgggagagtaaccattaataccttgamtaagtttataatctggtcattctgtagagcttcctatatgatgtcttctgtttaagtatttctgtaataccttatagacatctcttttagactactagtg

SEQ ID NO: 13881 - DNA, 201 bp, Homo sapiens
tggggtatacatgaatactagtgggtaaatccagctgtacacgagagtagggggcatatgttagggctagcaggtaaacccagctgcaccccagagcaggkgtatacatgagtgctagtgggtaaatccagcagacgtccggactgtgcttgagggtgtcatcgagagagagaaggttgatccgaagttagtaaaggcttt

SEQ ID NO: 13882 - DNA, 201 bp, Homo sapiens
gaaagcagtgctcagaggtaaagagcctcgctgaagccctagttctagcctaccaggatttggtcatttcttggtttttcatttgatcccacccttgcctmccttcagaatgaaggtagaatgtgggactgtttcagaccatgaatgcgattgggcagaaagactgtgaaccaagagggcagggagaagggaagggatgtg

SEQ ID NO: 13883 - DNA, 201 bp, Homo sapiens
ttggaggtaagtataaaaaccttcttgttttctactacttaaagctgaaaacccagcttgggttggctttgcttctaatatccttcttcctttttgtttcrtaagtaattgtcctgaagcctgtcgagataaatgtatactgaaagagaaagacacagaggagagacaggcatacagagaaagagagacacgcagacacac

SEQ ID NO: 13884 - DNA, 201 bp, Homo sapiens
tgagcccaggagtttgagaccagcctgggtaacatggcaaaaccttacctctcaaaaatttacaagcttagccaggcatggtggtgcccacttgtggtttyagctacctgggaggctaaagtgggaggatatcctgagcccaggaggtggagattgcagtgagccatgctcgtgccattgcatttcagcgtgggtgacagt

SEQ ID NO: 13885 - DNA, 201 bp, Homo sapiens
ccccatcaacatgatggcccttggaaaggactcttttagcctccgcgagttccttttccgcaccaggctccacttacgaaggactgcaaaaacttgctaaygtcatcagtctgaaaggattgagctgtaaaatgtgttatgggggcctaagcaacgcatctggaatttagccttcccaagttcaaatccggtttatgccac

SEQ ID NO: 13886 - DNA, 201 bp, Homo sapiens
ctcgtgccattgcatttcagcgtgggtgacagtgagaccctatctcaaaaaaaaaaaaaaaagttcctaagaaaataaagcctggcccatgcaatttgaaygtaactgtctataatttctcttggttactgaaattctgagtttgtgtctatggtttctccatccttgtctttgaggaggagcaggatggcgaagtcgcag

SEQ ID NO: 13887 - DNA, 201 bp, Homo sapiens
atgaacctgggaggcagagcttgcagtgagccgagattgcgccactgcacttcagcctgggtgacagagcgagaatctgtctcaaaaaaaaaaaaaaaaaraaagaaagaaagcaaaggttttttcctcccaagaactcatggtccaagttttggtttttaaatatgcatctatgacagcacggatcacatagtgcattga

SEQ ID NO: 13888 - DNA, 201 bp, Homo sapiens
tggaattataggcatgagccaccatgccctgcccaggcaccattcttgactgcgagaaagtcactgtgatggtttctccagcctgagttttctcctgtatraaatggaccttgttttgaggagagaatgaggtatgtggtactcgtgagcaggattttcaatgcctggctggttgttacttatccatttagtccgagcttc

SEQ ID NO: 13889 - DNA, 201 bp, Homo sapiens
ttaatagtaataataatatctaccacccactaggggtctatgtgtgtatgtgttgggggcggtgtggctggggagggaagcaaggcctgtattatggcccragctcaagaatattcgggcaagagcagatacaatgcctgtatttctcatcacttttgggtggcataggaccagttggttatgagcgtgaaaggttttctt

SEQ ID NO: 13890 - DNA, 201 bp, Homo sapiens
atttatttattcttttagggacagggccttacgctgctgcgtaggttgtggtgcagtggcacagtcacagctcactgcagcctcaaactcctaaggtgaasagaccctcccaccttagcctcctcagtagctgagactacaggtgcgtgctaccgtgcccagctgatttttaaatttttttttctttgttttgagacggag

SEQ ID NO: 13891 - DNA, 201 bp, Homo sapiens
cttcagcctgggtgacagagaaagactccatctcaaaaaaaaaaaaaaaggtagagatggtggagtggtgacatttggtagataatatagctctgcagaamttttcattgcaaaatgaaaattcttcattgttattataattacttcaaggagcaaggccattttgtgtaagctatcctgggcctccctgcctcccatttt

SEQ ID NO: 13892 - DNA, 201 bp, Homo sapiens
aattcttcattgttattataattacttcaaggagcaaggccattttgtgtaagctatcctgggcctccctgcctcccattttacaccctgtttattgatastaagaagagcctccaactgaataagaactaatgacttctgcctgccatcattttggaatgtccaattccccgttctggagagcctttgattataacatca

SEQ ID NO: 13893 - DNA, 201 bp, Homo sapiens
tgaaaaatctcttcctttcctatcgtgaattcggtcattgttataagccaagctttgcaaaggtggaacaccttggagatacttatctcctccttactctmcccaagtaatgactcatccttttatacagaatgtctcttttttgatttagatgtctttttttgatatagatgtctcttgatatagaagcatttctcggga

SEQ ID NO: 13894 - DNA, 201 bp, Homo sapiens
ttctcctgctctgcctcccgagtagctgagactacaggcacctgccacgacgcctggctaatttttgtattttcagcagagacggggtttcaccgtgttasccaggatggtctcgatctcctgacctcatgatccacctgccttggcctcccaaagtgctgggattacaggcgtgagccaccacgcccgactgctttattt

SEQ ID NO: 13895 - DNA, 201 bp, Homo sapiens
tcaccgtgttacccaggatggtctcgatctcctgacctcatgatccacctgccttggcctcccaaagtgctgggattacaggcgtgagccaccacgcccgrctgctttattttcctttgtgttcctaatacctggcccagtgtctggcaaatggaaagttcccctggatgtagttgggtgacactatgagtgtatcgttag

SEQ ID NO: 13896 - DNA, 201 bp, Homo sapiens
ttttcacgcggaaactggatgtttcttacatcctcagctgcaggcatggggaagagacgcacatcagccattaagaaaaaggtatgcagtctacatgcctsttaatttcctccacatacacagtaaacccatcatgtccatcagcaccattgtcaaaacatctgtgcaccagtaaagggttctgatgtgtgataaatttat

SEQ ID NO: 13897 - DNA, 201 bp, Homo sapiens
catcagccattaagaaaaaggtatgcagtctacatgcctcttaatttcctccacatacacagtaaacccatcatgtccatcagcaccattgtcaaaacatstgtgcaccagtaaagggttctgatgtgtgataaatttatttagctattactcatctgaagttatactattttaggatcttggggcagtgaggactttgga

SEQ ID NO: 13898 - DNA, 201 bp, Homo sapiens
tagtataaagactgtagattcatcaaacattgtttactgtcttcaaacttcaacagtgttttaactatcaaatagaaaatcgaaaggaagcataaacgcayatggtcactttactggtataataggggccaagagccgttgtgttttataatttcttgatgatcctggtggtaggtaagccaaccgctatgaactctgatg

SEQ ID NO: 13899 - DNA, 201 bp, Homo sapiens
tttatatttttagctaaattaaaatactcacattcccattattttttagaggttgtaagctaagtaataacattctagaaactctctgttttttgaaaggkcatcaccactgttgaaggcgctaatgggagatcctaagtttcaggctctgctacagacgtcaggtcccctaggagttgggctgcctttgctctcctctcc

SEQ ID NO: 13900 - DNA, 201 bp, Homo sapiens
agagtgtgctgtgtcagggtgtttcattgcattttcatatttgtcatttctctttggagcgtgtcttttggtgccacggaaaagggctggattttctatcrggtacaataggtacctgcagggcttagggtacaagagcttgtcggggacctgcacacatgtttgagacctgtaaaaatattgctggctctgaattatgga

SEQ ID NO: 13901 - DNA, 201 bp, Homo sapiens
gacctcggtgctcacggtaatgcttccttccaccatatcagaaggtcctcagcagccgcagccacttaacatgctcggtgcttctctgtaggaggattttkaaaaagcaggaactgtcagggtcccaaatgttcagtggcacttcagccagaggtaggatagggattttgaagtgtttggagaagtgttttcatatttgaa

SEQ ID NO: 13902 - DNA, 201 bp, Homo sapiens
aagctctcaaagtgactttttattttattttttatttttacatggagtctcgctctgttacccaggctagagtacagtggcgtgatctcagctcactgcartctccatctcccaggttcaagtgattctcccgtctcagcctccagagtagctgggattacaggcacccaccatcacgcccagctaatttttgtattttta

SEQ ID NO: 13903 - DNA, 201 bp, Homo sapiens
ctacaagtggagcgtgatttcatctttcatcaagagaagcagcttttcctcctcttgtatccgttttcttccttttctaactatcaaggtcatgcggtatstgccattttgcatattcttgctttgcttcatgttttccttaaactctgtgcacatgaatatttgtggtatatggcttaattgtaagcgatcaggcatcaa

SEQ ID NO: 13904 - DNA, 201 bp, Homo sapiens
gtttaacctgacagttgatcaattgatatcctttgacttgttggaattttattctttacattcgtcttttaaaaagctttattttatgccagatgcagtgmctcatgcctgtaatgtcagcactttgggaggctgaggcaggtggatcacttgtggtcaggagtttgagaccagcctggccaatatggcgaaaccctgtct

SEQ ID NO: 13905 - DNA, 201 bp, Homo sapiens
ctgtgtcacctcagcatttaatttacttccgtcacaaaactacttgaagttgtcccaggctagttggtcctattaattacaacctagagggattctattartaaactaatggattacagtacctaaatggaagccagcagatgactttggaaggactgatccgcaagggccttctgtgtgaagattaaatgaagcttcctt

SEQ ID NO: 13906 - DNA, 201 bp, Homo sapiens
aggctgaggcaggtggatcacttgtggtcaggagtttgagaccagcctggccaatatggcgaaaccctgtctctactcaaaatacaaaaagttagccgggygtggtggcacgtgcctgtaatcccagctactgaggaggctgaggcaggagaattgcttgaacttgggaggcagaggttgcagtgagccaagatcgtgcca

SEQ ID NO: 13907 - DNA, 201 bp, Homo sapiens
catgtagaggttggcaaaggggacaggagactgtgggatgattagtatattcttatttggcctgggagggaaaaaaaatctttcatttccaacaatattcwttctctgtgtcacctcagcatttaatttacttccgtcacaaaactacttgaagttgtcccaggctagttggtcctattaattacaacctagagggattct

SEQ ID NO: 13908 - DNA, 201 bp, Homo sapiens
ggctgacacaggcagatcacttgaggtcgggagttctagaccaacatggtgaaaaccagtctctactaaaaatacaaaaaattagctggccgtggtggtgygcacccgtagtcccacctacttgggaggctaaggcaggagaattgcttgaaccgcggaggcagagattgcaatgagccgagatcgcgccactgcactcca

SEQ ID NO: 13909 - DNA, 201 bp, Homo sapiens
gctcagtctttgaagggttacagaaacagtttcactagaaggtgtgacattgtgtaacagaaatcggttccttaacctgccaaagggaagaaaatagtgcrgaatcttttctccaggtttcaggacccatgtctgttgtccttcctttaccttaacttcagcagggcaagaatggttcaagccacattagaaagcagttac

SEQ ID NO: 13910 - DNA, 201 bp, Homo sapiens
taaaggcttactgggtatcagggctgctttcctttataatcttttacccgtcttatgggggatgaacagaaacacactttagtgctagaaaagctgggccyaaaagaccagtctcctgtcccatacttggacatttattgttctttttgggcaaggtgaaaacttgaaaccaaaagtctgttgagtttggaagacttgact

SEQ ID NO: 13911 - DNA, 201 bp, Homo sapiens
tctgttgtccttcctttaccttaacttcagcagggcaagaatggttcaagccacattagaaagcagttactttctcacccaattttaaaggagaaaggtaratgcggtgggttctagggatttcagtgacgtaacaggtgtttcccaggcattaagacctagtaaggtttccatttccattaggtattatggatgcattcc

SEQ ID NO: 13912 - DNA, 201 bp, Homo sapiens
ccaattttaaaggagaaaggtagatgcggtgggttctagggatttcagtgacgtaacaggtgtttcccaggcattaagacctagtaaggtttccatttccrttaggtattatggatgcattccaagaatttaattactataacatcacttcattcattgtaattccttactagagttatgagaacttgggattgtgtggtt

SEQ ID NO: 13913 - DNA, 201 bp, Homo sapiens
caagaatttaattactataacatcacttcattcattgtaattccttactagagttatgagaacttgggattgtgtggtttcttattcaatcgattaaaagstacttgctatagttttctaactagctatttatatgaaatttagtacttgtcaatatgtattaaatcaatacagttatatttatcaaagtggtgagaagag

SEQ ID NO: 13914 - DNA, 201 bp, Homo sapiens
tacttgtcaatatgtattaaatcaatacagttatatttatcaaagtggtgagaagagtttacatctgaacatagaatagattgcttgccttggccgggcgygggagctcacacctgtaatcccagcactttgggaggccgaggcgggcagatcacgaggtcaggagatcgagaccatcctggctaacacggtgaaaccccg

SEQ ID NO: 13915 - DNA, 201 bp, Homo sapiens
gggattacctggaaagggtggggcaattttggggggtcaagaaaatgttctaggacaagactgtggtgatggctgcacaactggataaatatactaactawcatcaaactgtatatttacaatggttaaatcatatggtatgtgaatttcacattaataaagtcataaaaaatgaattccaggaccattaaatcaggtgac

SEQ ID NO: 13916 - DNA, 201 bp, Homo sapiens
gtcctacaactggtgagctgtgagctgtaaattgtggaactaatttttatactgccaatctgaggccttttctgacctcatcgctgccactgtaaaatgarttctagccccagaccatgacatgcctactagcttagctctaaccaaaaagatttattatcccaagagttgtgaaaatgtggaagaactagaactgtcatt

SEQ ID NO: 13917 - DNA, 201 bp, Homo sapiens
gctatcgataaaagctaatgtaccacacgaaattggaaggggaacaaaatcacttaagtgttcagggccaccaaggcactggtgcatcccctgtgagcctrtttggctcctggcggtgtttttgttgccctggcttgcaacgtagcctgattgttctaagtaaatggcagagcacgcaaatcaaggacattggcaataaac

SEQ ID NO: 13918 - DNA, 201 bp, Homo sapiens
caagactccgtctcaaaaaaaaaaaaaaaaaaaaaaaaaaagtgccatgtatattttgattacaaaaaatttcatgcggtgttactttctttttattggtrgagggtctttatgttttatttttttgagacagaatctgctccatcactcaggctggagggcagtggcaggatcgtagctcactgtaacctcgaattccta

SEQ ID NO: 13919 - DNA, 201 bp, Homo sapiens
ttgtagctcctgtgaagattcaggaattttttttttcttctatttgcaagctttagtcctaggcatggaaaaagaactttgaagaaaacctgagagatatsagtgtaaaacaagagaatgattccctctggggtgctggtagtgggggcttaatttcctaaaggcttactgggtatcagggctgctttcctttataatctt

SEQ ID NO: 13920 - DNA, 201 bp, Homo sapiens
tttagtgtcacagctcaaaaccatcagtagtcctcgtgatctttcggcattgtggctccctttgtgagaagggcctaagagtgaatctcccaaccataagmtgtattcaggcaggcacgaagtctcttatttactcagtgtttctggagcccagcatagtgcctcgcacacagcaagtgctcagtgggtatctgttgaacc

SEQ ID NO: 13921 - DNA, 201 bp, Homo sapiens
agcaggagataaaaaggcatcagttccattccatatccaagtctgagtccaagggcaggagaagctgatgtctcagcttgaagtcaggcatagagaggcarttctttctcactcagccttttattttattcaggccttcaacagattgtatgaagccacccacactgggaagggcagtctgctttactcatagtactaatc

SEQ ID NO: 13922 - DNA, 201 bp, Homo sapiens
ttgcatactgacctttctgctcttttatgctgcctgctctctaatattgtccaaaaaccttctctaaagaaagtacacaaatggagagagggggaattggrcatgccattgggagaacaaatttatttagatatctttggctgtgttgacagaagctgcccaattatacccaatatacaaattttaaatgcatattagtca

SEQ ID NO: 13923 - DNA, 201 bp, Homo sapiens
atatataaatatgtgtatatatatatttgttagggtaaaacaaagtctataaaaactgttttcctttgtcattgcccccaccaaatatttatatatatgtrtatacacatatgtatatatgtatgtatagagagtctattatatatattacatatacataatatatacataatatataatagactctataatatagactct

SEQ ID NO: 13924 - DNA, 201 bp, Homo sapiens
tatgtaatatataatatattctatgtaatatataatatattctatgtaatatatattaatatgtagggaatatgttacatattatgttgagagtgtatatrttatatatgggtttctatatattataataaacccatatataatatacataatagactatacacatatacagctaatatatatacacaatagtctagtata

SEQ ID NO: 13925 - DNA, 201 bp, Homo sapiens
accaccattctcccctactttgtctatgaattcgactactcttggtacctcatataagtggaatcacacagtgtgtgatgtgttcttttgtggctgacttmtttatgatactggattctcagcatcatgggagttaggactgtctgtcgcaccatcaaacaggcatagctggctggctagaccatgtcacagggatgttgg

SEQ ID NO: 13926 - DNA, 201 bp, Homo sapiens
gactgtctgtcgcaccatcaaacaggcatagctggctggctagaccatgtcacagggatgttggaactgggtggcactgactggcccagccaaggggtcaygcaggggactcctgattcattcctggggaaagtagttatgtcaggaagcacaggctatggctcacggctgtggctgtgcccacgtggtctgtgtgggctg

SEQ ID NO: 13927 - DNA, 201 bp, Homo sapiens
tttgctcaggaagaagagcaaatggatttttgttaagaagctggcagtctgtcacaggagctacttgaggatacacacagttttctccccattagcatctscagtctctggtataaacttgagtcttctctttggtccctgataaatatacatagaatgtatggatgtgagaaagttaaactgatgtctgtgtgtcttcat

SEQ ID NO: 13928 - DNA, 201 bp, Homo sapiens
tttattttactataaatatgggataattatagtttttactgcatagttttgttatgaggagtaaatgagtcactatttctgagacacttcgtgcctggcasagaacgagcactgtgtgtgtgttacagaaatatatgtgggtgggtgtgtttctgttttccgtaattccagctaggcaaagacatatttaacaaaagcctt

SEQ ID NO: 13929 - DNA, 201 bp, Homo sapiens
tttcctggcttgcagctgcaactatctgacctctgcgtctgtcctcccacggccttctccctgtgtgtttctggatctcttctcctttgttatcaggacastggtcacattggattaagggcctaccctattccagtctgactgcatcttaactgtttaactctgtattccaatctaattacatgtctatttccaagtaac

SEQ ID NO: 13930 - DNA, 201 bp, Homo sapiens
gcgcatttgagacaggttgagggttcaagctgtccaatccctgctcatctgcagcacaccaaggaatgtggactaatgaaaaataaactgcatgcatgcartgcccatcacactgcctgcattttctaatcttcacaataactctgtgttgagaaatattcctgtctgtaatcccggcactttgggaggctgaagcgggca

SEQ ID NO: 13931 - DNA, 201 bp, Homo sapiens
ttcaccatgttggccaggctggtcttgaactcctgacctcaagtgatcggcctgcctcagcctcccacagtgatgggattacaggcatgcgccaccatgcstggctaatttttgtatttttagtagagatggggtttcactatgttggccaggctggtctcgaactcctgggctcaagcaatgcactggccttggcctccc

SEQ ID NO: 13932 - DNA, 201 bp, Homo sapiens
gggagcaggggaggaaccatctgaggtgtttttttttttttttttagatttctcattgctgagaacagttccagctctgctgaccaaaggctgagtgtccytttattagtctgagcccctagagaaaccaaagaggcaaccctcgagccaactgacagccagctgtggggttggaccctgtttttcatacagtgagcactc

SEQ ID NO: 13933 - DNA, 201 bp, Homo sapiens
cctgcctcagcctcccacagtgatgggattacaggcatgcgccaccatgcctggctaatttttgtatttttagtagagatggggtttcactatgttggccrggctggtctcgaactcctgggctcaagcaatgcactggccttggcctcccacattgctgggattacaggcgtgagccaccatgcctggccccctttcact

SEQ ID NO: 13934 - DNA, 201 bp, Homo sapiens
tctctaacatgcacatggccagaaaaatagcttggacattctgttcaaccctccacatcaactggtcagtttagtctttaaaaggtgataggcctgttgtsgtggctcacgcctgtaatcccagcactttgggaggctgaggcaggtggatcacttgagccccggagttgaagaccagcctgggcaacacggtgaaactaa

SEQ ID NO: 13935 - DNA, 201 bp, Homo sapiens
tctgagctgtgagtccttcctgtgcaccaggcatggatggcaaggcacgattgataatgttccctcttatctcgaaatgtccactctctctcccatgcacrgggagtcaagctgtgctcttcaaacacaaattccttctcccacttcctgggtagttatgctcttttcttccctgaggttgctaattgtgggcagtacagt

SEQ ID NO: 13936 - DNA, 201 bp, Homo sapiens
tgtgttactaaagttctcttagatactttacatttcctttcacggatttccaaaatttctttctttgagaatgtcaggaccagtaggaggttcagcacgcrttgccagagaaatcacagatgactaattggaatgcctcagaatcattctccttttgtttcacctaatttccacacttacgaagtcaaactctcagttaaa

SEQ ID NO: 13937 - DNA, 201 bp, Homo sapiens
cagggatagagtctcaaagttggaggtattttatgttgttttaaataatatcgtcatcacatgtcattttagaccccaaaagtccactccgaatctctgcktatggaattgaggaggggtgaggctgtcagaagccgagggacttggccaaggtcacatggctttggacggcccccctgaaccttggagctcatgttctgt

SEQ ID NO: 13938 - DNA, 201 bp, Homo sapiens
aattagctgcgcgtggtggcgcgtgcctgtagtcctagctactcaagaggctgacatgggaggattgattgagcccaagaggtcaagacggtagtgattcrtggtcacaccactgccctcaaccctgggtgacagggtgagaccctgtctctaaaaacaaaagcaaagtctactaaaaattcactggagctatgagaaatc

SEQ ID NO: 13939 - DNA, 201 bp, Homo sapiens
aaaaattagctgcgcgtggtggcgcgtgcctgtagtcctagctactcaagaggctgacatgggaggattgattgagcccaagaggtcaagacggtagtgaktcgtggtcacaccactgccctcaaccctgggtgacagggtgagaccctgtctctaaaaacaaaagcaaagtctactaaaaattcactggagctatgagaa

SEQ ID NO: 13940 - DNA, 201 bp, Homo sapiens
acacaaaacccagcgtggtgattttggcagccttgccatgcatctctaacatgcacatggccagaaaaatagcttggacattctgttcaaccctccacatsaactggtcagtttagtctttaaaaggtgataggcctgttgtggtggctcacgcctgtaatcccagcactttgggaggctgaggcaggtggatcacttgag

SEQ ID NO: 13941 - DNA, 201 bp, Homo sapiens
cagagcatttatctttgatgctgggaatgcgttcattttctttatcttgccattactgtacctctattgggaaatttactctctcttcatagataggatcmgattcagtacatatttataaaaccacacttacatttaaatacaggcctttcccatttcacagtgtttctagctcccctttccaatacatctctctctctc

SEQ ID NO: 13942 - DNA, 201 bp, Homo sapiens
aaacaaacaaacaaaacaaaacaaaaaaggtttaagaaatgttctagtaccttgaaaccaaaataggtatcagatacttggctgttttgttttttcttctwagccattttgacctgtgagattttatgtgatgaaaacataagaatgtggtattacaccctgtgatttgaattttccatactccattccattctatatgtc

SEQ ID NO: 13943 - DNA, 201 bp, Homo sapiens
ccgggaagagcgcatcctaaatcagccattagatttgttcctcatttctttgctttacaaattgtttttctgtatagtattggattttcaataaataaagkatgatataaacaagtctgcaaaccagcaagaactatataagccacttgctcaagtcaataagcgcatgctcacaaaggaacgtaaagttctgaagttctt

SEQ ID NO: 13944 - DNA, 201 bp, Homo sapiens
aatttctttcagaagtcagtactggacattcccttatttcaccttgagctacacatcccatagtcagcttagccctgtccctggtgcgggggagcaggackgttgcctgtatcccttagtcattgccgcaggcttgctgcatcacaaaccaccattagacctcagtggcccgcagcaataaacattcgattctcgccatct

SEQ ID NO: 13945 - DNA, 201 bp, Homo sapiens
aagaacattttgtgaatgtttaaatatcctaagacccactaaggaagtttgtggcaatatttgctcaaagacagtatatataataaatactttagactggytaagagaatggctctgaatgtctacctagctatcacatttagaaacgccccttgccttccttccaggactttcttccttaatcaggattgacttaactgt

SEQ ID NO: 13946 - DNA, 201 bp, Homo sapiens
cagcattgggtgtggctctggggattcattctagtgggcaagtctcatatttctcaacctcaggtttttcatctgtaaatggggacaatactgacatctasctaatgtccttgaggatggaatgagatattgagtataaagtatctagtagagtggctagcgtatagtgagtacccaataaatgcaatagatgttggcttt

SEQ ID NO: 13947 - DNA, 201 bp, Homo sapiens
cctggcatactgcaaatatctatggttgataaattaatgttatcatcatcacgtaagcatcttgggaagtctgtaagtaatgggagttggaggcttaacastgatctttgagctggcgatttttccagccaactcattttggacgttggtgcttaagcatatcctgttttcgagggtggtgttggtggtggaggaggtgat

SEQ ID NO: 13948 - DNA, 201 bp, Homo sapiens
agatcgcgccactgcactgcagcctgggcgacagtgaaacttttgtctcaaaaacaacaacaacaacaacaacaaacaaacaagaaacaaaaaatacataraagaggccttctcttcacaagtttttcttattgttttttgtttttttaagggaggaaatttctttcagaagtcagtactggacattcccttatttcacct

SEQ ID NO: 13949 - DNA, 201 bp, Homo sapiens
tcttgggctggctcattacaggccactctgtctgaggaacactcaggtttgcaaaccgtttcttaaaattacaggatacctagggacctgttggggtgggwgggaagaaccctatgggcagaaatgtgactttctgtagcaaagatgtactgtttcccactgagaagaatcaaaaatagaaaagtgcttccttgtctctct

SEQ ID NO: 13950 - DNA, 201 bp, Homo sapiens
cccgtctctactaaaaatgcaaaaaattagctgggatttggtggcgcctgcctataattgcagctacttggaaggctgaggcgggagaatcacttgaaccrgagaggcagaggttgcagtgagccgagatcgcgccactgcactgcagcctgggcgacagtgaaacttttgtctcaaaaacaacaacaacaacaacaacaa

SEQ ID NO: 13951 - DNA, 201 bp, Homo sapiens
gaacctttctcttataaggatactaatcccatcgtaccccgtcccccatgatctcatttgaaattagtcacctcccaaagccccacctccaagtactgtcmcactggggcatagggcttcagcatatgaatttgggggagctggggagaggaacacatacatttagtccataacaactatctcacttacctctctactaag

SEQ ID NO: 13952 - DNA, 201 bp, Homo sapiens
acggcagtctcaggtttatgtattaggaagcattcagcaggcaggagcagccgatctgagactggcatgggcagtggagacatcattcatctcctgaaacrtaatttggaggagactgttccagggctggctgagtgactccttgatgtcagcactttgccctgtcgtggtcttggcctttctcttgtgttccccagatgg

SEQ ID NO: 13953 - DNA, 201 bp, Homo sapiens
acctgtagtcccagctgcttgggaggctgacgagtaaggatcacttgagccagcatggtggaggctgccatgatcatgctactgcactccagcctgggcarcagagccagaacctgtcttgtaaagaaaaggaaaaagagagagaagggcagaaagaaagaagggaaggaagaaaggaaaattgggcccaggaatgatctt

SEQ ID NO: 13954 - DNA, 201 bp, Homo sapiens
agggaaggaagaaaggaaaattgggcccaggaatgatctttacaatgcctgacaaccaagagaagaagggaaatgagcttcacattgcctgcaagctctarggtgacaagagccaagagaaattattgttactgtagtgatgttccactgaggatcataaagtactttattactctactgagtatggttattggatatgtg

SEQ ID NO: 13955 - DNA, 201 bp, Homo sapiens
gatgctgggaatgcgttcattttctttatcttgccattactgtacctctattgggaaatttactctctcttcatagataggatccgattcagtacatattyataaaaccacacttacatttaaatacaggcctttcccatttcacagtgtttctagctcccctttccaatacatctctctctctctttctctctctctctc

SEQ ID NO: 13956 - DNA, 201 bp, Homo sapiens
ttattagctctgctatcagagtgatgctgtggctggagaagatggagacccatgtgttcaggctgtgagcataggcagatcctttctaatgcagaaggtgyagacacagggcacagaactgccaactgtggctgctgacacctgtctgactttgactgggttagtgacaaagaaatgactttccttttgtatgttagccct

SEQ ID NO: 13957 - DNA, 201 bp, Homo sapiens
taacataataccatagactgggcaggttaaacagcagacctctattcctcacagtctagaggctgggaagtccaaggtgaagccatgggcacattctgtgsctgcctgaggctctctttctggttcccagatggatgcctttgtgtgtcctctcatggcagagagaggaaggggtctggaacctttctcttataaggatac

SEQ ID NO: 13958 - DNA, 201 bp, Homo sapiens
ttatccatgccatctgaaatcctccttcctttttaacaaggcaagtagaaaacgaaaacaacatcaaaggatacactacacaattgttggagccctaggamccgagagaagagtacaagcaggttcttgaactgttctctccccagcaactataactggaaggaacctcagtttgtccattcattcattcatcagagcagc

SEQ ID NO: 13959 - DNA, 201 bp, Homo sapiens
gtagcctcaacctcctgggctcaactgattctctcatcttagcctcctgagtggctgggaccgcaggttcatgctaccgtgcccagctaattgtttaattytttgtagagataggatctctccctttgtggcccaggctgatctcaaactcctgagctcaagcgatcctactcactcggcctcccaaagtgctgggattac

SEQ ID NO: 13960 - DNA, 201 bp, Homo sapiens
atgaactcatgggaagcaaacacacaccctccctccgatccaccaggcactcgggtttcctgtgtgtctggtgatgtgctgggtgttgtggatctggactsaacggcagtctcaggtttatgtattaggaagcattcagcaggcaggagcagccgatctgagactggcatgggcagtggagacatcattcatctcctgaaa

SEQ ID NO: 13961 - DNA, 201 bp, Homo sapiens
caaggacataaacatttactcctgtggtgttatgatatatatagggttcctggctcataactctcatagcccttgttgcagtctattgttacaatattgcstgtgttaggcatcaggaaacagaatctctttgtctcctgtccttctttcacctgccccaaggcaggactctaatctttcccacctttttgattgtgagtc

SEQ ID NO: 13962 - DNA, 201 bp, Homo sapiens
gtttttatatgcagtttgtatttatccatgccatctgaaatcctccttcctttttaacaaggcaagtagaaaacgaaaacaacatcaaaggatacactacmcaattgttggagccctaggaaccgagagaagagtacaagcaggttcttgaactgttctctccccagcaactataactggaaggaacctcagtttgtccat

SEQ ID NO: 13963 - DNA, 201 bp, Homo sapiens
aaatcctttgcaaacattttctctcaatctatgggtaggcttttttactctttttatagtgtcttttgatgaacaaagattttaaatcttgatgaagtccmctttatctattttggatgttgttgcttctgtttttggtgttgtatctaagaatccattgccaaatccaaggacataaacatttactcctgtggtgttatg

SEQ ID NO: 13964 - DNA, 201 bp, Homo sapiens
tagcctagttttccaaactttatccccaggtggttgaactttctaagtttccccaagctgatcagtgttttggggtggtatggaactcagaatagatcactttttttattgactaactctgaccataagtatgcttctgtgcgagcctgacctccacggtaccaggcagagaacaacatgtatgcagagaactcattcact

SEQ ID NO: 13965 - DNA, 201 bp, Homo sapiens
cagtcctcagtgtaccccaggaaagaggaaactgagtctccatgtggctttctgtctggcctttctcttttgcttgccttgtgctttgaatgcaggcctgmtgtttgcctgtggacctcaggatttgtaaggccatctccacccacctacagctaagtttcccaagagccgatctccagccgaagtccaaggttccttgat

SEQ ID NO: 13966 - DNA, 201 bp, Homo sapiens
aggtaagcggctagcacagtgctcagcatgcatgaaggactctttcattatcgttattaactgatgtttttaacttatacattgaaatgtggaaacaagcsttgcttctattgaatgacttcttgaaagtgccagtctgatccttgaccttcaggtgcatctctaaattctttcatgtcagggtctctgaaatctgaacac

SEQ ID NO: 13967 - DNA, 201 bp, Homo sapiens
cttacaatccgttgcagaaagcctagctccccagcttctcctgaatctacgtttttctattttgtctgaactagccaaggtctctggagtttgctgttatmttgcttcagagaaattagtgacattgaaaggctgttgtcttttttagtgtacttttggttgttaggagaaatttacaaggccatttttttctcccgtctc

SEQ ID NO: 13968 - DNA, 201 bp, Homo sapiens
gctcactgcaaactacccccgcccccgggttcaagcaattgtcgcacctcagcctcccaagtaactgggattacaggtgcccaccaccaagcccggctaakttttctattttcaatagagatgaggttttgccatattggtcaggctggtcttgaactcttgacctcaggtgattcacccacctcagcctcccaaagtgca

SEQ ID NO: 13969 - DNA, 201 bp, Homo sapiens
ataaatatatacatatatgtgtatatatagattttgttttttgagacagggtcttgctctgtcactcaggctggagtgcagtggcgtgatcatggctcacygtagcctcaacctcctgggctcaactgattctctcatcttagcctcctgagtggctgggaccgcaggttcatgctaccgtgcccagctaattgtttaatt

SEQ ID NO: 13970 - DNA, 201 bp, Homo sapiens
atatatatatatttatataaatatattttatatttaaaaatatttatattttatatatttttatatatttatgcaagtatatatctaaatatataaaatakatataaatatatacatatatgtgtatatatagattttgttttttgagacagggtcttgctctgtcactcaggctggagtgcagtggcgtgatcatggctc

SEQ ID NO: 13971 - DNA, 201 bp, Homo sapiens
caagaaatgcggcagctgcttctagccgctccatccttccttttcccagtgcgcactaaccctccagagccttccgcatctgctatgcagcattggccacrccagtgggatgcaagaatttatcccttctgttgatgcaattaaagctaatggatctcatatatatatatatatatatatatatttatataaatatatttt

SEQ ID NO: 13972 - DNA, 201 bp, Homo sapiens
gttgctgtactagatgaataatgtccccccaaattcgtgtctatctggaacctcagaatgtgacctcatttggaaataaggcctttttaattaaaaaaaawtttttatttaaaaaacagagatagagtcttgccatcttgcccaggctagtctcaaactgttgggctgaagcagttctcctgctttgacctcctaaagtgc

SEQ ID NO: 13973 - DNA, 201 bp, Homo sapiens
cacagctggagtttaggaaggccaggcagcgtgtgttgaatgccagccactcttctacccagggtcatatccttggatgtttttctgtgcatctgtctttyccgaccctcccgtgattctggaaggaaacacctttccaagctccccagtgaccctggttcatcccggaaatatgcaggaaaagcattatgagcattgcag

SEQ ID NO: 13974 - DNA, 201 bp, Homo sapiens
ctcacatgtaggtcacctacgggagcaggggaggaaccatctgaggtgtttttttttttttttttagatttctcattgctgagaacagttccagctctgcygaccaaaggctgagtgtccttttattagtctgagcccctagagaaaccaaagaggcaaccctcgagccaactgacagccagctgtggggttggaccctgt

SEQ ID NO: 13975 - DNA, 201 bp, Homo sapiens
gagtttgagagcaatctggccaacatggtgaaaccctgtctctactacaaataaaaaattagccgggtgtggtggcgtgtgcctgtaatcccagttactcsggaggctgaggcaggagaatcgcttgagcctgggaggcagaggttgcagtgagctgagatcgtgccactgcgctccatgctaggtgacagagcaagattc

SEQ ID NO: 13976 - DNA, 201 bp, Homo sapiens
gccatgttggagagggatccaacatttattatccccattttacagatgaagaagttaaggtggccaggcatggtggctcatgcctgtaatcctagcacttygggacactgaggtgggtggatcacttgaggtcaggagtttgagagcaatctggccaacatggtgaaaccctgtctctactacaaataaaaaattagccgg

SEQ ID NO: 13977 - DNA, 201 bp, Homo sapiens
ttgcctgatcgcctctccacccctgctacgtgtaatagaaaggtagggccatgttggagagggatccaacatttattatccccattttacagatgaagaasttaaggtggccaggcatggtggctcatgcctgtaatcctagcactttgggacactgaggtgggtggatcacttgaggtcaggagtttgagagcaatctgg

SEQ ID NO: 13978 - DNA, 201 bp, Homo sapiens
ttaactttcagaggagccaccaaattgttttccacggaggctgcaccattttatatttccacttgcagtatatgaaggttccaatttctccacatccttgmcaacactttattttctgttttctttgaaggtatgaaattgtatcgtggttttgatttgcatttccctcatgattaatgatgttgagtatttttatgtggt

SEQ ID NO: 13979 - DNA, 201 bp, Homo sapiens
agccttcatctgttttcctgcagatgcccggctcgtggttaacccaagcaagaggtagttaaacggccccgcagattgccagtgactccgggaatgcctargtttatgtatggattaacacagtgatagaccctgagtagcaaaagacgaagactaattacctgacagagctcccctccactcgcctgggtcattgaaatt

SEQ ID NO: 13980 - DNA, 201 bp, Homo sapiens
acaccagactaatgcttctgacttttccatggtgccccagcagcaggctggagggaagggcgggggcggtcagaggagagatagagcacttcagattccamtcgaatacattagagcattagagcttttctcttcctcagggtgctctctctctctgggttgggaggagatgtggcatttctaggaattcacagtaaaatc

SEQ ID NO: 13981 - DNA, 201 bp, Homo sapiens
aaaattcaaaaaattgcaacctgaggcataaatgggttttaagctccatacagtaaaacctagcatatgaaaacagttctggctgatgggttggtagaagkgatagatatagatacatatatacacatatatgcacagtaatagatataggtaaagaccttgatatatgtacatatattgtatgatacatatccatgcata

SEQ ID NO: 13982 - DNA, 201 bp, Homo sapiens
ccgcacccggccctgtttttgcatttttagtagagacgggttttcaccaggttggccagcctggtctcaaactgttgaccttaggtgatctgcctacctcsgcctcccaaagtgctgggataacaggcgtgagccactgcgcctgtctacattttctgtctttactggtattatggtgggaacccataaaccactgcgagg

SEQ ID NO: 13983 - DNA, 201 bp, Homo sapiens
ctcaggatgaggatgttcaatttgtactgctggtggagctgcctttccattaagtgagtctttctccaagggaacagaagtcttaggttgttgatctggckgtcagaacctaggacaggcaaggcagtgggctgttgtagaggagatgaagctgatcagagcacacccacaccagtgacaaccggtcaggacctgggaagg

SEQ ID NO: 13984 - DNA, 201 bp, Homo sapiens
tgcgcctgtctacattttctgtctttactggtattatggtgggaacccataaaccactgcgaggcagataccattttaagcaggaaaccttatttttttcygaagcacatttaaaaatattttccagtttatctattaaacatcctcctttgcttctggagatcctctgaaagatttatctctttcgattcatctgtaaag

SEQ ID NO: 13985 - DNA, 201 bp, Homo sapiens
ctttgatgtgtgtaggtaagcggctagcacagtgctcagcatgcatgaaggactctttcattatcgttattaactgatgtttttaacttatacattgaaakgtggaaacaagccttgcttctattgaatgacttcttgaaagtgccagtctgatccttgaccttcaggtgcatctctaaattctttcatgtcagggtctct

SEQ ID NO: 13986 - DNA, 201 bp, Homo sapiens
ccttactgttgaagacttgtggaaaagggacatggcccagggaaccagagtggtttgggaaagcactttgtcaagaggcttggggaccccagggtggaagytgccatgcgcatgaggctgtgttagcagaggcagtggcagaagaagacattgcaaacctgcaaaagcaacctctgaggatgggtagacatatacttcatt

SEQ ID NO: 13987 - DNA, 201 bp, Homo sapiens
gcttattgcctgctgcacattttagcctcatctcgttagtgcaagaaataatttaacaactgaaaaagatgtgaggttgtacctggtaaggtctctattgstcaaggaaaggtttagcatggagagatttctcttaaggtgcctaggtattcagaagcacccctaaaactgatttgtgtggccctatgcttacaagtggag

SEQ ID NO: 13988 - DNA, 201 bp, Homo sapiens
tccactgtttatcctggtgaccttaggcaagtcatttaatttccttgagttttggtgtaagtattgatggagcagaccatcaataactgttcttatgtctrttattaccatgtgtctgtctacatgtttgtttgtaaattctctgtgggtaaaagttctcttttcatccccttgcctcagcacggagcccagagccagact

SEQ ID NO: 13989 - DNA, 201 bp, Homo sapiens
ctgtgagtcatttccacaatacgcctccctttggcgtgaaatggggcagaaagtgccccaaacagctgttattttcgcagtgattcattcattcattcattcattcattcattcattcatccacccatccattcattcattcactcatcacatggcaactcatcacccctgtataccagacccagtgccaaatactgggga

SEQ ID NO: 13990 - DNA, 201 bp, Homo sapiens
gtctggatatgaattccaaagaccactggactttggaatattcgtaggtctctgaaaattcagacccacagaggccttaccccgctacagagaggccccargagagaggcctcacaccctctggctccactgaaattcacttcacgtttccaacttggattaaactggcacgacagttcagtcaaatgtcaagtccatttt

SEQ ID NO: 13991 - DNA, 201 bp, Homo sapiens
accttgtagcaagggggaaaaaaagagcttcttgacatctttttgaagaatggcgctctttaaaaaaacataagggaactttttttttcaaacactgtaaygagggtattcaagtctgcaggcaaaacagagctgtttgaaaagacattagcctcgaaaccgcactgtgccagaatagatacagctacgtcaaaatgccgc

SEQ ID NO: 13992 - DNA, 201 bp, Homo sapiens
aaaaaaaaaatcgggaattagcgtgtagctattaggcgtagattcctgcctaaggtctggatatgaattccaaagaccactggactttggaatattcgtargtctctgaaaattcagacccacagaggccttaccccgctacagagaggccccaagagagaggcctcacaccctctggctccactgaaattcacttcacgt

SEQ ID NO: 13993 - DNA, 201 bp, Homo sapiens
tggaaaaaaaaaatcgggaattagcgtgtagctattaggcgtagattcctgcctaaggtctggatatgaattccaaagaccactggactttggaatattcrtaggtctctgaaaattcagacccacagaggccttaccccgctacagagaggccccaagagagaggcctcacaccctctggctccactgaaattcacttca

SEQ ID NO: 13994 - DNA, 201 bp, Homo sapiens
cctcccgagtagctgggactacaggcatgcaccaccactcccagctttgtgtgtgtgtgtgtgtgtgtgtgtgtgtgtgtgtgtgtgtgtgtgtgtgtgtgttttgtagagacagggtctcactgtgttggccaggccggtctcaaactcctagcttcaagcgatcctcctaccttggcctctcaaagtgctaggattacc

SEQ ID NO: 13995 - DNA, 201 bp, Homo sapiens
aataactctgtgttgagaaatattcctgtctgtaatcccggcactttgggaggctgaagcgggcagatcacctgaggtcaggagtttgagaccagcctggscaacatggtgaactccccccaaccaacgacccttcccatatctactaaaaatacaaaaattagctgggcatggtggtggggacctataatcccagctact

SEQ ID NO: 13996 - DNA, 201 bp, Homo sapiens
agcattcacacaggcactaagacggtgagtactcactacttagcgctgtcaacatcatctccgtccacatcaatgtcgtcatcgtccttatgaaaagccckgggcatcattttgcccttgagctggatgtccatgttggaaaaacagctagtggaaggcgtgcccaaatctcagaagttggcgtttccttgcagatatcat

SEQ ID NO: 13997 - DNA, 201 bp, Homo sapiens
acaaatcttgtttttgtctttttattgaatttaaccactattgacttgcgacttgcggcaatcaccagatcccagatctctgtgtttggagctacacgtcyttctgaatcgaggaggtggggcactgatttttcttttatcactgacttccccgaagtgggaagttccagtgcttaacaagtttcattaagaacacagcta

SEQ ID NO: 13998 - DNA, 201 bp, Homo sapiens
ttggttatttctttattcaagggttgttgagaggatgaagtgctaaaaatgcttgaccagcattcacacaggcactaagacggtgagtactcactacttakcgctgtcaacatcatctccgtccacatcaatgtcgtcatcgtccttatgaaaagccctgggcatcattttgcccttgagctggatgtccatgttggaaaa

SEQ ID NO: 13999 - DNA, 201 bp, Homo sapiens
ctgggtaaaataaatatgatataaaacagacacaaataagaatatatagatgatgttaatttcttcagagcttcccggtgttacgtcttcaagaatatgaygacaggggaacagcccagtgtggcagtcatgtgacgacatgagcattggaaccagccacatctcagttggcaacacgtatctgtgtcttactagcttggc

SEQ ID NO: 14000 - DNA, 201 bp, Homo sapiens
gtgacgacatgagcattggaaccagccacatctcagttggcaacacgtatctgtgtcttactagcttggccactgtcacgtcactcagcctctgttttctmatctgtaaaatggggaaaattatagatgcttcagaagatatttgctatcactattaaatgaaaacaagcatgtcatcagtgcttattatttttgttgctt

SEQ ID NO: 14001 - DNA, 201 bp, Homo sapiens
ggtgatcctgctgcttggcagcatcttcccagcgtacaacagaggaaaactgcctgttgtagttaaaaaaaaaaagagagagagagagagagactgatacmcaaagagaatcagaaaggagtagagatgaaacaaagatagagctagcatgattgcaagctgaggacatacgaggagtccctgggtcagctgggccataca

SEQ ID NO: 14002 - DNA, 201 bp, Homo sapiens
taatacaaaagttttccccataccaactagtagtgtaagttgatttcatatccttttatttcataaagttttgcttatcgggtttgtcatcctctatttgmaattaaaatgtgtggtctcgagatgaccttaaagtatctgacccccaaatctaatcactcctagcatctgtgaaaattgacaaatatgtcaggtataact

SEQ ID NO: 14003 - DNA, 201 bp, Homo sapiens
cttggccaaatatccgagtgtggaagctctcactgtgaacctgctaacatacatttcagtgtctacaaaatgtcttttgagagaaaacagcagggacattygtgagctcttttttttttctaaccactttcccagtgagacttcagttttcattctccccttagcagctttcaaatatgtacgtaacacaaatgttacatg

SEQ ID NO: 14004 - DNA, 201 bp, Homo sapiens
agcctcccgagtagctgggactacaggcatgcaccaccactcccagctttgtgtgtgtgtgtgtgtgtgtgtgtgtgtgtgtgtgtgtgtgtgtgtgtgtgtgttttgtagagacagggtctcactgtgttggccaggccggtctcaaactcctagcttcaagcgatcctcctaccttggcctctcaaagtgctaggatta

SEQ ID NO: 14005 - DNA, 201 bp, Homo sapiens
atttctttatcgtaagcacacttctctacattacctttataatccaacaactctgctattagtaaattatagaaacaacttttgtaacactatcttgtttscagagtatatgaaaaatttgaagttaaaattcagctccacgaatactgcagtggtgagaaaatggcgacaaagattagtcttctgtgagaagtctgctaa

SEQ ID NO: 14006 - DNA, 201 bp, Homo sapiens
ttaagttttttataggagtcattaatctccctcagcctcagtttccctatctgtgaagtgagtctaaccaggatgataatgaagagttaggtcaagtgagrttggcagccagacacccaccaccagctgtaacataagaacagatgttctctccagacccccaggtcagctgaggtcgctctgcttggaataatgaactgc

SEQ ID NO: 14007 - DNA, 201 bp, Homo sapiens
tatacaatgtcagtgctctgagctcattaggcgtcatctgagacagtggctgtaggggaggggaggtaggctctgagtcaagcagacctggaattttcttyatgggccattaggaactgtgtgacgctggggcatctgacttcacctttctgagtcttagtttccttacctgttgaataggtctaatgatatcattatggc

SEQ ID NO: 14008 - DNA, 201 bp, Homo sapiens
gttcaagctggcctcgtgtttgtggttttagacacagctttgagtcgtgaccggtgtggccaagacctatttcccttgcaaatgctctctctcttttttcrgtaactgtgttactaaagttctcttagatactttacatttcctttcacggatttccaaaatttctttctttgagaatgtcaggaccagtaggaggttcag

SEQ ID NO: 14009 - DNA, 201 bp, Homo sapiens
tggctggaggtacccctcagctcctagaggcatcaacagttcctgaatatctgggcttttcccacaaagcagcttccttcatcaagccagcaacaagagtytctggggcaagttggtcaacaagatggtgtcttacatgcccaatgtaatcatggaagccatgtatacctcatcacatttgccagatttctgctgattaat

SEQ ID NO: 14010 - DNA, 201 bp, Homo sapiens
cctttacattttaaagagggatgaggttgagtctgtccctagcactgacaatgaaacatttatgctgtttataaaaatcaggaaacacacaaataatttgmttaacgctcaccttctggtccttttgtgatttgagaggtcttgagataagaaaaactgtggatgaattttactgaactattgaattgagaatggctgagg

SEQ ID NO: 14011 - DNA, 201 bp, Homo sapiens
gctcttatttttaagtcatccttatctctttcacttattccctcattcaggcaccaaaaatgctgtttgactgggagagcaagtggagctgttcaaagttstagggacagccgggcgcagtggctcatgcctgtaatcccagcactttgggagggcgaggcgggcagatcacaaggtcaggagttcgagaccagcctggcc

SEQ ID NO: 14012 - DNA, 201 bp, Homo sapiens
gccaaaatattcttttcaaagtgattagaagtaggagaagcttgctctctttttattggcacttctgtcttacatgcactttttgatttaaattattctgkcttctatgaaatgacagtgattggaggtggtttatttttttttaagtctgcttactcggaaaaataaaacaaagttgacaacctgatttcagacctccca

SEQ ID NO: 14013 - DNA, 201 bp, Homo sapiens
gtttcagtgcctgacacagttgtattcctaagacatagttgggaccagacctcaagaaaatagccaacaaatactgggtgaatgaacgaaagaggccataygcagtcagcccccctctctctgggttctacatatgtagatttaactaatgacagattaaaagcattcgaacaaacggagggtggtatctgtactgaaaat

SEQ ID NO: 14014 - DNA, 201 bp, Homo sapiens
cctctttaaggataagactttctgatttttcaactggatttaccattgtggcatctgcacatgagcagactgactgctttttggccctacctggagcctgrgtcctcaggtagctgacccgagagaccgtggagctgcttgtgatatacaatgtcagtgctctgagctcattaggcgtcatctgagacagtggctgtaggg

SEQ ID NO: 14015 - DNA, 201 bp, Homo sapiens
gatgggtctttgtttagaggaagctctttatcctggtacgctggaagttggcatagtcttagcagttagtccagatgtgaatttcaggattattctgtgartcttccaagtcctgtctcagcagtgaaataggctcagtgtagcttatgtctaggtggctgagttcattttctagtctaggtaaagggcacctcctgtaat

SEQ ID NO: 14016 - DNA, 201 bp, Homo sapiens
tctttcttttttttttttgaggtggagtcttcctctgtcacccaggctggagtgcagtggtgggatcttggctcactgcaacctctgtctcctggcttcaygccattctcctgcctcagccttccgagtaactaggattacaggcatccgccaccatgcttgggtaatttttgtacttttattagagacagagtttcacca

SEQ ID NO: 14017 - DNA, 201 bp, Homo sapiens
ctatgctgggcacaaggaatgttatggtggataaggggaaaatggtccctaccctctgtcagttttttatggaagaagaaagacggtctttaaagaaattyacataattaatcacaaaaagctaatactatgacaaagaatgtaagttactaatacagcttagaacagatgactctaaccttgtgtaggagctagagaagg

SEQ ID NO: 14018 - DNA, 201 bp, Homo sapiens
cccagcctgattcctgttttacatattaaaaatttcatctctccaatcttcgaagaatccgtagtccatttttaagtagctcttgtcttccaaaggtatgsgatgtgcctacctaatgctcttcctggatgggagaatattaccaaaaacgtttggtcgactaattttatgacagtttccaactacaatttttttcctctt

SEQ ID NO: 14019 - DNA, 201 bp, Homo sapiens
gtggtggctcctgcctataatcctagccctttgggaggccaaggtgggaacatcatttgagcccaggagttaaagaccagcctgggcacatagtgagacascagctttacaaaagagagagagagaaagaaagagagagagattatttctagaataagcaaaccaaacgtgaattaagttttcattctcattttagtgatt

SEQ ID NO: 14020 - DNA, 201 bp, Homo sapiens
tgggtatggttgtgcactcctgtggttccagctactcaggagactgcggtagggggatcacttcagcccagaagttcaaggctgcagtgagctgtgatcgytccactgcactctagcatgcgtgacagagtgagactatctcaaaaaagaaaaaatgagattatggccaggggtggtggctcctgcctataatcctagccc

SEQ ID NO: 14021 - DNA, 201 bp, Homo sapiens
tggctgggcatggtggctcacacctctaattccagcactttgagaggataacttgagtccgggagtttgagaccagcctgggcaacagagccagaccatcyatctctacaaaaaatttaaaaattagctgggtatggttgtgcactcctgtggttccagctactcaggagactgcggtagggggatcacttcagcccagaa

SEQ ID NO: 14022 - DNA, 201 bp, Homo sapiens
atattaattattaataaaatccaactccttaataatacaatcatagttaccatttattgagagcactcttctgaacattttgcattctttatttaatcttmcctacaaccttattaagtagacattatcttcatcttattaagtagtcagttcctcatttgcagatgaggaaactggctgactgagttaaatgaatgccaa

SEQ ID NO: 14023 - DNA, 201 bp, Homo sapiens
actaatattctctctgactataattgtaaaacagtagatgtctttcaccaagcgctaacattatattaattattaataaaatccaactccttaataatacwatcatagttaccatttattgagagcactcttctgaacattttgcattctttatttaatcttacctacaaccttattaagtagacattatcttcatcttat

SEQ ID NO: 14024 - DNA, 201 bp, Homo sapiens
cctagccaagcagaaacccatgtttttgactttcaggatatttgtgaattaatttacttgcatatattggccaagatctagcataatctcttaatattcartgaataaaaaattgagttttgagagcaaatattttggtaggaaatagagaactgacactaatattctctctgactataattgtaaaacagtagatgtctt

SEQ ID NO: 14025 - DNA, 201 bp, Homo sapiens
gtggccctgaagagggtgggaatgtctcatccccctgtgggcttagaagaaaaccagaggtctgtgcacactatggatttttactacaatgatgccctttyacatacagcgagaaggattaagaggtactgtattgttggttgataaagtcaaacttgtgaacagagcaaaagggcattgcttggtcattgcagcttccac

SEQ ID NO: 14026 - DNA, 201 bp, Homo sapiens
tacttcttggagaaacctcccaaatttctatcgacactagacatctcaggatttgaaatgttaagctaacaaattgttcatcaggtgtatctccagccctycgtaaacactgccggatggatgaacctacgtaatgatctcctggtgccattttcctgactgtagatacttgggtaaggaggagactttgactctagatga

SEQ ID NO: 14027 - DNA, 201 bp, Homo sapiens
aacttgatatggaaggtcttcacagattaaaacgaaggaaaaaaaaaaaaaaaactagataaatctccctggacatgaacttttgtagaagtagttacaaygctagtgacctcatatactcatggtaacggcttccggcatccaatgaccttgccattgcggaggtcaatttcatgtgtgtgtgcacacatgggtgcgtat

SEQ ID NO: 14028 - DNA, 201 bp, Homo sapiens
agggccctttgtcatttatgtagcaccagccctgaaatcggagactcataaaacctacaaatacacacacaaacacaaaccaggcaaacccacacaccacrgagaagaggcaaagtgtgcataaagataccctgttgttattcacccagtacaactctctaattcatgtataaacagtaagtgtaaaatgttccacaccct

SEQ ID NO: 14029 - DNA, 201 bp, Homo sapiens
agagacttcaggtggatctggaggtccttccccaaccttctgcaaaccatgtcttcccagagagcttctaagccaaagcaaaggtgttgctctctgcctcytgttgctctgtaattcatctcagcaaccatctttcccatctctgggaagagaatgttgtcccccagaaaaagtccttatggatagatttagttattgctt

SEQ ID NO: 14030 - DNA, 201 bp, Homo sapiens
atcaggccttgggagatgcaaacagtttgcccttggaccatgtcttctgctttcatccttatgctctcaacagatcatgccaaggtcctgtgttcaccgcsttcctgagtccccattcagaggctcaagaattgagacaaaagggcatcctgcaaatttgctgccctggaagctgtgctgggggagccagtagagacttca

SEQ ID NO: 14031 - DNA, 201 bp, Homo sapiens
tggagtgcagtggcgtgatcttggctcactgtagctgctgtctcccggattcaagcgattcccctgcctcagcttcccgagtagctgggattacacccacsaccatgcccggctagtttttgtatttttagtagagatggggtttcaccatgttggccaggctggtctcaaactcgtgacctcaagcagtccacccgcctt

SEQ ID NO: 14032 - DNA, 201 bp, Homo sapiens
attctcgccttctagcctgggcttgtcagcttggggtgtatgccgcacctcctctttgaagaggatcttcatttggaggggtgatctgactcccaaccctmcccaggtgaaagcaccgggattcatacctagggggctttgggatttggggctgactttgacccgtcattatttctgactgcaaaattcctgacaaatgtc

SEQ ID NO: 14033 - DNA, 201 bp, Homo sapiens
ggttggcgtttcagtgcctgacacagttgtattcctaagacatagttgggaccagacctcaagaaaatagccaacaaatactgggtgaatgaacgaaagasgccatatgcagtcagcccccctctctctgggttctacatatgtagatttaactaatgacagattaaaagcattcgaacaaacggagggtggtatctgtac

SEQ ID NO: 14034 - DNA, 201 bp, Homo sapiens
acagggacaagaaataaataactttgatgcaaatcctgggaagactctggaacaacatggaggcacctatgttaactctatttcattttggaaaagttgastagacaaaaggtgcagagtagagtatgcagtgatttcagggtgttgggctctgacaagatgatgccgacttagacagtgttagtcaacatcaaatgtctg

SEQ ID NO: 14035 - DNA, 201 bp, Homo sapiens
ccagaggtctgttttcatcacatcgtatcaagcattccaccttcatcatgactcttcactgttgatggtgactctgattcacctggtcaaggtagtgttcrttaggtttctccactgcacacttagtctttccctctactttccacactgctgcctttggaggagtgttgctgtgcccagctcatgcttgtggagtgggga

SEQ ID NO: 14036 - DNA, 201 bp, Homo sapiens
tctcagttaatgcccacaaatttctgaactttgaacataaataccctcactgcaatacatgtttttctttctctctctttctttctttctctttttttttytttttttttttttgaaaaacttttttggagcagcacctgcatgttgtaaaaacacaaaataaaaaaaaaataaataaaagcagaccccttggttcagata

SEQ ID NO: 14037 - DNA, 201 bp, Homo sapiens
catgtacaacagcgcctgtgctgggcctgctaggagtcgatattttctggctcaaagaagttccaaaagaattcaaagccagtgtgtctctttctctggamggccaagtgatgcaggtaccacgcttaggtctgctggtgtttagcttgacttaaaacccagccagggaaatatgtttcactttgctggggtgcaggtgga

SEQ ID NO: 14038 - DNA, 201 bp, Homo sapiens
ttatttgtcttttggcttgtatcccacctgttcactttttaccatagctaacctttctaagtggtcaggtgggactcatggagattttccgttctttggaractagcagcgactgcagattactcatcagctgtctccttgagtccacaatgccgggcggtggacgggcttcctgcctcctggcccagggcccctttgccg

SEQ ID NO: 14039 - DNA, 201 bp, Homo sapiens
tattcctcgcctggcctcattgctcgcttcgtttcggaggaaattttccctgttaaagtactgtacttgtcatttatttcccttttttccactctccctccgtggctgggtttggatatgcatttatccaaaaggcaaggcttttacacacttccgctaacctcttatggtcaggctcataaaagcaacccaacaaagctt

SEQ ID NO: 14040 - DNA, 201 bp, Homo sapiens
gtggcgggcacctgtagtcccagctacttgggaggctgaggcaggagaatggcgtgaacccgggaggcggagcttgcagtgagccgagagcccgccactgyactccagcctgggcgacagagcgagactccgtctcaaaaaaaaaaaaaaaaaaaaaaaaaaaaaaaagacacgtacacagacaaatgttctgacagaaat

SEQ ID NO: 14041 - DNA, 201 bp, Homo sapiens
tctagtggatattttgttaaaaaaaaaaaatggggtctcattctgttgccccggctgcagtgcagtgacatgatcataactcatggtgacctcaaattcaygagcccaagcgatcttcccacctcagcctgagtagatgggactacaggcatgtgtcaccatgccaggctaatgtttaaaaatttttcttagaggtagagc

SEQ ID NO: 14042 - DNA, 201 bp, Homo sapiens
ctgagtttctgtggatttctataggctcctgcaaattttatctagtggatattttgttaaaaaaaaaaaatggggtctcattctgttgccccggctgcagwgcagtgacatgatcataactcatggtgacctcaaattcatgagcccaagcgatcttcccacctcagcctgagtagatgggactacaggcatgtgtcacca

SEQ ID NO: 14043 - DNA, 201 bp, Homo sapiens
aattttgtgttgcgtaatatttcaggaacttgcaaccctgataacttgtgcctgcctgtctgtaggcctttaatgatgttttattgaattttggttttccmctagactttgcagtgcatgacacatagtaattgctcaataaatatgtgttcaactgaactatggtggttaggttagtaattagatgcacagacaaaatca

SEQ ID NO: 14044 - DNA, 201 bp, Homo sapiens
cgagcatgctctgaactcctgaactgctcattctgttctctgagagaattgctcaagctgcagtttatcattatatgcctccaaagactttgtgtttcctrtgtttgacatcgagatagaatttttcataaccctttactagtaataaatttgattgttaagggaccgggttaatcttatttctaataccagcatctgatt

SEQ ID NO: 14045 - DNA, 201 bp, Homo sapiens
gaatgactccatggatgacctttccgtgcctttgtctgtagcctgccctcctctttaactgaacaccttccagacgagcatgctctgaactcctgaactgstcattctgttctctgagagaattgctcaagctgcagtttatcattatatgcctccaaagactttgtgtttcctgtgtttgacatcgagatagaatttttc

SEQ ID NO: 14046 - DNA, 201 bp, Homo sapiens
ttgttattgtaaaagcatcatgcaccaggtaaaatgtttaataacacagagaaatctaattgtcaagtatcttctcaacacacattaatcaacaattctcmtatcgaaggataacctcttgtatttacaaaaaaaagaagaaaaagtgctgtcatcagtaaattcattcatgtatgttatacacttacatacaaaatgtat

SEQ ID NO: 14047 - DNA, 201 bp, Homo sapiens
tcacgtttgtttaatattttaatttccccatgagtcttaaacctctgcgtggtgtgcaagttgaggcctggtgtatgcacttcggccacgggctttcccaytgtaatgaagatggaatgactccatggatgacctttccgtgcctttgtctgtagcctgccctcctctttaactgaacaccttccagacgagcatgctctg

SEQ ID NO: 14048 - DNA, 201 bp, Homo sapiens
ccgggaagtggaggttgcagtgagccgagatcttgccattgttctccagcctgggcgacaagagtgaaactccatctcaaaaaaaaaaaaaaaaaaaaaaraattatgtcatttcgttgtcacagcgtcagcagaataaatcttagatcaagatgggattactgcgccactcccttcttcccagtctgtggtttagcacgg

SEQ ID NO: 14049 - DNA, 201 bp, Homo sapiens
ggttggagaatgttcatatcacattattttggatgtctggggttgcacctggaagctcagatagcaatatctaggcacggctgccagtgctctatacattsacgtttgtttaatattttaatttccccatgagtcttaaacctctgcgtggtgtgcaagttgaggcctggtgtatgcacttcggccacgggctttcccact

SEQ ID NO: 14050 - DNA, 201 bp, Homo sapiens
aagcggggcaaggggttggagaatgttcatatcacattattttggatgtctggggttgcacctggaagctcagatagcaatatctaggcacggctgccagygctctatacattcacgtttgtttaatattttaatttccccatgagtcttaaacctctgcgtggtgtgcaagttgaggcctggtgtatgcacttcggccac

SEQ ID NO: 14051 - DNA, 201 bp, Homo sapiens
gaaggggacatgctatgtcagagtggagggacatggggaggcaccaggactggtcaagaggcagagggagagggtcaaaccgtgggttctgtggggaggamtgaacgaggcagggtaagtagactagggtttgagtaagttcagcaggctctggggaagaggggctgtccctatttttctggtacctggccctgggtgatt

SEQ ID NO: 14052 - DNA, 201 bp, Homo sapiens
ctcacttagtcatttcactattaaaagagaaaaatagttagtttacaatttccaggaaatcagacaggtcaccaccacctcttcaacgactggaatttgcrcagtctcactactcataggcccatctgttactactaacagtgctaatgtgattgtctgtaggtctagcaattggaggttgttcgtttctttgagacaagg

SEQ ID NO: 14053 - DNA, 201 bp, Homo sapiens
gccagagtttttttttcccttgtcttataccagtggtgcctagcatggtgtcaggtttatagaggactaatacatataagaaggagaaagggagggaggargaattccagttgttttttttttaatctaggtacaagtctctctgttgatttctaaacatcgaatgaagatgaaggaaatacttaaagcacctaagcactc

SEQ ID NO: 14054 - DNA, 201 bp, Homo sapiens
ctcttttctgaagtgatggggatattcgatggcaattttgtgttttcttcacttggaaaaactaaaaagtttgcaacatttaaaaaaaatacaacccttaygctgatggatgtacactgtaaaacaaccacgtttggtaaactgttaatcactttcatagtgtatgtggatggagccagttaaaccagttttcatgtcttt

SEQ ID NO: 14055 - DNA, 201 bp, Homo sapiens
ctctcaaagatagacatggacatataaataattttttaaaatcctcttttgcaaaaaaaaaaaaaaaaagaggtgaatttagttgaaaggatatagccacwcttttctgaagtgatggggatattcgatggcaattttgtgttttcttcacttggaaaaactaaaaagtttgcaacatttaaaaaaaatacaacccttatg

SEQ ID NO: 14056 - DNA, 201 bp, Homo sapiens
cttatttgtcttttggcttgtatcccacctgttcactttttaccatagctaacctttctaagtggtcaggtgggactcatggagattttccgttctttggmgactagcagcgactgcagattactcatcagctgtctccttgagtccacaatgccgggcggtggacgggcttcctgcctcctggcccagggcccctttgcc

SEQ ID NO: 14057 - DNA, 201 bp, Homo sapiens
tcttgctctgttgcccaggctggagtgcagtggcatgatggcatgatcatagttcactataatctcgaactcctggtttcaagtagtcttcctgccttggsctcccaaaatgctaggaatacaggcaggagccactgttactggtctgtttttttccttaaatacataggcaacttcctcgattgtctctcctttattggc

SEQ ID NO: 14058 - DNA, 201 bp, Homo sapiens
ttaaacagagacagatcttgctctgttgcccaggctggagtgcagtggcatgatggcatgatcatagttcactataatctcgaactcctggtttcaagtartcttcctgccttggcctcccaaaatgctaggaatacaggcaggagccactgttactggtctgtttttttccttaaatacataggcaacttcctcgattgt

SEQ ID NO: 14059 - DNA, 201 bp, Homo sapiens
tgattgccagtccattctctagccttctgaagaagatagattgtaatctttaattaagctatcactcacaccaaaaaaaaaaaaaaaaaaaaaaaaaaagyggggcaaggggttggagaatgttcatatcacattattttggatgtctggggttgcacctggaagctcagatagcaatatctaggcacggctgccagtgct

SEQ ID NO: 14060 - DNA, 201 bp, Homo sapiens
tttggcagttacctgaaagaaaatttagtgattgccagtccattctctagccttctgaagaagatagattgtaatctttaattaagctatcactcacaccmaaaaaaaaaaaaaaaaaaaaaaaaaagcggggcaaggggttggagaatgttcatatcacattattttggatgtctggggttgcacctggaagctcagata

SEQ ID NO: 14061 - DNA, 201 bp, Homo sapiens
accacccttacatatcccagtgtatatggtagccaaggacagtactgtttgagcctcccccattaagtgtcaacattgaatcaatgcaatcccatgcaaasaaagctgagcatgggattgtgccggtttagccagctaaagtgtggtctctgatgctgatcatgactatgaaaagggaaaatggaggagaatgatgacgaa

SEQ ID NO: 14062 - DNA, 201 bp, Homo sapiens
gggtgtgagagtggcacattccacaggaagggaaccctgcatgtccatgtgccatgtgccatgtgccatcttagagacgtaaaaacactttgtatgtttgsggtacaactcagtaacccattggtgcagatatgtgattcttaggatggcccacatgggtctctttcacacacccacgtgcatgacccaagtgagcaaaca

SEQ ID NO: 14063 - DNA, 201 bp, Homo sapiens
tgttcgtctcagcctcccaaagtgctgggatgacaggcatgagccaccgcacgcagcgtattgctttatattttaagactatacactgatatccccgagcmcccaagttcctgtccgctggtagaattcacaaagctggttttatgtctccttctcttcctcttccagtgttgtcttttccctgcattgagatagcattgc

SEQ ID NO: 14064 - DNA, 201 bp, Homo sapiens
ctccaggctgtgtgacagagcaagaccccatctctaaataagtaaataaatgcctctgtgaatccatttcattgcattggaaagacctccaggattctctscagaagaatctttcccaacataaaatccattgttaatcacatttgacacacatgtgtgcccatgtctctgggcctgtgtccataggcatctacgtcactg

SEQ ID NO: 14065 - DNA, 201 bp, Homo sapiens
attttattttttttgagacagagtctctgtctccaggctggagtgcagtggcacaatctcagctcactgcaacctccacctcccgggttcaagcgattccmctgccctgatcagcttcctgagtagctgggactacaggtgcgcgctatcatgcctggctaattttttgtattttagtagagactgggttccaccatggtg

SEQ ID NO: 14066 - DNA, 201 bp, Homo sapiens
ttttttattttattttattttttttgagacagagtctctgtctccaggctggagtgcagtggcacaatctcagctcactgcaacctccacctcccgggttyaagcgattccactgccctgatcagcttcctgagtagctgggactacaggtgcgcgctatcatgcctggctaattttttgtattttagtagagactgggtt

SEQ ID NO: 14067 - DNA, 201 bp, Homo sapiens
aaatattctagtatttgccaaaactagaggatgaatgagtgatgggtaagagagttctcagaaaaatggatataaacaatattgtaaatcatatttggaarataaatactagaatcattgaatccctgagttatagaaaaatttattaatagcgctatctggctactttttaaagtgtggacatcctcgatgtattagcta

SEQ ID NO: 14068 - DNA, 201 bp, Homo sapiens
aaggctgcagtgaaccatgatggtgccactgcactccaggctgtgtgacagagcaagaccccatctctaaataagtaaataaatgcctctgtgaatccatytcattgcattggaaagacctccaggattctctgcagaagaatctttcccaacataaaatccattgttaatcacatttgacacacatgtgtgcccatgtct

SEQ ID NO: 14069 - DNA, 201 bp, Homo sapiens
gaactcgctggttctcgtcctcgccctcagcatacttgctcattgtttgtttccatctctatcatctctgtgagccctttgaggatggatgtgtgtccatsttgttaacagttggctccccagtaaccagtacagtgccagatacagagtagtaaccctacattctagcgtaggcaaatattctagtatttgccaaaacta

SEQ ID NO: 14070 - DNA, 201 bp, Homo sapiens
taacctcgatttgtgctccaggtctgagcagaaatgttattccctccagaaagccttccctggatgttgagggatgaagttgtagccccctcccgaatgcrtcctcagaactcgctggttctcgtcctcgccctcagcatacttgctcattgtttgtttccatctctatcatctctgtgagccctttgaggatggatgtgt

SEQ ID NO: 14071 - DNA, 201 bp, Homo sapiens
agactcactagaagtttcagaaagatgcagactgctttaaaaaaaaaaaaaaagggcaaggggaggtgtgagaagaaagtataattctttttcttctaackggagatataaaaatcatataagcatgatttatgatttgattggaacattgtattttatggttgcagagcacacgtatcatcctatctgcttctgacaccc

SEQ ID NO: 14072 - DNA, 201 bp, Homo sapiens
cctctcaaagatagacatggacatataaataattttttaaaatcctcttttgcaaaaaaaaaaaaaaaaagaggtgaatttagttgaaaggatatagccaytcttttctgaagtgatggggatattcgatggcaattttgtgttttcttcacttggaaaaactaaaaagtttgcaacatttaaaaaaaatacaacccttat

SEQ ID NO: 14073 - DNA, 201 bp, Homo sapiens
aatgtcagagccctaaatggtatgaaaaataggcaacttgggtcatgccactacagatcgacacccactaaatccttttaatttagtctagtgcaacaagkatttgtgtaagtgtcctctgccctggacaccggtgaggtcaccgtgggaatggctgggcaggaacaaagccttttgtttccagctgagtttccttttctg

SEQ ID NO: 14074 - DNA, 201 bp, Homo sapiens
taccaagtcatttggtttacatcgggaatgccttttgtcgttatgtctagacccctggagaacagcccacggcaatgcacttgtggaaattcggactgtgrattacactgagtaacaatcctaataatacctgcacacaatcagttgcctgtccaaaaagcaataaagaacctctagattttgtggtcaccatattaatca

SEQ ID NO: 14075 - DNA, 201 bp, Homo sapiens
cactggtgtgtggggtcataccaagtcatttggtttacatcgggaatgccttttgtcgttatgtctagacccctggagaacagcccacggcaatgcacttstggaaattcggactgtggattacactgagtaacaatcctaataatacctgcacacaatcagttgcctgtccaaaaagcaataaagaacctctagattttg

SEQ ID NO: 14076 - DNA, 201 bp, Homo sapiens
gacggtggaaagagaggactgctcctagcgtgagagtgtcagggaagcttgctgggggaaatacaaggaaggaagagaatgcaggcagctcaaaagagccsggcaaggagacctgcagagcgagcggaggcctggtttctgtgaagcacagggcaggaaaatccaaactcacttgagtacacgctcagggtcatgggcttg

SEQ ID NO: 14077 - DNA, 201 bp, Homo sapiens
ggaggcctcaggaaacttacagttatggcagaaggtgaaggggaagcaggtaatgtcttcacatggctggcactggaggaagagagaaagtagggaggtgstagatgcttttaaacaaacagatctcaggagaactctttcacaagacagcactagggggatggtgattagaaagcacctcatgatcccgtctacttcctg

SEQ ID NO: 14078 - DNA, 201 bp, Homo sapiens
agggaagagcagggatagaagtgggctccgggtctaggagacggtggaaagagaggactgctcctagcgtgagagtgtcagggaagcttgctgggggaaayacaaggaaggaagagaatgcaggcagctcaaaagagccgggcaaggagacctgcagagcgagcggaggcctggtttctgtgaagcacagggcaggaaaat

SEQ ID NO: 14079 - DNA, 201 bp, Homo sapiens
ccctgaggagcgggattcgctgacccatgctggcagaacgggtgatggatgaggcagagaagggtacaggctggctggaccatgcgatggggaatgcaggyggaacaggcttcctcctgaatcaggagtggaagaggagtctggggtgaagccaaggggaagacagttaagctttaaaaaaccaactgcccagccgggcgc

SEQ ID NO: 14080 - DNA, 201 bp, Homo sapiens
atttgatcctggagttgctgtaatggcaagaaaaaccatggcctccagccccagtgttgaagttttgacgctaatgtgatgataattctcttttctttgastggggacttgcctttgtttatctttttttgttgttttagccatgaaatatcacatgtaaatagccgaggatatctgggctctgagtctttaaaaggcaac

SEQ ID NO: 14081 - DNA, 201 bp, Homo sapiens
aacgcagaatgcagaggccatgcctgcagatcaggggtgctagaggataggcaagaagtaaagtggccaccctatctcgtgttgagagcatgctagtctcygaacggcctgccagggtgcctgacagccagagccacctaatgggcctatttgatcctggagttgctgtaatggcaagaaaaaccatggcctccagcccca

SEQ ID NO: 14082 - DNA, 201 bp, Homo sapiens
agagggagaggacagtaaccaataccgctccttctacatgatcagtgttcaggttgaagacaaacagggctccaattatgttgtgatttagaaggcgacaragctgagacctcaccctctgcttatgggctgcatgcctttctcagtgaaataacgcagaatgcagaggccatgcctgcagatcaggggtgctagaggata

SEQ ID NO: 14083 - DNA, 201 bp, Homo sapiens
aagcccacattttaaagggaatttggtatttttaacaaagcatcagggggccgggagcagtagctcacgcctgtaatgccagcactttgggaggccgaggygggcggatcacaagatcgggagatcgagaccattctggctaacatggtgaaatgctgtctctactaaaaatacaaaaagaaattagctgtgcgtggtggc

SEQ ID NO: 14084 - DNA, 201 bp, Homo sapiens
gacactggtctgcacaatgagtgtttttgtatatgaaccgaaaaacaggtagcaaaagcaaaaatagacaactgggattacaacaatctaaaaaatttctktacagaaaggaagcaatgaacagagtgaagcagcatcctacagaaagagagagaatatttgcaaaccacacatgtgataagggattaatattcaaaatgt

SEQ ID NO: 14085 - DNA, 201 bp, Homo sapiens
cttctgttaggtgtatctctgctcatgcttgagagtggtggtgtttggaaagactcaatagcatatgcacatgaggaagttgaccaaatgattccacagcrcatactcattttttgctctgattctagcttttcctccaattttattcagaatttgttcttttcttacctcacaccatatagaaaaatcaactcaaagtgg

SEQ ID NO: 14086 - DNA, 201 bp, Homo sapiens
ggcaggaagattgcttgagcctgggacgtcaaggctgcagtgaaccatgatggtgccactgcactccaggctgtgtgacagagcaagaccccatctctaartaagtaaataaatgcctctgtgaatccatttcattgcattggaaagacctccaggattctctgcagaagaatctttcccaacataaaatccattgttaat

SEQ ID NO: 14087 - DNA, 201 bp, Homo sapiens
actctgggaggccaagatgagaggatcacttgagcctagaagtttgagaccagtcagggcaatatagactacctgcaaaaagaaaaaaaaaaaaatgccakgtgtagtggtgtgcgcctgtagtcccagctactcagggggctgaggcaggaagattgcttgagcctgggacgtcaaggctgcagtgaaccatgatggtgc

SEQ ID NO: 14088 - DNA, 201 bp, Homo sapiens
aaaaaattgaggtgaaattcacataatataagattaaccatttcaaagtagacagttcaatagcagtacattcacaatggtgtgtaaataccgcatctathtatttccaaaatatttgtatctccccacaataaaagtctgtaccaattaagcagctactacccattcctcttccctaccattctaccttctgtctcagta

SEQ ID NO: 14089 - DNA, 201 bp, Homo sapiens
cttgtacttcttttaggctatttttccacctggtactatttggctttactgactgccctcattccccatacaccaccttgttttgttcagattcccctaartcttcattctcgtcccacctccccatcactcctgactacttgaaacacgacttctgtcctcagaaggcagcagtgttccctcctcccgttcatttttcat

SEQ ID NO: 14090 - DNA, 201 bp, Homo sapiens
aaatctcataatgttttaagaaagtttatgaatttgtgttgggccagattcaaagttgtcctgggccgcatgtggcccaccagccatggtttggacaagcytagtctacaggttcttcaagaggggcttgagcatttgaaagacttctagtgggagagatcacaaggtacaagtagaaaatcctgggctggcctgagaggc

SEQ ID NO: 14091 - DNA, 201 bp, Homo sapiens
tggctgcacataatatacaattgttgatgagctaaaaaaaaaaaaatccccaaaaaatctcataatgttttaagaaagtttatgaatttgtgttgggccasattcaaagttgtcctgggccgcatgtggcccaccagccatggtttggacaagcttagtctacaggttcttcaagaggggcttgagcatttgaaagacttc

SEQ ID NO: 14092 - DNA, 201 bp, Homo sapiens
ctgaattatggagttttagttttgctttagaatttttggatgattagacttgtacttcttttaggctatttttccacctggtactatttggctttactgamtgccctcattccccatacaccaccttgttttgttcagattcccctaagtcttcattctcgtcccacctccccatcactcctgactacttgaaacacgact

SEQ ID NO: 14093 - DNA, 201 bp, Homo sapiens
ccaaacttttggcttccctgggccacattggaagaaaaagaattgtctttggctgcacataatatacaattgttgatgagctaaaaaaaaaaaaatccccraaaaatctcataatgttttaagaaagtttatgaatttgtgttgggccagattcaaagttgtcctgggccgcatgtggcccaccagccatggtttggacaa

SEQ ID NO: 14094 - DNA, 201 bp, Homo sapiens
ataaacacatttatagttctcagagattccttgagagaggaacatctttaaatggataaccacagtcttctaaacacctgaaagggtgtcttttgctgaaytatggagttttagttttgctttagaatttttggatgattagacttgtacttcttttaggctatttttccacctggtactatttggctttactgactgccc

SEQ ID NO: 14095 - DNA, 201 bp, Homo sapiens
gtgtccaaacttttggcttccctgggccacattggaagaaaaagaattgtctttggctgcacataatatacaattgttgatgagctaaaaaaaaaaaaatycccaaaaaatctcataatgttttaagaaagtttatgaatttgtgttgggccagattcaaagttgtcctgggccgcatgtggcccaccagccatggtttgg

SEQ ID NO: 14096 - DNA, 201 bp, Homo sapiens
attatgccagattaagaaaatgaaatctgactgtaaattacttctctaggagcaaatgattgcttgattctattgtagaaaataaaaattttttacttaaaccacacaaattaaaaaatggaactcactttcacagtcaagagttacttctatttttttttacagtaaatgcgctctttaagatgttgcaagctcaattca

SEQ ID NO: 14097 - DNA, 201 bp, Homo sapiens
gagagagaaaaaaataattcctagatctagagttggtgtgaggctaaaataagctgcttttagtatcacatttggcaagtagtaaactctggataaatatrcttttgaattgtgtgattattgttgttaccatttattgaaagggaatgatgaatgtagtgagagaaggaaggaagagagagagggaagaaggggaaaaag

SEQ ID NO: 14098 - DNA, 201 bp, Homo sapiens
agagttgacggagaggggacaggaggtgactagatttggaaggaaaattagaaaacttttggccgggcatggtggctcatgcctgtaatcccagcactttygggtcagttgagtctaacataggggtgtccaaacttttggcttccctgggccacattggaagaaaaagaattgtctttggctgcacataatatacaattg

SEQ ID NO: 14099 - DNA, 201 bp, Homo sapiens
catgattcaattacctcccacctggtccctcctgcaacatgtgggaattcaagaagagatttgggtgggtacacagccaaaccatatcaaaaaccatttayaaaactctaagcagccttaaaggaaaccaccaagggaccaaggcctgatgaagcaagagtaggagggaacagatgcttggatagggcaggtgagtcacag

SEQ ID NO: 14100 - DNA, 201 bp, Homo sapiens
caggcaagaaagaacttgtgtagggaaactctcccttatgataccgtcagattccttgagacttatttgctattgtgagaacaccttgggaaagacctgcytccatgattcaattacctcccacctggtccctcctgcaacatgtgggaattcaagaagagatttgggtgggtacacagccaaaccatatcaaaaaccatt

SEQ ID NO: 14101 - DNA, 201 bp, Homo sapiens
ggcgacacagtgatggcagaaggtgaaaggcacatctcacatggcagcaggcaagaaagaacttgtgtagggaaactctcccttatgataccgtcagattycttgagacttatttgctattgtgagaacaccttgggaaagacctgcctccatgattcaattacctcccacctggtccctcctgcaacatgtgggaattca

SEQ ID NO: 14102 - DNA, 201 bp, Homo sapiens
gctggggaggcgacacagtgatggcagaaggtgaaaggcacatctcacatggcagcaggcaagaaagaacttgtgtagggaaactctcccttatgataccrtcagattccttgagacttatttgctattgtgagaacaccttgggaaagacctgcctccatgattcaattacctcccacctggtccctcctgcaacatgtg

SEQ ID NO: 14103 - DNA, 201 bp, Homo sapiens
gtggcagagggagaggacagtaaccaataccgctccttctacatgatcagtgttcaggttgaagacaaacagggctccaattatgttgtgatttagaaggygacagagctgagacctcaccctctgcttatgggctgcatgcctttctcagtgaaataacgcagaatgcagaggccatgcctgcagatcaggggtgctaga

SEQ ID NO: 14104 - DNA, 201 bp, Homo sapiens
agagtatgtgcgccttctttttggttaccctggaccagacattcctcagcactggcttgcattggcaggaggtggcagagggagaggacagtaaccaataycgctccttctacatgatcagtgttcaggttgaagacaaacagggctccaattatgttgtgatttagaaggcgacagagctgagacctcaccctctgctta

SEQ ID NO: 14105 - DNA, 201 bp, Homo sapiens
ttgaggttctttccaagtaaaggcgttattctttgtggtgtgctcctggaggtcactaacaaaacgtctccagcaggtgttgtgtggattcccccaaatcygtaggctcttatttcctagacatgaagagtatgtgcgccttctttttggttaccctggaccagacattcctcagcactggcttgcattggcaggaggtgg

SEQ ID NO: 14106 - DNA, 201 bp, Homo sapiens
aaacagccagctattctgatcatttgaaatctggaacattctttcctacggtggttgacttttcactgcctttgaggttctttccaagtaaaggcgttatyctttgtggtgtgctcctggaggtcactaacaaaacgtctccagcaggtgttgtgtggattcccccaaatccgtaggctcttatttcctagacatgaagag

SEQ ID NO: 14107 - DNA, 201 bp, Homo sapiens
ggagaccagactccaagttctggcctcacgttgcttggtatacatcactcagttctgttggcatggatgctcctcctataccccatcagccatcttgcagwatgggtttggtggatcacacagggattcagataagagggttcagatccttctatccatcaacccacccatccacatcactgaaaaagggactctcagatg

SEQ ID NO: 14108 - DNA, 201 bp, Homo sapiens
ctatatgatcatatgattttcctttagctttttgatatggtggactatattgattttaaatattgaaccagccttgaagacctggaataaatcccacttgstcatggcatatatgtttttttatacattgttggatacagtttgctaacattttgtggatagctcaccaacttttattcagaaaacatccgtctcagttta

SEQ ID NO: 14109 - DNA, 201 bp, Homo sapiens
gacttcttgtgcctgtagagtttattcatatcactctttgcttgctcagcagttgaaatgggatggaggaaagccccctaactccaaaaaaaaaaaaaaaactttcttcccagcctgagacagttgccataattagtaacctgcagctcccttgatatcttgatgatactttattaaaacaaacaaacaacaaaaaacaca

SEQ ID NO: 14110 - DNA, 201 bp, Homo sapiens
agaattggcaggaagggcacaggggcaaggtataggctcacgtctccacattctgcacctcccaggctcctgccattgatgtgagcgggttcctgtactgyatgaagcaggggtttgcatccgaaacaaccacccgtgctgaatatgtaggtgatacgttgatctgtacagcaaaccaccatggcacacatttacctatgt

SEQ ID NO: 14111 - DNA, 201 bp, Homo sapiens
taagatctgtctgcactccttttgtctggcctgtacctgccttttctgaatgaccctgttaattgcaattgactctcatagaatgtggatagcagtgccasttgacaccagactaatgcttctgacttttccatggtgccccagcagcaggctggagggaagggcgggggcggtcagaggagagatagagcacttcagatt

SEQ ID NO: 14112 - DNA, 201 bp, Homo sapiens
agatacccagccaatggtccacagtgatgtaactcatcagtggtccacctgacattggaaattcggttgctttggaaccttctactacatcccctttccttactcactgacatcattcccagatcaaagaaagataaaagaaggaagggctggagacgttgttttcctgtatgctccttgatgaagggctcagagctaagc

SEQ ID NO: 14113 - DNA, 201 bp, Homo sapiens
acatatcagtcattttttgaggaaaataaatttaaggcttggttatcggtccttgagtcagcacattgagcgttttgtcaattagctcctccccccatctktatggtatggcttttcctgtaattacagtcaagatcctatagccggaggaaggcctgtcaattgagtaagaggctgatgttcatcgcacagtgacagccc

SEQ ID NO: 14114 - DNA, 201 bp, Homo sapiens
ggacaacatatcagtcattttttgaggaaaataaatttaaggcttggttatcggtccttgagtcagcacattgagcgttttgtcaattagctcctcccccmatctgtatggtatggcttttcctgtaattacagtcaagatcctatagccggaggaaggcctgtcaattgagtaagaggctgatgttcatcgcacagtgac

SEQ ID NO: 14115 - DNA, 201 bp, Homo sapiens
aggtaccttggaaagactgcatctcctggattttgcatggttctggcttaatggacaacatatcagtcattttttgaggaaaataaatttaaggcttggtyatcggtccttgagtcagcacattgagcgttttgtcaattagctcctccccccatctgtatggtatggcttttcctgtaattacagtcaagatcctatagc

SEQ ID NO: 14116 - DNA, 201 bp, Homo sapiens
ctaaattatgccagattaagaaaatgaaatctgactgtaaattacttctctaggagcaaatgattgcttgattctattgtagaaaataaaaattttttacytaaaccacacaaattaaaaaatggaactcactttcacagtcaagagttacttctatttttttttacagtaaatgcgctctttaagatgttgcaagctcaa

SEQ ID NO: 14117 - DNA, 201 bp, Homo sapiens
ctagggtgttgataagaaacagcaggcatagttactgggtgattgagaagagtttaacaaaagactatattagtctgttttcatgctactgataaaggcayacccaatactaggtcatttacaaaagaaaaaggtttattggacttacagttccttgtggctggggaggcgacacagtgatggcagaaggtgaaaggcaca

SEQ ID NO: 14118 - DNA, 201 bp, Homo sapiens
tagctagggtgttgataagaaacagcaggcatagttactgggtgattgagaagagtttaacaaaagactatattagtctgttttcatgctactgataaagrcatacccaatactaggtcatttacaaaagaaaaaggtttattggacttacagttccttgtggctggggaggcgacacagtgatggcagaaggtgaaaggc

SEQ ID NO: 14119 - DNA, 201 bp, Homo sapiens
ggattgatactagctagggtgttgataagaaacagcaggcatagttactgggtgattgagaagagtttaacaaaagactatattagtctgttttcatgctwctgataaaggcatacccaatactaggtcatttacaaaagaaaaaggtttattggacttacagttccttgtggctggggaggcgacacagtgatggcagaa

SEQ ID NO: 14120 - DNA, 201 bp, Homo sapiens
ctttctgttataaaatcatgtttttattgaattacattttaatattggtatcactttaaaatgaaaatgagtacttgcaaaatgtatttttgaaggagttkggtggtggtggggggatgccattttggcaacagatgacttcggttcaagtcctctctctgtctcttacttgctttgtggctttagaccagccacccactc

SEQ ID NO: 14121 - DNA, 201 bp, Homo sapiens
ttttttttctttttcccttatgcatttgggagtggaagagctgtcagattctgaatttagttagatttataatgctagagacattcagcagtctgcctttycctttctgttataaaatcatgtttttattgaattacattttaatattggtatcactttaaaatgaaaatgagtacttgcaaaatgtatttttgaaggagt

SEQ ID NO: 14122 - DNA, 201 bp, Homo sapiens
ctacaataactttttcagtctctttctccctttcccaccttcccaaaagggtgggaaatttttaaagtaaagtaataaacaaataagttttgggttgggcrggagattagttagagacaggatctgtaggtcagaagtggtatttgggggagtagggagttttttttttttttctttttcccttatgcatttgggagtgga

SEQ ID NO: 14123 - DNA, 201 bp, Homo sapiens
gcacaactgaactccagcctgggcgacagaggaagactctgtctcaaaataaacaaacaaataaataaataaaaattgtttaaacctgccaactacaatawctttttcagtctctttctccctttcccaccttcccaaaagggtgggaaatttttaaagtaaagtaataaacaaataagttttgggttgggcgggagatta

SEQ ID NO: 14124 - DNA, 201 bp, Homo sapiens
tttttgatttggtttggttctttggagttgtttgcatttcgtgagtcttggcatctttttggtagagaaccttgctaggttctcacaatgtagaaattaarcagaaaacagaggtctcaatttgccttttcagcgtgaatgcagactcttacattcagtgctgggagtctttcttgagggacagtgagagcgaggaagggt

SEQ ID NO: 14125 - DNA, 201 bp, Homo sapiens
tactaagaaacttttgaaaatgataatgggtgtgtactttttatcaactgctttttgtatgccaatctatatgatcatatgattttcctttagctttttgrtatggtggactatattgattttaaatattgaaccagccttgaagacctggaataaatcccacttggtcatggcatatatgtttttttatacattgttgga

SEQ ID NO: 14126 - DNA, 201 bp, Homo sapiens
gattcttctcaattcctaaattactaagaaacttttgaaaatgataatgggtgtgtactttttatcaactgctttttgtatgccaatctatatgatcatawgattttcctttagctttttgatatggtggactatattgattttaaatattgaaccagccttgaagacctggaataaatcccacttggtcatggcatatat

SEQ ID NO: 14127 - DNA, 201 bp, Homo sapiens
tttatttttgtttgtatttgttagtttttttgagatttcttgggattttctatctagcctgtcatgtcatatgcaaatagagaattttatttcttcctttrtaatatgtgtgccctttttttattgccttattgtagtggctagaacttcctgtgctatgttgaacaagagtagtgagaacatccttgccttgctcctgat

SEQ ID NO: 14128 - DNA, 201 bp, Homo sapiens
gttttttatttttgtttgtatttgttagtttttttgagatttcttgggattttctatctagcctgtcatgtcatatgcaaatagagaattttatttcttcytttataatatgtgtgccctttttttattgccttattgtagtggctagaacttcctgtgctatgttgaacaagagtagtgagaacatccttgccttgctcc

SEQ ID NO: 14129 - DNA, 201 bp, Homo sapiens
gcctatcatataggaatgatagaggcagcacagtgctgtaatggaaaccataagggcacgcacaatggctcatgcctgtaatcccagcactttgggaggcmgaggcgggaggatcacataagaccaggagtttgagaccagcctggccaacatggtgaaaccccatctctactaaaactacaaaaatagccaggtgtcctg

SEQ ID NO: 14130 - DNA, 201 bp, Homo sapiens
cataagaccaggagtttgagaccagcctggccaacatggtgaaaccccatctctactaaaactacaaaaatagccaggtgtcctggtgcatgtctgtaatyccagctacctgggaggctgaagcatcagaatcgcttcagcttgggagctggagcttgcagccagccaagatcacaccactgctctctatcctgggagaca

SEQ ID NO: 14131 - DNA, 201 bp, Homo sapiens
ttctttggagcgattgtaaatggcattgtgtttttaattccaacttctacatatatctagaaatatgattgagttttgtgtgttgatcttgatcctatgascttgctgattgcatttattataaagttccaggagttttttatttttgtttgtatttgttagtttttttgagatttcttgggattttctatctagcctgtc

SEQ ID NO: 14132 - DNA, 201 bp, Homo sapiens
tgggtatctttctggcttctttattccactgatctatgtgtctgtctctctgacaattatacgctgtcttcattactatagctatgtagtaagcctcatgycaggtagagtgattcttctcactgtattcttttttattaagattattttagcttcctaagacctgtgctttttcatataaattgtacaatatggttgtct

SEQ ID NO: 14133 - DNA, 201 bp, Homo sapiens
gcctaggaacatctcattgttttagcaccatttgctgaaaatgatcttcctccagagaatttttttacctttattcaaaatgaattgagcatgtttgtgtrggtatctttctggcttctttattccactgatctatgtgtctgtctctctgacaattatacgctgtcttcattactatagctatgtagtaagcctcatgtc

SEQ ID NO: 14134 - DNA, 201 bp, Homo sapiens
tgaactcctggcctcaaagcgatcctcctgtctcagcctcccaaagtgtggagattacaggcatgagccactgcacacagccaaggtcagctttttcactycagcacaccaggattttcatcccagctctccaatcccccagctgtgtgggcctggtcaacctgtttagcctgtcaagacttcagtcccttcaactgatag

SEQ ID NO: 14135 - DNA, 201 bp, Homo sapiens
tacaaaaactgttaccgcctaacacattaaatgtatttaaattatttgttctattaaaatgtcagtgtatttcttgaattttaactgtgcctgaagatcartcattgtaacagctgcagggaaggctttatgacttacctgaacggtggtgtattctgtggctcggctaagtggattcttcgactttaatagattttacta

SEQ ID NO: 14136 - DNA, 201 bp, Homo sapiens
caaggtgttgatagaaccccttagtgtcctcctcataccacagacactctcttcccccacttacttggccaattttttttttttttttttttttttttggkggagtctcgttctgtctcccaggctggagtgcaatggtgcgatctcagctccctgcaacctctgcctcccatattcaagggattctcctgcctcagcctc

SEQ ID NO: 14137 - DNA, 201 bp, Homo sapiens
gaaatgacagtgattggaggtggtttatttttttttaagtctgcttactcggaaaaataaaacaaagttgacaacctgatttcagacctcccaattttttsttaaaaaaaataaaagtcttcttggtccatgaaatccagaaactggagaccaaactagcaaattcgcaaggagctgcttgatagaaaaacacttgagatc

SEQ ID NO: 14138 - DNA, 201 bp, Homo sapiens
tggatggtttaataaataagattgatacaaacacaaagcattaagcaaacaaaaggaaataaaaacggcaacaaataaaacttctgtgctttttgaaattytgtttttggcaggcaacattccaaagatctttttcatttaaagtccaggagtcttctgtgtgaaccccacacaggtaccttggaaagactgcatctcctg

SEQ ID NO: 14139 - DNA, 201 bp, Homo sapiens
attattccttaaacaatccaacataaccactatttatatcgtgtttatattgtattaggtattataagtaatctagagatgatttaaagtgtacaggagcrtcacatacattatatgcaaatactatacaattttatgttagggacttgagcatttgtggattttggtatttgggggggttccttgaaccagtcccctttg

SEQ ID NO: 14140 - DNA, 201 bp, Homo sapiens
tgatgtaggaatgaacagatgaacaaccccacacaacctaaggacaactttgaatcaattcttctaagctggtagcagaagccacctttccatttgacttstatctcgctctttttttctttcttttttttttttttggagacagagtctcactctgttgcctagactagagtgcagtggtatgatctcagctcactgcca

SEQ ID NO: 14141 - DNA, 201 bp, Homo sapiens
gtgtgactaatattagaagcagacacagccatgatgagcaatactctttttttgtttatttttgttgttactgctgtaagccactttcttctccctctccrttaaaatgcaacttaattggtaaagtttagttgactagagatttcatttatttatttatttatttatttatttatttatttgtttgtttgtttgtttgag

SEQ ID NO: 14142 - DNA, 201 bp, Homo sapiens
cttgataaaggttggggtttgtaagcttggggctcctcagccatgactgaaacgtactatgagcacggcatctaccgggctgttccacatcctccctgtgkgactaggggccagggcaatgggaatcagtgcagaaataaagctcatgctgtttgctctgccatgagtaacgaagtcctctgtatctgatcctgggtctcc

SEQ ID NO: 14143 - DNA, 201 bp, Homo sapiens
acagttgtattcctaagacatagttgggaccagacctcaagaaaatagccaacaaatactgggtgaatgaacgaaagaggccatatgcagtcagcccccctctctctgggttctacatatgtagatttaactaatgacagattaaaagcattcgaacaaacggagggtggtatctgtactgaaaatgtaccaactgctttt

SEQ ID NO: 14144 - DNA, 201 bp, Homo sapiens
cctgcaattctttgtacatatgaaatttaatatggtgagattggcatctagctgctgctagagatagtgctcataataatttttaacattgattgagtgtrgataataatccaggagctgtgctaaacgttttacaacacattatctcacttaatttcacaactccataaagtagttttcacttagttgagggatgaaaaa

SEQ ID NO: 14145 - DNA, 201 bp, Homo sapiens
ctgcctcctgtccctatcattgatacctgcaattctttgtacatatgaaatttaatatggtgagattggcatctagctgctgctagagatagtgctcatartaatttttaacattgattgagtgtggataataatccaggagctgtgctaaacgttttacaacacattatctcacttaatttcacaactccataaagtagt

SEQ ID NO: 14146 - DNA, 201 bp, Homo sapiens
ctggcaggggatgcccgtgacccctgaaaccctaaaaggagtgttacagtcagtgctcttttagttttgccatccacggacggcttaagtgttaacagttsagtggagggtcagcgtgacagccttttgcacccacatctgggttcttgtccagtgtccaggaggaatgaggtctcatgagcaaattttaaggatggcaaa

SEQ ID NO: 14147 - DNA, 201 bp, Homo sapiens
aagtatcacttatcctacgttccatgtaagatctctttcctagggtaaacttgatatggaaggtcttcacagattaaaacgaaggaaaaaaaaaaaaaaaactagataaatctccctggacatgaacttttgtagaagtagttacaatgctagtgacctcatatactcatggtaacggcttccggcatccaatgaccttgc

SEQ ID NO: 14148 - DNA, 201 bp, Homo sapiens
tgaagcaggaaatttccctgacccctttgcaggcaggaagtggagtgcggatgctggaactagctggctgctttggtgccagtagaggtgaactgcactcwcttgaaccccctgcactccaccccttctgggaggaagcatgcaggtgagcaggtgcaggagccagggtaaatgcttttgggcactggcaggaatgaactc

SEQ ID NO: 14149 - DNA, 201 bp, Homo sapiens
cttaatctcccttttccatgggcccaacacctgaatctagggcaaacaggtgtcccccagattggatcctctgctctaggacacattcttgtcctagagcrggttgggcaagaggcttttctctcagtcaccagccccaaaccctgtggtcttgccagcccaggacgtgtcaagactgcagcctttgctgacctgtgacca

SEQ ID NO: 14150 - DNA, 201 bp, Homo sapiens
tataattttgatgaaagaagtttcccaacagtatttcggtgtgcatgctcacacaccagccctggtcgtcagtgaacagattcttccaggtcttcattgtrgcggaagaaagtgagatcagagatcccgaggaagggcttcagtttcaccagtagtggagctagggagtaggggggcagaagccgcaggaagtcagtgcag

SEQ ID NO: 14151 - DNA, 201 bp, Homo sapiens
tgcttctgacacccagtaagcagctctggcttttataattttgatgaaagaagtttcccaacagtatttcggtgtgcatgctcacacaccagccctggtcrtcagtgaacagattcttccaggtcttcattgtggcggaagaaagtgagatcagagatcccgaggaagggcttcagtttcaccagtagtggagctagggag

SEQ ID NO: 14152 - DNA, 201 bp, Homo sapiens
gattggaacattgtattttatggttgcagagcacacgtatcatcctatctgcttctgacacccagtaagcagctctggcttttataattttgatgaaagargtttcccaacagtatttcggtgtgcatgctcacacaccagccctggtcgtcagtgaacagattcttccaggtcttcattgtggcggaagaaagtgagatc

SEQ ID NO: 14153 - DNA, 201 bp, Homo sapiens
ccaacctttttgctggctctctttcaaactgtactgctcactttgggctgtacgttagaaccacctgagaagttctttttctttcttttttttttttgagrtggagtcttcctctgtcacccaggctggagtgcagtggtgggatcttggctcactgcaacctctgtctcctggcttcatgccattctcctgcctcagcct

SEQ ID NO: 14154 - DNA, 201 bp, Homo sapiens
ggctgcagcagtgtctaggtatctgtgaatgtgtaagaaattgagacagcctgcaaaatagctcacccagcttttctttaaagttccaacctttttgctgsctctctttcaaactgtactgctcactttgggctgtacgttagaaccacctgagaagttctttttctttcttttttttttttgaggtggagtcttcctctg

SEQ ID NO: 14155 - DNA, 201 bp, Homo sapiens
tttgggaagttcccaaatctgtcagtatatattacaaaaactgttaccgcctaacacattaaatgtatttaaattatttgttctattaaaatgtcagtgtmtttcttgaattttaactgtgcctgaagatcaatcattgtaacagctgcagggaaggctttatgacttacctgaacggtggtgtattctgtggctcggcta

SEQ ID NO: 14156 - DNA, 201 bp, Homo sapiens
tgtgggcccttctctttcctcgtgatgcacggtgatagtgcgtatctaacacttgaaggtgtccacgctggccctagctcagtgagatggctttgctttgsgggggtgagggggcggaggtggtggaaaggcagcaagctacgatgttcttatgtgtgtggccttgcttctggtggtggggtggcacacatgctctgtagt

SEQ ID NO: 14157 - DNA, 201 bp, Homo sapiens
catctgggaagaggtaacattgatcttaattgttattagagagaattttcaatttcagttgtagcatgaaaaatcacagagtccatttatttctcctcttygagtcagtatatctcaaaacattttttcaacgttaatagaaatataagaagtgcctggatcagtttttgtttttgttttgtttctttttgagatagggtc

SEQ ID NO: 14158 - DNA, 201 bp, Homo sapiens
aacacatgacagtttcttgttcatatttggccagaaggaagcagtgtccattaggttgactctccagtgcttcttggtgttgtgataagcccgtctagcayggagggccagaaggaagcagtgtccattaggatgactctccattgcttcttggtgttgtgataagcccgtctagcacggagggccagaaggaagcagtgt

SEQ ID NO: 14159 - DNA, 201 bp, Homo sapiens
cctttgtttttgttgtcatcgttttatgattaacttatatctggtcctttagacatttagattttttctgttttatctctctctctctatatgtatatctrtatatatatttatctatatctatatagatatatatatatatatataaaataatgaatgaaatggactgtttgcaacctcagatgtatttctaggacttag

SEQ ID NO: 14160 - DNA, 201 bp, Homo sapiens
cgtggtcacttgcttgcacacacttgtttagatgtctctgccctgctgttaattagactgtgagcctccagagggtgagactgacatctcatttctctttkcagtcacagcagagatgcaggcccacagtagggactcaccagatgtggcagggtgagggaattgtccatagatgccttaaagatatgctatccacaggag

SEQ ID NO: 14161 - DNA, 201 bp, Homo sapiens
ttggaacaactgcctcactcctgtggccccactgtgccatagacaggttagagaacatgggccctggcatcagacctggcaggcagtcttgattaggcccsttattagggtgctctgggcaagtaagtttacctgtgccagggatgcacctttttaacccaacacttagaggggtcctccatgtacagccatgatcacaac

SEQ ID NO: 14162 - DNA, 201 bp, Homo sapiens
ccttgtgattgaaagcccaagccctgtgatccacagcaggggccacagccagaaataattccccgagaatactgcgtgtgccttcaaatggtccttgatcrtttttcttggatgccccactttccaaaggccagaaattgtttcagggagtcattccagttggggaaggttttatgttctaagagcaaggtgctgtactca

SEQ ID NO: 14163 - DNA, 201 bp, Homo sapiens
ggtaaaaataattctagatgaagatagacccgtttacattccaaggaagggaaatgttttacccaaactgtttccatggaccctgtgggttcttgttaatrctgttcaaccttgtgattgaaagcccaagccctgtgatccacagcaggggccacagccagaaataattccccgagaatactgcgtgtgccttcaaatggt

SEQ ID NO: 14164 - DNA, 201 bp, Homo sapiens
ggccctgatgtcacttcttaggctaatttctgtgaaattgtgattgggaggaaaaagtgaacaggaacttaaagccagcagaggaaagctacctgcccttsactggtggtcagtgcatggattccagagacagggtgggcaccagttcctcaccgggtcctttctagttgcatgacctggggcaggtgactttatgtggct

SEQ ID NO: 14165 - DNA, 201 bp, Homo sapiens
ggtcttctgaagtataggaaaaggcagcttacagaaaaaaacttgcttgtttactgtcttctgagctgatttctcacctactggcaagtggataggtctastttttgtttagctgtttttctaatttaatcttgtacatgagacagctatagatggatgtatagtctttgaagtggggccagttggctccgtctattagct

SEQ ID NO: 14166 - DNA, 201 bp, Homo sapiens
tagtgttggcaaaaggcttgcaatttattattaagtggaataagcagtttaaaaacagtatgtacagggtggttttctggctatataaacacacaggcatwgaaaatagatatacataaataatgttactataatttgtctgcctcccttctctcagaaaagaccaatgaattatctattatgtgccactcactatttgag

SEQ ID NO: 14167 - DNA, 201 bp, Homo sapiens
tttttctccttggcaggttttcactattaatttgcttgacaaaggatagatacattttccatgtgtggaggtaaaagcagtgcagtgagctaaaaagttarcaaaggtgaagtggtcctaatctgcggccctggtacacttagataggcatcattgcctttcctctgagctcttggtgctgataacagcttccttgaccga

SEQ ID NO: 14168 - DNA, 201 bp, Homo sapiens
gctaagttacagcaggtgaacttgaatttgaggaaagacaaagcaaaccctggctattaaaggaacacacacacacacatacacacacacacacacacacmcgtttctggtattaggaaatggagatttctaacataataaaaaagattgaacttaaaaatgacttccattaaatagggtaagaattttgaggtggaatcc

SEQ ID NO: 14169 - DNA, 201 bp, Homo sapiens
gcaccactgctcgcattcccatgttggagttttccctttggggttcttatgccattttaaagactctgaaaacaggaagactttttctcttgggtattttwttttttttttcctctgcaagggatggggtcataagacattggtgaggttaggccttcctttgtctcccaggagcacacttgatagcaatgtagggtgaat

SEQ ID NO: 14170 - DNA, 201 bp, Homo sapiens
agaaagtataattctttttcttctaactggagatataaaaatcatataagcatgatttatgatttgattggaacattgtattttatggttgcagagcacaygtatcatcctatctgcttctgacacccagtaagcagctctggcttttataattttgatgaaagaagtttcccaacagtatttcggtgtgcatgctcacac

SEQ ID NO: 14171 - DNA, 201 bp, Homo sapiens
ccccccccagcttccccacctgtaaaatgatttgctcaaagtttgcaaagaatggaggcatattcaaagtgctcagcactgggccggacccatgggtatgmattcataatgatcagcttcattctctccctttccctctctctccacacctttccattcctcctaactaatgtgggagagaagagaaaattacagtgagag

SEQ ID NO: 14172 - DNA, 201 bp, Homo sapiens
gctttaaaaaaaaaaaaaaagggcaaggggaggtgtgagaagaaagtataattctttttcttctaactggagatataaaaatcatataagcatgatttatsatttgattggaacattgtattttatggttgcagagcacacgtatcatcctatctgcttctgacacccagtaagcagctctggcttttataattttgatga

SEQ ID NO: 14173 - DNA, 201 bp, Homo sapiens
atcttggcagatacttagctgaattccatcgatttagtgataaaatgggaacagtagtaatggtgcagattagagaaaaaaatgtgatttgtgcattcatwtgtctgtgtgtacatatatgtatatgttctgtgtatatgtagacatgtatagatgcatgtgtgtacgtatacacgcacacatacataaattgtgtacata

SEQ ID NO: 14174 - DNA, 201 bp, Homo sapiens
gattaaatacaatgatgtaacctacttgaaagtgtcatataaattctgaggtgaagtggaggcattatggatgcattttattttgttttattttatttcayttattctttttttgaagaggtatgggtcaagcagatctgcagcccacactcggctcactgatcacgtcccatacaatcttggcagatacttagctgaatt

SEQ ID NO: 14175 - DNA, 201 bp, Homo sapiens
agctgcaggatcacttgctttagatggaatcacccagcggatggcgtttaactctgctttaaaccccttcatggcttcccaccacacttacaaatacaactccttatcctgtcagcaggggcttgcttaatctgaccctttccacatatgctggatcacttcacgcctccctgttctttcaattccttgaacacaccaagt

SEQ ID NO: 14176 - DNA, 201 bp, Homo sapiens
gcagctgcaggatcacttgctttagatggaatcacccagcggatggcgtttaactctgctttaaaccccttcatggcttcccaccacacttacaaatacatctccttatcctgtcagcaggggcttgcttaatctgaccctttccacatatgctggatcacttcacgcctccctgttctttcaattccttgaacacaccaa

SEQ ID NO: 14177 - DNA, 201 bp, Homo sapiens
tacgtttttctattttgtctgaactagccaaggtctctggagtttgctgttatattgcttcagagaaattagtgacattgaaaggctgttgtcttttttaktgtacttttggttgttaggagaaatttacaaggccatttttttctcccgtctctgcagttcaggagattatattagaaaatattctatacaaaaaatatg

SEQ ID NO: 14178 - DNA, 201 bp, Homo sapiens
acaaagcatcagggggccgggagcagtagctcacgcctgtaatgccagcactttgggaggccgaggcgggcggatcacaagatcgggagatcgagaccatyctggctaacatggtgaaatgctgtctctactaaaaatacaaaaagaaattagctgtgcgtggtggcgggcgcctgtagtcccagctactcgggaggctga

SEQ ID NO: 14179 - DNA, 201 bp, Homo sapiens
tccatgacactggtctgcacaatgagtgtttttgtatatgaaccgaaaaacaggtagcaaaagcaaaaatagacaactgggattacaacaatctaaaaaayttctgtacagaaaggaagcaatgaacagagtgaagcagcatcctacagaaagagagagaatatttgcaaaccacacatgtgataagggattaatattcaa

SEQ ID NO: 14180 - DNA, 201 bp, Homo sapiens
acagtgtaaaattagtagaagaaaacaaggaggaaagctccatgacactggtctgcacaatgagtgtttttgtatatgaaccgaaaaacaggtagcaaaarcaaaaatagacaactgggattacaacaatctaaaaaatttctgtacagaaaggaagcaatgaacagagtgaagcagcatcctacagaaagagagagaata

SEQ ID NO: 14181 - DNA, 201 bp, Homo sapiens
tgaagggacttggggctcagagaaatgaagtaactcagctaagtctgtacagtacttagccaggggatttagaaatccacccagggatggctccagttgcmtgtttcttttcatttgacacgggatggcctaatgggtccccaccaggggtggcttggaaaggagaaagcaactgcattcccactggaaggtgttctgtag

SEQ ID NO: 14182 - DNA, 201 bp, Homo sapiens
aagtcctcaagaagaaaaatttaaggagcaaatatgtgagccaggatctcatgctggactatctaagcaagcatgtaggaagagtttgtttcttcctgctrtggccatagaggtttggttgtcactatgaagaatgggcctgtgtttttttttaaaaatatgctgatctgggtgaggtcacattttgctattctcagtgga

SEQ ID NO: 14183 - DNA, 201 bp, Homo sapiens
tttatgattaacttatatctggtcctttagacatttagattttttctgttttatctctctctctctatatgtatatctgtatatatatttatctatatctrtatagatatatatatatatatataaaataatgaatgaaatggactgtttgcaacctcagatgtatttctaggacttagagtgattagcttgaggcgatgg

SEQ ID NO: 14184 - DNA, 201 bp, Homo sapiens
aagaaaaataaaacgtggtgaacgcccatgattgcaactaggagactgttatgcttatggttgttaagattagaaagaaggaagctttaaccctatctctratttcttacttttctctgtctatgtagaagttgatgttgatacgtgtctacataaatatttactaagggcttgcattagtcttgggaccaaggatatagt

SEQ ID NO: 14185 - DNA, 201 bp, Homo sapiens
agaaggaagctttaaccctatctctgatttcttacttttctctgtctatgtagaagttgatgttgatacgtgtctacataaatatttactaagggcttgcmttagtcttgggaccaaggatatagtattaaacgaaacagaatccctgccctcataggcttaccttctaggtaggaaaaatagaccataatcaagtttaat

SEQ ID NO: 14186 - DNA, 201 bp, Homo sapiens
gtcttaacttttcaaaaacaggacatgggtgatcaagcagcagtatatctctttactccttgtattagtccattttcacactgcttgataaaaacataccstagcctgggaagaaaaatcggtttaatggacttacagttccatattgctggggaagccttacaatcatggtggaaggcaaggaggagcaagtcacgtctt

SEQ ID NO: 14187 - DNA, 201 bp, Homo sapiens
gttaaagtcacactggaaggatatatattgaggctttatctctgccatggtgtcagcatcagtgaattaacacagggtgtcttaacttttcaaaaacaggrcatgggtgatcaagcagcagtatatctctttactccttgtattagtccattttcacactgcttgataaaaacataccctagcctgggaagaaaaatcggt

SEQ ID NO: 14188 - DNA, 201 bp, Homo sapiens
ctgcgggtgtgtgagccaagggggccctgtgacccttgaaatagaaaagggggaaatggctgcatgccaaccgaagagaccactgcattgttggccataartgaaactagtgagatgtgtgggatatcataaaaagaacattgacataatccttttttggatgaagttatatcacaaccagaacacacaatgaccagcagg

SEQ ID NO: 14189 - DNA, 201 bp, Homo sapiens
aacaaagagagatcctgtctccaagtctgtctgtctgtctgtctgtctgtctgtctctctcggaaatattccttcagtgtattagtaaagaagttacttakgagtcacttatgcccttgaagagtgagtgatgtatcaaaatatgtctgtctttattgtttcactttcatccttctttttttggagatggagtcttgctct

SEQ ID NO: 14190 - DNA, 201 bp, Homo sapiens
gttttctattctgggcctccctgcttccagcgatagcaaggagcgaaatgagatgctgtctaagaaaggaaggtgctgcgatctttgattactacacagcytcggcagtgtttgtatgattaatgagtccatgtttcagacgttcccatttaatgtatttgagccttctaacaacattgcctttcatatgttgctgactgt

SEQ ID NO: 14191 - DNA, 201 bp, Homo sapiens
atcccctttgcaaaagtaagaattgtatcgtagcctgactcagggttttagccaacttctctggatgctaatgctattctcttctttatacttgtcttccytcccaggcacacatccactggagctttgcagggcctatctgcccttagccctccaatatccttttcattttctttaatagttttattgatatataatgtg

SEQ ID NO: 14192 - DNA, 201 bp, Homo sapiens
taagagacctcttctcaacaggatccatgtttgatccgggggaataaagctagagttgctttcttccttgtaatatgtataatgactcatgagagaattcyccactgtcttccccacctgagacctgagaggaggagaaggaagcttggagtcgctgccctgtggcctgaattggtcagtgaccaatcactcagacccagc

SEQ ID NO: 14193 - DNA, 201 bp, Homo sapiens
cttgagcccaggaggcagaggttgcagtgagccgacattgcaccactgcaccccagcctgggccacacagagaaaccttgtatccaaaaaaaaaaaaaaaaagtgaccacactgtggctttgctgctttgcctaagtatttcgtgaaattgatcgttcattcacaatgctcagtgcagtgactttgccgagcacaagtggt

SEQ ID NO: 14194 - DNA, 201 bp, Homo sapiens
gctctcacagttagaaaacagtgagccttggtcaagtctcataaactgtgtctcagttttttcatttatacaatggccaaaaaaaaaaaaaagaaagaaascacaaaaccataccttctttgcagggttgtgtaaaggaaggttgaactagaataggttgaagtcaatcacatctctaaggcatttggcatgtagtggaac

SEQ ID NO: 14195 - DNA, 201 bp, Homo sapiens
cactcttagctctcacagttagaaaacagtgagccttggtcaagtctcataaactgtgtctcagttttttcatttatacaatggccaaaaaaaaaaaaaagaaagaaaccacaaaaccataccttctttgcagggttgtgtaaaggaaggttgaactagaataggttgaagtcaatcacatctctaaggcatttggcatgt

SEQ ID NO: 14196 - DNA, 201 bp, Homo sapiens
taccagtggtgcctagcatggtgtcaggtttatagaggactaatacatataagaaggagaaagggagggaggaggaattccagttgttttttttttaatctaggtacaagtctctctgttgatttctaaacatcgaatgaagatgaaggaaatacttaaagcacctaagcactcataactcacttagtcatttcactatta

SEQ ID NO: 14197 - DNA, 201 bp, Homo sapiens
cactgcagtcttgacctcccaggctcaagcaatcctctggcctcagcctcccaagtagctgggactattggcaatgccaccatgttcggctaatgtttttrattttttatagagacaaggtttccctatgttgcccaggctggtctggaactcctgtgctcaagccatcctcccacctcagtctcacaaagtgctgggatt

SEQ ID NO: 14198 - DNA, 201 bp, Homo sapiens
gcagtgagccaagatggtgccactgcactccagcctgggtgacaaaaaaaaaactttacctgggcttagtaagttgcctgacttctcatcctggagttcgkatccccttgtttctagaagagaaatccctcagatgtgaaggtgtgttccatgattttgtcgaacttgccctacatactgttttattatatattctgccca

SEQ ID NO: 14199 - DNA, 201 bp, Homo sapiens
gccctactgcactccagcctgagcgtgagactctgactcaaaaaaaaaaaaaaaaaaattagctgggcgtagtggcaggtgcctgtaatcacagctatccrgaggctgaggcaccagaactgcctgaacctgggaggcggaggttgcagtgagccaagatggtgccactgcactccagcctgggtgacaaaaaaaaaactt

SEQ ID NO: 14200 - DNA, 201 bp, Homo sapiens
atttccatgttctccgcacagtgcggagctactgcgggtgtgtgagccaagggggccctgtgacccttgaaatagaaaagggggaaatggctgcatgccarccgaagagaccactgcattgttggccataagtgaaactagtgagatgtgtgggatatcataaaaagaacattgacataatccttttttggatgaagttat

SEQ ID NO: 14201 - DNA, 201 bp, Homo sapiens
agatgcagagtcttcatcttgttgggctgtgatcaagtacatatgctccccagcagttctttgagatttccatgttctccgcacagtgcggagctactgcrggtgtgtgagccaagggggccctgtgacccttgaaatagaaaagggggaaatggctgcatgccaaccgaagagaccactgcattgttggccataagtgaa

SEQ ID NO: 14202 - DNA, 201 bp, Homo sapiens
gccaagaacaaattaacccagggcaacaagaaacaatgactaattagaccctaatgaagtgctgcggtactggcgtccttccagatttgacttgtaatcgmcacaatgtattacagatgcagagtcttcatcttgttgggctgtgatcaagtacatatgctccccagcagttctttgagatttccatgttctccgcacagt

SEQ ID NO: 14203 - DNA, 201 bp, Homo sapiens
tccaatttttcaagctgctggccagcttgagcgtattcatatgttacctacgatgaatcacatcagtgtcggggccgggaaggtactgcaacatattggcrcctcacgggaggctctcaaaatgatccaaagttttttgttgcagcaaaagctcattcagaagtctttgggccatttggctcagcggaggctgtcatgtgc

SEQ ID NO: 14204 - DNA, 201 bp, Homo sapiens
aaacatgctgtattatagtggcaaagattagaatcagatacatcttatgaccttgggcaagtttcttaacttctttaaacctcagtttcttcatctgtaamatgcacatcataatatctctattcagagatacaggtggttctattaaacacatcaactctgtgtatataaagtcttaacccattgtggaataaattaagt

SEQ ID NO: 14205 - DNA, 201 bp, Homo sapiens
aatttctatataaagtgcttagcatagtgcctgccacttagacctcaaaatatattgttttcattggataattaaatataaaataacatacagcatgatgrttaatacaactaataaatagtgcattagtattataggcacaaaagacagtatgaagtacagcacagatcatgaggagggtagggtcagttctacgtaaaa

SEQ ID NO: 14206 - DNA, 201 bp, Homo sapiens
cccttgagcaggaataagtgagtggcagagggggtcagggatgttaacgcaaatggagatcccttcacccagaaagacacatctgaaatggagaagatgcytttttcctcctgcaaccaataagagagtgatgaaaattatgacgccttgggaaataagactgcaacgtaaatgtgtgtccaccccctagttttcttttgg

SEQ ID NO: 14207 - DNA, 201 bp, Homo sapiens
cagtgagccgagatcaggccactgcactccaatctgggtgacagagcaagactctgtctcaaaaataatagtaataataataataataataataataatartaataataataagaatctgactaaggttattaaccattaaggtatgctgtgctaaggagcagggggccccttccatccgtagagggcagaaaggtgccta

SEQ ID NO: 14208 - DNA, 201 bp, Homo sapiens
ctcctgtatctcagtaggcactgttcaagcatttgaacttcatcaagtatcaagacaagtctaagagaaggtggggagagaccatcagggcctaggattgsaaaacctccaacgcaaaatagagatgtagttttagcgtgctgcccaatattaaaagattgtataaatgaggggggcacacttcctgatatgttcgttatg

SEQ ID NO: 14209 - DNA, 201 bp, Homo sapiens
taaaatgttgcctcctgtatctcagtaggcactgttcaagcatttgaacttcatcaagtatcaagacaagtctaagagaaggtggggagagaccatcaggrcctaggattggaaaacctccaacgcaaaatagagatgtagttttagcgtgctgcccaatattaaaagattgtataaatgaggggggcacacttcctgata

SEQ ID NO: 14210 - DNA, 201 bp, Homo sapiens
aagggatggggaattagtcatagggtatttccagataatgtagttaacacctcgtgtaatattaggtgggcagggagctctgctctcaggaccaaaattgytcctgccagctctaatagggaatgtgtgtatttttaaagtctgggtaagcactgtgagtcatttccacaatacgcctccctttggcgtgaaatggggcag

SEQ ID NO: 14211 - DNA, 201 bp, Homo sapiens
tagcgtctaggggatatacacttctaagcccattcttcaatggagaattacttatgcgcataagtagtttaaacaaaattagtggaaaaacagggagtttmagggagcaagagatcaggtcttctgggctcaccacacatcaggtgatttaagctaaaaatggcttaaaataccgcaatcacttgaaacgccttacataaa

SEQ ID NO: 14212 - DNA, 201 bp, Homo sapiens
ttactttgcaggattgctgtaaggattagaaccaccgtctctaaggcattcagcatagtcccttagggtaacatgagtgctcaagaaatagtaaattttartatgtgtctcatttttttccagatgctctggggtcactaccaaccttgcctttcaccctacctgtggatctatgaccctgtccttctcagaacaccactc

SEQ ID NO: 14213 - DNA, 201 bp, Homo sapiens
tttcacctacaaaatgaaggctacaatatttactttgcaggattgctgtaaggattagaaccaccgtctctaaggcattcagcatagtcccttagggtaamatgagtgctcaagaaatagtaaattttagtatgtgtctcatttttttccagatgctctggggtcactaccaaccttgcctttcaccctacctgtggatct

SEQ ID NO: 14214 - DNA, 201 bp, Homo sapiens
gacttgtatctcttaatgagtttaactacatttaaccatgtatgtgtcagtcctactatgcaccttacagctcactaaccctgtttaataatgtatgttgytacatttaatctttatggtagcctcatgaacaggctcttatttagttcagtggttcttgatcaggagtgatattgcctgccagggaatgcatgtcaatgt

SEQ ID NO: 14215 - DNA, 201 bp, Homo sapiens
tgccattgcactccagcctgggcaaaaagagcggggtaaaaaaacaacaaaaaaatgatgtaggaatgaacagatgaacaaccccacacaacctaaggacractttgaatcaattcttctaagctggtagcagaagccacctttccatttgacttgtatctcgctctttttttctttcttttttttttttttggagacaga

SEQ ID NO: 14216 - DNA, 201 bp, Homo sapiens
cacacctgtaatccctgctacacaggaagctgaggcaggagaatcgcttgaacccaggaggtgaggttgtggtgagccgagatcatgccattgcactccarcctgggcaaaaagagcggggtaaaaaaacaacaaaaaaatgatgtaggaatgaacagatgaacaaccccacacaacctaaggacaactttgaatcaattc

SEQ ID NO: 14217 - DNA, 201 bp, Homo sapiens
aggaacaagagagagagaaagtgcatggcaaagacccatcattgatgagtgactggatgtgaggaatggagcaggggagatgctgatgatttggttacccscttctccatcccccaccacccactgatgttattatccagtaaggaccaggagagaagaagagatttaagaagaagacaatggctgtggtttgatgaagat

SEQ ID NO: 14218 - DNA, 201 bp, Homo sapiens
gctttaaggagaaatattttgttgggacacagaagttagactgcaagaaggagaagattggattcagggcaggaaatcagtacaacttgcagtagtccacrtgacagttacgcaaaggcctggtctgatagaggaacaagagagagagaaagtgcatggcaaagacccatcattgatgagtgactggatgtgaggaatgga

SEQ ID NO: 14219 - DNA, 201 bp, Homo sapiens
ccagccttttgctattgcaaattgtgccgcaacgtgtaaccttgcaccgacatcgcttcccacgtgcatgcatgtatttgcaggattgagtcttagaaatmgcagcatcggctgagagagtatgcactccggtcgttttcatagatattgccaaattgccctctacggaggttgttctgatttacattcccactaagcaac

SEQ ID NO: 14220 - DNA, 201 bp, Homo sapiens
ttgctatagataccaaactccacaatcagtaattagagcgtgccccctgccccagaactggtcaaacggtgcagagcgctcggcaaatggtcttaaaagcrtccgcgcttgcatggaaatgcatttccaatggtgacggggtttgttttattcatggactttttgaaaaaaaaatcactggtttattggaaaccatagaga

SEQ ID NO: 14221 - DNA, 201 bp, Homo sapiens
tctaggctcattcatacaccagttcattcatcctcataacagttctgtgcctgagtagattcttgtccttatgtaaggattaaggacgttgagacccagargggtctcatctaacaggcagtagtagagccagcagtcaaaatagtttgaccccaaggctccaggctttttccctatttctttctcacccacagccaattg

SEQ ID NO: 14222 - DNA, 201 bp, Homo sapiens
aaggccagttatgtgatggatacttctattaccttatgtctttctgatttcatacacttaaatgtacagtttttatcttccttcaaaaccttatttttccragcaagttttatttattcactttcagtcattactgaagtgaataacaaacatataacagatgctattttgggtcatagctgttttgctaagtaatactta

SEQ ID NO: 14223 - DNA, 201 bp, Homo sapiens
gtgaacagattcttccaggtcttcattgtggcggaagaaagtgagatcagagatcccgaggaagggcttcagtttcaccagtagtggagctagggagtagsggggcagaagccgcaggaagtcagtgcaggacgccggaggccactcctaattgcttcatgtgttgttgccgtgctgatgaccttggaggcgctgctggtc

SEQ ID NO: 14224 - DNA, 201 bp, Homo sapiens
ctgaggcagataaatcacctgaggttaggagttcaagaccagcctggctaacacggataaacctcgtctctactgaaaacacaaaaattagcttggcttcstggtgcatgcctgtaatcccagctactgcagaggctgaggcaggagaatcgcttgaacccaggaggcggaggttgcagtgagccgagatcgtaccattgc

SEQ ID NO: 14225 - DNA, 201 bp, Homo sapiens
gcatcttacctataaaaataatgcagatacattcgtaactccccaggttttcgggagtggaaatgagggcagctggggagtgaatctgtcgtttgttgagrctctttttcctgcttgccagacactgatctaggctcattcatacaccagttcattcatcctcataacagttctgtgcctgagtagattcttgtccttatg

SEQ ID NO: 14226 - DNA, 201 bp, Homo sapiens
gaattgtgcatttattattgctaggatgcatatacacattgaactcagtcaacttactctctctaaattatctcaccggtggagacattgcctcaggagtygagccctgtggtgtgcctcctgctgtcaccacatttgaccacctaactgaccccactgtggtcacctttgccacctgccctgctttggtcccttctctgc

SEQ ID NO: 14227 - DNA, 201 bp, Homo sapiens
tcaggcccataaaatactgcacatcttggcatcttacctataaaaataatgcagatacattcgtaactccccaggttttcgggagtggaaatgagggcagytggggagtgaatctgtcgtttgttgaggctctttttcctgcttgccagacactgatctaggctcattcatacaccagttcattcatcctcataacagttc

SEQ ID NO: 14228 - DNA, 201 bp, Homo sapiens
aagcatgatggcaattgcctgactctgtcctcggtggggacaggagagctgagcataaggatctaagtttagacgccctcctaggattaccaacgtaggcrtgatcaggcccataaaatactgcacatcttggcatcttacctataaaaataatgcagatacattcgtaactccccaggttttcgggagtggaaatgaggg

SEQ ID NO: 14229 - DNA, 201 bp, Homo sapiens
ggacccttgccggggcctcgccatccacatggtcattgcctcaaaatttgggattccagttgcccttttccttcttctctcttgaacaatgtgaacgcaakgtgaggatgggccttctccgccttcaaaagttgctgccttccaaggggaaaaggtctggtcttgtaatttctggtctgtgcgtgctgtataaggaagaag

SEQ ID NO: 14230 - DNA, 201 bp, Homo sapiens
tgtagtctcagcttcccagaaggtcaaggcaggaggattgctggagcccaggaggttgaggctgcagtgagctacaatcataccactgcactccagcctargcaacagagtgagaccttgtctcaaaaaataactggctgggcatggtggctcatgcctgtaatcccagcactctgggaggacgaggtgggcggatcacga

SEQ ID NO: 14231 - DNA, 201 bp, Homo sapiens
agtcttctctttggtccctgataaatatacatagaatgtatggatgtgagaaagttaaactgatgtctgtgtgtcttcatgtcattaaactttgaatctayggacatgtctttttctttctggcatagtttggaggtcttcattttgtgattgaatacaaaacaccgagggctttaaggaggcatagtggtatgttcagct

SEQ ID NO: 14232 - DNA, 201 bp, Homo sapiens
tagaaggccttaatctcattgtacatacttttctattcctcccagtaccatttaaaggttagtgaaagcaacctttagtatcatctgttttttgggggggkttttttgttgttgttgtttagctgtttatgggtaggagaatgcgtgctcttttagggacatctcttcaaataagaacaggttgtaacctacactcaaaag

SEQ ID NO: 14233 - DNA, 201 bp, Homo sapiens
tgttagcaggctatttcaatgattttctctgcggaagagtagggaaaggtgacattccaactgggaatattcgactctgcagatccctactcggagtttttcagccctgttttaagtgccgagctgggttttgcctcatgatccaattgttttattagcgaaatcatcatctgtttcattttgctttggtaatagtgcagt

SEQ ID NO: 14234 - DNA, 201 bp, Homo sapiens
ttcataatcagcagaagtcttttctctggaaggaacaaaggattaagttagggagacagtaatggtattgttagcaggctatttcaatgattttctctgcrgaagagtagggaaaggtgacattccaactgggaatattcgactctgcagatccctactcggagtttttcagccctgttttaagtgccgagctgggttttg

SEQ ID NO: 14235 - DNA, 201 bp, Homo sapiens
aaatcacagagtccatttatttctcctcttcgagtcagtatatctcaaaacattttttcaacgttaatagaaatataagaagtgcctggatcagtttttgkttttgttttgtttctttttgagatagggtctcattccgttccctaggcgggactgcagtggcaccattatggtttactgcagccttgacctcccaggccc

SEQ ID NO: 14236 - DNA, 201 bp, Homo sapiens
cagaggggcagtccaataaaagaggcagaaagggctcttgaaaaatgtccctgggcacttgcccgaatgactttagtgacagtatctactaaaactgataytaattctgttacgtgttatggcgcatacccaagaccctccccataaactatttgaaagaagcaaagttgtaattctccaaatacggacttgtacatttct

SEQ ID NO: 14237 - DNA, 201 bp, Homo sapiens
ttgtttttctttcttttttttttttttttttgaggcaggccttaggtctggcacccaggctggagtgcagtgacgtgatcaaggctcactgcagcttccamctcctgggctcaagcaatcttcgtgtttcagcctcctgagtagctggaattacgggctcatgccaccacacttggctacttgtttaattttttgcagaca

SEQ ID NO: 14238 - DNA, 201 bp, Homo sapiens
tactgctattgttagtttctaaaggcacttgtcatggtgtgactaatattagaagcagacacagccatgatgagcaatactctttttttgtttatttttgwtgttactgctgtaagccactttcttctccctctccgttaaaatgcaacttaattggtaaagtttagttgactagagatttcatttatttatttatttatt

SEQ ID NO: 14239 - DNA, 201 bp, Homo sapiens
aaataaaagtaaataaggggaaattgcatactcctatctggactgttttcttatggttttggaatctctggcaggtagaagtaattatttctgtaactctyaggcagggcttaggaattatctcccttaggtttgacttctttctttcttgagaataagcgctgtgtttcgcaagagtaaagaagtggcatttattctgtt

SEQ ID NO: 14240 - DNA, 201 bp, Homo sapiens
gggaaaactaggttagtgccagataaggtccattactctttaaaagtggccactcatccctaataataaataaaccaaacattgggatattaaaacaattygttctcagcatcagaaaagaggtcgtgtgtgtgtttgtgtttttttaatatcccatccagcccccagccccagtaaccctaagattgaacaaaaccctac

SEQ ID NO: 14241 - DNA, 201 bp, Homo sapiens
cctttgaatcttcagtgtttcaacatagacttgttacaaagagaaggaatataagcctctgttctttcttgtttccctttgttaattcctttttcctttcrttccttcttatctatccctttcttaccttctttatttcctcgtttatttgggctttttcggttgtgaagatcagtaccttgaaattcagaatagatggca

SEQ ID NO: 14242 - DNA, 201 bp, Homo sapiens
aaactgtgtgattctgtctgcagttgagaactgtaagaaaaagatcaagattaacattattattattggtgttacctcatgtctgtacctttttggacacktgggtctgtttcccgagaaatcatttttcctcctccttgaaaatagtgaatttcaagtggttttaattttaactgcattatttgtttgctttatatagtt

SEQ ID NO: 14243 - DNA, 201 bp, Homo sapiens
aaccacacagcccagtggccgtggcctgggcagggaaaccgcaactgcctgcaggaagagtgcagtttatttagataacattttcacttaacatcctgccrttaatgacctccacctggcaacctttatttaatccaaaactcagggactggattttccatacggcctgtgaggccagggggctcagttgttcctcataga

SEQ ID NO: 14244 - DNA, 201 bp, Homo sapiens
cggaggttacagtgaaccgagatcgtgtcactgcactccagcctaggcgacagagcgagaccctgtctcagaaacagaaaataaaacaaacaaaaaaatastattccatagctgactattttctgaaatgattttgttacttttctaatgagaaaaaaatagatctcgtgtgtggagggaattgaagatgtaatttcagac

SEQ ID NO: 14245 - DNA, 201 bp, Homo sapiens
acaacataaccacacagcccagtggccgtggcctgggcagggaaaccgcaactgcctgcaggaagagtgcagtttatttagataacattttcacttaacaycctgccgttaatgacctccacctggcaacctttatttaatccaaaactcagggactggattttccatacggcctgtgaggccagggggctcagttgttcc

SEQ ID NO: 14246 - DNA, 201 bp, Homo sapiens
cagttttcagaccaactccattgttactagatatcctgacactgaagaagctaaaaccaaacaacaatgacaacaacaaacccaagtctgccttatggcasattcttcacgtcgtaacaccttccttgggaccctatttctcagtatggacctgactctcccagggatcctagaatgcaagcatagtgattgcaaaccaga

SEQ ID NO: 14247 - DNA, 201 bp, Homo sapiens
ggagaatccagagaaacacagcggaaattcaatttatgggctacattaacccagcattttggattggagggtttctaaagaggtttcgttatattaatggrtgacaagtggatacttaagaaaaagtgtattttggagaaagttgcaataatacctactagagattgtgtcctccctcaaaatcggagtgccatccgcgct

SEQ ID NO: 14248 - DNA, 201 bp, Homo sapiens
gatcacttgagctcaggaattcgagaccagcctggccaacatggtgaaaccttatccgtaaaaaaaataaaaaattagccagacatcgtggtgcatgcctsttgtcccagctatttgggaggctgaggtgggaggattgcttaagcctgggagattgaggctgtagtgagctatgattgcaccactgcactccagcctggg

SEQ ID NO: 14249 - DNA, 201 bp, Homo sapiens
ttccttgggaccctatttctcagtatggacctgactctcccagggatcctagaatgcaagcatagtgattgcaaaccagaccatttgagggaaactcctcyagtaagcaccctgcatggtcacaatgtaaaccctgcaggggcagaaaaatgataagctttgggtcgggtcggaaagccatttcccccacaatcaaagttc

SEQ ID NO: 14250 - DNA, 201 bp, Homo sapiens
tgcccatggcaaccacaattaacccatgcctgccttccagtctttttaccacgtgttgtgttgtgtggtgtttgtcccacatagagatcattgccatacgsccatttggcacattgcttatttttccctgtctttatacatttcatcatgttgttctaaatgcttcttaactgcaattcttagtggttgtgatagtccaca

SEQ ID NO: 14251 - DNA, 201 bp, Homo sapiens
agcattttgagaggcagaggtgagaggattccttgagtccgggagttgaagaccagtctgggcaacatagtgaggccttatctcttcaaaaataaaaaaaattagctgcccatggtggtgtatgcctgtggtcccagctacttgggcagctgaggcaggagaattgctggagtacaggagattgaagctgcagtgaactgt

SEQ ID NO: 14252 - DNA, 201 bp, Homo sapiens
accacttttgctctctgctggcatagatggctgtgctttggttcattttcttgctcatcttcatgatctagcaagttcttgttgagtgccagcccagtgcyaggtgctgaagaacaatggtgaacggcacagtcatggtaccagaactcggtctggtggaacagagagattaagcaatcagaaaaacatatgtgtgtgtaa

SEQ ID NO: 14253 - DNA, 201 bp, Homo sapiens
ttgatgtcaaaagtaaagaagttcagaacctacggggcttgctttgggtcccaaattatcttagctttctggaaagagaagaatctataatgtattctccrtggagtatctttactcacttgtgatgagatgtctgtaaaagtaatcagctccatacatctgggcatgatgaccctcaggcccttgagactcaggtgttct

SEQ ID NO: 14254 - DNA, 201 bp, Homo sapiens
tttttgttcccccatgggatagtaggtaaattaatggaggaagggagtcaactaaacaatttatttgagcaattaatggaggaagggagtcaactaaacartttattagggctttatgtaaagccctagggttagttggttggttggttttgttttgttttgttcctttttttttttgccaggggatgctgtggttgaatt

SEQ ID NO: 14255 - DNA, 201 bp, Homo sapiens
agcctcccaaagtgctgagattacatgcatgagccaccatgcctggcctctggccttcttttcactttagaaaaaaacaaaaaacaaaaaacaaaaaaaaacacaaaaaaaacttttttttttagaactgttttagtttgggagccaaaattgagcagaaagtacagagagttcccgtatacctccggcagagccctggct

SEQ ID NO: 14256 - DNA, 201 bp, Homo sapiens
cgcctcagcctcccaaagtcaggtgtgtctttatcagcagcattaaaacaaagtaataaaattggtttcttagggttggatggcttaaaacaacagaaatrtatcatctcacagttctgaaagtgagaagtccaaaatcaaggtgtcagcacagccacgttctttctgaaggctccagggatgatctactccatgcctttg

SEQ ID NO: 14257 - DNA, 201 bp, Homo sapiens
tataagttttcatagttctgtgcatttcctcttggcagcaatgcactgagctgcagttttacatttttgtttttttgttttttgagtttttttttttttttgagacaaaagtctcgctctgtcccccacgctggagtacagtggcacgatcttagctcactgcaacctccacctcccaggttcaggcgattctcctgcctc

SEQ ID NO: 14258 - DNA, 201 bp, Homo sapiens
cactttattggtgatatggtttggctgtgtccccacccaaatctcatcttgaattgtagctcccataattcccatatgttgtgggagggaccgggtgggasaatattgaatcatgggggtggttcccccatactgttcttggggtagtgaatgaatctcatgagatctgatggttttataagggggaaacacctttcactt

SEQ ID NO: 14259 - DNA, 201 bp, Homo sapiens
catgccaaaggcagatagcaacactcttcaatggatgtgggtgagaggacagtggaatccagcaggggccattgtttccttccataatatttttaaactgyagcaaagtgatctttttgagacccaaatgtgagtatgccattctaatcttcccaccctcagataaaccacagcaatgattttatactgtctgtagggtaa

SEQ ID NO: 14260 - DNA, 201 bp, Homo sapiens
actccacatctttgtaactttttatggctctcagccctactttcttaatagtagcagcagtatttatctactgtttattgtattccaggtaaaggatatgygaagcacttttcatgcattatttaacctagctataatactcccatttgacagatgagaggactgaggcttgtagactttccaaggctgtgcagctctagg

SEQ ID NO: 14261 - DNA, 201 bp, Homo sapiens
tgtcattgaaaaaaacaccagtaattaaatcattatttcttagatgtgaggtccaaggacattctagaggaagtcaaaggcagagggaggaagggtgggacgatggaggcctgaagggctggtggagaggaaagaaggcagcctgtgccgtcagagagagttcaactccatccgtgcagctgctagcatcttgccttactc

SEQ ID NO: 14262 - DNA, 201 bp, Homo sapiens
cattgaactgaatctccaccttgggcttgagactctgcaaagtgcattaaatgggaaggaaaccaaagggcctgctgccctgcccccgccatagcccaagkctgtggccatggctggggaattggcctgtcagttcaatcaggcagcccctctgactggtgtttttcactaagctggccccatggatggccctggtcatgt

SEQ ID NO: 14263 - DNA, 201 bp, Homo sapiens
cacgcaggcattaaatggattgtgaagagggactttgttccccctcagtcttgtctctgcctccgtaaaggagtaagttaaaaaagaaagtttctttttttaaaaaaaagccttactgctcaataaatccctgtggaaaaaaaaaaaagagggggaaaaaggaatgcacattagtcttccattaaaaatagatcaaaaaag

SEQ ID NO: 14264 - DNA, 201 bp, Homo sapiens
agccatactcagagtggccctaggatggctcctcagatagctgctggcagaaacctgcactcagtacatctatacatggtgtaatgattgactcaagatamttagcatagccatcatctcaaacctttattatttgtgatgagaagattcaaaacccgctttttgaactgttctgaaatatgcaataccttgttgttaact

SEQ ID NO: 14265 - DNA, 201 bp, Homo sapiens
ccatcatttacttacgtaataaatctgttaaataattttaatataaatctattcatctatccatctattaaaagagatttaagttatttctaatctttgcrtattataagttgcatttcagcttataccttgactttctttgacatatacatcaataggtagagtatattcctagaaattcaattgtggaccaatgagatg

SEQ ID NO: 14266 - DNA, 201 bp, Homo sapiens
aattttatggattacatttattttcatttctgtatatttagttaattcttttaaaaggctgcctgttatcccattgtctgtcttcaccatcatttacttaygtaataaatctgttaaataattttaatataaatctattcatctatccatctattaaaagagatttaagttatttctaatctttgcatattataagttgca

SEQ ID NO: 14267 - DNA, 201 bp, Homo sapiens
ctcaaatgctctaatctccacagaagttaaaatatccctaaacaggcatgtgcatatatgtctttctttcttttcttaggttaacttttttttttttttttccttttgaatgaccacaaagcatatctacccagcggggttactttttttttccttttcagtattcatgacgtcaagtccctgtttgttatcttattgtcc

SEQ ID NO: 14268 - DNA, 201 bp, Homo sapiens
tcctcctttttcctgaatatggaaccaaagcctgtgtttttcttgctcacatgtgagtcttctccttgcttcaaccctccccgctgacagccacaagactctgcctccctgcagcctgtggaacataatattcgttgggatcatacattgaccaaagatccgccatgtctttgcaactaacatactcactcatgacttcac

SEQ ID NO: 14269 - DNA, 201 bp, Homo sapiens
tccgctcatattcttgcatttgctgcagcaaaacctgacctctctttgtgttacctgagtcttgacgaagaagactgaggaaaggcccccccccccccccrccaaattgtcccgttgtctcttggctggtcttgccagctggcacacagcttcctctgaccaccctgctaggtacaaatcccacatgaaaagtctcaatca

SEQ ID NO: 14270 - DNA, 201 bp, Homo sapiens
atccgctcatattcttgcatttgctgcagcaaaacctgacctctctttgtgttacctgagtcttgacgaagaagactgaggaaaggcccccccccccccccaccaaattgtcccgttgtctcttggctggtcttgccagctggcacacagcttcctctgaccaccctgctaggtacaaatcccacatgaaaagtctcaatc

SEQ ID NO: 14271 - DNA, 201 bp, Homo sapiens
ttgaccgataagtgtaccagatttccttacctgtcccagggcaagatagcaagagtttcttgatgcatttaaaaaatgcatttagtgttggcaaaaggctkgcaatttattattaagtggaataagcagtttaaaaacagtatgtacagggtggttttctggctatataaacacacaggcatagaaaatagatatacataa

SEQ ID NO: 14272 - DNA, 201 bp, Homo sapiens
tgcaattccctctcagtttacatcaaaatcagctcgtcacccttgagattgaagctcgcactctgtaagctctgaataaatattaaccatctcctgaaccytgaaggagacattttctggggagcagtgatttgatgatttgatgaagttgtgtgtgtgtgtgtagtttttcagacatatctccatctgattcttacctct

SEQ ID NO: 14273 - DNA, 201 bp, Homo sapiens
atgtctgatagatattaggcattcagtctctctctctctctctctctctctgtttattatagatagaaataaaaaaattataaatagaaatttatttctcrtggttctagaggctggaaaattcaagatcaagatgcagacaggcttggtgtctggtgagggctgctttctatccttcaaaaaggcaccacgttgctgtgt

SEQ ID NO: 14274 - DNA, 201 bp, Homo sapiens
agctgccgttgagtgtgtgcatgtacaactgcttgaaaacagcttgtgagttcactattaggtccatgaaatttttctccttggcaggttttcactattartttgcttgacaaaggatagatacattttccatgtgtggaggtaaaagcagtgcagtgagctaaaaagttagcaaaggtgaagtggtcctaatctgcggcc

SEQ ID NO: 14275 - DNA, 201 bp, Homo sapiens
cattgacccacttatgtgtagtcccctagtgaaatgacaagaatccccagagctgggaaaacatttccatgcaattccctctcagtttacatcaaaatcakctcgtcacccttgagattgaagctcgcactctgtaagctctgaataaatattaaccatctcctgaaccctgaaggagacattttctggggagcagtgatt

SEQ ID NO: 14276 - DNA, 201 bp, Homo sapiens
cagattttaatatctttcctcccacacttgctttgactccctcctttagtaattagataattatgtataataagcacattaattatgtgcaacagctgccrttgagtgtgtgcatgtacaactgcttgaaaacagcttgtgagttcactattaggtccatgaaatttttctccttggcaggttttcactattaatttgctt

SEQ ID NO: 14277 - DNA, 201 bp, Homo sapiens
ttatttaggaggggaatttggggacattgacccacttatgtgtagtcccctagtgaaatgacaagaatccccagagctgggaaaacatttccatgcaattmcctctcagtttacatcaaaatcagctcgtcacccttgagattgaagctcgcactctgtaagctctgaataaatattaaccatctcctgaaccctgaagga

SEQ ID NO: 14278 - DNA, 201 bp, Homo sapiens
cagaagaagttaaggtaaatggcttttagcacattgcacccccagcttttagcacattgcattatcattataataaatgtttacggttactgatattattwtagttctttatcgacattattacagtccattatttacagtccttatgttatttaggaggggaatttggggacattgacccacttatgtgtagtcccctag

SEQ ID NO: 14279 - DNA, 201 bp, Homo sapiens
cttgatgtcggagtgttctctagacctcacacccagtccctattcttaggttttatttctcaaaccaggttttgcctgagaaattacagcaaatgattcakagcacaatgatgttgctcatttttgataagtagttgaaagctgatggtgccctccatttcaaagcaacagaagaaacgctggtggtcatggagaaagagt

SEQ ID NO: 14280 - DNA, 201 bp, Homo sapiens
tctgcttcttaatccattagtacctgagtgggggtatataggttttctcaaatgctctaatctccacagaagttaaaatatccctaaacaggcatgtgcayatatgtctttctttcttttcttaggttaacttttttttttttttttccttttgaatgaccacaaagcatatctacccagcggggttactttttttttcct

SEQ ID NO: 14281 - DNA, 201 bp, Homo sapiens
aatgatgtgaggaagccaggaatgatgagtacctggattaaactaccttaaggctgattgagtaaaagtgaaagatcatcccgtcaactgctggcctgccrcttgtgttcgttaatagaacatttccctctgattgtcaggctttcttagcagctacagaatacttattttcttctttatattataagtttatgccactgc

SEQ ID NO: 14282 - DNA, 201 bp, Homo sapiens
catccttcatcaaggtgacataggtctggcgatctttttggcatagacgtgtggacgttgtttttgacatttgtacatgcttttgctcaagttgaaggccsaagtttacccaattcgactgcccccacccagatagaatattcatggttagaccataaactacataactggaaattttaaatctatttttatatgcataca

SEQ ID NO: 14283 - DNA, 201 bp, Homo sapiens
atggttttaaaataccaaaaaatatttcttcaatttttttctgctactcataatgtagcatctgtagagcgacacacttttgaatttgagttaatatttcytttttattttattttattttttgagatggagtctcattctgtcgcccaggctggagtgcagtggcgcgatctctgctcaccgcaacctccgcctcctggg

SEQ ID NO: 14284 - DNA, 201 bp, Homo sapiens
attttcatttttattaagaagtaaggcaaaaacaaaataagacatatgtcagaacttcacttatccttctttgctgaattgtataatggttttaaaatacyaaaaaatatttcttcaatttttttctgctactcataatgtagcatctgtagagcgacacacttttgaatttgagttaatatttcctttttattttatttt

SEQ ID NO: 14285 - DNA, 201 bp, Homo sapiens
agaccttgatatatgtacatatattgtatgatacatatccatgcatatacgtgggtgtacacacacaggtacacacaaatatatatgtgcctttggacaaraaaaaatccccaggacagtctcatttggcttttaaaatgctgcagttgaataggaccgtagaggtggcctaaggcagccttccattcagggcacgcagat

SEQ ID NO: 14286 - DNA, 201 bp, Homo sapiens
gacatgaatattggttgatattttcatttttattaagaagtaaggcaaaaacaaaataagacatatgtcagaacttcacttatccttctttgctgaattgkataatggttttaaaataccaaaaaatatttcttcaatttttttctgctactcataatgtagcatctgtagagcgacacacttttgaatttgagttaatat

SEQ ID NO: 14287 - DNA, 201 bp, Homo sapiens
caacctaaataaagccacagccagtgttacagaaatagtgtttcgtgattaaaataatggtacttatttgggagagttacttgccacgtttcagatgattkggaggtagtcttttcaggaatattctgagtttgtttcttgatctcgatagcagcaacctttccatttgctctctgtctggtttctctgtgtctctctttt

SEQ ID NO: 14288 - DNA, 201 bp, Homo sapiens
gtttgtgccaaaccaggtgtcattgccctccccaccctaccttgctcccctggagtgtatcctgattcttttgaggatcacttgatcctgattttttttttatgtgtatagatgggatttcattatattgcccagactggtcttaaactcctggcctcaagcaatccagccacctcggcctcccaaagtgctgggattata

SEQ ID NO: 14289 - DNA, 201 bp, Homo sapiens
gttcattcagttatctcacgtttctggagggccctctatgtgcaatacctagtgatacagcagtgaacaaaggaaatccctgccctcagggagctttcatkctacttggggaaagagacgtgaaagaaatcaagacatgcaagcaaggataagtgctgtaaagataattcattcctgtttagagggctgaggacaggaaga

SEQ ID NO: 14290 - DNA, 201 bp, Homo sapiens
cattttcatggcgatgtgttataacaggacagaccttgtactttggaatcaaacattctcaactctgctatctgctctttgtggggccctgaacaaaaatmtttactctctttgagccttcgcttcctcattggtcaagacttttctcactgcattatatttgagtgagacccgtatcaatggattgaaattctcagaaac

SEQ ID NO: 14291 - DNA, 201 bp, Homo sapiens
ggagaggtgcgatttccctccacataatcttcagttagtgatctctgtaagagaatgtttttcaaaaggctaatagagaagtaatgagatcagaaggaggycaacccggccttctccgtttggcagcttgattaatttatttctccttcttggagattgctgcaaggggcttttgtcaccctgtgtttttcatgggactgt

SEQ ID NO: 14292 - DNA, 201 bp, Homo sapiens
cctaaagatatcccgccccaccaaagatatccctaaagacatcctgctggtttcagtggctcatgcctgcaatcccagcactttgggaggctgaggcaggyggatcacttgagctcaggaattcgagaccagcctggccaacatggtgaaaccttatccgtaaaaaaaataaaaaattagccagacatcgtggtgcatgcc

SEQ ID NO: 14293 - DNA, 201 bp, Homo sapiens
gagcaagcatttctaacaatcatattgcttaagaagtggatggcaagaagataattactaatatgtctgcaattgatctgaaattgacacagttgatctawctgattcatggggaccctgggagtatgtttgtgtatttgggggttgggatgggggggtgggtggagggtcagagaggtggcaaaagcaggtgggaacagg

SEQ ID NO: 14294 - DNA, 201 bp, Homo sapiens
  misc_feature (1)...(201): n = A,T,C or G, or insertion/deletion polymorphism (see Tables 1-2)
gtagtccagtatattggcctccagggcaaagctacctaggttctgagtccaattatggccttcatgagtcttgtttctttggacaggttttccagtgtctntgagcctcaacttcctcatgtataaagtggagatgatgccattacaggttgctgctttatggcacataattaatactagctcttatttataggaactgaa

SEQ ID NO: 14295 - DNA, 201 bp, Homo sapiens
atgttactgttttagctgcccccagtcaggtggttgatgagttggggagcctggtgggcagtctggaagagagcacagtgactgcaaggtcagctcctgaycttcataataaggactcacatgtgtcggtcccaaggatccccaagggatactcatggttgaaggtgtctatgtgttctccttggtgtccagcgaatgcct

SEQ ID NO: 14296 - DNA, 201 bp, Homo sapiens
ctgtaaacaaaaacaacacagccatctagctgcaagacgtagctaattgctctgcagaacagggttggccagcctggccttgatgtcggagtgttctctaracctcacacccagtccctattcttaggttttatttctcaaaccaggttttgcctgagaaattacagcaaatgattcagagcacaatgatgttgctcattt

SEQ ID NO: 14297 - DNA, 201 bp, Homo sapiens
tcttacccattagggattattaatatactagataagagtacagtctctggagctaggcttgtgactttgaacaaattattttatctctctgagctcagtcycctcatctacaaagggggaattgataataggaattgtcgcaaagagctgttttaaagattaaatgagataatagatataaagcacttagaagagagtttg

SEQ ID NO: 14298 - DNA, 201 bp, Homo sapiens
cttttgtgaccctgatgagattacaggtcctcagtctcctcattgtatctgaagactaaagaatcagaaatttgtgactccacttagtttttctccacccmggagccctcaggccgctggtgagtgaagttcttacccattagggattattaatatactagataagagtacagtctctggagctaggcttgtgactttgaa

SEQ ID NO: 14299 - DNA, 201 bp, Homo sapiens
tatatgtgtatacatacatagaagtatatatataaataccagtactagtgtctgctaataggtggcgccactttttatctgtgtgtgttgggggtggaatkagcatgtagaggttggcaaaggggacaggagactgtgggatgattagtatattcttatttggcctgggagggaaaaaaaatctttcatttccaacaatat

SEQ ID NO: 14300 - DNA, 201 bp, Homo sapiens
ataaattaattttttagcattaatattagggaagataatctgacatttaaaaatacatgtctatatgtgtatacatacatagaagtatatatataaatacmagtactagtgtctgctaataggtggcgccactttttatctgtgtgtgttgggggtggaattagcatgtagaggttggcaaaggggacaggagactgtggg

SEQ ID NO: 14301 - DNA, 201 bp, Homo sapiens
aatctaggagaaaggtagagctctcttatgctggggcaacgctaccaacattggtattccacagcattccaacgattctaaatactctcccagagtagggmggaaaaatcatccaaactacttggtaattgaattcaagagtgatggaccaaaaattattaatgcattcccttccgtccaccagccaaagaggattccatc

SEQ ID NO: 14302 - DNA, 201 bp, Homo sapiens
ctctgttttcctacttttctttggccactgtttttgccacagcttctaggatttctctttcccacaatctaggagaaaggtagagctctcttatgctgggrcaacgctaccaacattggtattccacagcattccaacgattctaaatactctcccagagtagggaggaaaaatcatccaaactacttggtaattgaattc

SEQ ID NO: 14303 - DNA, 201 bp, Homo sapiens
catgcaatgttcacaggtctttacatgtaaaaacaaccctgtaaaataaataacattattctcttcattctccaagtaagctgaggcagaggattccagcrcaagcaatttggttccaaaacctgcccttttaacctctaccagattttggtgaactctctgtctttggaagggtaggtggcggctgcggggagaaataga

SEQ ID NO: 14304 - DNA, 201 bp, Homo sapiens
gtcaaagacatgaatattttcttctaagtagaagtaatgatgacgatgatggtagcagttatgagcaggtaacatgcattgaacacttatttgctccatgyaatgttcacaggtctttacatgtaaaaacaaccctgtaaaataaataacattattctcttcattctccaagtaagctgaggcagaggattccagcacaag

SEQ ID NO: 14305 - DNA, 201 bp, Homo sapiens
gaatattgggccgggcttggtggctcatgcctctaatcctacctgaagcaagagaatcgcctgaacttgggaggtagaggatgcagtgagctgagatggcrcccctgcactccagtctgggcaacagagcgaggctccatctcaaataaaattagtcagtcaaagacatgaatattttcttctaagtagaagtaatgatga

SEQ ID NO: 14306 - DNA, 201 bp, Homo sapiens
aactcctagcctcaagtgatccgccagcctcagcctcccaaagtgctgggatcacaggcataggctgctgcaccaggcaaggactttttttttttttttttaaacaaacttcactcagtttgaaggcaccattatttgggtttcctgttaattgcagttaatcctattgagtaaatgtatcaaggacaaagagcagaatga

SEQ ID NO: 14307 - DNA, 201 bp, Homo sapiens
ttaatacctgttgcttttgtgtgcttcctatttaaaacatgtttatctatcccccacccccactttatccaaaagttattcagtgttttacaaagacatgmatattgggccgggcttggtggctcatgcctctaatcctacctgaagcaagagaatcgcctgaacttgggaggtagaggatgcagtgagctgagatggcac

SEQ ID NO: 14308 - DNA, 201 bp, Homo sapiens
tttttttttgagacaaggtctcattctgttgcccagactggagtgcggtggtgcgatctcagctcactgccacctctgcctcccaggcccaagcgatcctsctgcctcagcctcatgagcagctgggaccacaggatgcaccaccatggccagataattgttttgcatctttggtagagacaaggcttcactatgttgccc

SEQ ID NO: 14309 - DNA, 201 bp, Homo sapiens
cccagacacttacatattcctagccattccttttgcttaagtttgcagagatttgtgcttaaaactgaataaacaatctcagggtttttgtgtgtgtgtggatgtgtgtgtgcgtgttatatgaagtcttgctagaatgcataaacaaacaaaaaaaatatcatactctcagatcctggatactgtggtcgcctggacttc

SEQ ID NO: 14310 - DNA, 201 bp, Homo sapiens
taggtgatcccctcaccttggcctcccaaagtgctgggattacaggcgtgagccacgaccaccagcctcagtgaatgttttttaatttggaaaggattttmtaagaaaggattccaactttcccatttacagagaaggaagctgaggctcacaggtttcactcaaaccataaagctcaggagtaactaaaggaactggagc

SEQ ID NO: 14311 - DNA, 201 bp, Homo sapiens
tagtcagttaattacataaagagaacttgagcaaactcttactctgccatatgctgtgcagatccctctgaaaagctttacagatgttcttttttttttttaatccctccccctatctttctttctttgcacccacgatgctctgcacttcaagctaaatataatgtatctgattttacagcatacatactaatcaggttt

SEQ ID NO: 14312 - DNA, 201 bp, Homo sapiens
cttacatttaaatacaggcctttcccatttcacagtgtttctagctcccctttccaatacatctctctctctctttctctctctctctctctctctctcamacacacaacacacacacacacacacagccaaatcagacaccaacataaactgtagagttaacattctttttccaccctcacactttttttagctccgatc

SEQ ID NO: 14313 - DNA, 201 bp, Homo sapiens
gcacatatgtgtgtgtgcaaattgtacttgcagtggctgcctgggaaatgaaatttctgcaccttgccagagcatgttttccctctaaagagaggcagctsataattagtaatgctaatgtcggggtgagatgcaatagataatctaacaccagcaatgatgcccagagcatttatctttgatgctgggaatgcgttcatt

SEQ ID NO: 14314 - DNA, 201 bp, Homo sapiens
ccgattctcttccacgtgtggacagattggcacatatgtgtgtgtgcaaattgtacttgcagtggctgcctgggaaatgaaatttctgcaccttgccagarcatgttttccctctaaagagaggcagctgataattagtaatgctaatgtcggggtgagatgcaatagataatctaacaccagcaatgatgcccagagcat

SEQ ID NO: 14315 - DNA, 201 bp, Homo sapiens
ctatcacatttagaaacgccccttgccttccttccaggactttcttccttaatcaggattgacttaactgttaactcctagaactgtcgttgattgcttgstgaagtaacaattagtatagacattcagcaactggcctcccatactgtgattcactgacccagactttgacatcttgggctcagccataccctggagcct

SEQ ID NO: 14316 - DNA, 201 bp, Homo sapiens
gtccagtatattggcctccagggcaaagctacctaggttctgagtccaattatggccttcatgagtcttgtttctttggacaggttttccagtgtctctgcgcctcaacttcctcatgtataaagtggagatgatgccattacaggttgctgctttatggcacataattaatactagctcttatttataggaactgaacaa

SEQ ID NO: 14317 - DNA, 201 bp, Homo sapiens
ctttctaatgcagaaggtgtagacacagggcacagaactgccaactgtggctgctgacacctgtctgactttgactgggttagtgacaaagaaatgacttkccttttgtatgttagccctgtgcctggcatactgcaaatatctatggttgataaattaatgttatcatcatcacgtaagcatcttgggaagtctgtaagt

SEQ ID NO: 14318 - DNA, 201 bp, Homo sapiens
atctaagaggtaataaccctaatacctcttagtgttgctgtgagaattaactaaagtaccatcttcatgtggtcagcacaatggctgacacatagcaagaycttggtaagttatagctgttgctgtcattcctgcagctgttatctttgtcattacgcttactgttattattagctctgctatcagagtgatgctgtggct

SEQ ID NO: 14319 - DNA, 201 bp, Homo sapiens
ccatttggacttcctttttgtagtgggctattagattttgcctctgcttgtttctgaatacccaagcttgctaacacagggaaagaccaattatcatgattattattatttaccttaagacctgattctacctatctatgatcacatagacatttggaagcaaagagaaatgcttttcatgtgggaaaaaccaataccaac

SEQ ID NO: 14320 - DNA, 201 bp, Homo sapiens
catggtgaaagaagacagacagtgtaatttccctggaaactcaattttgattcagacgtccacagcatctcatttctgcctttaaaaaatttcaagagtgrcattttggcatgattggactcacaggtggagaaggtatgacaaacattctggaaatcttggaaggtgaaatatagggaagatggcccctatggaggttca

SEQ ID NO: 14321 - DNA, 201 bp, Homo sapiens
tgaggattaattgaaataactcgcaaaaatatccagctctctgtttccctgctaggggctcttgtcataggagccattgttgtagccttagaaaacatacrgcattattttagggggagaggttagagtagaattttaaagagtgcatttctcttccagtaagcaattctgcatcgataaaaagtggagaaagaataagtg

SEQ ID NO: 14322 - DNA, 201 bp, Homo sapiens
agatagatgaagggttaggaagatgtaacttgtcctaaatcacgtgtcttctaagcggtggaactgattttctcactgactatagatgttgagcccattamtgtgatacctactgccttttaattttaaaagttctcattgttttatcgttttcatcattatcatatgatttacctcttctcttgtgtcttataatccgat

SEQ ID NO: 14323 - DNA, 201 bp, Homo sapiens
gtcttttttttttttttttttttcctccttttttgagagagagagtctcactctgtcacccagactggattgcagtggcacaatctcaactgactgcaacstgcacctctcaggttcaagcaattatcaggcctcaacgtcctgagaagctgggactacaggcatgtaccaccacactcagctaatatttgtatttttagt

SEQ ID NO: 14324 - DNA, 201 bp, Homo sapiens
atccagtcagagtgaatcagcttgcccagtgcttggcatatagctgctcaagaaatattaggcattctttgttattataaatcccctttgtattttaaaaycctcatgtatcactgaaacaaccaactgaaaaccattgagaggctcatggtgaaagaagacagacagtgtaatttccctggaaactcaattttgattcag

SEQ ID NO: 14325 - DNA, 201 bp, Homo sapiens
taatgattaaatgattctggttattagcataaaacacagctgtagtacataagaggtaacctttattgtttaaatattattcaatgtgcctacatagcacmcagcaaaaaaaactttttttcagactattcagccattatggaaataacttataattacattcagaaatgttgcaaatgcaactcatccttgcagtgggat

SEQ ID NO: 14326 - DNA, 201 bp, Homo sapiens
tgtttaaatgctcaaacttggtatggaactgcacagactatacggctgctctccactcaagaatacaaattgaacattgactttcctcattttttatccarttttgctttccagagacccagatatggcttcattttttaaatgaaattttgcaggtcattagctcataatgattaaatgattctggttattagcataaaa

SEQ ID NO: 14327 - DNA, 201 bp, Homo sapiens
tgtggctctccccagggcctcccttcttgttctccccagttgcagacctcagacaggagtctgcttgtcttcctaggcccttgtcagagtggaaggtggcyctccaccacaccagcccactttccagttatcaaaaaggatctttgatttaatatttccagagcaattttggtgatttccattcaaatctgttttttgtca

SEQ ID NO: 14328 - DNA, 201 bp, Homo sapiens
cccagagtgctgggattccaggcgtgagtcaccatgccaggcccctgcctctgtttaaatgctcaaacttggtatggaactgcacagactatacggctgcyctccactcaagaatacaaattgaacattgactttcctcattttttatccagttttgctttccagagacccagatatggcttcattttttaaatgaaattt

SEQ ID NO: 14329 - DNA, 201 bp, Homo sapiens
ggaaaagctcattttccagtttttccccctccagctgtaggggatatattttcgttaattcctgtgaccatatggcagcatggttaggatcttgggcttcyaaatcagacagttgtaaacttaaactccaattctgccacttattgtgtcactttggacaagttacttcacctctccaagcctcagtttccctgactataa

SEQ ID NO: 14330 - DNA, 201 bp, Homo sapiens
gtgagccacggttggccagctcccaaacaccatgacatacaacttgcaggaaaagctcattttccagtttttccccctccagctgtaggggatatattttygttaattcctgtgaccatatggcagcatggttaggatcttgggcttctaaatcagacagttgtaaacttaaactccaattctgccacttattgtgtcact

SEQ ID NO: 14331 - DNA, 201 bp, Homo sapiens
tagtatttgccaaaactagaggatgaatgagtgatgggtaagagagttctcagaaaaatggatataaacaatattgtaaatcatatttggaaaataaataytagaatcattgaatccctgagttatagaaaaatttattaatagcgctatctggctactttttaaagtgtggacatcctcgatgtattagctatgcatctg

SEQ ID NO: 14332 - DNA, 201 bp, Homo sapiens
tttcttaccaggagtacatagtttgttctttaagcaaaaccatatgcatcgtattttaaatggaacagggaggttgttccatgcgtcaacttagtccaaawgtagagggtcaggaaaacaatgatatgagaaaagggccggttactgtctgggaatccataaatactgcttggcaaatggcacattgcatgcttattcctt

SEQ ID NO: 14333 - DNA, 201 bp, Homo sapiens
cccttatcagagatcaattggccataaatgtaagtatttctttctggactctgaattatatcccattgatctgtatgcctgtccttatgccattgccacaytgttttggttactgtactctgtgtaagttttgaaatttggaattgtgaattctccaactttgttcttcattttcaagattgttttgggtattctgggtcc

SEQ ID NO: 14334 - DNA, 201 bp, Homo sapiens
ctttgaaagttgtccttctgcacccattttccccagacctaacctcgatttgtgctccaggtctgagcagaaatgttattccctccagaaagccttccctkgatgttgagggatgaagttgtagccccctcccgaatgcgtcctcagaactcgctggttctcgtcctcgccctcagcatacttgctcattgtttgtttcca

SEQ ID NO: 14335 - DNA, 201 bp, Homo sapiens
tctattaaatggtctttgcacccttatcagagatcaattggccataaatgtaagtatttctttctggactctgaattatatcccattgatctgtatgcctrtccttatgccattgccacactgttttggttactgtactctgtgtaagttttgaaatttggaattgtgaattctccaactttgttcttcattttcaagatt

SEQ ID NO: 14336 - DNA, 201 bp, Homo sapiens
gcatgtggcccaccagccatggtttggacaagcttagtctacaggttcttcaagaggggcttgagcatttgaaagacttctagtgggagagatcacaaggkacaagtagaaaatcctgggctggcctgagaggcagacctgtgattattttgctctttgaaagttgtccttctgcacccattttccccagacctaacctcg

SEQ ID NO: 14337 - DNA, 201 bp, Homo sapiens
tctcgcatttggtgagaggagtcttctgtgttgattgtcatggtggtgtgagagcagaagggaaacatggtttcagaaaagagtttttccctgaaaccacycctctattttcttctcagacttttatagttttagcacttatgttaagacttttgatccattttacgtcaatttttctatatagtttaaggtaggcattca

SEQ ID NO: 14338 - DNA, 201 bp, Homo sapiens
actttaggcattgatgcgcttaattatgcttttcaacaagattttgcatttttaatatttccttttagagcttccaggaatctcaattattaattgtaccstggatttattggtctttggactctcccgctagtataaagactgtagattcatcaaacattgtttactgtcttcaaacttcaacagtgttttaactatcaa

SEQ ID NO: 14339 - DNA, 201 bp, Homo sapiens
gggaaaatggaggagaatgatgacgaaggaggaggaggaggaaaaggtgacttgcctctagctgatgtggattatttctcttttttaatttccatgtctgygtagcttcatcatagatctcagcttaaggacaatgaaagtcgtttattgagtacttagtatgtgctggttgcagagccaagtcttttttttttttttttt

SEQ ID NO: 14340 - DNA, 201 bp, Homo sapiens
acagacagtgtaatttccctggaaactcaattttgattcagacgtccacagcatctcatttctgcctttaaaaaatttcaagagtggcattttggcatgaytggactcacaggtggagaaggtatgacaaacattctggaaatcttggaaggtgaaatatagggaagatggcccctatggaggttcattgtcccccacctt

SEQ ID NO: 14341 - DNA, 201 bp, Homo sapiens
cgtcctcgccctcagcatacttgctcattgtttgtttccatctctatcatctctgtgagccctttgaggatggatgtgtgtccatcttgttaacagttggmtccccagtaaccagtacagtgccagatacagagtagtaaccctacattctagcgtaggcaaatattctagtatttgccaaaactagaggatgaatgagtg

SEQ ID NO: 14342 - DNA, 201 bp, Homo sapiens
ttttaagatacagaaagtgggccttaaaggtgctactgacttgctgatatgctttggctgtgtccccacccaaatcttaacttgaatcgtatctcccagarttcccacgtgttgtgggagggacccagggagaggtaattgaatcatgggggctggtgtttcccatgttattcttatgaaagtgaataagtttcataagat

SEQ ID NO: 14343 - DNA, 201 bp, Homo sapiens
gtgtcaaaacaggagctgtatttcatgtcctgaaaagtgtgcacggttggcctcctctaggtcccacgtgccttctggatggttttaaccctcagcctctytttggcctgtgagtgaaacccatcatttgacacagaggctttctggaaatgatgctcctcttagatgaaagttccctttcagaaatctttcattccctga

SEQ ID NO: 14344 - DNA, 201 bp, Homo sapiens
cataaccacatctactttgtgtctctatagatttgactattctggatatctcatataaatggaatcacacaatatgtggccttttgtgtctggcttcttgsttttagcatgctttcaaggttcatccatgttgtagaatgtatcagtacttcattctttttatggttgagtgatattctgttacatggatataccactttt

SEQ ID NO: 14345 - DNA, 201 bp, Homo sapiens
accatcccccgctaaagaaacaccatatccattaagtggtcattccccatttcctccttcccccagcccctcataaccacatctactttgtgtctctatasatttgactattctggatatctcatataaatggaatcacacaatatgtggccttttgtgtctggcttcttgcttttagcatgctttcaaggttcatccatg

SEQ ID NO: 14346 - DNA, 201 bp, Homo sapiens
tactttctaaaattctcgggcctttgcaccttctttttatcaacgcttagttctatgttactgaatatttcttaattaagtgcaggaaagaaaataaccaytttttctccttttaaagaagcacacacacctttcttttattggtattacattccttttccctgttggtgcccctgttggttttccaaattgtcttcccat

SEQ ID NO: 14347 - DNA, 201 bp, Homo sapiens
aaacatctgtgcaccagtaaagggttctgatgtgtgataaatttatttagctattactcatctgaagttatactattttaggatcttggggcagtgaggaytttggaaatggaacaggatgctcctttaagttagggtaaaatgaagtctataaaaactgtttttctatatcctcctcctaccccacaaagaaagttaggg

SEQ ID NO: 14348 - DNA, 201 bp, Homo sapiens
gaggaccttgtgttcctgctggagagtgagagtccctccctccccattccactcccaagagcagtgaagagtcaggaaggtgggcttgttttgttttgttwtgttttgttttgcttgttgagcaagggaatgcggttcccctgtgtcggacttgtttcagaaagacaatgtcactgaggctggggcagggagattagctga

SEQ ID NO: 14349 - DNA, 201 bp, Homo sapiens
taaatgaagcaccgccaggcccagttggggaggaccttgtgttcctgctggagagtgagagtccctccctccccattccactcccaagagcagtgaagagycaggaaggtgggcttgttttgttttgttttgttttgttttgcttgttgagcaagggaatgcggttcccctgtgtcggacttgtttcagaaagacaatgtc

SEQ ID NO: 14350 - DNA, 201 bp, Homo sapiens
aacccaactcctagccactgctttttgagcagctactcagtgcctaagactttgaatagtttattaatcatgtgtcactgcagcaaaggggacatttcggycctgatttcagagatgaaagaaccaaggcatagaaattgagtcactttctggagtgtacacaactagtaagtggattcgagttagttttgctctattcca

SEQ ID NO: 14351 - DNA, 201 bp, Homo sapiens
tttttcaattccagagatgttttcacctggaagattccccagatttggcaaaaacaacccaactcctagccactgctttttgagcagctactcagtgcctwagactttgaatagtttattaatcatgtgtcactgcagcaaaggggacatttcggccctgatttcagagatgaaagaaccaaggcatagaaattgagtcac

SEQ ID NO: 14352 - DNA, 201 bp, Homo sapiens
ctttttacagtcatgtgctttcagcccagtaccctttgctatgccaagatccagctgaaactgaaccaggtgggggaggcctgctaatgcccaggcagtcraaatgacgccatctcatcactccttctcttaaaatttttttttgtctttcttcttggatttccagcaacagggagctgccaccaccgtgtactgtgctgc

SEQ ID NO: 14353 - DNA, 201 bp, Homo sapiens
gatcaccattggtagatcatcacttagaatgccatcactaccttctaacagcaatcagtccccttaagtggctttcttctcttttttttcttttatctttktgttttttttttttttttgagggagtcttgctctgtctgccagatggagcacaatggcgcgatctcagctcactacaacctccgcctcccgggatcaagc

SEQ ID NO: 14354 - DNA, 201 bp, Homo sapiens
agaatgaggtatgtggtactcgtgagcaggattttcaatgcctggctggttgttacttatccatttagtccgagcttcagggaaagaacatgacaccggcstccagcagagcctgctcttggtccactgtttatcctggtgaccttaggcaagtcatttaatttccttgagttttggtgtaagtattgatggagcagacca

SEQ ID NO: 14355 - DNA, 201 bp, Homo sapiens
agcaggattttcaatgcctggctggttgttacttatccatttagtccgagcttcagggaaagaacatgacaccggcctccagcagagcctgctcttggtcyactgtttatcctggtgaccttaggcaagtcatttaatttccttgagttttggtgtaagtattgatggagcagaccatcaataactgttcttatgtctatt

SEQ ID NO: 14356 - DNA, 201 bp, Homo sapiens
aattattcttttacccagacacttacatattcctagccattccttttgcttaagtttgcagagatttgtgcttaaaactgaataaacaatctcagggtttgtgtgtgtgtgtgtatgtgtgtgtgcgtgttatatgaagtcttgctagaatgcataaacaaacaaaaaaaatatcatactctcagatcctggatactgtgg

SEQ ID NO: 14357 - DNA, 201 bp, Homo sapiens
tgtgtgtgtgtatgtgtgtgtgcgtgttatatgaagtcttgctagaatgcataaacaaacaaaaaaaatatcatactctcagatcctggatactgtggtcrcctggacttcaaaagccttttgtccgtatgtatttacataatgtattctccatgtttggttttcattaaacccatgagtttaataataaagtgtttggaa

SEQ ID NO: 14358 - DNA, 201 bp, Homo sapiens
gtgttatatgaagtcttgctagaatgcataaacaaacaaaaaaaatatcatactctcagatcctggatactgtggtcgcctggacttcaaaagccttttgyccgtatgtatttacataatgtattctccatgtttggttttcattaaacccatgagtttaataataaagtgtttggaactatgcttttccctaccactttt

SEQ ID NO: 14359 - DNA, 201 bp, Homo sapiens
aaatgtatttaacgctctctcaagaaatccatttaagaataagaacacggtttgggggtgattttcagaccgtaaattgaagtgtaaatattcgaattatyttcataaactcttcagttctgttgggcttttatgttatcatacagtgatttttttttttgtatttaagttttctagcagttctcttttttaagagcctca

SEQ ID NO: 14360 - DNA, 201 bp, Homo sapiens
tgtgagccaccgctcctggcacccatcaaattttcaaaggaagaaatggaatggtgcaaccatggtacatgggaaggaggagggggacacacaagactgtrcctatcatgggggcttcgacctcatctgggaaggtggttggagagagtgagtcctgacctgagctttggaacttatcaagttgagagagaaatttgataa

SEQ ID NO: 14361 - DNA, 201 bp, Homo sapiens
gagcagaagaactcactgaaaagtcctggcaaggttccacggcacctgtgatgcttccatcacacatatttgctgagtacccgctgttcataggtcagtcrctatgcaaggcactgaggtgacaaagacaagcagaatgacagttaaatgtaacatgggctttgtggtcaattagttctgggttcgttcccaggtcctatc

SEQ ID NO: 14362 - DNA, 201 bp, Homo sapiens
catagtggtcatgctaacgtaataacctctcttttttatttgaaggatattaaataaaattgtacttttaatcagagcctttttttgaaaaaaaaaaaaaagaaaaagatagttgatattgtgggagatggctacaatacagattcatcccatattctctttaatgttctattcccaagaagagcactaattaatctctct

SEQ ID NO: 14363 - DNA, 201 bp, Homo sapiens
tgccttcactgcacattccgggatcgccatgttctagaacattcatgtctgccttttagccagcagaatgctattctcacatccacaatgggacagctaayagcccccatttatcaaatccctgtcatatgctgtgtcaggcactttatatccctcatccaggaggatgcaaaaacctggtgtttttcttttttttttttt

SEQ ID NO: 14364 - DNA, 201 bp, Homo sapiens
gtgtgtgttgggggtggaattagcatgtagaggttggcaaaggggacaggagactgtgggatgattagtatattcttatttggcctgggagggaaaaaaartctttcatttccaacaatattcattctctgtgtcacctcagcatttaatttacttccgtcacaaaactacttgaagttgtcccaggctagttggtcctat

SEQ ID NO: 14365 - DNA, 201 bp, Homo sapiens
ttaacagcaagatcttcagagctgcagctcacctgtgccacgatggtctcctaggagccctttcctgctgtagtcccgccccgaggggtttcacttcccaytgcctcttggtagccgtgggcactttggtgctctgatgatgtaacatggagattgtccttgtctccatcgctgtctttactggtgtatgcccatgaggta

SEQ ID NO: 14366 - DNA, 201 bp, Homo sapiens
ggttccacggcacctgtgatgcttccatcacacatatttgctgagtacccgctgttcataggtcagtcgctatgcaaggcactgaggtgacaaagacaagsagaatgacagttaaatgtaacatgggctttgtggtcaattagttctgggttcgttcccaggtcctatcactaactagtacccttatgaacctggacatgt

SEQ ID NO: 14367 - DNA, 201 bp, Homo sapiens
gtcaggccattggtataccattgtttttcttaaacatttatttattttcttatatttacagcatatgtggtcatttaaaattattttatagcatataaaastaaaaagaatataaattaattttttagcattaatattagggaagataatctgacatttaaaaatacatgtctatatgtgtatacatacatagaagtatat

SEQ ID NO: 14368 - DNA, 201 bp, Homo sapiens
ttgtctccatcgctgtctttactggtgtatgcccatgaggtatgtcaaagtctgtatgtctttgtaataatgctggatcatttgtccaccttcagagacarctgaagacagttttaagtgaaaccacacagagggcatataccattgggacaagaggtctgaagtctatttttgagaaagagaagagatcaagtagttaac

SEQ ID NO: 14369 - DNA, 201 bp, Homo sapiens
ccacactcaggaatagtggaaaactgacaagaccctggagatgctgtgtggggagggataatgggaacgcaggtcagcatgctctaggaatggtaagagaractcccaatctgaacggtagtcaaagaaggtcttcttctctttggagactgaaaggctgagagggtacctgccctgctaaggaaatgaacaggacggaag

SEQ ID NO: 14370 - DNA, 201 bp, Homo sapiens
ctgggcttagtaagttgcctgacttctcatcctggagttcgtatccccttgtttctagaagagaaatccctcagatgtgaaggtgtgttccatgattttgycgaacttgccctacatactgttttattatatattctgcccacttctattccctgccaattaattaattgtttcattggtatagttttttttttttttttt

SEQ ID NO: 14371 - DNA, 201 bp, Homo sapiens
ccaggctggagtgcaatggcgtgatcttggctcactgcaacctccgcctcccaagttcaagcgattctcctggctcaacctcctaagtagctgggattacrggcacctgccaccacgctcagctaatttttgtatgtttagtagagacgaggtttcaccatgtttgtcaggttagaccggaactcctgacctcaagtgatc

SEQ ID NO: 14372 - DNA, 201 bp, Homo sapiens
ggaaatgaacaggacggaagaatgatggagggagaatgggaagtcctcagcacataaaagtttgagctggaaatgaaatatacaactctgcatagtcagcrgattttgctgggctgggccagttcagctcagcaaggattgctgggcatgtgcttgaaggagaaaggtgaggatacaaaggcaatgagtacatgatccttg

SEQ ID NO: 14373 - DNA, 201 bp, Homo sapiens
accagtccctagcctgtggagaaggggcaatctcttatctgaaggcctaggaggtgcagggatgtttatatgggctgctagcgcttagtttcctgccacarggagacagtaagaaaggtgacgtcaatctgagatgagagagagagcaaaacagttcttttgaccaccttgaccccgaccttgaaataaggtggaactaat

SEQ ID NO: 14374 - DNA, 201 bp, Homo sapiens
ctccacattggccttctgccgtgattgtgagactttcccagccatgtggaactgtgagtccgttaaacctctttcctttataaattactcagtctcaggtwtgtctttattagcagcatgagaacaaactaatacaccacttgaattgctggtacgtctgaggggcttgactcccagtccttcgaacatggaggggtagct

SEQ ID NO: 14375 - DNA, 201 bp, Homo sapiens
atgtctttattagcagcatgagaacaaactaatacaccacttgaattgctggtacgtctgaggggcttgactcccagtccttcgaacatggaggggtagcyctttttctaagctcctcataaagtattgtatccaattcttcagaagggatgaaggtatctggtcctgtccgcaaacagagaagtgcttcttgtactgacc

SEQ ID NO: 14376 - DNA, 201 bp, Homo sapiens
tccacaatgtccacataccagcttgatggtgacttgtgtcattctccatccccttgttaagagaaaatctactttatgagccctctttccaaccgcagtgwtgaggactagaccaggcaagatgatgccgctggaccactggatccagctggaccgctagaccacagagcccctggagcctcccaaggccaagcccgccag

SEQ ID NO: 14377 - DNA, 201 bp, Homo sapiens
ggggtagctctttttctaagctcctcataaagtattgtatccaattcttcagaagggatgaaggtatctggtcctgtccgcaaacagagaagtgcttcttrtactgaccaggcagtgacctaacgcagtccttgagacaattccaggtgcccctcaggccgtttttccaccctggtgtttttctttgtatagacagcctat

SEQ ID NO: 14378 - DNA, 201 bp, Homo sapiens
tccacctgggcacccagcctggtgaacagggtgcaggctgggatttagccctaccttgcttttggaccattgagctactaagttggagcaacaaggcttgrgaatttttctttgatcataggtaggaaaggtaaaaaaacataaatctgccaatagaaaatagcatcgtaatgagtttctactatatttgtttgggctttg

SEQ ID NO: 14379 - DNA, 201 bp, Homo sapiens
tccttgagacaattccaggtgcccctcaggccgtttttccaccctggtgtttttctttgtatagacagcctatgcctggataagaacatgctgcgtcagasagttctttttcactttgcccctcaaaatgtgcacaccgacagccacagatagatcccagatgtctttttcctgctcttgcaaaccttgaagtgggccctg

SEQ ID NO: 14380 - DNA, 201 bp, Homo sapiens
attctagcaaactgctctcatatcctgtgatcttaaaatttatttattcaccttttcctttttgttaaatagattctgtagaattctctacatctctgaayatagttttacttcttctccaatttttatggcttttgtttctttttcttgttttaatgcactggctatagcctgtaggacagtgttgaacagaggttttga

SEQ ID NO: 14381 - DNA, 201 bp, Homo sapiens
gtttggtggaattaacatagatttcccacatggggaaggttttgggtgaggatttagaacaaggcaggttcttgatcctcggaagagattcttatctgagrggggatttgagaatggcattgcagagtgggaggcgctgctgtgtggaaaaatgaactggaataattattagaacagttctcagaatttacaggatatttg

SEQ ID NO: 14382 - DNA, 201 bp, Homo sapiens
cctggataagaacatgctgcgtcagagagttctttttcactttgcccctcaaaatgtgcacaccgacagccacagatagatcccagatgtctttttcctgmtcttgcaaaccttgaagtgggccctgccggcaggcacacctgccaaggaaaatgctgtcctcgaaatgttcctggcaccgttttcaagaggtgccgacca

SEQ ID NO: 14383 - DNA, 201 bp, Homo sapiens
aggatatttgatcataggagtaactttcctcaggagtgatggatggaatgcctgtacttggaatatttttaaattaatctattttcattacattgaaagtrtgacacacagagaacactaaaattggatgaggcactacctggaattatataaagaatgacaaagatgcggttatccatttattttctaggcaagttagtt

SEQ ID NO: 14384 - DNA, 201 bp, Homo sapiens
caagcgctggaattgctgacctccctgaaagagaagcctgcagctgcggcctctggggtgaattccccccatgggaggacctggtggagttaaaacagackatatccacatcacagagagctggcccattgctcagggcctgggaagtggtagggagggaccttcccagaagagagatgactcaggctggtcccaagcccc

SEQ ID NO: 14385 - DNA, 201 bp, Homo sapiens
gatcacatgaggtcaggaattcgagaccagtctggccaacatggcaaaactccgtctctactaaaaattcaaaaattaggcttggtggcacgtgcctgtartcccaagctactcaggaggctgaggcaggagaatcacttgaacccagtaggcggaggttgcagtgagccgagatcgcaccactgcactccagcctaggtg

SEQ ID NO: 14386 - DNA, 201 bp, Homo sapiens
ggcaggccaaggcgggtggatcacctaaggtcaggagttcgagaccagcctgaccaacttggcaaaacccagtgtctactaaaaatacaaaaattagctgrgcatggtgtcacatgcatgtagtcccagctactcaggaggctgaggcaggagaactgctcgaacccaggaggctgaggttatgttgagccaagattgtgc

SEQ ID NO: 14387 - DNA, 201 bp, Homo sapiens
gttccacatcctccctgtgggactaggggccagggcaatgggaatcagtgcagaaataaagctcatgctgtttgctctgccatgagtaacgaagtcctctrtatctgatcctgggtctcctgttttctgctagcttcctcaaaacttggtagctaactcattaacttacaaggaagaggttgaacgtgtagacccttcaca

SEQ ID NO: 14388 - DNA, 201 bp, Homo sapiens
tggtttactactccttagacggtggcccagagaccctttaaatgaaattcattttactagcaccctttttcatcatgagaaatatattctgtttttcttaraaaatgggttatgttaggtctggtcaaggtaaataagtgttgagagtcgatgttgtgtgcatagttaatttcaattctttgaagaagctcccccatgata

SEQ ID NO: 14389 - DNA, 201 bp, Homo sapiens
aggctcagttaatgataaattgttatcaggagacccagcagtttctgctttttctaccctcctctttgacctctatttaaactaataggttactgggtttsaacatgccatgcagtgggaagaggcgggaaccccactgagctgtcctctaagtgaatcatgcccactatttggttgtgaggctgtggactttacttttca

SEQ ID NO: 14390 - DNA, 201 bp, Homo sapiens
acctgtaatcccagcactttgggaggctgaggtgggtggatcacttgaggtcaggagttcgagatcagcctggccaacatggtgaaaccctgtctctactrtaaactccgtctctactataaatacaaaaattagccaggcttggcgctgggtttctgtaatcccagctacttaggaggctgagacaggagaatcacttga

SEQ ID NO: 14391 - DNA, 201 bp, Homo sapiens
gtattaatagtagggagacagtaagcaagcaaggctcagttaatgataaattgttatcaggagacccagcagtttctgctttttctaccctcctctttgasctctatttaaactaataggttactgggtttcaacatgccatgcagtgggaagaggcgggaaccccactgagctgtcctctaagtgaatcatgcccactat

SEQ ID NO: 14392 - DNA, 201 bp, Homo sapiens
tctcgatctcctgacctcatgatctgtcagcctcagcctcctaaagtgctgggattacaggcgtgagccactgcgcccggccggggatcttgtattaatartagggagacagtaagcaagcaaggctcagttaatgataaattgttatcaggagacccagcagtttctgctttttctaccctcctctttgacctctattta

SEQ ID NO: 14393 - DNA, 201 bp, Homo sapiens
acactttgaaataatttatgttatgtgaatttcatctcagcaaaaagaggctaacacataaggagacatattttgatacatgtggcatattaagctgctgytgttgttttttaaatattccagctgcgtgcagtggctcacacctgtaatcccagcactttgggaggctgaggtgggtggatcacttgaggtcaggagttc

SEQ ID NO: 14394 - DNA, 201 bp, Homo sapiens
taggacccatatccctggattgttgaggaaatacgtgaacatatgtggcacacattatagtgtctggcatacaataaatactttgtaatgttactggtgtyttcttaccgttattgtctcactggtgaccgtttgaaatgttgaagctttattattacagataatggtggatatagtctcttccttgtttattttttgaca

SEQ ID NO: 14395 - DNA, 201 bp, Homo sapiens
ggcgggtggatcacctaaggtcaggagttcgagaccagcctgaccaacttggcaaaacccagtgtctactaaaaatacaaaaattagctgggcatggtgtyacatgcatgtagtcccagctactcaggaggctgaggcaggagaactgctcgaacccaggaggctgaggttatgttgagccaagattgtgccactgtactc

SEQ ID NO: 14396 - DNA, 201 bp, Homo sapiens
tttatataaaatatgcagagtaggcaaattcataaagacagaatacgcatcggtggtttctggggcggcggggagtatggaaagcctgttaatgagtacawgtttctttagttttttttggttttttgttttttttttgagacggagtcttgctctgttgcccaggctggagtgcagtggcaccatctctgctcactgcaa

SEQ ID NO: 14397 - DNA, 201 bp, Homo sapiens
atactttgtaatgttactggtgttttcttaccgttattgtctcactggtgaccgtttgaaatgttgaagctttattattacagataatggtggatatagtstcttccttgtttattttttgacagaatctttttttaaaaaagtttttatttgtttggtgagaatttacttgttacaggtctagtgctgttatagttgaat

SEQ ID NO: 14398 - DNA, 201 bp, Homo sapiens
atgttgacataacagttctgaagaccaaggtggtggaataggttaggttaggatacgtcggaggagccagtgtgaactgctcctttaagacatgaattagyccattttcatgctgctgataaagacatacccgagactgggcaatttacaaaagaaagaagtttattggacttacagttccatgtggctggggaggcctca

SEQ ID NO: 14399 - DNA, 201 bp, Homo sapiens
ttacaggtctagtgctgttatagttgaatgttttgaattatgtaacttaagtgaaacataaagctatgacttgaattttgtggttagaaattttctcagtygattgacaaggatggcgtattggccaccttttgccgcagtaacaaacaatcccagactctcaaggcttgcaaaaataaatgtgtgtttgtttgctcataa

SEQ ID NO: 14400 - DNA, 201 bp, Homo sapiens
agaggagagcttgtgtagggaaactcctgttttttaaaactatctgatctcgtgagacttattcactatcacgagaacagcatgggaaaatcctgcacccrtaattcaattacctcccaccagcttcctcccacgacatttgggaattgtgggagttacaagttgcaattcaacatgagatttgggtggggacacagctaa

SEQ ID NO: 14401 - DNA, 201 bp, Homo sapiens
gtaacaaacaatcccagactctcaaggcttgcaaaaataaatgtgtgtttgtttgctcataacacatgtggctgagggttggccgtggctccacagtcacrggtgggctttcctgggctcagcttctcacagcgtctccttgcagggcccaggctgtaggagatgtcatcagggcctgcagagggcaaaacctcacagagg

SEQ ID NO: 14402 - DNA, 201 bp, Homo sapiens
ccggggccgggcacggtggctcatgctggtaatcccagcactttcggaggcctaggtgggcagatcacaaggtcaggagatggagaccatcctggctaacrtggtgaaaccccgtctctactaaaaatagaaaaagaaattagcctgacatggtggcacatccctgtaatcccagctactcgggaggctgaggcaggagaa

SEQ ID NO: 14403 - DNA, 201 bp, Homo sapiens
ctaagttcttgccacaggtagaagccatgctactgcacaagtttcatacttgaagagtggacatctgacacagtgttggtggttgttgaagtgtatgactwttactgtgttgctttggaagcttgatgccataacaaaagtgcagaattccatgtttgataactttctgacttgatgaaaatgaattgtggatacagattt

SEQ ID NO: 14404 - DNA, 201 bp, Homo sapiens
taatcccagcactttcggaggcctaggtgggcagatcacaaggtcaggagatggagaccatcctggctaacgtggtgaaaccccgtctctactaaaaatasaaaaagaaattagcctgacatggtggcacatccctgtaatcccagctactcgggaggctgaggcaggagaatggcgtgaacccaggaggcggatcttgca

SEQ ID NO: 14405 - DNA, 201 bp, Homo sapiens
acttagccaaaactaatttgggatttttgtttgtttgaattgttggagggtggatgagagtgaagacatatccttttgaaacttaatttaatttttatttwttattattattattattttcaattttttatttttattattattattattttctattttttatttttattttttgagacggactctcgcactgtcgcccag

SEQ ID NO: 14406 - DNA, 201 bp, Homo sapiens
gggattttagttgctggatgctgaagttctgccaacacagtgggtttggagagtaggagtgaaagagtggagactggccataagttgggagggtaagtaaytggttgtgattgaaaggaaagaaggaggtaatgatgagttttggtctgggaaccggagaatggtggtccatggacagaaatagagaaggcaagatgagaa

SEQ ID NO: 14407 - DNA, 201 bp, Homo sapiens
cacgtggccttgctgacatctgagtttgcaacttcttttatgccttctgctaactgggaccccagtgggcttccctgctacaccctctgaggttccccagwcctgccaagctgttccatccccagttccttggtgcctgctggtacttcaccctggagagcccagcccttccacttgttcagatctcagtctctcatctgg

SEQ ID NO: 14408 - DNA, 201 bp, Homo sapiens
gaataaataggtacataagtgcttgctagcaagcagctgaggcaacctattaaaactcatgccagtggtaaagttaagctgctttctggtaagaatttcasaattccaggacgtctcaaatttctggctggtacaccctgggtaaggtccacaggctggatgggttttggaacatgtcttgattgtactttttcctcttgg

SEQ ID NO: 14409 - DNA, 201 bp, Homo sapiens
ctaactgggaccccagtgggcttccctgctacaccctctgaggttccccagacctgccaagctgttccatccccagttccttggtgcctgctggtacttcmccctggagagcccagcccttccacttgttcagatctcagtctctcatctgggagggacagcttgagcactatgacctgtgtgaagcttttcccagtgctg

SEQ ID NO: 14410 - DNA, 201 bp, Homo sapiens
tgaggcaacctattaaaactcatgccagtggtaaagttaagctgctttctggtaagaatttcagaattccaggacgtctcaaatttctggctggtacaccytgggtaaggtccacaggctggatgggttttggaacatgtcttgattgtactttttcctcttggtttggaaagcaacgtaccctaggtaaggagagatttc

SEQ ID NO: 14411 - DNA, 201 bp, Homo sapiens
tggcgtgagctgagatcgcaccactgcactccggcctgggtgacagagcaagactctgcctcaaaaaaaaaaaaaaaaaaaagaaaaaaaaaagattgaamatgtggaatatgagacaaatgaaaaagattgaattccgttccaactgggcttttgaatttattttcgcacttcctattttttgagcccgggagtgcaaga

SEQ ID NO: 14412 - DNA, 201 bp, Homo sapiens
caacctattaaaactcatgccagtggtaaagttaagctgctttctggtaagaatttcagaattccaggacgtctcaaatttctggctggtacaccctgggyaaggtccacaggctggatgggttttggaacatgtcttgattgtactttttcctcttggtttggaaagcaacgtaccctaggtaaggagagatttctgaca

SEQ ID NO: 14413 - DNA, 201 bp, Homo sapiens
ctgtactctttaaccaaggctccttttgcaaagagaaatctgagctgctttttaaagaaggccgtttttaaataaaaatgcaaataagctactttgtaacyacattaattacccacctagcctcttattaccatgtttgtattgtttgcaaatactatttacagtcgtgtggaaattaacattactggtcctgaggaaaga

SEQ ID NO: 14414 - DNA, 201 bp, Homo sapiens
gcaacagtgggtttttgttaaatacggcaaatattaagagtcgtctctgggcattttagtttattcattcatttgttcatttattccacagggatttattrtgcatttactgtgtactaactaatggggagatagcaatgaaggcagactaagtgtctttgttctagtgcagccatatagtcagtgaatgaatgagtgagc

SEQ ID NO: 14415 - DNA, 201 bp, Homo sapiens
gacatccatttgggcattgtatatgttttgataggattacataaataatgaaattgtatgcaaagcatcagaatgcaaaaggtgttttctccaaggtgtayacactgcctgggccttgtactctggccctcaattttcttaaacagctgcatcttttgggggctctgttaagacatgctactgtctttagtattttgcccc

SEQ ID NO: 14416 - DNA, 201 bp, Homo sapiens
acgaaacataccttccagtctcccgagtagtgtattaggctaagtatggtcttttaaattattactttaaaaataaaagataatggaattatagcattaartacattttgcaaatgatcttctagtaggattattgaaagacagtaaaggcaagtataaatcagaagcaaaatcattgtcctctaattcattaatggttaa

SEQ ID NO: 14417 - DNA, 201 bp, Homo sapiens
gctgggagtacaagtgtgcaccaccatgcctggctaatgtttgtatttttagtagggacggggtttcgccatgttggccaggctggtgtcaaactcctgayctcaggtgtaccaagaacaaaaggccaaccccattagacggtggccaagttggtgctgtgaacagggatcctgcctctgcctcccaaagtgatgggatta

SEQ ID NO: 14418 - DNA, 201 bp, Homo sapiens
caagtgtgcaccaccatgcctggctaatgtttgtatttttagtagggacggggtttcgccatgttggccaggctggtgtcaaactcctgatctcaggtgtwccaagaacaaaaggccaaccccattagacggtggccaagttggtgctgtgaacagggatcctgcctctgcctcccaaagtgatgggattacaggcgtgag

SEQ ID NO: 14419 - DNA, 201 bp, Homo sapiens
ccccatctctgctacagatataaaaattggctgggcatggtggggtgcagctgtaatcccagctgctcaggaggctgaggcaggcgaatcgcttgaacccsggaagcagaggttgtagtgagctgagatcatgccactgtactccagcctgggtgacagagcaagactgtctcaaaaaagaataaaaatgaataaaaatta

SEQ ID NO: 14420 - DNA, 201 bp, Homo sapiens
agcttcttaaaggagctgcctcagactgtctcaagatcttagaaggccatgcctacattgccaccagcatcccttggctttttgcttggcttaagaatctrtcttttccgttcctccttccagcatactcagcacagtccacctctgtggtctctctgtggttttctttctgttttcctgctctctccatttctcattcac

SEQ ID NO: 14421 - DNA, 201 bp, Homo sapiens
ggaatgccatttgacagttacaggctcccgtgaggcggtgcaggctcctccgagccagggatggagctggggattgagtgacacaagactctttgggtatstctcaaacaatataaatcaccagcaaaatctcactcctacaaggagaacctgcagggagctccgtgggaggcactgctgtttactctcctcattccccac

SEQ ID NO: 14422 - DNA, 201 bp, Homo sapiens
agcaggacacactgcaaatactaggaatccttaagtacagtggaaccccagagcactctacctgctttctttctcacctccttaaaaactttttttgcccwcacctcatcatttattcagcagtcacaacagtgccaagaacttggctagagattggaaataaagcttatgccttctctcatatctcctgtaccttatttc

SEQ ID NO: 14423 - DNA, 201 bp, Homo sapiens
ggcaggcgaatcgcttgaacccgggaagcagaggttgtagtgagctgagatcatgccactgtactccagcctgggtgacagagcaagactgtctcaaaaargaataaaaatgaataaaaattatgtgattagagaggggaaaacaatcatttcttgtgcgctaatgccactcagcaggtgcttacactgtctggttcatcc

SEQ ID NO: 14424 - DNA, 201 bp, Homo sapiens
tgaaataccttggatttaggaattggagatttccttgggtcaggtttcaccctcttcaagtagcgtctcaaacagtatacccactacagctttctccccastctgtcaaccatgccatggggcctactttttgccctgactcccaccagataatgcccatcagatggcacctcttttggctgaaaaatcgaaaactcatca

SEQ ID NO: 14425 - DNA, 201 bp, Homo sapiens
acttgttaacttctgtattgtcttttctgctgctttatccaactttgcaatctataagcttctgttactggaaaatggtgatggtaaagtaattgctttcytatgttccatcacagagggtagactgctagctctagtatttttcaatgctgctttttaagtgatagatgtataccattcagtaccaaccctgcaccctgg

SEQ ID NO: 14426 - DNA, 201 bp, Homo sapiens
gagtctaggactcagcagctgtcaccttcccaaagtcacactgctgatgagtgacagagaccacatttaaatctgtgtgtttacaaggtctacaactgcaycctgctacctcccagaagctgaggcaggatgggcaggttgccacaccctcccaacctcctgcaaccttagttgttagtgaaaggttattaaataggcctc

SEQ ID NO: 14427 - DNA, 201 bp, Homo sapiens
aaatggtgatggtaaagtaattgctttcttatgttccatcacagagggtagactgctagctctagtatttttcaatgctgctttttaagtgatagatgtataccattcagtaccaaccctgcaccctgggacatgcctccttgctgaaactaccatttatctttgtgaattcattattcgtttttccaacaaacttttatt

SEQ ID NO: 14428 - DNA, 201 bp, Homo sapiens
acatgatggcaaccaggctccaatatctgccagttcccctgtacagattcctctttagcattctctcggcttccctcctcaacaattaattcagatgagcmgttgggagagtgcaggatccagttcaaaaggatctgtccccccgtgaaccccaggacagggtgagaggccacctgcacactttttttttgtcagctcaca

SEQ ID NO: 14429 - DNA, 201 bp, Homo sapiens
aagttaaaaaatagcacagaggggatccctgtgatttttactcacttttctacaagcatgactccttatataactacagtacaggatccaaaccaggaaayatgcctgggtacaatgtgagtgtataattccaggtaggtaaaataatggcccttattaggatgtctgcgtcctaatccgcggaaactatggatatgcttt

SEQ ID NO: 14430 - DNA, 201 bp, Homo sapiens
ttggccagactgctcttgaattcctaacttcaggtgacccacctgcctcagcctcccaaagtgctgggattacaagcatgagccactgtgcccagcctagraataacttttaaatcagaaaaatacattttttaaaaagatgtaaagcatacatagaggataacttacaaatctgcatttcatgaccacatatatctattg

SEQ ID NO: 14431 - DNA, 201 bp, Homo sapiens
gagatgtagctttgaatggccacatgagtgtttttttaaatgaaaaaaaaatctatgtataacttgtttcctgtgagggtgccaggaaactttacaatgarcttcgtgaattaaacctctaccagatgaatagaggtggtggcatggtagcagaaattaggattaaaaaaatggtttttgatttatgaaaaatttttctgc

SEQ ID NO: 14432 - DNA, 201 bp, Homo sapiens
tgtggtgtgcggtgcaacccgggctgtgttcccgagtgcatcaaacggggattgggacctgttttccttcccactcacatgtaggtcacctacgggagcargggaggaaccatctgaggtgtttttttttttttttttagatttctcattgctgagaacagttccagctctgctgaccaaaggctgagtgtccttttatta

SEQ ID NO: 14433 - DNA, 201 bp, Homo sapiens
aagaggtcacataggatattccatttatataaaatatgcagagtaggcaaattcataaagacagaatacgcatcggtggtttctggggcggcggggagtakggaaagcctgttaatgagtacaagtttctttagttttttttggttttttgttttttttttgagacggagtcttgctctgttgcccaggctggagtgcagt

SEQ ID NO: 14434 - DNA, 201 bp, Homo sapiens
tctccgacttatgtatgattcatcaagaggactccaggctgtggtgtgcggtgcaacccgggctgtgttcccgagtgcatcaaacggggattgggacctgktttccttcccactcacatgtaggtcacctacgggagcaggggaggaaccatctgaggtgtttttttttttttttttagatttctcattgctgagaacagt

SEQ ID NO: 14435 - DNA, 201 bp, Homo sapiens
aggagctcttggattgcaatttttcattcacccctccctctccacccttcctgtcttcaagcctgagcaggtgatactgcattttgtaccgtatgactttwaaacagaaccacgagttcagaactttggttaggtcctgcccgtgttctctagctaacgcatggcaacgctggtttccaacctttcactgtgcgggtttct

SEQ ID NO: 14436 - DNA, 201 bp, Homo sapiens
agggagatggagggaggcaaaaagaaaaagggagaaggaaagagaggaaagaggggaagggaggaaggaaagaagagagagaaggaggaagagagggaagkaggcacagaggtagagaggcagggagataatggagatcctggccaaaagttaatgctccgtttctagtagtccacagaaagcaccttgaccaagtgactg

SEQ ID NO: 14437 - DNA, 201 bp, Homo sapiens
ctttccattaagtgagtctttctccaagggaacagaagtcttaggttgttgatctggcggtcagaacctaggacaggcaaggcagtgggctgttgtagagkagatgaagctgatcagagcacacccacaccagtgacaaccggtcaggacctgggaagggctctgacccattcatctgagagatgtggcatgaggaacact

SEQ ID NO: 14438 - DNA, 201 bp, Homo sapiens
attgcattgcaaataatagcagttagtgggagttgagagccagctctgcaccagactcgtatcagccacttgacctccattattccttattccttggtacytctgcgccatctgtgatatcagatccttttttctgcaaggaaactgaggctcggcgatactaagaaactcagccagggtccgtcagctgtcaagtggcat

SEQ ID NO: 14439 - DNA, 201 bp, Homo sapiens
taaagtgatagagaggggctggcgaggagagcagtctaatttcaggaaagtcagaaaagtctttaaggaaactgaaggctgagctgccagggccagccacrtgggtactggagagtgggaggcccagtcacggggaatgctggcttagcacaactgaaaaatacaaaggtagaatatgaagtgtaatgacatggtttagat

SEQ ID NO: 14440 - DNA, 201 bp, Homo sapiens
cgggtgtggtggcgtgtgcctgtaatcccagttactcgggaggctgaggcaggagaatcgcttgagcctgggaggcagaggttgcagtgagctgagatcgygccactgcgctccatgctaggtgacagagcaagattccatctcaaaacaaaacaaaacaaaaaaacaagaagttaaggattgcagagcataagtatcttc

SEQ ID NO: 14441 - DNA, 201 bp, Homo sapiens
cccatataccacagtttctaatacgatattataccaagctttaatatgagcacacctcctggatgatgctgtaaattagttgcctcccaccacaccacatsaagtataatggatataatatgatttttcagaattcagctaattacctactgagctttacattttgtaacttttttgactgtccatcaaaatgtctttggg

SEQ ID NO: 14442 - DNA, 201 bp, Homo sapiens
gcagtctaatttcaggaaagtcagaaaagtctttaaggaaactgaaggctgagctgccagggccagccacatgggtactggagagtgggaggcccagtcasggggaatgctggcttagcacaactgaaaaatacaaaggtagaatatgaagtgtaatgacatggtttagattgaaatctgatgtggatggaaaggttttgt

SEQ ID NO: 14443 - DNA, 201 bp, Homo sapiens
actctaatgacataattacctcccaaagtccgcacttcctaatgttaccactctggaggttagaatttcaacatataaattttggggggacacattcagaycacaataatgttttataatgttccttttgctttaacaagagacacatgtcagatagtagacatgatctgagaagacacaaaacccagcgtggtgattttg

SEQ ID NO: 14444 - DNA, 201 bp, Homo sapiens
gtagtttaactaaaaagtggccactgtctcctggtagcggttggtaagccatccagtctctgcaggcatctacgctccaggtctccagtctgaggagtctsgctcctggggcaggtgcctctgggggtctctgccaggcttgtctggtcatgcagctacttccagactgattcctagatcttgcatttttacataggacat

SEQ ID NO: 14445 - DNA, 201 bp, Homo sapiens
taatgacatggtttagattgaaatctgatgtggatggaaaggttttgtggcctttcagcccaaggtttgaaaaagaaatggaatttctaaatggagtgggyagccacaggagggctttagacaggaccgtggccccgctggattttctgcccattgacttgggctcgaagtcacgtccatgttgctattacagatgcctcc

SEQ ID NO: 14446 - DNA, 201 bp, Homo sapiens
gaggatttgtttttgatctcataggtgtccatcttgctattttctcaactagcagaggcaactctctggggtatcttttaaaagggcactaatggccaggmgtggtggctcacacctgtaatcccagcactttgggaggccgaggcaggtgtctcggtggatcacttgaggtcaggaggtcgagaccagcctggctgacat

SEQ ID NO: 14447 - DNA, 201 bp, Homo sapiens
aactaaaaagtggccactgtctcctggtagcggttggtaagccatccagtctctgcaggcatctacgctccaggtctccagtctgaggagtctggctcctrgggcaggtgcctctgggggtctctgccaggcttgtctggtcatgcagctacttccagactgattcctagatcttgcatttttacataggacatccccagc

SEQ ID NO: 14448 - DNA, 201 bp, Homo sapiens
atgtggatggaaaggttttgtggcctttcagcccaaggtttgaaaaagaaatggaatttctaaatggagtgggcagccacaggagggctttagacaggacmgtggccccgctggattttctgcccattgacttgggctcgaagtcacgtccatgttgctattacagatgcctcccagaacagtttatataatcgtcaacgt

SEQ ID NO: 14449 - DNA, 201 bp, Homo sapiens
aagtgctgggattacaggcgtgaactactgtgcctggccaggataatctttaagaagaagataacattagctattcttctcacttcctacgtagaattccmtaccctgtgtctttggcctggaaagggtattggtagcaattgtcttcggctttccctgccatgtgtatgcattcccacggccacacaagcacacacacac

SEQ ID NO: 14450 - DNA, 201 bp, Homo sapiens
ccctagttgtatcaccttcctcccattatgtttgtaacttcagattttgtatatttcgcatatgtcaatatgtaaacattttatatatatatatatgcatkcacacacatgcatacatatatgtaatggtatatatacatgtaagtttccatttttgctcaaattgctctggacagttctttgctctgggagttctttact

SEQ ID NO: 14451 - DNA, 201 bp, Homo sapiens
acaggaccgtggccccgctggattttctgcccattgacttgggctcgaagtcacgtccatgttgctattacagatgcctcccagaacagtttatataatcrtcaacgtatattcatggagcatcttctgtctgctagacacagaattgggtgttgggctttaaagatggatgaaaggcagtacctggtctagagaggctgc

SEQ ID NO: 14452 - DNA, 201 bp, Homo sapiens
cagtgagcccagatcgcaccactgcactccagcctgggtgacagagcgagactccatctcaaacaaacaaacaaacaaacaaacaaacaaactaagaacarcaacgaaaaaactcccatgtattatctatggattgactgtaaaatatgagaagcaataaatatgttcatcactagggccatctagaaatttctaacccaa

SEQ ID NO: 14453 - DNA, 201 bp, Homo sapiens
gctagacacagaattgggtgttgggctttaaagatggatgaaaggcagtacctggtctagagaggctgctacctggatggtgtgtttgccatcctcagtartgtgtgtcccttacagatgatgcccagtgactctacaattgctgggatactttttagaattttctttttgtgcattacttttgattcttggttctttctt

SEQ ID NO: 14454 - DNA, 201 bp, Homo sapiens
gaagaaatgctgttttaggaaatcaataggataatttttttttttttttgaggcggagtctcactctgttgcccaggctggagtgcagtggcacagtctcsgctcactgtaagctccgcctcccgagttcacgccattctcctgcctcagcctcccgagtagttgggactacaggcgcccgccaccacactcagctaattt

SEQ ID NO: 14455 - DNA, 201 bp, Homo sapiens
gagaagcaataaatatgttcatcactagggccatctagaaatttctaacccaagggtcaactaatctttccctgtgttgtatttcctgctctgcggatccrgcatcatgacctttgtactacccaggaaagccagtgttctcatgggctcttctcttttttatgctctaccagatgctagcactgtggcatgccattcgct

SEQ ID NO: 14456 - DNA, 201 bp, Homo sapiens
ttaaagatggatgaaaggcagtacctggtctagagaggctgctacctggatggtgtgtttgccatcctcagtagtgtgtgtcccttacagatgatgcccartgactctacaattgctgggatactttttagaattttctttttgtgcattacttttgattcttggttctttctttggcattagctcaccagtggcaaatat

SEQ ID NO: 14457 - DNA, 201 bp, Homo sapiens
ataaataaatacataataaataaacagtagtggttgaaagaaagggaaggaagaaatgctgttttaggaaatcaataggataatttttttttttttttgargcggagtctcactctgttgcccaggctggagtgcagtggcacagtctcggctcactgtaagctccgcctcccgagttcacgccattctcctgcctcagcc

SEQ ID NO: 14458 - DNA, 201 bp, Homo sapiens
tgtctgtttatagaaagtgtcaccaagttctgtcttgggcccgtccactcggttatatgtgctggaccctgggtggaagcactttgcacgtgtgcattcaygatgggctgtgctggaggggaaaacaggcatcactcccaaattctattcatgcaattaaaaattcctttcatttttatttgtgagagggtatgggtgcac

SEQ ID NO: 14459 - DNA, 201 bp, Homo sapiens
gacataggtctggcgatctttttggcatagacgtgtggacgttgtttttgacatttgtacatgcttttgctcaagttgaaggcccaagtttacccaattcractgcccccacccagatagaatattcatggttagaccataaactacataactggaaattttaaatctatttttatatgcatacaaaaactgcaggcctga

SEQ ID NO: 14460 - DNA, 201 bp, Homo sapiens
taactgggtgtggctgtgtcctaataaaactttatttacaaagaacaggaagtggcttggatttggtatctggcctggcagctgtggtttactactccttrgacggtggcccagagaccctttaaatgaaattcattttactagcaccctttttcatcatgagaaatatattctgtttttcttagaaaatgggttatgtta

SEQ ID NO: 14461 - DNA, 201 bp, Homo sapiens
ttggattatttatttatttatttatttatttatttatttatttattgtttgagacagtctcactttgtcaccaagtctggagtgcagtggtgtgaccttgrctcactgcaacctctgcctcccaggttcaagtgattctcttgcctcagccccctgagtagctgggactacaggcacgtgccaccatgcctggctaatttt

SEQ ID NO: 14462 - DNA, 201 bp, Homo sapiens
ataaactacataactggaaattttaaatctatttttatatgcatacaaaaactgcaggcctgaagcttctaaaaataaacgttactttcatcccattatasaaaaatgcatttgaggtggtcatcattttatttgggccagggtcttccgagacttgggacaataatatattttttctactttaggcaaatgtatgcagat

SEQ ID NO: 14463 - DNA, 201 bp, Homo sapiens
ttacaaagaacaggaagtggcttggatttggtatctggcctggcagctgtggtttactactccttagacggtggcccagagaccctttaaatgaaattcaktttactagcaccctttttcatcatgagaaatatattctgtttttcttagaaaatgggttatgttaggtctggtcaaggtaaataagtgttgagagtcgat

SEQ ID NO: 14464 - DNA, 201 bp, Homo sapiens
cccctttcctttcccaaacttttactagcttcttccatcctggacttgcaatctggctgaaaacctgctaaataagggaacaattttgacatggctcctgkactccccacaaacctagttgattccagaccagtaatgtcttggggacagtgttgtcccatcttcctttctaggctgggctcagattactgacgtggaaga

SEQ ID NO: 14465 - DNA, 201 bp, Homo sapiens
gcagattcttaaagcatgaatgctgtattacacacattataaattcgagtaacagaaatgtttgtgtgtagaaatagaatacggagtatatattttgtatwaaataacctctgtggtatttgtttaccctgattttttgatttatgagtcgtcattgctcgctatagaagaagaaaaataaatatgcaaaacagtggtaga

SEQ ID NO: 14466 - DNA, 201 bp, Homo sapiens
ggggtttcaccatgttagccaggatggtctcgatctcctgacctcatgatctgtcagcctcagcctcctaaagtgctgggattacaggcgtgagccactgygcccggccggggatcttgtattaatagtagggagacagtaagcaagcaaggctcagttaatgataaattgttatcaggagacccagcagtttctgctttt

SEQ ID NO: 14467 - DNA, 201 bp, Homo sapiens
agtcttcaggcccacagtgtaggcattcaacaaacgctcttcagggagaaggaaagttaccatcaaaatccgtcgttgaaagtattgaagttccagctggyggtctgatacagcttagatgttgtccctgcccaaagctcatgtcaaaaggtaatctgcagcgttggaggtggggcatggtgggaggtgattgggtcatgg

SEQ ID NO: 14468 - DNA, 201 bp, Homo sapiens
cccacagtgtaggcattcaacaaacgctcttcagggagaaggaaagttaccatcaaaatccgtcgttgaaagtattgaagttccagctggcggtctgatayagcttagatgttgtccctgcccaaagctcatgtcaaaaggtaatctgcagcgttggaggtggggcatggtgggaggtgattgggtcatgggggtggattt

SEQ ID NO: 14469 - DNA, 201 bp, Homo sapiens
gatcacacagctagatcacagtgggggaacctgaattatggggatgctcacaaaagggcaaaacacaacggttgctgtcatttgatgctttatgttaagtrtgcatatgctcagttacagaaacctaaattgctaaattgcaaggctgtatatgatatgccaatttggcatattctgtctttttatattctgccaccccta

SEQ ID NO: 14470 - DNA, 201 bp, Homo sapiens
aatctgcagcgttggaggtggggcatggtgggaggtgattgggtcatgggggtggatttctcatgaatggtttaccaccatcctcttggtactgtcctcamgatagtgagtgagttgttgggggagctggtcatttaaaaatgtgtggcacagccccccaccctgtctcttgctcctgccctggccacatgacgtgcctgc

SEQ ID NO: 14471 - DNA, 201 bp, Homo sapiens
tctgtttttcttagaaaatgggttatgttaggtctggtcaaggtaaataagtgttgagagtcgatgttgtgtgcatagttaatttcaattctttgaagaarctcccccatgatatttcacggctgagagaagaggaaagagtttaagtggaacagtgtgctttgctgagctttggaaatattaccatatagggaagcaggt

SEQ ID NO: 14472 - DNA, 201 bp, Homo sapiens
cacagtgggggaacctgaattatggggatgctcacaaaagggcaaaacacaacggttgctgtcatttgatgctttatgttaagtatgcatatgctcagttrcagaaacctaaattgctaaattgcaaggctgtatatgatatgccaatttggcatattctgtctttttatattctgccacccctatcatacttatgaaaat

SEQ ID NO: 14473 - DNA, 201 bp, Homo sapiens
acatatgtattcattcattcattcatttattctttcattcagtcaataaatatttattgagtagtaagcacatgcaaggcattgagggtggggagggaaaragacacaaattgtccttaccctcatggattcaccatctatttaaaggccacaaatacttgtgtgagaagcaagtcttaatagtctgaagtattttcttag

SEQ ID NO: 14474 - DNA, 201 bp, Homo sapiens
atataatgatgataataattgctaatatttatcagctatttatcatgtgtcatgtacagctaagcacttacataccatcccattttatccttataatgackctaagagtgggttaaaaaatggcagaagaatggcagtgtttaatggttcagcctggtgcaatgattaaccacattttacagactaagaaattaagaacct

SEQ ID NO: 14475 - DNA, 201 bp, Homo sapiens
ttcagtcaataaatatttattgagtagtaagcacatgcaaggcattgagggtggggagggaaaaagacacaaattgtccttaccctcatggattcaccatstatttaaaggccacaaatacttgtgtgagaagcaagtcttaatagtctgaagtattttcttagattcccttgagccgcaatgctgaaaagcttatggtgg

SEQ ID NO: 14476 - DNA, 201 bp, Homo sapiens
ggagggaaaaagacacaaattgtccttaccctcatggattcaccatctatttaaaggccacaaatacttgtgtgagaagcaagtcttaatagtctgaagtrttttcttagattcccttgagccgcaatgctgaaaagcttatggtggttttgctaatgaatttgacaaggccagaaatagaccagatgaagattgatccat

SEQ ID NO: 14477 - DNA, 201 bp, Homo sapiens
ataaaaatttggtatcaattgtttggctaaattatgcacagtgggccatcctaacctgccattaacataacgtatgctaaagaatgtgttgtgtttttttsttttctctgataattatactctaaagcatcaattgcttatttgagtaaattaaactttgagttgttcttatttcttcaaactttcaaattgtcttgcctg

SEQ ID NO: 14478 - DNA, 201 bp, Homo sapiens
tgtaatcccagccacttgggaggctgaggcagagaattgcttgaacctgggaggtggaggttgcagtgagctgagatcatcccaccgcacaccagcctggscgacagagtgagactctgtctcaaaaaaaaaaaaaaaaaaagttacttctgagttaaaatatgaagagtgagcagtacccagccatgcagaaggacatgg

SEQ ID NO: 14479 - DNA, 201 bp, Homo sapiens
cctttttctggggtcttttgcctaatcgtttactggtttggagacactgttttctgtattgtttaggactgaaaatgtagacctaactgaaatcaagcackcgagtatcctaattattttaaattcataatgaatagtcatcatggtttcactttttttatgtactcttttgaaagagtacgatgggggaataaaagccag

SEQ ID NO: 14480 - DNA, 201 bp, Homo sapiens
atcattaaaatgagaacactgttattggtctttcgggattgttttgagaaatgagatatcgagacatgcctggcacaaggccttaattcttcttcatggtmaagaaatggcagattttcccccttccattcccacccttgcacatagtaggttctcagcaagtatttgtagatgtaatcgaccagcagagatcatttgtac

SEQ ID NO: 14481 - DNA, 201 bp, Homo sapiens
ggagttttgtttgcaaatgatcacctggtaatttaagagggtgagctaaacttcctccttttctagtatggacctttggggctcaggatgaggatgttcamtttgtactgctggtggagctgcctttccattaagtgagtctttctccaagggaacagaagtcttaggttgttgatctggcggtcagaacctaggacaggc

SEQ ID NO: 14482 - DNA, 201 bp, Homo sapiens
agaagcttagtctcaatttcagagagttattttggcaacatatttgggaaaatgatagttagatgctgcgttagccagcctctgcatgattttttacgcaraacaaacagttccaaatatcagtgctttcagcaactcatatatttctcacttatggtgcatgtcgctgatggttggctgctgctctgatctcactccagt

SEQ ID NO: 14483 - DNA, 201 bp, Homo sapiens
gcttctttttatttcttagagccagagctggaagacaaggcctggcatattttggcaggcctggatcagagcctaggtgtgtaaattaggaattgcatttsgctgctgctaacaaggacccaaacatggtggtaaattcttccacataaaacaacagaaaataagttgttttctggccctgggctggggtggccactccac

SEQ ID NO: 14484 - DNA, 201 bp, Homo sapiens
gggtttatgatcaagtaaagagtttaaagaagtgttttatgagggagttttgtttgcaaatgatcacctggtaatttaagagggtgagctaaacttcctcmttttctagtatggacctttggggctcaggatgaggatgttcaatttgtactgctggtggagctgcctttccattaagtgagtctttctccaagggaacag

SEQ ID NO: 14485 - DNA, 201 bp, Homo sapiens
aggacatatgtgtcttctgccaagatgtggaattttggcaaggctagcatgataacaaataaacattcaagcagtcacttaatgatattgaattgaacacmatttctcagaagttcctgtattaaattacaaccataagaacatacacaagcatgcagattgtaagtgtgatgagaatggaaacattccataggacgcaga

SEQ ID NO: 14486 - DNA, 201 bp, Homo sapiens
ttgggtaattctaatgcttacttcatcccagggctgatgtgtgttaggttagggtttatgatcaagtaaagagtttaaagaagtgttttatgagggagttytgtttgcaaatgatcacctggtaatttaagagggtgagctaaacttcctccttttctagtatggacctttggggctcaggatgaggatgttcaatttgta

SEQ ID NO: 14487 - DNA, 201 bp, Homo sapiens
actcctgtacttcaaggttttggagtgggaaagttgaggaaatgtaagagatcatctctgtctctatcacattaccgacggagaagtgggataagaactaygtgtgttttcacttcttctttctttagagaaaacaaatatcatctgccttgctaggtagttgtgagaaatgaggagataatatctttaaatctcctacgg

SEQ ID NO: 14488 - DNA, 201 bp, Homo sapiens
actagcttcttccatcctggacttgcaatctggctgaaaacctgctaaataagggaacaattttgacatggctcctgtactccccacaaacctagttgatyccagaccagtaatgtcttggggacagtgttgtcccatcttcctttctaggctgggctcagattactgacgtggaagagttgttggtcctggtgcaacatg

SEQ ID NO: 14489 - DNA, 201 bp, Homo sapiens
ggcggtgcatgcctgtaatcccagctacttgggaggctgaggcaggagaatcccttgaacctgggaggtggaggttgcagtgagctgagatcacgccattrtactccagtctaggcaacaagagtgaaactctgtctcaaaaaaattaataataataatgttacaataataataatgttagtgatacatatcattttgaaa

SEQ ID NO: 14490 - DNA, 201 bp, Homo sapiens
atagaagtttatgacggaaaaggcaaaattctctgtgtctttatggggagatattcgatatgttttttcttggcagaaataaaacatattcaataatatamttaggcaaacttgttttacttgacaagaagaccgtatctccgtctgcaagatgaaggcaagatcaagagatgtcagttaacattcttgcgaccacaggta

SEQ ID NO: 14491 - DNA, 201 bp, Homo sapiens
tatatgtctttctttcttttcttaggttaacttttttttttttttttccttttgaatgaccacaaagcatatctacccagcggggttactttttttttccytttcagtattcatgacgtcaagtccctgtttgttatcttattgtcctcttatcctggtccttagagtctttcaagagaagaggttgatcccggtgtaatg

SEQ ID NO: 14492 - DNA, 201 bp, Homo sapiens
agagaaaaacaattacactagctgctggtctgtatttactggttagaatagaatattattaccatcaagaataacattagtggccaggtgcggtggctcaygcctgtaatcccagcactttgggaggccgaggtgggtggatcacctgaggtcaggagttcaaaaccagcctggccaacatggtgaaacccccgtctctac

SEQ ID NO: 14493 - DNA, 201 bp, Homo sapiens
ggaaaaggcaaaattctctgtgtctttatggggagatattcgatatgttttttcttggcagaaataaaacatattcaataatataattaggcaaacttgtkttacttgacaagaagaccgtatctccgtctgcaagatgaaggcaagatcaagagatgtcagttaacattcttgcgaccacaggtagggaggagaactggg

SEQ ID NO: 14494 - DNA, 201 bp, Homo sapiens
ttgaccaatttttgtaaatctcttctgttactgtttatatacccggccacttctgccaaaatatgctggccttttagtcttttggttttttctctcttttkgtttgttggcttatgttcgctgcttgatctgactactggttttatttctaaggatttttttttaagttggcatctttttttctttgactttccttgtatg

SEQ ID NO: 14495 - DNA, 201 bp, Homo sapiens
aaggcaaaattctctgtgtctttatggggagatattcgatatgttttttcttggcagaaataaaacatattcaataatataattaggcaaacttgttttasttgacaagaagaccgtatctccgtctgcaagatgaaggcaagatcaagagatgtcagttaacattcttgcgaccacaggtagggaggagaactggggagg

SEQ ID NO: 14496 - DNA, 201 bp, Homo sapiens
ttactgtttatatacccggccacttctgccaaaatatgctggccttttagtcttttggttttttctctcttttggtttgttggcttatgttcgctgcttgrtctgactactggttttatttctaaggatttttttttaagttggcatctttttttctttgactttccttgtatgcccccctttctcccctgcattgtcttg

SEQ ID NO: 14497 - DNA, 201 bp, Homo sapiens
gttcaagaaggtcttgggcaagcgcgtgctagttattttcctcactggtgtggtcgtgacagatgaatcacattttactctcctccctttctcatagtatrattacataaaggagaccttccctggaaagagccctgtgcatggcttttgagagtgggcctgggctaacagtgagtgtggaagcttgctgccttgaattct

SEQ ID NO: 14498 - DNA, 201 bp, Homo sapiens
ttgtttttatttagggctcatctggtatgtgtattatgttcttggtagacagaagctgtctttagttcgtatgggttgagcatggagggaacttcatctcrtagtcactggataaggagccagtcctggctcttcctttaactgcccttgtgaccttgaacatgtcagttcatctcaccacgtagtcattttctcatccgt

SEQ ID NO: 14499 - DNA, 201 bp, Homo sapiens
gggctaacagtgagtgtggaagcttgctgccttgaattctttccaattctggagagttgatgggtaacaagtgtgtatctatagtctgcttggacatggcrgtgtggccactgacacgttgtcagccatcccctcaactccagggacaggaatggtgagaaggtggtgagggcacagtctgcccggagacgggacagtttg

SEQ ID NO: 14500 - DNA, 201 bp, Homo sapiens
gctgatctgcatagcacttcgcaatgaagctgtgctctagaaacataccacgatctactggactttcttaaataaggtggttgttcaggaaattcctccarttaattttactttaattccccctacaagaatgccgagacacctctgcctattttctctttctgtgtttgttgtttcttttgtttttgttttcgagactga

SEQ ID NO: 14501 - DNA, 201 bp, Homo sapiens
tcagaaatgcatgtcagagctacacaattctatccaaggcattaactgttgtcaagtctgttttttatgaatatgtttcaatataagaaattgtcttaggyccaaagtgaaacgtcttcctccttgactcatagcaagctcatgcaggtatttgaacattgttctgtataatatgtgcacctttgagaaatcccatgattc

SEQ ID NO: 14502 - DNA, 201 bp, Homo sapiens
ggattacagggatgcgccaccatgcccagctaattttttgtatttttagtagagacggggtttcaccatgttggccaggctggtcttgaactcctgacctsagttgatctgctcacgtcggcctcccagagtgctaggattaaaggtgtgagccaccgtgcctggcctctttctgtttcaaagaaatagtcaagaagtttc

SEQ ID NO: 14503 - DNA, 201 bp, Homo sapiens
aacttttgtagttgctgctggtctctttggaaggcaagtgctaatttacccacagttgaaacctgacacacacacgcgcgtgcacacacacagacacacastctctctctctttctctgtctctctctctttctctgtctctcataaggaactaaatcctgcgttttctcaccagagggctaatgacacactgcttagtca

SEQ ID NO: 14504 - DNA, 201 bp, Homo sapiens
tggcctctttctgtttcaaagaaatagtcaagaagtttctagatgcacacaaaatgaccaaaccagtctttccgcttatttacacaatgaagaaacatcasagttcaccctggaagacagagtttctttctgtcttcatcctagggcacaggagagatgcagtgatggcatgtctccactctgcagacatgttgcaggcct

SEQ ID NO: 14505 - DNA, 201 bp, Homo sapiens
gccacttgcagaccttggcagttgctgttgctcctgctgctgctgctgctgctgcattgtcaagactacattgatgtcttggaaatatagaaaaaagaggmtgctggactgtgtgcttagaatcagtgtgctaactctgttaccaacaccgtagagaagtggttccagaaggaagagttcagggtgagaatgaataacgga

SEQ ID NO: 14506 - DNA, 201 bp, Homo sapiens
ctgttgctcctgctgctgctgctgctgctgcattgtcaagactacattgatgtcttggaaatatagaaaaaagaggctgctggactgtgtgcttagaatcwgtgtgctaactctgttaccaacaccgtagagaagtggttccagaaggaagagttcagggtgagaatgaataacggagtggctttgcagtgggaacctggc

SEQ ID NO: 14507 - DNA, 201 bp, Homo sapiens
aggatagtttcccttcctggaagattgagatgaaataaagctttaggagttggtatcgcacgcaggcattaaatggattgtgaagagggactttgttcccsctcagtcttgtctctgcctccgtaaaggagtaagttaaaaaagaaagtttctttttttaaaaaaaagccttactgctcaataaatccctgtggaaaaaaa

SEQ ID NO: 14508 - DNA, 201 bp, Homo sapiens
tttgggttgatgagatgctggtatgtatcattcgttcagccattctttcagtaagtcatcacggaagtctgcctctgtgacagattctggggctctaaggmggaatttacttcttcaaagtacagtttcctgccttgcaagtttggagttaaggccacgcagaccagagttacgtgcacaggttgtaatactctctcttgt

SEQ ID NO: 14509 - DNA, 201 bp, Homo sapiens
gcagtcccaaagcccggggcatggatccagagaggagggtgaagaatgggcccctgacccaagactgcacttgtatttgagttgcataagaagctgctgakgaattttaagaacaggagtgacatgacttccgttacaattgaaaaaatcaatctggcgaaatgaatggggctacataggttgggggaaggaggtaagaga

SEQ ID NO: 14510 - DNA, 201 bp, Homo sapiens
ttgttaaacttcttgcactgagctttaccaggtgagctgacagttatcctctgcattcatcaatataagccccataaaaggcaaagtggttgaggagaaaygagaaattacagcccagattagcagccttgagtgctccttgtgaacacaagacactgacccaaatcacacgtcacggctcttcgcccattaacgcttata

SEQ ID NO: 14511 - DNA, 201 bp, Homo sapiens
catcaatataagccccataaaaggcaaagtggttgaggagaaacgagaaattacagcccagattagcagccttgagtgctccttgtgaacacaagacactsacccaaatcacacgtcacggctcttcgcccattaacgcttatagcaggattattcccaaggaagctgtagccattatatttgctgccatcacaacagtaa

SEQ ID NO: 14512 - DNA, 201 bp, Homo sapiens
ctcgtttttccttttttcttttcctttttttttttttttttttttttttttttttttgagatggagtctcactctgttgcccaggctggagtgcagtggcrcaatctcagctcactgcaacctctgcctcccgggttcaagtgattctcctgcctcagcctcccaagtagctgggactacaggtgcacaccaccatggctg

SEQ ID NO: 14513 - DNA, 201 bp, Homo sapiens
cacggctcttcgcccattaacgcttatagcaggattattcccaaggaagctgtagccattatatttgctgccatcacaacagtaaaataaacaggtgtgaytgcagccctactcctcgggttgtttcatgctgatcagttgttaatatatgtgtgacttgaagttggagcctgttgggagaaaaagttgtctttagaggag

SEQ ID NO: 14514 - DNA, 201 bp, Homo sapiens
caatcacttactaactgcattgtgggttaacacagtgtgtgtgtgtgcacttactaactgtgcaactgtgggcaagtgatgtaatctctctggagctcgtytttccttttttcttttcctttttttttttttttttttttttttttttttttgagatggagtctcactctgttgcccaggctggagtgcagtggcgcaatc

SEQ ID NO: 14515 - DNA, 201 bp, Homo sapiens
aggagtaaagtgttgccttgctgtgggaaggggaaactttttcttgggaagtggactcaccaataatttttgcatcatgcgcaggagaccctactaaaacstaagtgtgcaatgctttaaatcagtaagtttgtttttcattaacataaaatccaaaacaggtgctgtgatcagcaagccgctgtcctccaagtggtaatt

SEQ ID NO: 14516 - DNA, 201 bp, Homo sapiens
acagcttgcatgtgtagttaatttgttccaaatttccatcctgcattataaccctaatgtttgctaataacacacaaacccacattttattaagtaagtartttgagacatgatgatttttgtcatgtaaataggatcaggctgaccagtatagactgggcagaggaagattcataaccagggaattaatctctggatcca

SEQ ID NO: 14517 - DNA, 201 bp, Homo sapiens
ggctgcatagtattccatggtgtatatgtgccagccatcccgttactgggtgtatacccaaaggactataaatctttctgctataaagacacatgcacacrtatgtttattgcggcattattcacaatagcaaagacttggaaccaacccaaatgtccaacagtggtagactggattaagaaaatgtggcctttgcctctt

SEQ ID NO: 14518 - DNA, 201 bp, Homo sapiens
ctataaatctttctgctataaagacacatgcacacatatgtttattgcggcattattcacaatagcaaagacttggaaccaacccaaatgtccaacagtgrtagactggattaagaaaatgtggcctttgcctcttttaaaaagttctaagttgctagccagtcggaacaaatacagaatgtgaggtccctttccagccaa

SEQ ID NO: 14519 - DNA, 201 bp, Homo sapiens
aaagacttggaaccaacccaaatgtccaacagtggtagactggattaagaaaatgtggcctttgcctcttttaaaaagttctaagttgctagccagtcggracaaatacagaatgtgaggtccctttccagccaatggaaaccggacacagcagtagagtacacgtgtcaggttataaatgagcctgtctcctttgtccgg

SEQ ID NO: 14520 - DNA, 201 bp, Homo sapiens
ctcttttaaaaagttctaagttgctagccagtcggaacaaatacagaatgtgaggtccctttccagccaatggaaaccggacacagcagtagagtacacgygtcaggttataaatgagcctgtctcctttgtccggtgttctctcatggcaaaactgctggcgagtgtaccctttctgcagaaagtaaaaatggccttgct

SEQ ID NO: 14521 - DNA, 201 bp, Homo sapiens
tgctggcgagtgtaccctttctgcagaaagtaaaaatggccttgctgaggaaattaaattcctgttcgagtgctatttctttatggcactgaggagcaagyatttctaacaatcatattgcttaagaagtggatggcaagaagataattactaatatgtctgcaattgatctgaaattgacacagttgatctaactgattc

SEQ ID NO: 14522 - DNA, 201 bp, Homo sapiens
tgaatggaccctgagtatcttagaatcttctgaaataatatgcagcattatattccatttgtacctgggaagagggtacttgtctttcatcagagagtcaycaatggaccactggtccctgctgatttagtgtcacagctcaaaaccatcagtagtcctcgtgatctttcggcattgtggctccctttgtgagaagggcct

SEQ ID NO: 14523 - DNA, 201 bp, Homo sapiens
gtgaatctcccaaccataagctgtattcaggcaggcacgaagtctcttatttactcagtgtttctggagcccagcatagtgcctcgcacacagcaagtgcycagtgggtatctgttgaaccggcaaaacaaacaaatgaataaattaatgggtggtcactgtactagttttctattgcttcataaacaaactatcacaggc

SEQ ID NO: 14524 - DNA, 201 bp, Homo sapiens
cactgtactagttttctattgcttcataaacaaactatcacaggcatagtgagttggaatgatggctctcaaaaaactatgtccacatcctataaatgctrttgtacaatatatggtcttttgtgattggcctcctccacttagcgtcgtgtttttgaggttcagccacagttgtagcatgtccatctctctttgtgtggc

SEQ ID NO: 14525 - DNA, 201 bp, Homo sapiens
ttgttgtaaactcgtcctgccgcctggactagttacgcttcccttgattagctctgagaaacgaggcagcgggcactggggcagccacatagacaacatcyaaatttttgttgctttcctgggtcttgccctgtccttactgtttcccttgggcacgctgttcaccccttaggacatactacagtaaccttttcccaccac

SEQ ID NO: 14526 - DNA, 201 bp, Homo sapiens
tcttaatacaaactggcgtatgttatagttactgtcagttgttgtaaactcgtcctgccgcctggactagttacgcttcccttgattagctctgagaaacraggcagcgggcactggggcagccacatagacaacatctaaatttttgttgctttcctgggtcttgccctgtccttactgtttcccttgggcacgctgttc

SEQ ID NO: 14527 - DNA, 201 bp, Homo sapiens
cccatgtgtgtatgtctaacccagtgacaggtaaggcagccaggagctgctgttatttcagtgcaaagctgttttcacaatcacagacatgcacagctcaraaaccctcacaggtcacgcctgaataccttcaatgtgccccatgtaaaaatacactgcaagtcgattggacatgccctatgaattataccttatttatga

SEQ ID NO: 14528 - DNA, 201 bp, Homo sapiens
ctggagggtccaggagccccctgaactgagtatccggtgggaggtcagatttccgcattcagaacgagagctcatacggcatccacgcgtgtctttctcaygcatatccccagcccgagtagaagaggacttctgcatctctgttagttctttctcctcctaagaaaaagcagattttaagtaacttatcatttgttcatt

SEQ ID NO: 14529 - DNA, 201 bp, Homo sapiens
gcatgttaacatcctggtagctctatttatttgctaccatggtacataatcatgggagctctatttatttgaacatcttcttttgttattatttggtgtayttgggaaaggcatgtgggagcagcaagcaggtgagcatcctgtttggaatgcagggccgggaactgccctgcccagtccagcctcattccagaggctagc

SEQ ID NO: 14530 - DNA, 201 bp, Homo sapiens
atttgttatttttctcttcccccccttagctgtatccctgcatttattacagcgcaggtgcatcttgcttttgagtgctaactgagatgaaaggagtgagraaacgctctcttcttcttgcaggggagggctggcaaattcagtgaatgcagagtcggctgggagcctttcggctggaaagctcttcctctgatgagctgt

SEQ ID NO: 14531 - DNA, 201 bp, Homo sapiens
agctctctgcttctttggcagtctagtgctgtcacagaaggaaagctcactccatggaaaaggggggattgatttcttctctgagggcagaggctgatcartctaggctggtaggaatagatgtaacctcagaggaaacaatttgcattggcgaaagcaagtcaatggccatccccaaattcaaaaggacagggaagtgta

SEQ ID NO: 14532 - DNA, 201 bp, Homo sapiens
gtcagataacccccgatcgtaataagccggaggataatcgcttgcattgttcaataaagcaattgctttgtcccctcacttagccccttcagaaaagccaraaagaatgtgccacctagatgctatttataaccattttcacctcttgcctccaggggctaaattggaaacctaattttagatgcataaaagccaaaatat

SEQ ID NO: 14533 - DNA, 201 bp, Homo sapiens
ctcccctttccaatacatctctctctctctttctctctctctctctctctctctcacacacacaacacacacacacacacacagccaaatcagacaccaayataaactgtagagttaacattctttttccaccctcacactttttttagctccgatctgtgttcaatttctgcctgagagagtgatatattcatatattta

SEQ ID NO: 14534 - DNA, 201 bp, Homo sapiens
gagtgacaagccctggagacctgagggcttctggggcccccagggcggtttcaggaggctgtctccagacctgtccggggtgtgagcatgtcacgctgtgrcccgcgcctcccctgtacagctgcctctgctcttctaagcactgaaatgagaggtgtaacctgtgttccagagtctgcgcctcccagccactggggcagg

SEQ ID NO: 14535 - DNA, 201 bp, Homo sapiens
taattatgtcattgaaaaaaacaccagtaattaaatcattatttcttagatgtgaggtccaaggacattctagaggaagtcaaaggcagagggaggaaggrtgggacgatggaggcctgaagggctggtggagaggaaagaaggcagcctgtgccgtcagagagagttcaactccatccgtgcagctgctagcatcttgcc

SEQ ID NO: 14536 - DNA, 201 bp, Homo sapiens
agctaattcctacctgtgcgatcactagccaagtactgaacctctctgaacttcaattatctcatctgtaaaaggtggttggtttgtaattgttcctaccycttagggcttttgtgagagtttagatgataaaccaccaagcaacagtggctggcattctgtgcacaatcgaagtctgctgctgtcagctctgtggtcgct

SEQ ID NO: 14537 - DNA, 201 bp, Homo sapiens
taacacctgcctccgtggtttgtcaggacatttagaaatgcagacttgctcaagacctggatctcaggtggtaggttggtccacagacagtggcaccactmgctattatttatttgttgtcactgtttgggacccctgttgctgtctcaccaaagaacttcttgtctcccttttagaagtttccagagcgtcttcctgatg

SEQ ID NO: 14538 - DNA, 201 bp, Homo sapiens
aacatggtgaaaccctgtctctactaaaaatacaaaattttttttgtattttgggattcggtttaggtgatgtgtgtctgtaatcccagctacttgggagrctgagacaggagaatcacttgaactccagaggcagaggttgtagtgagccaaacttgcacaactgaactccagcctgggcgacagaggaagactctgtct

SEQ ID NO: 14539 - DNA, 201 bp, Homo sapiens
aatttcatcactccaaaaagaaatctcataacaattagcagttattttccatcgctacttcctccagtcccaaggcaatcagcagtctgctttctatctcyacctgtttgcctattctggacatttcatatgagtggagttagataatacatggccttttgtgactggctttcacttagcataatgttctagaggttcatt

SEQ ID NO: 14540 - DNA, 201 bp, Homo sapiens
aggtggttggtttgtaattgttcctacctcttagggcttttgtgagagtttagatgataaaccaccaagcaacagtggctggcattctgtgcacaatcgawgtctgctgctgtcagctctgtggtcgctgtctgcactcccacccctgtcatcctccaagtctgatctcctcccgaagtctcttcctggacctcagccctc

SEQ ID NO: 14541 - DNA, 201 bp, Homo sapiens
ataggaaggttatcctgggtgattagcatggatcagagttctcacaggagcccttcaaagcagaaggggaaggtggacaagagaatcggagagatgtggcrgagggtaggcagagagattgcaagcagggaaggatttcacgtactgccactggctttgaagatggagggggcacatggctagaaatatgggcggccctca

SEQ ID NO: 14542 - DNA, 201 bp, Homo sapiens
tggtattggtacaatcagtcaggaagcatttttcctggggagaaacttacaagtccacgatcaaagccaacaagagacaaggtgttacatgactcattttyggtttaagaagtgacaggctgattctaagttgggttcaattattttgttaaagcgttttgcttatttgacttctcctgacctcggaaataattctaacca

SEQ ID NO: 14543 - DNA, 201 bp, Homo sapiens
ttctcatgtacttactttaaatcagagagcccacctgtccaattctagcttctcctgggcatcctgtatttgacacagcccctcccagcattctgagtcaycgtctgctgctcttgcactgtccgttttccaaatgaggaactcatcggtaaggccagaaaggaaagggagaaaaaacaaacaaacaaacaaacaaaaaat

SEQ ID NO: 14544 - DNA, 201 bp, Homo sapiens
gtgagatctgatagttttataaatggaagtttcccctggccttcattctctttcctgctgctttgcgaagaaggtgcttgcttctgctttgccttctgccrtgattgtaagtttcctgaggcctccctagccatgcggaactgtgagtcaataaacctctttcctttatacattacccagtctcgggtagtatcttcatag

SEQ ID NO: 14545 - DNA, 201 bp, Homo sapiens
aaggctcgtgttaactccatctggacaaagccttgaggtatacgtgtggcttcttttgagcatcgtgccatagctgtccctgatctaccttgcggggcaawcacaacaagtaaaaggttttcctcttgaaggattgaacgcctcaatgcgtgcatcctacattgtctagtgggagaaatctccgttgtagattctgacatg

SEQ ID NO: 14546 - DNA, 201 bp, Homo sapiens
acaatccaagcacccaaaagacctctagtttctaaagccttcgatgatttgatgtggtacatggatgtggttccaaaaaacatggactcacattccttttatttattttttttcatccttttcagtctttcaaaattccagttggagaaagccttagttagggcctagcatattttgatcctatcatatgctagcatccct

SEQ ID NO: 14547 - DNA, 201 bp, Homo sapiens
tgagatattgggactgttcttattcccatttcacagatgagccactaactggctcctggcaggacagtgaataaggggcacaacagagacacaaacacatsgctaaccaatggtctcatccgtcagccacactgcctgtctcagcatgggccctgtgtggaccattccatctcaatttgtttctgattcttgtcaattcaa

SEQ ID NO: 14548 - DNA, 201 bp, Homo sapiens
cttgggctaaaatgtagttgttggcatttctttctggaggctctgggggaaggtcgttccttggccttttcccatgacgtagaggctgacacattcctctkctatggcctcttcatttttcaaagccagcaagattgcatctctctgtctttcttttgtggtcacattttaccaggactcttctcctgcttttttttttct

SEQ ID NO: 14549 - DNA, 201 bp, Homo sapiens
gcagcctgtaactcccagactgaagcgatcctcctgcctcagcctcccgagtagcttgtactgcagatgtgtgtcaccatacctggctgatttatacttayatttatgtatgtgcatgtgtgtttatatatatatatttgtagaaatgggattttgccatgtttcccaggctgggctcaaactcctgggtttaagcagtcc

SEQ ID NO: 14550 - DNA, 201 bp, Homo sapiens
caaagtagggaaagcacgactttggggccagggccctttctggttcagaatgtccctggccagtgtgcgccgtgcagtgtggaagcacgcttcggtgcgcrtgtaagtttacgtgctatctgtagggacagtgatttttattcattagagtttttgagtctaattgtttttaaactgccacttttgtttgttaaagataca

SEQ ID NO: 14551 - DNA, 201 bp, Homo sapiens
atatactgcacatgtttttgtttttgtattttggttcaaaaagagagtatgatctcacttttcccttcttgataggttgtagattccatgtctaatccatscttttccaatattccctcctaatctttcagttgaattatggtctttagctcaaatgcatgacatgatgtgtgtgcctttggagtggggcggtattagtca

SEQ ID NO: 14552 - DNA, 201 bp, Homo sapiens
ttagatgctcttagttaaagaccatgcaaaaaggatgaaatcttttgatcatgttcttcacaatattagaggtaaaacatgaactcaacgcttttaggaaraaacaactggattgcgttttctattttattgacagaaactagatggggaggccagggtgtgttttattattgcacacatacgtaattacaaagtctttgc

SEQ ID NO: 14553 - DNA, 201 bp, Homo sapiens
ataagtaagtgggaagtccaggggtagacgtgagttcaggcatagctggatccaggatccgacagcttgcatgtgtagttaatttgttccaaatttccatmctgcattataaccctaatgtttgctaataacacacaaacccacattttattaagtaagtaatttgagacatgatgatttttgtcatgtaaataggatcag

SEQ ID NO: 14554 - DNA, 201 bp, Homo sapiens
aagctgtaccttaagtttatagttatgcaaatgaaaaccattaatcctggagcctctgacttgcaaggtgtgcttcagaaatttgcagcttctatttaggyaggaagagtttgccagcccgaaaactccagtaagcaaacagctttatagtaccccagccatagaaagtgagagctttcgaagaatctgtggttagaacta

SEQ ID NO: 14555 - DNA, 201 bp, Homo sapiens
aattatagctcaaatttaattaaaatagcttttattgcttctattcatgtgtccctggattttaagtgatgcgtcagaatttcatgatgagcaaatgcctrtggatgccctcatttctcatccttcttgactgtctgctaagattcactcttggtcttgtctttgagcttttctgttcagtgatgtaatgggacaggctct

SEQ ID NO: 14556 - DNA, 201 bp, Homo sapiens
aagtaccaaaacaaaacaagaaacccagaattatagctcaaatttaattaaaatagcttttattgcttctattcatgtgtccctggattttaagtgatgcrtcagaatttcatgatgagcaaatgcctatggatgccctcatttctcatccttcttgactgtctgctaagattcactcttggtcttgtctttgagcttttc

SEQ ID NO: 14557 - DNA, 201 bp, Homo sapiens
caggacacttgctgttttctgttattttggtttatattgcttaattagccagcctttctaattaacattacattttgctgagttcacattgtgataaagawgaatatcaattcttttctactcatctcattgagagatagagttgaattcatcttcccttgtatctaggctgcacttattcgtttgcttgaccaatggaat

SEQ ID NO: 14558 - DNA, 201 bp, Homo sapiens
cttctctttatggatttccctttggaagcagggataagaagagggaaggtctcccagatgtaaatttctcataaatatttgagctccatttcagtaattcyttcattctctgatctgttgcctaatcttctatttagcaagtactttccatgaaatagaaggctttaattgatagaattactaatttgaatagcttagcac

SEQ ID NO: 14559 - DNA, 201 bp, Homo sapiens
agggtagtgtgaagtggcgttatagttctccttttaatggttgagacaagaattgcctggacctcttttaggatacatcaccagtcttccaatggcaaacktatgtttattccagctgattctccccagcatgggggcatgaattgcagtggaaatcagtggactagaatttggatgcaattgcccccaaattatcgaaga

SEQ ID NO: 14560 - DNA, 201 bp, Homo sapiens
atagtgagttggaatgatggctctcaaaaaactatgtccacatcctataaatgctattgtacaatatatggtcttttgtgattggcctcctccacttagcrtcgtgtttttgaggttcagccacagttgtagcatgtccatctctctttgtgtggctgaatatcattgcattgtatggatataccaaatatttttctcctt

SEQ ID NO: 14561 - DNA, 201 bp, Homo sapiens
gggaatagatgaagcaagctgcttctttcaaatgctcttccaatatgaagcaaaatattattgatctagactgcctgctactttcatttaccatgttactrctcgtgggattacaggcacaaaggtttcataaatttcaaatgaaatatgaacatttgttgtcaaagtactgttaaggtatgaaaaccctgctagtattag

SEQ ID NO: 14562 - DNA, 201 bp, Homo sapiens
ttggatgcaattgcccccaaattatcgaagagaaaagaagaccactgtaattcaccggccatagcatttttaccaactgtttttgctaagcattagtttcktgtgataggttcaattctcaggctccttctcattagagtctttctgtaaagaccattattatttctgttatatttcctgtggctgagctgagccgcactt

SEQ ID NO: 14563 - DNA, 201 bp, Homo sapiens
aaaagaagaccactgtaattcaccggccatagcatttttaccaactgtttttgctaagcattagtttcttgtgataggttcaattctcaggctccttctcrttagagtctttctgtaaagaccattattatttctgttatatttcctgtggctgagctgagccgcacttggagatttgatccattttaactctctcattgc

SEQ ID NO: 14564 - DNA, 201 bp, Homo sapiens
aacctcagtttcctttgccacaaaatagcaatacaaatttataattccttagattgctgtgagaatgaattgaggcaaggtaggtaaagtgcaaggaattktgtgtggccggccaggtgcagtgtggctcaagcctgtaatcccagcactttgggaggctgaggtgggtggatcacctgaggtcaggagttcgacaccagc

SEQ ID NO: 14565 - DNA, 201 bp, Homo sapiens
aagaagaccactgtaattcaccggccatagcatttttaccaactgtttttgctaagcattagtttcttgtgataggttcaattctcaggctccttctcatyagagtctttctgtaaagaccattattatttctgttatatttcctgtggctgagctgagccgcacttggagatttgatccattttaactctctcattgcct

SEQ ID NO: 14566 - DNA, 201 bp, Homo sapiens
gaggcaggagaatcacttgaactcggaaggcagagtttgcagtgagccagattgcaccaccgcactccagcctgggcgatgagtgaaactccgtctcaaaraataaacaagaattgtgtctggcctttgtgatagttactcaacaaatcatatctgtgattgttttggttttaacaataatggtttttaaaaaccgtaggt

SEQ ID NO: 14567 - DNA, 201 bp, Homo sapiens
catttttaccaactgtttttgctaagcattagtttcttgtgataggttcaattctcaggctccttctcattagagtctttctgtaaagaccattattattkctgttatatttcctgtggctgagctgagccgcacttggagatttgatccattttaactctctcattgccttcagagagttggtgattttggggggggcac

SEQ ID NO: 14568 - DNA, 201 bp, Homo sapiens
cagcctgggcgatgagtgaaactccgtctcaaagaataaacaagaattgtgtctggcctttgtgatagttactcaacaaatcatatctgtgattgttttgrttttaacaataatggtttttaaaaaccgtaggtgatcacatactacgcagaaagggaagcagttacagcattcacagcatccgtgagtcatagactcact

SEQ ID NO: 14569 - DNA, 201 bp, Homo sapiens
tactcaacaaatcatatctgtgattgttttggttttaacaataatggtttttaaaaaccgtaggtgatcacatactacgcagaaagggaagcagttacagyattcacagcatccgtgagtcatagactcactgcattgctccaaggtgcagattctagttggaaatgttaagttttttagagcaatgaaaaaattgatctc

SEQ ID NO: 14570 - DNA, 201 bp, Homo sapiens
cccgcagtttcatgaatgcctcgctgtgccaccaggattttcttggagggagccacggtcagatttcaagtggtcatttcactctttctccctctgggggmctgagacatgattaacttgcaataattgtgactccctcattaaaggagagctgtagcaagggaagaaatcattgagactgatcaagacatcccgtgctat

SEQ ID NO: 14571 - DNA, 201 bp, Homo sapiens
cactgcaactacaacatcccaggttcaagagagtctcccacctcagcctcacgagtagctgggatttcaggtgcctgccaccatgcctggctaattaagtsagtttcttaaagtcctacaactggtgagctgtgagctgtaaattgtggaactaatttttatactgccaatctgaggccttttctgacctcatcgctgcca

SEQ ID NO: 14572 - DNA, 201 bp, Homo sapiens
cctcacgagtagctgggatttcaggtgcctgccaccatgcctggctaattaagtgagtttcttaaagtcctacaactggtgagctgtgagctgtaaattgyggaactaatttttatactgccaatctgaggccttttctgacctcatcgctgccactgtaaaatgaattctagccccagaccatgacatgcctactagctt

SEQ ID NO: 14573 - DNA, 201 bp, Homo sapiens
tgaaactctatagacagcaaacagaatgatggttgcctggggctgggagtgagtggaggggattacctggaaagggtggggcaattttggggggtcaagaraatgttctaggacaagactgtggtgatggctgcacaactggataaatatactaactatcatcaaactgtatatttacaatggttaaatcatatggtatgt

SEQ ID NO: 14574 - DNA, 201 bp, Homo sapiens
gatacagatttcactatccatgaattgtggccttaactttctcatgtacttactttaaatcagagagcccacctgtccaattctagcttctcctgggcatyctgtatttgacacagcccctcccagcattctgagtcatcgtctgctgctcttgcactgtccgttttccaaatgaggaactcatcggtaaggccagaaagg

SEQ ID NO: 14575 - DNA, 201 bp, Homo sapiens
gagtaaaagtcctttatgattagcaaattgcaggtcctcccctttctgatatttacagcccttgcaaccgcctgtacaaaaatcgggaaaaggcagaagasggctgtcattaatgtaaaagcagctggttacctccccctccccagcgcacacatcacctcctagtacaattagtcaccatgtcttttcccttccgtcaag

SEQ ID NO: 14576 - DNA, 201 bp, Homo sapiens
agctgaaactgaaccaggtgggggaggcctgctaatgcccaggcagtcgaaatgacgccatctcatcactccttctcttaaaatttttttttgtctttctycttggatttccagcaacagggagctgccaccaccgtgtactgtgctgctgtcccagaactggagggtctgggagggatgtacttcaacaactgctgccgc

SEQ ID NO: 14577 - DNA, 201 bp, Homo sapiens
tcactgtccaatatggtagccacgtgtgactattaaaatgtaaattaattaaaattaaaagttcaattgctctgaaatagcagccacatttcaaatcttcwgtagccagatgtggttattggctaccatattgggtagcaccgatatagaacatttctaccatagtagaatgctcttttggatacatctgctttaaagcat

SEQ ID NO: 14578 - DNA, 201 bp, Homo sapiens
agagtaaaagtcctttatgattagcaaattgcaggtcctcccctttctgatatttacagcccttgcaaccgcctgtacaaaaatcgggaaaaggcagaagmcggctgtcattaatgtaaaagcagctggttacctccccctccccagcgcacacatcacctcctagtacaattagtcaccatgtcttttcccttccgtcaa

SEQ ID NO: 14579 - DNA, 201 bp, Homo sapiens
atgcatgacctgtgcaatgcacctgcttcggtgcctggcacagagtcgcaaagccacaaagatggtgcttgttggttgtatgtgttgtttccatctgataycaccattgaggggagcaagatgacatgtgcctaccccacgtgtccagcagcaaagccacctggcatagtgggctgctcagcgtgcctggttcatactgcg

SEQ ID NO: 14580 - DNA, 201 bp, Homo sapiens
ataaaaataaaaagtcaaaaggaaacaaacaatgttgctgagaagtgatagaatattctagtttatatctcagtcattttacagctctggcatttctgggkaacactttagaatacttccactccggttggtccataaaaagctgcctgtgtttttatgttttgaaaatacacgcagagagacccactgcatgtcctatta

SEQ ID NO: 14581 - DNA, 201 bp, Homo sapiens
aaaaaaaaaaatcactggatttgaagttggcctatgttagattactccaaggaagttagttaatatgttaatatgaatctagatgaacattgagtgttttrctcttcttgttaatttgcgccatctactaatctctggacaatggagaaaaagtcgtaggttatgagttttttatttatggacattaagcaatatctttaa

SEQ ID NO: 14582 - DNA, 201 bp, Homo sapiens
aaagagagtatgatctcacttttcccttcttgataggttgtagattccatgtctaatccatgcttttccaatattccctcctaatctttcagttgaattayggtctttagctcaaatgcatgacatgatgtgtgtgcctttggagtggggcggtattagtcagtcgatggttatttccttgaggagaaaggaaaggagaag

SEQ ID NO: 14583 - DNA, 201 bp, Homo sapiens
attttaagcaactgacccttgggataaaaataaaaagtcaaaaggaaacaaacaatgttgctgagaagtgatagaatattctagtttatatctcagtcatwttacagctctggcatttctgggtaacactttagaatacttccactccggttggtccataaaaagctgcctgtgtttttatgttttgaaaatacacgcaga

SEQ ID NO: 14584 - DNA, 201 bp, Homo sapiens
tctggacaatggagaaaaagtcgtaggttatgagttttttatttatggacattaagcaatatctttaaaatgtaaaatgaagccgacaaaatgcacagccrgataacaacaacaaatctaatctaaagtgacaggaagagactctcccagacatttttctctttaatgtaacatgactttaaattgatgcaaccccacagt

SEQ ID NO: 14585 - DNA, 201 bp, Homo sapiens
ctttcagttgaattatggtctttagctcaaatgcatgacatgatgtgtgtgcctttggagtggggcggtattagtcagtcgatggttatttccttgaggaraaaggaaaggagaagttgagtacttttcagtgtttgttactacaaaagcatggtggcatgccattgttctgagaggaagggggttttttgccttgtcagc

SEQ ID NO: 14586 - DNA, 201 bp, Homo sapiens
aattgtgatgttcagcagtttataccttgggagctggaagcgtttctccatggtgaatttgtaatattaattggccatgtcagttcatgacaaatgtagtracatctatttcaagtatttcagttttatggtgctgaagaagtgacacgcgctccagataagtaatctcacaaaagatcttcccgctcgctgtggagcgcc

SEQ ID NO: 14587 - DNA, 201 bp, Homo sapiens
gtaggacaatgagaagaggccagatgaggacagaatttttattttccattgccagtaacaaacacagccctaacttgcttagaccaaagatggggattgaytggcaactgggaagcctaagggtggatctggcgtggctggatctaagtgattaaatggcgcggtcataattctatttctctgcatctctcagctgtactt

SEQ ID NO: 14588 - DNA, 201 bp, Homo sapiens
ttcaccatgttggccatattggtcttgaactcctgacctcaagtgatcctcccgcctcagctgcccagggtgctgggatcacaggcgtgagccaccgtgcrcgacctcagggtcccttctaacctgtgctgttgtcataaaccctggaggagaagcaagatctttctagcaggagcaacatcatcccaaataaagtgatag

SEQ ID NO: 14589 - DNA, 201 bp, Homo sapiens
aacagcagcacaacaaaatagccatttacatgtcaagactatattcatagaatccatatgtctaaggtggggaagttgtcattattcctgttttatagatraggaaacagaggcccagatggagtaagtgactgctgaagtacacatgatttgtcagtagaaaggaagagaccaaaggtggcatcaactttatctttcctt

SEQ ID NO: 14590 - DNA, 201 bp, Homo sapiens
aatttttattttccattgccagtaacaaacacagccctaacttgcttagaccaaagatggggattgattggcaactgggaagcctaagggtggatctggcrtggctggatctaagtgattaaatggcgcggtcataattctatttctctgcatctctcagctgtacttccatctctgtaaacttcatttgcagacatggcc

SEQ ID NO: 14591 - DNA, 201 bp, Homo sapiens
gagcactggatacctagactctgctgggctctagagaagtgctgggctacagcgcccagtgccctacctcttggggccagccagcctcaccaaaaaatcasgcttctggcttgctccaaactcaggaagttgctgggaagtctggctagcaacaccctcattcccagtcctggccatgcctctctgctctccctagcacag

SEQ ID NO: 14592 - DNA, 201 bp, Homo sapiens
atgagtactcactctacttttttagtttatatttttattttagttcatttcatttaagacagcgtctgttacccaggctggagtgcagtgacatgatctcrgctcactgcaacctacaccttctgggttcaagtgattctgatgtctcagcctccccagtagctgggattacaggcatgtgccaccacaccggctaatttt

SEQ ID NO: 14593 - DNA, 201 bp, Homo sapiens
taagtttttaatttttgttttacttttgtcttttaattttaattctattgcaaccaaatctatcagcctgtcttctatgatctctgcttttaattgttacsctttaaaaatccttctccatggtaacattatattgactcatatgtcttactggttgaacgtgcctatgtttgactttgaaatcattaaattcattgagga

SEQ ID NO: 14594 - DNA, 201 bp, Homo sapiens
gctccatcaatacccatcccaggagacagtggcagtcttgatgtcaatcttgttttaggatcattgccagtggaattcaggactgcggttctacccggtaycggggaaccaggtgagggggttaagaggcctgggcccatggaaggggtgagagagagccacatacttacagttgtgaagggggccagccaggatggtggc

SEQ ID NO: 14595 - DNA, 201 bp, Homo sapiens
agagaataaggtgttggtttgttataaggtggtcctttataaagtttagacctattttaataaggctgacttgggttgaagataactagagccatgacttycatcttgatggacaatgagtactcactctacttttttagtttatatttttattttagttcatttcatttaagacagcgtctgttacccaggctggagtgc

SEQ ID NO: 14596 - DNA, 201 bp, Homo sapiens
atgaaatattaggttaacatggaaaaaacatggcatcccatgttttagtattttttccttatttccaagcagcacctctctttgaattatattctgttctstgtttttataatttgactcccttctattctacatctaaatagtgcattgtctgttttcactcaggactttaaaaatagttctagtactaattgtattttt

SEQ ID NO: 14597 - DNA, 201 bp, Homo sapiens
atccctcgacccagtgacctagcccccgtgtaccttccctgtctcatttctcactgttatcattgtaaccctctaccctctcttttggcttcctgcagttkccctcctgcagcagggcttttgcacatgctggtttctcccttactttgcctctactcagtctttatatttcaactcagtggtcactgtctctaggaagcc

SEQ ID NO: 14598 - DNA, 201 bp, Homo sapiens
cactggataggtaatagacgccggcatggctatgctgtggttcctgctgatgggcacactattacaggtgcatgataagtgtgtcgtacgcaggaagtacrtttcccccagccttccctacctgctgagggctgctcccagcctaaggatttcatccagatagattcatagcgcttccagtaaatgcaccccttgcctttc

SEQ ID NO: 14599 - DNA, 201 bp, Homo sapiens
ctgcattaaatccttctataagttttcatagttctgtgcatttcctcttggcagcaatgcactgagctgcagttttacatttttgtttttttgttttttgrgtttttttttttttttgagacaaaagtctcgctctgtcccccacgctggagtacagtggcacgatcttagctcactgcaacctccacctcccaggttcag

SEQ ID NO: 14600 - DNA, 201 bp, Homo sapiens
cctgctgatgggcacactattacaggtgcatgataagtgtgtcgtacgcaggaagtacgtttcccccagccttccctacctgctgagggctgctcccagcstaaggatttcatccagatagattcatagcgcttccagtaaatgcaccccttgcctttcaaagttgaaaaagaaattactttggacacaaagaggtgtttc

SEQ ID NO: 14601 - DNA, 201 bp, Homo sapiens
tcatgtgttacctgagactctccgcccataggatgtagttcctttccattggaacacatggggaccgagggaataaagaatgttttcatctctgaaaatayctctcattcttccaatcaatgctgctcttttcttgcatactgtatactgggaagcatttgtttcgatttgtggttaaatgtatgtgtccactggacttca

SEQ ID NO: 14602 - DNA, 201 bp, Homo sapiens
ctgacctcctaagttagagcccctgggaagttcagccgtggttctgaccaggcaggataactatctaagtgttcccctttggacctagactgagccaaagwttctccttggtctatataggataatagatttctaaaacaaaccaatagctcaggcacaattatagtggggggtggggggcatgtttaacctactttagag

SEQ ID NO: 14603 - DNA, 201 bp, Homo sapiens
cgatttgtggttaaatgtatgtgtccactggacttcagtatccaccctttgaaggaccgcaggagaagttgttcaggtagaaacatacaagggccggatgyggtggctcacacctgtaatcccagcactttgggaggcctaggcgggtggatcacttgaggcctggagtttgagaccagcctggccaacatggtgaaaccc

SEQ ID NO: 14604 - DNA, 201 bp, Homo sapiens
tattgaattttggcccacaggaaaaggaaactttgctgttagggtcagctggaggagagactgcaggggtcagagatcagggccatatgctagagctgcartgtgggtgctcaaatgatgttcagtgcatcttcacagatggacctccacatgtccctcatgccctaaaatagatattctccacagctgcacatacaacaa

SEQ ID NO: 14605 - DNA, 201 bp, Homo sapiens
gtcttcgtaatatagctagtttttgtccattcattttgctttgacttccttgtataggtacaaaggtgtaagtaggagagtctaccaggcagcacacagaygtggccctgtaaccacccttgtgtaaaatcagagtaatcctccctatccttgcttatttcactgggttcatgggtgatgactgtaaatgacacaggagac

SEQ ID NO: 14606 - DNA, 201 bp, Homo sapiens
gatgaatactcagggttttttttttttttttttttcttctaacttgtcctccttgatcaggatttctcaaatgcacatttgtctaatatactgttgaaccrtgcaagtaccaaaacaaaacaagaaacccagaattatagctcaaatttaattaaaatagcttttattgcttctattcatgtgtccctggattttaagtga

SEQ ID NO: 14607 - DNA, 201 bp, Homo sapiens
cccagtgtgtcacgccattacatgcttacagcctatttttacaaagtttgaatattgtaatttgcctttaaaaaattgttttaaagatctgcctaggtcarcaaattttatttactctctagaaccatttgattggggtactgccttaagaaataaagcagattccttcagtcgcatgtgggcctggagtcactggaaaat

SEQ ID NO: 14608 - DNA, 201 bp, Homo sapiens
caaggtagaagacataggtggtcaagaatttagaaagacccggactcgaatcccagctctgatccatctcagctctgccatattgccaagttccgctgagrctccatttactcacctgttgtatcatctgaattatttccatatccataatgtgcaaggatatccttccatgttattagaaatacagatacaccatcatta

SEQ ID NO: 14609 - DNA, 201 bp, Homo sapiens
gtgccagtgggcagaaggttttgcaagaatagcttcaggaagactttgtgggaagacagatgaatactcagggttttttttttttttttttttcttctaayttgtcctccttgatcaggatttctcaaatgcacatttgtctaatatactgttgaaccatgcaagtaccaaaacaaaacaagaaacccagaattatagctc

SEQ ID NO: 14610 - DNA, 201 bp, Homo sapiens
tggttttaaaagacgccatggttgccatgaggaggacaatgcgtaggaggcaggagtgaaagctaaaggatatgctgggaggtgaccctggagttaaagaragcaactaaggtgaccaggtgacaataatggagatagagaaaacaggatggattcaggaaacatgaccacactgagcatattcaaatgtaattgtcagtt

SEQ ID NO: 14611 - DNA, 201 bp, Homo sapiens
tttgcttttaaatgcccgtgttgatttcttaatattttcaacttcctcttctgaagccagttccccccgaccatcagtcatgagtccgttcttttaacctygttcaggtggcgtggggcggtgtgtttggtggggagtgatgggtgcttgcctggaagtgcgagcaattgatcagctgatgaggggtatttattatctgtc

SEQ ID NO: 14612 - DNA, 201 bp, Homo sapiens
catttactcacctgttgtatcatctgaattatttccatatccataatgtgcaaggatatccttccatgttattagaaatacagatacaccatcattatcastggccaaatcattcaaatcgctgtttgcttcttctcgggctcttattcaagctcacgatgctattctcatagtgattgcgaatctcactgcataaaggtg

SEQ ID NO: 14613 - DNA, 201 bp, Homo sapiens
aactaaacaaaatgctaacccatatgggagaaatttccaaagaattaaaaccacccaccaggaaaatgggaaagtctcccctccacacacacacacacgcrcgcgcgcacacacacacacacacacacacacacacacaaaatcaccaaatcacacctgaacaagaggaagaaaattaaactcattgaggagataccatct

SEQ ID NO: 14614 - DNA, 201 bp, Homo sapiens
tgatcctattcgcatgataaaaatcataatgtctcaaattacttactcaataaaatgtgggtttgtctattattagtgattattagggttataatgcagcrtggaaatttggagcaaattaactatacatgcaagctgttgggctcaagtgcagttaatcatacgcatacagtgccagtgggcagaaggttttgcaagaat

SEQ ID NO: 14615 - DNA, 201 bp, Homo sapiens
ttcattgttgtccttttttattaaaacaggttttgtttttttgtgtgtgtgttattttgttttttgtttttttgtttttcgggggctggagtagtgtgcaragcctggcggtgattgttctcattagaaagtatagtgtaatactcaataaattacttttgttctcaccttgggaagtggactcagaggccaagtgacttt

SEQ ID NO: 14616 - DNA, 201 bp, Homo sapiens
aacttcctcttctgaagccagttccccccgaccatcagtcatgagtccgttcttttaaccttgttcaggtggcgtggggcggtgtgtttggtggggagtgmtgggtgcttgcctggaagtgcgagcaattgatcagctgatgaggggtatttattatctgtccctgactcccgagagaggaaataaatccttggaccccag

SEQ ID NO: 14617 - DNA, 201 bp, Homo sapiens
atctcactgcataaaggtgattttgaaaacatcacttttcctccacactaatgtgtgagcttagccagagtaggagatatatcttacttaaaaaaaaaaamaacaaacaaacaaaaaaaaaaaactccttcttcatttgttatagttccaggatagagtgtgtacctggatagagagagtcaggcagatataggtgtgccc

SEQ ID NO: 14618 - DNA, 201 bp, Homo sapiens
ctaaacaaaatgctaacccatatgggagaaatttccaaagaattaaaaccacccaccaggaaaatgggaaagtctcccctccacacacacacacacgcgcrcgcgcacacacacacacacacacacacacacacacaaaatcaccaaatcacacctgaacaagaggaagaaaattaaactcattgaggagataccatcttt

SEQ ID NO: 14619 - DNA, 201 bp, Homo sapiens
tcactgcataaaggtgattttgaaaacatcacttttcctccacactaatgtgtgagcttagccagagtaggagatatatcttacttaaaaaaaaaaaaaamaaacaaacaaaaaaaaaaaactccttcttcatttgttatagttccaggatagagtgtgtacctggatagagagagtcaggcagatataggtgtgccctcc

SEQ ID NO: 14620 - DNA, 201 bp, Homo sapiens
aaacaaaatgctaacccatatgggagaaatttccaaagaattaaaaccacccaccaggaaaatgggaaagtctcccctccacacacacacacacgcgcgcrcgcacacacacacacacacacacacacacacacaaaatcaccaaatcacacctgaacaagaggaagaaaattaaactcattgaggagataccatcttttt

SEQ ID NO: 14621 - DNA, 201 bp, Homo sapiens
aggtgattttgaaaacatcacttttcctccacactaatgtgtgagcttagccagagtaggagatatatcttacttaaaaaaaaaaaaaacaaacaaacaacaaaaaaaaactccttcttcatttgttatagttccaggatagagtgtgtacctggatagagagagtcaggcagatataggtgtgccctccttccaagatgt

SEQ ID NO: 14622 - DNA, 201 bp, Homo sapiens
tagaaagattttcacccattctgtataattagacaaattctgttactatctgtccaacagtttagcaagagtcactctgagattgaagagaggaagggaaygttggaaccaatgctgatgagccattcataggctctggctcactatatatgtctaaaattcacatgcccctaaccctcaaataatgaccattaataatct

SEQ ID NO: 14623 - DNA, 201 bp, Homo sapiens
ctgcagaactgaggtgggccccaaaacttgcgtttctaaaaggtactagctgagcatgatgactcacatttgtaatcccaccactttgtgaggccgaggcsggtggatcgcttgaggccaggagtttgagaccagccttgccaacatggtgaaactccatctctactaaaaatataaaaatttgccgggtgtagtggtgca

SEQ ID NO: 14624 - DNA, 201 bp, Homo sapiens
gcttggaaggtggcgcaaataactgcttgaggctccctctcttgggccaagcttgactctggattttcattgttgtccttttttattaaaacaggttttgkttttttgtgtgtgtgttattttgttttttgtttttttgtttttcgggggctggagtagtgtgcagagcctggcggtgattgttctcattagaaagtatag

SEQ ID NO: 14625 - DNA, 201 bp, Homo sapiens
aaaaaaaaaaaaacaaacaaacaaaaaaaaaaaactccttcttcatttgttatagttccaggatagagtgtgtacctggatagagagagtcaggcagatayaggtgtgccctccttccaagatgtgtgatggtgggcaactttctttgcatctctgagcctctattttctctatataaaatgagagagaaaaaaataattc

SEQ ID NO: 14626 - DNA, 201 bp, Homo sapiens
catcgcccactctgatttagatgagcaagagctgctgagttgtagatttctagtttctaaacaacaataagtcttgcccccagatagcctcttagcagagycaaaagccagcagagagaagactcagcatttgctttggagtaagtttgtgtgtgtatgtttatctcccttttactcatgggctcttttttcccaaataac

SEQ ID NO: 14627 - DNA, 201 bp, Homo sapiens
gatgaatgtagtgagagaaggaaggaagagagagagggaagaaggggaaaaagagggatggaaaggaggaaggaaggaaaggagggaggaggcaagtatawtagtcatgatatagggaattgaaaagacattcacgttttgtggtgaatgaaaataacttgacctttatgaagctggcctaatccctggaaggaaaaaatt

SEQ ID NO: 14628 - DNA, 201 bp, Homo sapiens
actacaaatcattgatcaaagtattggtctgtcacctgtccatgtgtaaggccaggcctaagtgctctgacagggcatgactcaatcctcaaacaggaagsgggaaattgctttccatctcctaaccctaagatcctggatggcaggtaatctgcttcctcaagattctgttgatacacattcaggactctggtttctgtt

SEQ ID NO: 14629 - DNA, 201 bp, Homo sapiens
gagaaggaaggaagagagagagggaagaaggggaaaaagagggatggaaaggaggaaggaaggaaaggagggaggaggcaagtatattagtcatgatatakggaattgaaaagacattcacgttttgtggtgaatgaaaataacttgacctttatgaagctggcctaatccctggaaggaaaaaatttccttggatatgtg

SEQ ID NO: 14630 - DNA, 201 bp, Homo sapiens
caaagtattggtctgtcacctgtccatgtgtaaggccaggcctaagtgctctgacagggcatgactcaatcctcaaacaggaagggggaaattgctttccrtctcctaaccctaagatcctggatggcaggtaatctgcttcctcaagattctgttgatacacattcaggactctggtttctgttttgcttgatgacaatg

SEQ ID NO: 14631 - DNA, 201 bp, Homo sapiens
gggaagaaggggaaaaagagggatggaaaggaggaaggaaggaaaggagggaggaggcaagtatattagtcatgatatagggaattgaaaagacattcacrttttgtggtgaatgaaaataacttgacctttatgaagctggcctaatccctggaaggaaaaaatttccttggatatgtgatttatataatcaatcaacta

SEQ ID NO: 14632 - DNA, 201 bp, Homo sapiens
atacacattcaggactctggtttctgttttgcttgatgacaatgacccagtttctttgactaaataaatgtatagacacacattacttcttttcattctargaatcataagtttttcaaactttagaatcacaaggtccattaaaggacatctcccctgaccttcccattttgtagatgggaagactaaggtccaagcttg

SEQ ID NO: 14633 - DNA, 201 bp, Homo sapiens
tattttagtagagacgggttttcaccgtgttgcccagggttgtctcgaactcctgagcttaggcagtctgcccacctcagcttcccaaagtgctaggattrtaggcatgagccaccatgcccggcctaatctaatcaattcctttaaatctgaaactgtccgcctgattctggtttaccacaaccaccagagtcttaagtg

SEQ ID NO: 14634 - DNA, 201 bp, Homo sapiens
aggcagtctgcccacctcagcttcccaaagtgctaggattataggcatgagccaccatgcccggcctaatctaatcaattcctttaaatctgaaactgtcygcctgattctggtttaccacaaccaccagagtcttaagtgtcccaatagccagggtctcatagactctgcttatggttaattcttctggggaaattaatt

SEQ ID NO: 14635 - DNA, 201 bp, Homo sapiens
gtgacaagatctccaaggagccagttcacgcttggatgactctggagctgtggtgacaatctaaatcctaaattgaggcttactaggaaatgcactaggtracaggctctagagaaatggctattaccaggttgctcaggctggagtgcagtagtgcaatctcagctcactgcaacctctgccttctgggttcaagcaatt

SEQ ID NO: 14636 - DNA, 201 bp, Homo sapiens
ctctagtctagggcacaaaatttctgtcaacccttctaaccagtgtttgaagtacgtaagacgttcatttccacttctaatgaggaattagaggaacggawttataaaggaattctggttataattgcatgtacttttagagacgatgtctaacagtgcaacccatagaaccaggctgcctggattcaaatcccagctctg

SEQ ID NO: 14637 - DNA, 201 bp, Homo sapiens
agtatagacacgtggcaccacgcctgggtaatttttgtagttttagtggagacaggatttcaccatgttggccaggctagtcttgaactcctgacctcaastgatagacccacctcagcctcccaaagtgctaggattacagacatgagccgacctttttatgtattgttgatacagtatgacaagggaagagttaactga

SEQ ID NO: 14638 - DNA, 201 bp, Homo sapiens
aagagactggagaaagccaatctgtttctccctgaaaatcatcttacttttttaacgcttcgtacctagatttggcctgggcagcccagggagactgttcragcactggatacctagactctgctgggctctagagaagtgctgggctacagcgcccagtgccctacctcttggggccagccagcctcaccaaaaaatcag

SEQ ID NO: 14639 - DNA, 201 bp, Homo sapiens
gcccatcccaaatgaattctaatcctcagcctctagaatgcctggagtgagaaaacagaatattgttcttttctgtttatattatttcatactgagttaayacacttgccaagactccgaggcagcttctggcttgacaatgccttctttaactagcctagtttctagaataaagttcgggtccaccaggccctctgagtg

SEQ ID NO: 14640 - DNA, 201 bp, Homo sapiens
tcgagttcttaatctgagcagtttcgaaaccaagcccacattaattaatataaataatgactgggaaacgttgcaggactccccggaaaagaatgtataarttgatgtgtttttgtatatgcttatgtatatgcctttgtgcacgaaaggagataaatggtgtatttcacacagttccttctcctcctctaagggatatta

SEQ ID NO: 14641 - DNA, 201 bp, Homo sapiens
cttaggcatccatgctcagggctctctgtggtaggcaacagctggattatttactttctagaatatctcgagttcttaatctgagcagtttcgaaaccaarcccacattaattaatataaataatgactgggaaacgttgcaggactccccggaaaagaatgtataagttgatgtgtttttgtatatgcttatgtatatgc

SEQ ID NO: 14642 - DNA, 201 bp, Homo sapiens
tgcggtggcgcaaacctgtaatcccagctacttgggaggctgaggcaggagaatcgcttgaactcgggaggcggaggttgcagtgagtcgagtcgtgtcartgcactccagcctgggtgacagagcgaaactctgtctcaaaaaacaaacaaaaagaaacataccgggagatctggttctattgaaccccagtgcagccat

SEQ ID NO: 14643 - DNA, 201 bp, Homo sapiens
tatgctagagctgcaatgtgggtgctcaaatgatgttcagtgcatcttcacagatggacctccacatgtccctcatgccctaaaatagatattctccacasctgcacatacaacaacgtcagtgaaatccgttgagaggagcattgaggagatgagtcaggtgtgccgcagcactcaggtcagacttgaggcaagtgagag

SEQ ID NO: 14644 - DNA, 201 bp, Homo sapiens
cagtggtgtgatctcagctcactgcagccttgacctcctgggttcaagagatcctcccacctcagcctcctgagcagctgggaccacaggtgcttgccacyatgcccaactaacttttgtattttttgtagagacagggtttcaccacattgcccaggcaggtctcaaactcccgggctcaagcgatcctcccaccttggc

SEQ ID NO: 14645 - DNA, 201 bp, Homo sapiens
gagatgagtcaggtgtgccgcagcactcaggtcagacttgaggcaagtgagaggtgtgagttattcagagtcccagagagcttgggccaaaagagattctrtttttactggagcatgtgagggtggatcacaactaggatggcgcgaagttcacctcgtgtaagcacaccaggctgcagggataataactgcactttttaa

SEQ ID NO: 14646 - DNA, 201 bp, Homo sapiens
atcatattctcttcactgaaacatttcagatgacttaaaaattcaccttgtagaacttttaaaattgaaactttctggtgaacatcattagttgacagatrtgtcattgaagtttcatccttcttcatttcagagtctgctggaagacccttcatttaccactctctccttcctggaggtgtggaaatactctacctgggt

SEQ ID NO: 14647 - DNA, 201 bp, Homo sapiens
tataagcaatagtccctgaacatcatttggcctgaactaggctagagtttctcttaatcaaaataataacgatgatttttccatgccaaggagtggtgtcrtatcatgaagtagatttatgtacacattaaataaacttttacattttaatgtaccaatttgcaatttttttttctattcaccaaaatattccagataacg

SEQ ID NO: 14648 - DNA, 201 bp, Homo sapiens
catattctcttcactgaaacatttcagatgacttaaaaattcaccttgtagaacttttaaaattgaaactttctggtgaacatcattagttgacagatatrtcattgaagtttcatccttcttcatttcagagtctgctggaagacccttcatttaccactctctccttcctggaggtgtggaaatactctacctgggtga

SEQ ID NO: 14649 - DNA, 201 bp, Homo sapiens
cccaaagtgctgagattacatgcatgagccaccatgcctggcctctggccttcttttcactttagaaaaaaacaaaaaacaaaaaacaaaaaaaaacacamaaaaaacttttttttttagaactgttttagtttgggagccaaaattgagcagaaagtacagagagttcccgtatacctccggcagagccctggctcacta

SEQ ID NO: 14650 - DNA, 201 bp, Homo sapiens
caaatggggaacagtcctgtgcagtgtttctaggaagttaccagcttcatcataggaagacgttctccatcgtttggatctttttcaccagcaccttttgrttgtggtggtttgggatgtgatgatctcagaactttacatcctccatgaaatctctgcagcgatagttgaatgtcttgccttttctattattgccctttt

SEQ ID NO: 14651 - DNA, 201 bp, Homo sapiens
ttcaccttgtagaacttttaaaattgaaactttctggtgaacatcattagttgacagatatgtcattgaagtttcatccttcttcatttcagagtctgctrgaagacccttcatttaccactctctccttcctggaggtgtggaaatactctacctgggtgaggctctcgtggctttttgtgccaagtgtccgtaaacttc

SEQ ID NO: 14652 - DNA, 201 bp, Homo sapiens
atgcctggcctctggccttcttttcactttagaaaaaaacaaaaaacaaaaaacaaaaaaaaacacaaaaaaaacttttttttttagaactgttttagttkgggagccaaaattgagcagaaagtacagagagttcccgtatacctccggcagagccctggctcactatctacatccccactagatccatgtatttgttta

SEQ ID NO: 14653 - DNA, 201 bp, Homo sapiens
gaagtgggcgtcgtgatgccagtgtcttcgtaatactatctttctttcccctttagcacccagaacttatgaaatatgactcggtttatcctgaacacatstctgtgcatcagggaggatgggagaattaattccagtttctcaattgcaaaagtgaggctggtcatggggcttggaaccacgccacggacgcatgaagcc

SEQ ID NO: 14654 - DNA, 201 bp, Homo sapiens
tgaataccttttgctttctataaaatggtgtggcattgctggtattttcactcttccttcctaccctggatgctgatttgatgcttccagccttagcggtyttcttgcttctaggactgaacagggaagagggaaaagtcaaaagaatgacagaaggtcctcacgttgcagaacactgaccaatgttggcaactacaagac

SEQ ID NO: 14655 - DNA, 201 bp, Homo sapiens
gggggcctggaaggggagaaggggcaccagaaggagaaatgggaggaaagggcgagtgagatagcaaagagaactcagaaagtaataaagccctgcagtartcagagggctgaggccaggtccccagtgagcggctgaacacacagtgattcaaacccactccagacctgtgttcttaatcattaccttcacctggaggga

SEQ ID NO: 14656 - DNA, 201 bp, Homo sapiens
tctgtagcttcttccagcatgtgatcatacatctacctaacctctcccattggttgaatttaatatactagtgaattttccattgcaaagatgaggttacraatcatagtgttcatactcagaaggactttataaatattttgcctttttgaagtatatacaagaaatgaaaaaaaaaacaggaataaataaaaagaataa

SEQ ID NO: 14657 - DNA, 201 bp, Homo sapiens
atcatatattgtatcatatcatatcatgtcatatcatatcatatcataccgaataatttcattgccctaaaatacctctgttttcactttttaatctcttwgtgcacacatcaaaaattccttttgtgtttttgagtttcaaaagtgtgccacaaacaagaaatttgggatctgctgagcccagcctcagacctgtagggg

SEQ ID NO: 14658 - DNA, 201 bp, Homo sapiens
gattccagcattttgggaggccaaggtggacggatcaccagagttcaggagtttgagaccagcctggccaaaatggtgaaatgccatctctactaaaaacmcaaaaattagctgggtgtgtggtagtgtgtgcctgtagtcccagctactctggatgctgaggcacgagaattgcttgaacctgggagtaggaggctgcag

SEQ ID NO: 14659 - DNA, 201 bp, Homo sapiens
tgctctcatttcattttcactgaactgaaaataaggtaacagaccctcaggtctacctataagtaccttccaactgttccacttttgtaaatttagttcarataatacatatgctgaaattcctatatcccccccatactccagatcttcagtgtggaatttaaatataattccttattgtaaaaaaaaaaaatttttttt

SEQ ID NO: 14660 - DNA, 201 bp, Homo sapiens
ctttctagctgtgtaactttaggcaaataatgtaacctccatctgcctttgttttttcctctgtaatagaaggaacaacaacgaacaacattttttttttkgcaagattaagtgagatcttccatttgacatgcctggctaattggcagtgcccaacagatagaaactattggtattgtaaggactgcttattgggtacat

SEQ ID NO: 14661 - DNA, 201 bp, Homo sapiens
cccaggctggagtgcagtggcatgaccatggctcactgcagcctcgacctctggggctcaagcgatccttctgcaacagcctccctagtagctgggactayaggtgcatgccaccacacccagctaatttttatattttttgtagagatggggttttaccatgttgcctaggctggtctcgatctcctgggctctagcaat

SEQ ID NO: 14662 - DNA, 201 bp, Homo sapiens
gaaacaaagagggcaacaggaggtcacgaaggcatgctgtgcccacttttggaaattgtgaaggagagtgtctcaaacatgtaggcttgagccactcaaarttctgggaaataggatgttttgtaaagaaagtttgctactgtcacttctgagtagttgcagtccctcccagtacgtgggtatcttcggtgagaacaaatt

SEQ ID NO: 14663 - DNA, 201 bp, Homo sapiens
tctctcagcttctcctctctttcccatccaactgagcagcaccaataaatagataagaaacctgaaggtctacatcaaatcagcttctattgctgcaaaaytcttctagctaacttcattctaaaagctgtctgaaatatatttacttacacccgagaagattcaaaaacattaccgctgaaccccgatgctttgggaaca

SEQ ID NO: 14664 - DNA, 201 bp, Homo sapiens
tcgacctctggggctcaagcgatccttctgcaacagcctccctagtagctgggactacaggtgcatgccaccacacccagctaatttttatattttttgtrgagatggggttttaccatgttgcctaggctggtctcgatctcctgggctctagcaatcctcccacctcggcctcccaaagtgttgggattacaggcgtga

SEQ ID NO: 14665 - DNA, 201 bp, Homo sapiens
ctcatgtgactttctatatcatcctttgtgtctaagtgatttgcactgggaagatagtaaacgctcccactttatatgcagaaggttgaaaacaccatgartgttgcaatctgaggtatctgcccttaaagaagcaatatttactgaaatgcagggcacacgacttttccagcaaaccacaccgccgtccttttgtgtgac

SEQ ID NO: 14666 - DNA, 201 bp, Homo sapiens
gctcctaggttttcttacttccaaaacagtgggcaagaacagctaccttttagaagcaggaaaaaggaacataatgaataaacctaaaggatttaaaaacktggaagacactaagaaactatattgccgagaaagagaaatgtaaattccgctggataaattagcgtttgcggttacttctctctttgttgcttaagcaga

SEQ ID NO: 14667 - DNA, 201 bp, Homo sapiens
attcataactcagtcacgttactgaggtatgtctcttcggatagattctatctctaaaaactacagattctatctctaaaaacttaagtcaagggattttsaagcagttgtttgatttatgtatgtgaacctctcccttaggagaagaacttttctttggcaaacaccataggaacggagaccttaacaaaagaattagga

SEQ ID NO: 14668 - DNA, 201 bp, Homo sapiens
agtgcacctgaccctaggataatcttaattttaagtaactggtaactcataaatttttaaacactctgcagttcaaagaaaacatgtttgtggtaggtagycagtttataacctgtgtaagactgtgttattagcaaatccctcaatgtgttgaccaagagtgggtaggaatcctgcagacagaatcttttgaaggtggtt

SEQ ID NO: 14669 - DNA, 201 bp, Homo sapiens
tggacaagaggtcacattgccttttctagcttggaaggtggcgcaaataactgcttgaggctccctctcttgggccaagcttgactctggattttcattgktgtccttttttattaaaacaggttttgtttttttgtgtgtgtgttattttgttttttgtttttttgtttttcgggggctggagtagtgtgcagagcctgg

SEQ ID NO: 14670 - DNA, 201 bp, Homo sapiens
cccggccttacgtttcagcatctttcaatccatctaatacgcagtgccagggaaggtttgtgaaaacatttgaatcacagagtcacaaacagtgagaatakctgcagttatgtttgtgatgctctaatgaacttacaaaaggccaggcctagtatttcagctgtgtccatgatgtctctgatggaaatggacaggtaacat

SEQ ID NO: 14671 - DNA, 201 bp, Homo sapiens
accccatctctattaaaaatacataaattagtcgggcatggtggcatgtgcctgtagtcccagctgctcaggaggctgaggcaggagaatcactcgaaccygggaggcagaggttgcagtgagcctagactgcaccattgtactccatcctgggcgacagagcaagactccatctcaaaaaaaaaaaaaaaaaaaaaaaag

SEQ ID NO: 14672 - DNA, 201 bp, Homo sapiens
aaagtactctctatggagaggttttatggttctgaaataatttaaaaacacactttactacaatccatagcaggtagttttgccaatttgggaagttatgktgccttgcagtttccaaagtaagctgaacagtgttttttaacagtgctgcccctctctcccactagaaatgcgagtccatccttttaccaagtgtggtac

SEQ ID NO: 14673 - DNA, 201 bp, Homo sapiens
ttccttttgagcccagctctccctttgtgacccagcaacttccttccccgatgatggccaagccttgaggatgtgaaactgcccagtgccccaatctggartccaccatcctgggtctagctggggacatccttgaatcagcctctgggaatcactgaaccaacatgagtcacttgctactgtgagatctcagaacacatg

SEQ ID NO: 14674 - DNA, 201 bp, Homo sapiens
tgagcacacttcagacttccagtcttgtgtggcctgtctaccacaccatgagacttcatgtctctcctaaatgaggagaaccaaagctggaaattgtcacyccctgtcagcccacagcactggtttctaaacctactggcctctaccgcttcacttctcactgtaatctctctgaccctaccttccagcttctcttgagaa

SEQ ID NO: 14675 - DNA, 201 bp, Homo sapiens
gttattagcaaatccctcaatgtgttgaccaagagtgggtaggaatcctgcagacagaatcttttgaaggtggtttgtttttttattcctttataagtacwgttgtagatttacaaagtaattgagtatatagtacataaggtcttgtgtacccaccgatcgcaattgagcatatagtacatgctgtcctgtgtacccact

SEQ ID NO: 14676 - DNA, 201 bp, Homo sapiens
ttggatatgtgatttatataatcaatcaactagtccttattttggtagagctaaacttctgtctttgggtttactcaccgtatctgtgtgcatcctggcartgtttacgatatacttctactaaaatattattttattctatactaacaaagggatttgttgtgtgtgtaaaattcaaatttcaatgaagattgtgtattt

SEQ ID NO: 14677 - DNA, 201 bp, Homo sapiens
tgggtttactcaccgtatctgtgtgcatcctggcaatgtttacgatatacttctactaaaatattattttattctatactaacaaagggatttgttgtgtrtgtaaaattcaaatttcaatgaagattgtgtatttttatttgctaactctggaaaatgtgtttacagaagaaccagagaaggacttactcctctccgtac

SEQ ID NO: 14678 - DNA, 201 bp, Homo sapiens
aggcctgagcaaaagacacagaaaggatttctttatcgtaagcacacttctctacattacctttataatccaacaactctgctattagtaaattatagaamcaacttttgtaacactatcttgtttgcagagtatatgaaaaatttgaagttaaaattcagctccacgaatactgcagtggtgagaaaatggcgacaaaga

SEQ ID NO: 14679 - DNA, 201 bp, Homo sapiens
taggccaagaaaggggtgggagaaacgagcaaggtgttgatagaaccccttagtgtcctcctcataccacagacactctcttcccccacttacttggccawttttttttttttttttttttttttttggtggagtctcgttctgtctcccaggctggagtgcaatggtgcgatctcagctccctgcaacctctgcctccca

SEQ ID NO: 14680 - DNA, 201 bp, Homo sapiens
gaaatctctagcttctcaaactgtttcgtggtggagtgccttttgggcacaggagaaggaaataagagcctcgcgaggtttgggaatgctgcctctagctytcacactgcatgcagaattcctactctgagagctcactttatctcaaaaacccatgcatattctgcatctactctgaattccgcagtgttgtgtgttact

SEQ ID NO: 14681 - DNA, 201 bp, Homo sapiens
tactcctctccgtacactttggacatgtcaaaatctagaaatagagatcagtaaaggtaacacatagcaccttaaatctgatttaaaaggaaaacaatgaytattatacagatttatggcttcttgtcaataatactctgatttctggagattgttatcagtcataagctttataggaaatatctccttttgaaaatgaca

SEQ ID NO: 14682 - DNA, 201 bp, Homo sapiens
cacgaacaaattgccaaatgcaaggcctgagcaaaagacacagaaaggatttctttatcgtaagcacacttctctacattacctttataatccaacaactytgctattagtaaattatagaaacaacttttgtaacactatcttgtttgcagagtatatgaaaaatttgaagttaaaattcagctccacgaatactgcagt

SEQ ID NO: 14683 - DNA, 201 bp, Homo sapiens
tgcactcctgtctgggagacagagggaggagactccatcaacactaataataataaagtaaataaaagggcactaaccctactcaggaagccttcactctmatgacataattacctcccaaagtccgcacttcctaatgttaccactctggaggttagaatttcaacatataaattttggggggacacattcagaccacaa

SEQ ID NO: 14684 - DNA, 201 bp, Homo sapiens
gtgtcatacagcagagggctgtgatgctctactgaggagtggaagtgtttttctgagggcatcaaacacgccgtcaagcagggaggcaacaaatctgagtygttccacagatactttgagtgcagtacaagttggtaatgggtaacaggctaaaccatgtggcaccccttccctcttatcagcttcttgctaccatgcaga

SEQ ID NO: 14685 - DNA, 201 bp, Homo sapiens
tccgtacactttggacatgtcaaaatctagaaatagagatcagtaaaggtaacacatagcaccttaaatctgatttaaaaggaaaacaatgactattatasagatttatggcttcttgtcaataatactctgatttctggagattgttatcagtcataagctttataggaaatatctccttttgaaaatgacattttaaat

SEQ ID NO: 14686 - DNA, 201 bp, Homo sapiens
tcccatcacgaacaaattgccaaatgcaaggcctgagcaaaagacacagaaaggatttctttatcgtaagcacacttctctacattacctttataatccamcaactctgctattagtaaattatagaaacaacttttgtaacactatcttgtttgcagagtatatgaaaaatttgaagttaaaattcagctccacgaatac

SEQ ID NO: 14687 - DNA, 201 bp, Homo sapiens
ggaaaacaatgactattatacagatttatggcttcttgtcaataatactctgatttctggagattgttatcagtcataagctttataggaaatatctcctwttgaaaatgacattttaaattaatgtgaaattgtgttttaatttaattcacagggagtcataaacaggtgggagaattatggaacaataattgtgtttgc

SEQ ID NO: 14688 - DNA, 201 bp, Homo sapiens
acaatgactattatacagatttatggcttcttgtcaataatactctgatttctggagattgttatcagtcataagctttataggaaatatctccttttgamaatgacattttaaattaatgtgaaattgtgttttaatttaattcacagggagtcataaacaggtgggagaattatggaacaataattgtgtttgcaagaa

SEQ ID NO: 14689 - DNA, 201 bp, Homo sapiens
ggtctcccaccctctcttatttttataaacaggctccatggtactatatacactgcagatggacagctgccaacctgctctttttgtgctgaggaactctrgatatttcaactagtttacatgactttcttacctatgctaccttataatccttttataaattttgctttacgttttaacaacggaaaacacttaaggttt

SEQ ID NO: 14690 - DNA, 201 bp, Homo sapiens
ttataggaaatatctccttttgaaaatgacattttaaattaatgtgaaattgtgttttaatttaattcacagggagtcataaacaggtgggagaattatgkaacaataattgtgtttgcaagaaatggatttcatcctaaaactccatgaatatgctattacagtttgttgtcatcctgaaatgctctgtttaaccataaa

SEQ ID NO: 14691 - DNA, 201 bp, Homo sapiens
catggtactatatacactgcagatggacagctgccaacctgctctttttgtgctgaggaactctggatatttcaactagtttacatgactttcttacctaygctaccttataatccttttataaattttgctttacgttttaacaacggaaaacacttaaggtttttttcctttcttttttttttaattcttccgccagct

SEQ ID NO: 14692 - DNA, 201 bp, Homo sapiens
tgtacaaagctgataaataactgaaaccaaattagctcaaactggttatatttctgggtacaaaccaggtgtatagttaatccattgttgtttctgtgtcraccaccattgtcctcacctatacttgggcagtgggggtggggaggagaacataaaaacccaccaagcctcatttttcttgctaatttatttccttgaact

SEQ ID NO: 14693 - DNA, 201 bp, Homo sapiens
tcccatttcaggctgattaaaaggcaaaatcttcacagtaggacaccaaaccctctgtatgccctgcctgcctccccccctctgacccgcctgcctccccvctgtgagctttttccacctactggcctcttgttcttcttcagctgttcctcagacatgccaggtgtgttcctgtctcagacgctttgcctttgctgctcc

SEQ ID NO: 14694 - DNA, 201 bp, Homo sapiens
gcagtgtttccaaaaatagttttggaaattgcaaaaatactacaatgctgttgtgccggccacactgtgagtgctgactgtcatgcattttatagcccatstccctctccagtgaggcttttggccactggccgttaattggtaaggttcttgaaaactgaagtgatggtatcagcatggatgcccgtgctttctgatgcc

SEQ ID NO: 14695 - DNA, 201 bp, Homo sapiens
tcttcttcagctgttcctcagacatgccaggtgtgttcctgtctcagacgctttgcctttgctgctccttctgcctggagtattcttccacgtagcaccaygagctgttcttctccaaaaggctttgctcaactgacactttctcagtgaagctgtttctcaccactcactataaaatggcagcctgcctctctgagcctt

SEQ ID NO: 14696 - DNA, 201 bp, Homo sapiens
tggccatggtgctcacagtctctcaatcctttatgttgagggagaaatgataaccagatctcattttgtgtgccaacccgaaagcctgacttgactgcctmaaatgttaggaaggactctaaagccctatctggattccaaatttatggttggtgcagactggatttttacaatttgtgcttagtagtatcttattatatt

SEQ ID NO: 14697 - DNA, 201 bp, Homo sapiens
cataggtagttttatatacattttatagctaagcccagcagcccaaaaagctaaatgacttcagcgcccacagatactcctggatgagaggggattggaawccaggtctgttcaattgcaaatcccctcttgtgccttttacaggtcagatgattttgtttttataggctctagcaggtcccttctctttgcgtcaccaga

SEQ ID NO: 14698 - DNA, 201 bp, Homo sapiens
tttataggctctagcaggtcccttctctttgcgtcaccagagaggaagatcccctaagacaaagcattccctgtagtttttagcataactagtactggctsagtaagtatccactggggttcggaatacaactgccctgcctcttgagcagccatgcctgcttccgaggtggtgctgcatgctattcaggaggacagacca

SEQ ID NO: 14699 - DNA, 201 bp, Homo sapiens
ttttagcataactagtactggctcagtaagtatccactggggttcggaatacaactgccctgcctcttgagcagccatgcctgcttccgaggtggtgctgmatgctattcaggaggacagaccatggatgggaatcctgagccacaactccttagcctcatgacgttgggcagatgactgagcttgtctgagttacaataa

SEQ ID NO: 14700 - DNA, 201 bp, Homo sapiens
cggaatacaactgccctgcctcttgagcagccatgcctgcttccgaggtggtgctgcatgctattcaggaggacagaccatggatgggaatcctgagccasaactccttagcctcatgacgttgggcagatgactgagcttgtctgagttacaataaataaaaataccatgctgaatgatggcctagcatgacattgggaa

SEQ ID NO: 14701 - DNA, 201 bp, Homo sapiens
tgctattcaggaggacagaccatggatgggaatcctgagccacaactccttagcctcatgacgttgggcagatgactgagcttgtctgagttacaataaayaaaaataccatgctgaatgatggcctagcatgacattgggaagtacagactttgcaggcaggcccctgggttcaattcctgcccctgtcattgagtaaag

SEQ ID NO: 14702 - DNA, 201 bp, Homo sapiens
gcacctgcatgttgtaaaaacacaaaataaaaaaaaaataaataaaagcagaccccttggttcagatatctttgtttgtgtaaatgttttggcattctttrtgaaaatcttcagattttcaagagcttaagatgacctcctctagccggctgcagcagtgtctaggtatctgtgaatgtgtaagaaattgagacagcctgc

SEQ ID NO: 14703 - DNA, 201 bp, Homo sapiens
cgctgccattcagttttactctgcacaaaatacagccaacatttttgcatttctttcttccttcctccttttcttctttctttccttccttccttcctttytcccttcatctatctttgttccgcttttgtttgtttttttttagatcgctgcatgctgccgcgttgggttaaccatggtagcattttaccatgagaagcc

SEQ ID NO: 14704 - DNA, 201 bp, Homo sapiens
taaattgaattattcccgctgccattcagttttactctgcacaaaatacagccaacatttttgcatttctttcttccttcctccttttcttctttctttcyttccttccttcctttctcccttcatctatctttgttccgcttttgtttgtttttttttagatcgctgcatgctgccgcgttgggttaaccatggtagcat

SEQ ID NO: 14705 - DNA, 201 bp, Homo sapiens
attctccatgccactccttatctctttagtgcagaaaacggagaggaggttcagtattcttaagaaactcccatgattgctttgaggcaatggatttaacrggtatctttatcccttatttacgcactgactgtggtactgagtcatccctggtgtttctggattttattggcaatgccaagagagcaggaagactgggac

SEQ ID NO: 14706 - DNA, 201 bp, Homo sapiens
aatttaaaaacacactttactacaatccatagcaggtagttttgccaatttgggaagttatggtgccttgcagtttccaaagtaagctgaacagtgttttytaacagtgctgcccctctctcccactagaaatgcgagtccatccttttaccaagtgtggtacgacaaaggtttctctggttttcttttggtattctcaga

SEQ ID NO: 14707 - DNA, 201 bp, Homo sapiens
ccttccaacatctagcattattgtgtgttgaataaatacttgttcgattaggtctaatcactcttcatgattggatttccaaaatgtggactctcagcagkacattacagggacagtggttgggtctggagatgtcacccttagctgtttttcacaatgagaggttgttttatcataaataaatcaataaatggcagatta

SEQ ID NO: 14708 - DNA, 201 bp, Homo sapiens
caggcacgccaccacacctggctaatttttgtatttttagtagagatgggggtttcaccatgtgggccaggctggtcttgaactcctgacctcaggtgatygacctacctcggcctcccaaagtgctgggattacagtcatgagtcaccatgcccgaccagcaagaccccactgctattgtccagtgtggtaggtaccttt

SEQ ID NO: 14709 - DNA, 201 bp, Homo sapiens
aatgagggcattggaaatccgctctcaggtggccatcgaaaatagtcagcctgagtgttgctacctgttttccataattgtgtagctttgcctttccttarttaatctgttcaataaactcctctgcagaatccaaatgcttaaattcagtttctttttgtctttatggtgtttttcattgttaacgtggcatcggagtag

SEQ ID NO: 14710 - DNA, 201 bp, Homo sapiens
tggtatgtgcaggtatcaccaggatgcaattagtttgatgaaatataccaagtcgtcaatgccactttggatagtttaatctgaaaataggacatggttgkggtagtgggcacaggggaaggaaggttatgtaattttaaaattcttcctttgattcaaaagaaaaaaacatgtttgttgcattcaactccaaagggtgag

SEQ ID NO: 14711 - DNA, 201 bp, Homo sapiens
tctgttggctgcataaatgtcttcttttgagaagtgtctgatcatatccttcgcccacttgggtggatgaagctggaaaccatcattctcagcaaactgtygcaaggacaaaaaaccaaacaccgcatgttctcactcataggtgggaattgaacaatgagaacagttggacacaggaaggggaacatcacacaccggggc

SEQ ID NO: 14712 - DNA, 201 bp, Homo sapiens
attgtttgtttaaaatcactttggattctcatttaccttttccccctcaagatctttgtttttgactttggagataaccagaaataactaagcatgcttcsttccctctacgatttcatcctcatggggaagcaagaccccactcttttattttcatgtatgtatatatgtatgtatgcatgtatgtatgtatgtttgaga

SEQ ID NO: 14713 - DNA, 201 bp, Homo sapiens
taattgtgtagctttgcctttccttagttaatctgttcaataaactcctctgcagaatccaaatgcttaaattcagtttctttttgtctttatggtgtttwtcattgttaacgtggcatcggagtagctcgacttttgcatcatgataaattcataacccaagagaaggcagaaaacataattattatcaattgcctctct

SEQ ID NO: 14714 - DNA, 201 bp, Homo sapiens
taacactaacaagctaattcaggtatgataataaaaaccttcacagggttagccatccatctatctgtccatccatctattcactcatgcattcatccacstgttcatccattcatctgtccattcatccatctatccatccatctacttctaggttgtgagaacccgtagtattgactctcagtgtgataggaaggccag

SEQ ID NO: 14715 - DNA, 201 bp, Homo sapiens
tctgatggccagtgatgatgagcattgtttcatgtgtctgttggctgcataaatgtcttcttttgagaagtgtctgatcatatccttcgcccacttgggtsgatgaagctggaaaccatcattctcagcaaactgttgcaaggacaaaaaaccaaacaccgcatgttctcactcataggtgggaattgaacaatgagaaca

SEQ ID NO: 14716 - DNA, 201 bp, Homo sapiens
cactttaaacattgcatccttgagttgcatatgatgggatctcttgaatcatttacattttgaaaaaagaaagtgaaatattctttaagaagccaaagtamtccacgagaatgtatggtgtttgttcagctggatatcttatttatttgaagtactgagagagaaatcttttctgactgctcaaaacagggaataataaac

SEQ ID NO: 14717 - DNA, 201 bp, Homo sapiens
gaaattgtctctaccttcaaggttctcacagtctggagggaacagagagccatcagggacaataggtccctgtgccatcagctactgggatgtatgacttyccagtagaggtacacagcacttgttccaaaaggagcctatgtagctttgggagttctctatttagtcaccttattttttttgtcttcttgttaaactagc

SEQ ID NO: 14718 - DNA, 201 bp, Homo sapiens
ttgtctttatggtgtttttcattgttaacgtggcatcggagtagctcgacttttgcatcatgataaattcataacccaagagaaggcagaaaacataattrttatcaattgcctctctcctggaattgccattggctgagtggaacaaaatacgaacttaaggagtagctgattcagagaaatccagggtaggaacgggtc

SEQ ID NO: 14719 - DNA, 201 bp, Homo sapiens
caaagaattgtagttggatcaaatgagttggagtgggatacagcaacaatctatattctgatttcagcaacactgtgcagtgtaattccatattatattayaccacatcttctgtgggtctttctttgggggaagctaacattttaaaaggtttccctttgtaacctgtaaccccctctaccccaaaagtatattcaagag

SEQ ID NO: 14720 - DNA, 201 bp, Homo sapiens
aggctagccaatcatttcaaagcctgtgtagaatatctagactatatgtaatcctaggatttgttgttgttttgttatgattttttttaagcaggaagctwaaaaaaataaccacccgttactttgctgcttttagaaaataggtttgagattgattttgaatactaaagtatagttttcatgttataaagccaaccatgt

SEQ ID NO: 14721 - DNA, 201 bp, Homo sapiens
aaagtgagattgcttcacattgcatttaaaggcttaaataatgtattctgtcagacaattctctgaaatggttttccaagtgaatgcatcagaaagtgccyagaaagaatgcctggcacaggaagaggagggcattcagaaaatgtgagctgcttgcatcagaatctaacttgagatgtatcattcctacggtaaggtgca

SEQ ID NO: 14722 - DNA, 201 bp, Homo sapiens
tctttatggtgtttttcattgttaacgtggcatcggagtagctcgacttttgcatcatgataaattcataacccaagagaaggcagaaaacataattattrtcaattgcctctctcctggaattgccattggctgagtggaacaaaatacgaacttaaggagtagctgattcagagaaatccagggtaggaacgggtccca

SEQ ID NO: 14723 - DNA, 201 bp, Homo sapiens
aaaaactagccagaaagcgtgaactttttttttttttaagccataaagcttggtaaggctagccaatcatttcaaagcctgtgtagaatatctagactatwtgtaatcctaggatttgttgttgttttgttatgattttttttaagcaggaagctaaaaaaaataaccacccgttactttgctgcttttagaaaataggtt

SEQ ID NO: 14724 - DNA, 201 bp, Homo sapiens
atagttttctgttcctgaattcatataaatagtcacccagtacgcattctttgctgtcttgcttcttttactcctcattaggttgtgggatttgcccacgrtatttcattctttattgtcattcttctttctctgccactgccatcctaccaacagtttgtattatgaaaaattgcagacgtacacaaaagttgaaagaat

SEQ ID NO: 14725 - DNA, 201 bp, Homo sapiens
gcccttttgaagatcaaatgggatctgtaaaaactctttgaaaaatgtagactgcttcttatgtgattcttactggtctattatttatcaagaaattaaamaggaatgaatatctgtagctgtttttctttttctttcttttcttttcttttctttttttttaagatggagtctcgctctgtcaccgggctggagtgcagt

SEQ ID NO: 14726 - DNA, 201 bp, Homo sapiens
tggccatggaattgagaagcaggagcatggctcacaaattcacaaatcagcttctccactaatgaggggtgaggaagttaaaatatagactttgttgttgktgctgttttaatgaagaggctggacattaaaatcaaggggaggaataatcatgtcttctcttgaaatgggcagtgaacttcccggaaccagagtgttgcc

SEQ ID NO: 14727 - DNA, 201 bp, Homo sapiens
ttcttttcttttcttttctttttttttaagatggagtctcgctctgtcaccgggctggagtgcagtggtgctatttcggctaactgcaatctctgcctccygggttcaagcaattctcctgcctcagcctcccaagttgctgggactacaggcgtgcgccaccatgcccagctaatttgtaattgtttgtttctaaaagga

SEQ ID NO: 14728 - DNA, 201 bp, Homo sapiens
ttttaaaaataattaaggtgatgtcatgataaggctattaagagccaacatgcattgagtatggactttctgccagacattgcactatgcacttaacacayagacacatattgttttttccattttaagatacagaaagtgggccttaaaggtgctactgacttgctgatatgctttggctgtgtccccacccaaatctta

SEQ ID NO: 14729 - DNA, 201 bp, Homo sapiens
tctgtcaccgggctggagtgcagtggtgctatttcggctaactgcaatctctgcctcccgggttcaagcaattctcctgcctcagcctcccaagttgctgrgactacaggcgtgcgccaccatgcccagctaatttgtaattgtttgtttctaaaaggatattcagtgcttccactgtcttttagaagtctgtagaaggaa

SEQ ID NO: 14730 - DNA, 201 bp, Homo sapiens
tggatttgtcccattacactgctttctttagtgcataagatcttgaagggagggatgcattctatgcaccccaagtttctggtttactcgtggtttcaggwgtccctttagacaacatcactgacaactcactatgtaaaaccaaacaaattattagctttcttactgtgtgtttgcatttgctgtgcccagggaaatggg

SEQ ID NO: 14731 - DNA, 201 bp, Homo sapiens
gttttttccattttaagatacagaaagtgggccttaaaggtgctactgacttgctgatatgctttggctgtgtccccacccaaatcttaacttgaatcgtrtctcccagaattcccacgtgttgtgggagggacccagggagaggtaattgaatcatgggggctggtgtttcccatgttattcttatgaaagtgaataagt

SEQ ID NO: 14732 - DNA, 201 bp, Homo sapiens
gctgttcttaactctgaaagcagagtgggccatttgaatgctcactttgatattttttaaaggaaaaatttgaggcattgacacatgccttttgcttactygcttggattggtttgatcaactttgttgcggtctaatttatgtaaaataaattgcatccatttaaatatacaattcaatgagttttgacagatgcacatg

SEQ ID NO: 14733 - DNA, 201 bp, Homo sapiens
cgatctcggctcattgcaagctccgcctcccgggttcatgccattcttctgcctcagcctcccgagtagctgggactacaggcgcctgccactacacctgkctaatttttttgtagttttagtagagatggggtttcaccgtgttagccaggatggtctagatctcctgacctggtgatccgcctgtcttggcctcccaaa

SEQ ID NO: 14734 - DNA, 201 bp, Homo sapiens
actatgtaaaaccaaacaaattattagctttcttactgtgtgtttgcatttgctgtgcccagggaaatgggaagtgcattgaggaagaggccccaagacawggagaagtcactccaactttccgggaacaccttttgctgtgccatgtgcatggaaggagaggaatgaatgactgttgaagccagatggccttgctcattg

SEQ ID NO: 14735 - DNA, 201 bp, Homo sapiens
ggagaggtaattgaatcatgggggctggtgtttcccatgttattcttatgaaagtgaataagtttcataagatccaatgaatttatcaggggtttctgcartttttctcttgccaccaccatgtaagaagtgcctttcacctccaccatgattctgagacctccccagccatgtagaactgtaagcctgattaaacctctt

SEQ ID NO: 14736 - DNA, 201 bp, Homo sapiens
cctcccgggttcatgccattcttctgcctcagcctcccgagtagctgggactacaggcgcctgccactacacctggctaatttttttgtagttttagtagrgatggggtttcaccgtgttagccaggatggtctagatctcctgacctggtgatccgcctgtcttggcctcccaaagtgctaggattacaggcgtgagcca

SEQ ID NO: 14737 - DNA, 201 bp, Homo sapiens
agctttcttactgtgtgtttgcatttgctgtgcccagggaaatgggaagtgcattgaggaagaggccccaagacaaggagaagtcactccaactttccggraacaccttttgctgtgccatgtgcatggaaggagaggaatgaatgactgttgaagccagatggccttgctcattgattctctcctttcccgccctctcaa

SEQ ID NO: 14738 - DNA, 201 bp, Homo sapiens
cctcctaatactgcatgacggataatatgccatcacatggtgtcatttaatatattcattcctatttatagacattgaagttagatccatgtcttactatyacacatgacttagtaatgaatgttcctgcatgtatatttggtctgcttgagcaaggatattgggagggaggatttccagcagcagaagtggtggaacaaa

SEQ ID NO: 14739 - DNA, 201 bp, Homo sapiens
ttcttactgtgtgtttgcatttgctgtgcccagggaaatgggaagtgcattgaggaagaggccccaagacaaggagaagtcactccaactttccgggaacmccttttgctgtgccatgtgcatggaaggagaggaatgaatgactgttgaagccagatggccttgctcattgattctctcctttcccgccctctcaagcca

SEQ ID NO: 14740 - DNA, 201 bp, Homo sapiens
tgttgtgggcttggggaaacagaaggaaattggagacattgatatgcttcctgagaggtggaaggggccacttaacacagctttcatttttcagttgccartgggagaggagctggggtgggcatataatgagtaacattcaaagctccttctgtctttttttcagagaattcacaaaacaactcagggcctcctggtcct

SEQ ID NO: 14741 - DNA, 201 bp, Homo sapiens
tgaagccagatggccttgctcattgattctctcctttcccgccctctcaagccatccagaaggagaatgaaatgctcaaatcaagggagttaactatggcmaagatgttagtaatgggaaactttggaggaaggcaaagtcagaaattattctgcagggagatttggggatgttggatgctaaggcccaagccgtctattg

SEQ ID NO: 14742 - DNA, 201 bp, Homo sapiens
tgctcacagtctctcaatcctttatgttgagggagaaatgataaccagatctcattttgtgtgccaacccgaaagcctgacttgactgcctaaaatgttargaaggactctaaagccctatctggattccaaatttatggttggtgcagactggatttttacaatttgtgcttagtagtatcttattatattagcccggca

SEQ ID NO: 14743 - DNA, 201 bp, Homo sapiens
tttagaaatatttctaacctctggccttttttcttatctctacttaaagcttttctggaaggaattcattttccactttccttaatgttccttaaatgttstacatatcttaaaagtggattcctcataaaacaatatggactatggtcttattctgtttaacggtatgaaagctcgcctgaaaggccaagagtaagattc

SEQ ID NO: 14744 - DNA, 201 bp, Homo sapiens
gccagggaaccaaggcctttcaaagttgaggacacttcccggtgccgtgcggtgtaaatcacagtgcaaactatgcgattatcccctgcagaggaatcgastgtgactttatgggattcttcaccaagcacttaggaataatctgatataaaacagcaggggtggagagtaatgacaacttcaaattagtttaatgaatgt

SEQ ID NO: 14745 - DNA, 201 bp, Homo sapiens
ggaaggaattcattttccactttccttaatgttccttaaatgttgtacatatcttaaaagtggattcctcataaaacaatatggactatggtcttattctstttaacggtatgaaagctcgcctgaaaggccaagagtaagattcttttaaaatcatgcccaagttttaaaggaatataaaactttctctttaaaaatata

SEQ ID NO: 14746 - DNA, 201 bp, Homo sapiens
aaatgtccagctttctttcttttattcaaaatttatacttcataattgaagttcacctcccaaaagacatagcttggtttagcatagagctatgatgtgtkttctctttgttccttttgcacactttccttgtctggaggcgttgggcttggatccttcattcttcatgaggctgatgtttttccatttcggtttccttaa

SEQ ID NO: 14747 - DNA, 201 bp, Homo sapiens
aaaatgtccagctttctttcttttattcaaaatttatacttcataattgaagttcacctcccaaaagacatagcttggtttagcatagagctatgatgtgktttctctttgttccttttgcacactttccttgtctggaggcgttgggcttggatccttcattcttcatgaggctgatgtttttccatttcggtttcctta

SEQ ID NO: 14748 - DNA, 201 bp, Homo sapiens
ctcctggttttcagcctgaggaggaaggtggctttatttaactccttcagccccggaacatcacagggcccttctttgtgcattctgggttctaacagccmcttgaacagtgcttgagagtatttccattataaatgtcgaatcggcattgaaggaacatctgttttaagtcaacttagactcaatccaggaaaaaaaata

SEQ ID NO: 14749 - DNA, 201 bp, Homo sapiens
cgcctgaaaggccaagagtaagattcttttaaaatcatgcccaagttttaaaggaatataaaactttctctttaaaaatatacctttctgctttcatcccytaacccacaaagctcaagtctagtttaattcaaacttggaaatagttcttttattattgctccctgcaatgggaacagagctgaggctcctaaggtctag

SEQ ID NO: 14750 - DNA, 201 bp, Homo sapiens
ggtgcctaaagtttgagaacttctgatcaaaaatgccagataagaaaaaaaaacctttcgagacatcatttgaatcaattatcaaatgtttccaaagtgcrcttgctttgcaaaccactgtactactcatctctgcctccatcggagcgagttcaggagagttgtgtttacttttctaaaggagccttttccttcccattt

SEQ ID NO: 14751 - DNA, 201 bp, Homo sapiens
aactcctgagggatgctcaggaaaccaaaaaggatgtctgcatggaggacaagaaggcacaaatcgtctgatttcaccccatcctaagatcttgtgacttmagctttgttttggactggggcattggatctcccacatgccctctcttaagtcgtgcatttgacgcatatttaataagcacctactgtgtgccattagaga

SEQ ID NO: 14752 - DNA, 201 bp, Homo sapiens
atttcagtagaaggagtgggataggaaatgttcacattgcttgcagtatgtgaaatagacctcgaggtattttggataaaaaagcaacattcgtgttttakatatggttacccagcccaagccgcctctgctctttatagccgtgtttttgaagtgttcttattttttgttccgaaatcggaatatttcctggcgtgcgta

SEQ ID NO: 14753 - DNA, 201 bp, Homo sapiens
ccaaagtgctaggattacaggtgtcagccacagtgccatgccctgatgtgatgcttaaattcagaaattgggaaggagggtcaggtagctataagcaaaayacaagagaaatataagagaaagaaagacttgtatctgttgttagtgagtttttgtggtggtgatacattaatggaggcaacagagggtcagaaatcaggg

SEQ ID NO: 14754 - DNA, 201 bp, Homo sapiens
atatactgaatgctaagccctccccactttttttttcttttttaaattcagaaatttctagttgtgtttattcccctcgtcagcatactttatcatatcaragccttttcagacactgtaaaactactgagttatgtttgggtcatgttttgcggtatgccctttaatagtgtagctttagaaatgcaattttcagcctct

SEQ ID NO: 14755 - DNA, 201 bp, Homo sapiens
gatttagaatcagaaagtgtgagttcaaattgccttcggctcttcacctgggtgggcgatttgaatagagctcacagccctgaaaaccctggttttcagaytctttattggtaaatgaagtcagcttagtgatatgagaattatgaaacataaatccctttgtaaaaatataaaataatcttacaatcatcatcgtcatcc

SEQ ID NO: 14756 - DNA, 201 bp, Homo sapiens
ttgaggttgcagtgagctatcattgtgtcactacacttcaccctggatctggaaggaagggaggaaaggaggaagggagggaaggaggaatttactagaarcaaattaacttctgtaatcctaagtacttgttaaggcagaaaaacgcagataagaaaatcgaagttgagggcaaggagctcatctttcacggtcatagac

SEQ ID NO: 14757 - DNA, 201 bp, Homo sapiens
gtgttttagatatggttacccagcccaagccgcctctgctctttatagccgtgtttttgaagtgttcttattttttgttccgaaatcggaatatttcctgscgtgcgtatcttggccccatcacatcacaacaggctgaatgctgtccacaggttgccagtctggatatggaatattagtcaaaacgatataaactaactt

SEQ ID NO: 14758 - DNA, 201 bp, Homo sapiens
ggctgatgccttctttcactagctttatgtggctggcagttctgtcctgccactcttttcctcatcatctcagcctccctgcccatggcactcaagagtcsaccttggcagaacctgcaactcttcagcgcctccctaatgaactccttgcaagggcccttggttaagttacagtagagaagtggttgcttaagcaagtag

SEQ ID NO: 14759 - DNA, 201 bp, Homo sapiens
gttcacgcctgtaatcccagcgctttgggaggccgaggcaggcggatcacctaaggtcgggagttcgagaccagtctgatcaacatggagaaaccctgtckttactaaaaatacaaaattagccaggcatggtggcacatgcctgtaatcccagctacttgggaggctgaggcaggagagtcgcttgaacttgggaggcag

SEQ ID NO: 14760 - DNA, 201 bp, Homo sapiens
gcatttcaggttggtctttcccgcaagaaggtaaactcatctgcagctgtattcgctgtgcctatggtagtgcctggcaaatgcacagaagtgggtattastgaggactttgtggttcgaatggaatgagtgtgctgctgacagtgttgcgagtcatctgcaaatgaaaagtccttccttctcttcccttctggaaccttc

SEQ ID NO: 14761 - DNA, 201 bp, Homo sapiens
gatgaccaagaatttatagtcaaaagtagataaagtaaaagagtgaaaacagagacatgatacgagttgatgataccgtatgcaacttgtcaaacacttamatttgtgaataagaaaactggggtctatttggtggtttatttcagagatgttggatcaaatcagacatcagaaaagacaccagtaccaaacgaagatatc

SEQ ID NO: 14762 - DNA, 201 bp, Homo sapiens
acgtgtaggaagctcaagacagagacgtggctggtcacggtggctcatgcctgtaatctcaacgctttgggaggctgaagcaggaggatcacttgagcctrggagttcgagacctgggcaacatggtgagacccccatctctacaaacaacaacaacaaaaaaaaaaattagccaggcgtgggggtgcatgcctgtgctcc

SEQ ID NO: 14763 - DNA, 201 bp, Homo sapiens
ggcaccacacacgatgagattggaggcacctgggtgtcagcctcttgggctggctcattacaggccactctgtctgaggaacactcaggtttgcaaaccgkttcttaaaattacaggatacctagggacctgttggggtgggagggaagaaccctatgggcagaaatgtgactttctgtagcaaagatgtactgtttccca

SEQ ID NO: 14764 - DNA, 201 bp, Homo sapiens
aaaactcctgggctcaagcgattcacgtgcctcagcctcccaaagtgctagggttacaggcatgagccactgtgcctggccctggtaaaattttgtctacrtagttactgctgcccaggcaaaatctgaaaaatgttagtctaatttagttaagtttttcttgcagaccagaacttctaggaaactaatatacaggttttc

SEQ ID NO: 14765 - DNA, 201 bp, Homo sapiens
aacttctaggaaactaatatacaggttttctccaaaatatattttcaaggaaaatcagagaataaaagtttccaatgcatttagactagaaaattaaataytcaacaaacaatttcggagggccaactatttgccaggatccttgctggaatagtctctaacctcaaggcaattgctgtctagctttaagatcaagagtaa

SEQ ID NO: 14766 - DNA, 201 bp, Homo sapiens
gtgtcacatatttaaggatgttcaaggcaaccaattagtattcaagcatttagaattattttgaaacatcttctgtgaaaaacaatttatttcctattccwaaataaatgcagaatattcctaatatagtttgatagttcctcctcaagacttatcattcaaagattgggcaaattgacttgaaagagaaaagttaagcta

SEQ ID NO: 14767 - DNA, 201 bp, Homo sapiens
cagttgctcacactcggtcaatacttgccttcctttgaggccatctgcactcactgacaatctgatcgctcccctgaatggaggtgaaagcatgcaagctmggagttaagatctttaactcagggaagaccctgtctatggaagtgctgagctcttcagtgtcatcacagaaaagcatgagcccctccctggtacggagtc

SEQ ID NO: 14768 - DNA, 201 bp, Homo sapiens
tagtgtcaagcagtacaggctttattcaatggccatggaattgagaagcaggagcatggctcacaaattcacaaatcagcttctccactaatgaggggtgrggaagttaaaatatagactttgttgttgttgctgttttaatgaagaggctggacattaaaatcaaggggaggaataatcatgtcttctcttgaaatgggc

SEQ ID NO: 14769 - DNA, 201 bp, Homo sapiens
gggtcaacttcttaccgacaaagctggtgccccaaaagaatggggtcttatcctgttgggtgtcatgaagccaacacacaaaaccgaaagtagtgtcaagyagtacaggctttattcaatggccatggaattgagaagcaggagcatggctcacaaattcacaaatcagcttctccactaatgaggggtgaggaagttaaa

SEQ ID NO: 14770 - DNA, 201 bp, Homo sapiens
gttctgaacttgctgttataattattcacattttcttgcagtgaaaatctacaggtcaaggtcatcttcacgtctttagttcttgttttgcttcaggtcastttagaaccgaatgttaaaaggatattgtctattcgaagggtcagattgtggcacgtggaccaaatccagccccccgaggcccacttttgtaaatcaggt

SEQ ID NO: 14771 - DNA, 201 bp, Homo sapiens
ggccacaaaaatcatgtcacaagatcttgttgatgtgcatgcattcattcattcaacaaatattattgagcatctaacataagccgggtgctttgctaggkacagaatgctgtacaaggtccctgtcctcatggggaccgtatgttgggaagacagatgataggcatggaaatgaagagacaaaccactccgacttcagcc

SEQ ID NO: 14772 - DNA, 201 bp, Homo sapiens
tagagtctggattctttttatccagaagccattctttcagcctgtgcctttttgtaaataccataccccatctatttccacaaaggatttggggcattagsgagtaaagggggaatatgttctagaagaagggcgctcacctcagtaaattgatgggtgggccacaaaaatcatgtcacaagatcttgttgatgtgcatgc

SEQ ID NO: 14773 - DNA, 201 bp, Homo sapiens
acctctttttcttcccggtctcaggttatgtctttatcagcagtgtgaaaatggactaatacagtgaattggtaccagtagagtggggcattgctgaaaasatatctgaaaatgtggaagtgactttggaactgggtaacaggaagaagttagaaccgttgggaggtctcagaagaagacaggaaaatgtgggaaagtttg

SEQ ID NO: 14774 - DNA, 201 bp, Homo sapiens
gatccgcctgtcttggcctcccaaagtgctaggattacaggcgtgagccaccgtgcctggcctgatgattcagtttttaccccaagatgcagtatgcctcmgtctcactaaaatatgccaatatgttcttcttcttgaggatcagggctgatttcttctactgggaaaatgtatcccctgtgtttggccccagaggcatca

SEQ ID NO: 14775 - DNA, 201 bp, Homo sapiens
catgttaattagatatgcatgtatgtgtatgtatgatgtatatacccatatacacacagtctatatatacatgtatgcgcacatacacatattttaaggaragaattataaaatgatcaattcaagcttactatatgctagaggtgaggaatatttgaatacaagtcttatctagtagattaaaacagaaattaaagactg

SEQ ID NO: 14776 - DNA, 201 bp, Homo sapiens
ttaggagaggaatcactgtgaatgtagacctcgggttggtcattttcctagtaagatagaccagactgactggaaaagtcaccctcttgggctatcctgcrtatgtggctcggcattgcttccgtcaggataatgcatcagtttcttggacaaagggtgcatttctgctatttgaatgcagacatatttttggatataagc

SEQ ID NO: 14777 - DNA, 201 bp, Homo sapiens
cggtctcaggttatgtctttatcagcagtgtgaaaatggactaatacagtgaattggtaccagtagagtggggcattgctgaaaacatatctgaaaatgtsgaagtgactttggaactgggtaacaggaagaagttagaaccgttgggaggtctcagaagaagacaggaaaatgtgggaaagtttggagcttcctagagac

SEQ ID NO: 14778 - DNA, 201 bp, Homo sapiens
cggtggggaggagttcatattcattttttttttgagtctggattttagaataaattcactgtgtacatagctattccatctttaaaaacctttgtgaatgytaatatacagcctttataaatttgaggtataatgttcaaaatgctctaatccctaaattttccagtctaggttattatacttttatgactattaattttg

SEQ ID NO: 14779 - DNA, 201 bp, Homo sapiens
ctggcagagggcttttttctgatcaccacccatgttaattagatatgcatgtatgtgtatgtatgatgtatatacccatatacacacagtctatatatacwtgtatgcgcacatacacatattttaaggaaagaattataaaatgatcaattcaagcttactatatgctagaggtgaggaatatttgaatacaagtcttat

SEQ ID NO: 14780 - DNA, 201 bp, Homo sapiens
ggtggctcatgcctataatcctagcacgttgggaggctgaggtgggtggagcacctgaggtgaggagttcgagaccagcctggtcaacatggtgaaacccyatctgtactgtaaatacaaaaaattagctgggcatggtggcaggcacttgtaatcccagctacttgggaggctgaggcaggagaatcacttgaacccgga

SEQ ID NO: 14781 - DNA, 201 bp, Homo sapiens
tttttttctaactgagggattaaggatataaacccaacttcaaatttctttctgggtggtcttgaaaacttaacagtaggtcctgtaaagaggtgggggaraggaaaaagaaatcctttactctcatctgctggttttaaaatgagaaaaatacacacacacacgtaatgatgttcgtgatgttaatggagggaaatatca

SEQ ID NO: 14782 - DNA, 201 bp, Homo sapiens
tcccctttctggcagagggcttttttctgatcaccacccatgttaattagatatgcatgtatgtgtatgtatgatgtatatacccatatacacacagtctrtatatacatgtatgcgcacatacacatattttaaggaaagaattataaaatgatcaattcaagcttactatatgctagaggtgaggaatatttgaataca

SEQ ID NO: 14783 - DNA, 201 bp, Homo sapiens
tactggccaggtagaaagggcgtccaggtgaagggaccctggttcagtgatctccaacctgcacgtctcatttgtgaggaagccgtagggtgtggactttycttgtttctgaccttgagtgattagaaaatagcagcttttatatgtcacaaatggactttagataagcatgaagatgacgaagactgtggaatatgtagc

SEQ ID NO: 14784 - DNA, 201 bp, Homo sapiens
tctggcaaaaatggttttattgtagtttcatccttgttgagtcaataattaactgagtttgattaaagctgaattttcctaagtatgaaaaccatgtgggyccttctctttcctcgtgatgcacggtgatagtgcgtatctaacacttgaaggtgtccacgctggccctagctcagtgagatggctttgctttgggggggt

SEQ ID NO: 14785 - DNA, 201 bp, Homo sapiens
gagcaaaactccatcttaaaaaaaaaaaaaaatgcccgccttattcagatacacagtctaatgctttccactagaagattctggcactgttagcatctctrgcataaactatgttactcaacccagttctgtcgtcgtcatttttttgtgttggctttgcccttcccgcattgtgacttgatcccatttaagcagcaacct

SEQ ID NO: 14786 - DNA, 201 bp, Homo sapiens
tgggagatagtttgagatttgaggcctctgaagaataggtgtttttgtgatgattttggcttttcagtttgacagttggctttgcttttttgacagacacmttaagagcttcaagggtcatttcatggtttgtcctttccatgtcagggacacctttcacgtggccattttaagcacaggaattgccttcaagtagtttac

SEQ ID NO: 14787 - DNA, 201 bp, Homo sapiens
tagataactcaagagactcaatcaacttcgtgtttaatgttttcgtaagaatacttcagaggcagtggtgtaatcgtccaagagtacacacaggcctgatygccaaagccagttttcttcaggcccagcacgtcctgacctcctcactcctctgcccactctctgtttactcactcccattttcattcattgattctgtta

SEQ ID NO: 14788 - DNA, 201 bp, Homo sapiens
gtcgttgtgagcagtgccttggtcccgatgatgattctccaaaatgtaatctctgctgacagaacaagagtctgcaaattgggagtctggaaagggaagakaagggctttgtccctggccccaaagactcagggagaggtttactggccaggtagaaagggcgtccaggtgaagggaccctggttcagtgatctccaacct

SEQ ID NO: 14789 - DNA, 201 bp, Homo sapiens
cccctggctgtccaccagcccctttgtgatagtctcatagtcttatttgtcttttggcttgtatcccacctgttcactttttaccatagctaacctttctmagtggtcaggtgggactcatggagattttccgttctttggagactagcagcgactgcagattactcatcagctgtctccttgagtccacaatgccgggcg

SEQ ID NO: 14790 - DNA, 201 bp, Homo sapiens
tctctagcataaactatgttactcaacccagttctgtcgtcgtcatttttttgtgttggctttgcccttcccgcattgtgacttgatcccatttaagcagyaacctctgcacacacaatcttttctctgtccttcactcagtgatgttataatatctagaggcttattgattatttgtttgattctattgtgggcacagga

SEQ ID NO: 14791 - DNA, 201 bp, Homo sapiens
tagtaaccatgaacctgtatatcaaaaagcgtgactagagtttcatagttaaacatgtgctgaaatccacagtggacaccagagagggtcatggaatctgrgaatggatgacttgtcccatgatgataatatctgtgttcctacggctgggcccggtggctcacacctgtaatcccagcactttgggaggccgagatggga

SEQ ID NO: 14792 - DNA, 201 bp, Homo sapiens
tggccccccagaaattatctccagcagcagcaacagagaggactggaatgccattgacaggtcccacaagtcagcaatcagcacgccattttttaaaattwatgttgctattgtatcgtaaggttcttctgaagcgaccacttcataacactgtgtagtccaatccctaagctgggcaatttttttttcccctttcaatac

SEQ ID NO: 14793 - DNA, 201 bp, Homo sapiens
ccaagagtacacacaggcctgatcgccaaagccagttttcttcaggcccagcacgtcctgacctcctcactcctctgcccactctctgtttactcactccsattttcattcattgattctgttattctccactaagttttctgggtggtcagcccaggaagcctcagcctgcttccagatagttctcctcagagttagcgg

SEQ ID NO: 14794 - DNA, 201 bp, Homo sapiens
gcccggtggctcacacctgtaatcccagcactttgggaggccgagatgggaggatcacgaggtcaggagttgaagaccaccttgatcaatatggtgaaacsctatctctactaaaaatacaaaagttagccggtgtggtggtgcatgcctgtaatcccagctactcaggaggctgaggcaggagaatcacttgaacccagg

SEQ ID NO: 14795 - DNA, 201 bp, Homo sapiens
ttaacatgctgttagtgcatgcaaaaaaaagcccagtaattgtagggctcatcagtacattgttaattgatcctcatttcctattattttacctcaaagcmaacacatcattcaccatagtgacaccagagttgtttatcttctctgtgcaagtgtgtgctctttttagcaagctttttggatcctctgtttcagagggcc

SEQ ID NO: 14796 - DNA, 201 bp, Homo sapiens
ttaccagacacatctcactttatggagcctggggctattggtaatatgcatttctttctcatcttgatcgtaaaatgatcttagaaaggtttctgagaatwtatagagtttaagacagcaataagacaactaattaattaaacaggaaaaggggatgttgtgctcagagaggaagtgtgggtctcataagggctttcacaa

SEQ ID NO: 14797 - DNA, 201 bp, Homo sapiens
tctacctataagtaccttccaactgttccacttttgtaaatttagttcaaataatacatatgctgaaattcctatatcccccccatactccagatcttcaktgtggaatttaaatataattccttattgtaaaaaaaaaaaatttttttttgatcaaggtgattttgataaactaaatgcatctttaattttactcacagc

SEQ ID NO: 14798 - DNA, 201 bp, Homo sapiens
caagccccagctgccaaggaggctgatatcgggagaggcagaatgtgtcttttctttcttcttcctcttcttcttcttctttttgaaaccatgctcattgkttttaggaatcattagcatggtgaagattaaagctattggagatagcacagattgtttcattttattatgttcaattggattggatccgagccatttgca

SEQ ID NO: 14799 - DNA, 201 bp, Homo sapiens
ccagcactttgggaggccgagatgggaggatcacgaggtcaggagttgaagaccaccttgatcaatatggtgaaaccctatctctactaaaaatacaaaarttagccggtgtggtggtgcatgcctgtaatcccagctactcaggaggctgaggcaggagaatcacttgaacccaggaggcggaggttgcagtgagccgag

SEQ ID NO: 14800 - DNA, 201 bp, Homo sapiens
ggacccggttggctctgcaaaccgcatttccttggctgaacgccagaggagagaaatgatccggcaagaagacacaccattccccgtcagccccttcccgwcccttgcacccctggatcttctgctgagtatcggattggtctgcgtccaagagctcctcgcttggccagcaggggctgcctggagaaggggaggacaggc

SEQ ID NO: 14801 - DNA, 201 bp, Homo sapiens
cttttttccactttcaaatgtataacaaaatagaactttatatttccagatggactgcctggaacccggggagtggctcagctaccaggccccagtggccsttgtcttgttatttcctccattagagacctggcgtataattgtgggagggagaagccagtggagcagtcaggggactccctggctgtttctgtgtctggt

SEQ ID NO: 14802 - DNA, 201 bp, Homo sapiens
ttttttgaaagagactgtttaaaacacgtaattttgctaagttatggctcatatcgtatttgttattttggttttgaaaaattgagtaggaagcaattgcrttcttaaatgacttgaacatcaaaggcaagtagtgtcttgttttaggagcagccaggctcctatccctctgatccagccaagtgctttcacttggtccca

SEQ ID NO: 14803 - DNA, 201 bp, Homo sapiens
gaaagtgtcatgtcaaagataaagggagaacagcattttctttttttacaagtcactcttacttaaacacacagcatgactctccttacacatttatttcrgaagagcaaagtccgggtccccaggctcaactatcagccgccttctcatcccaagggctgtcaccaccagaaatttaacatgctgttagtgcatgcaaaa

SEQ ID NO: 14804 - DNA, 201 bp, Homo sapiens
gttcaaaagtatcctctctaggcaaataacgagatttcgccagcaggatctcccgttaaaggcgtgcatgtgtggctttgtagacacgtatgtgtgtgtgmgtgcacacctgcctgcccttgcacagtgggcactgtttccagtgtgcagtgaggccctcccttcgtgtagaacaggacaggacaatgacaaagttattca

SEQ ID NO: 14805 - DNA, 201 bp, Homo sapiens
actttatatttccagatggactgcctggaacccggggagtggctcagctaccaggccccagtggcccttgtcttgttatttcctccattagagacctggcrtataattgtgggagggagaagccagtggagcagtcaggggactccctggctgtttctgtgtctggtcttatgggtctgggcactgaattcagtcacaaac

SEQ ID NO: 14806 - DNA, 201 bp, Homo sapiens
tcagaaattgggaaggagggtcaggtagctataagcaaaatacaagagaaatataagagaaagaaagacttgtatctgttgttagtgagtttttgtggtgrtgatacattaatggaggcaacagagggtcagaaatcagggaaatcagggtggaaaatagcccagcagaggggaaaagaggaagtctgaacgagggccaca

SEQ ID NO: 14807 - DNA, 201 bp, Homo sapiens
ccctggttgacctggaatgacctagaccagcagtcacaagctcctgcccatggacaaaatacagccggtacctctttggctatggcctgcaggctcagaayagttcttacattttcaatcatctgcaaaaaagaataaagaggagaatattatttcttgaaggaggaaaatgatatggaattctgatttcagtgtcataaa

SEQ ID NO: 14808 - DNA, 201 bp, Homo sapiens
aaggaccctatgttatatgatttcatttacatgaaataccccaaagaggcaaatctgcagaaacagaaagtagagtggttgccaggggctggggatggggygtggatggaggcatttgggattaacagctaaagatagcaggattccttctaaagcaataaaaatgttgtaaagttgattgtggaaattctttcacaactc

SEQ ID NO: 14809 - DNA, 201 bp, Homo sapiens
aggcaacagagggtcagaaatcagggaaatcagggtggaaaatagcccagcagaggggaaaagaggaagtctgaacgagggccacattgcagatagaggcyggtgtactggtctgctcaggctgccataacaaaataccacaggctggatgacttgaacaacaaaaatacattttctcatagttgtggagcctagaattcc

SEQ ID NO: 14810 - DNA, 201 bp, Homo sapiens
agctggcatggtggcacatgcctgtagtcccagcttctggggatgctgcagcgagccatgattgtgccactgctctctggcctgggcaacaaagagagatyctgtctccaagtctgtctgtctgtctgtctgtctgtctgtctctctcggaaatattccttcagtgtattagtaaagaagttacttatgagtcacttatgc

SEQ ID NO: 14811 - DNA, 201 bp, Homo sapiens
ggcgcgatctccactcaccgcaagctccgcctcctgagttcaactgattctcctgcctccgcttcccaagtacctgggattatagacacccaccaccatgyacagctaatttttgtatttttagtagagatggagtttcacccttttgattggttggccagtatggtctcaaactcctgacctcaagtgatccacctgcct

SEQ ID NO: 14812 - DNA, 201 bp, Homo sapiens
tccccgattacaatatagagaggctaaattatagtccatatcacttttcctttaaatccctttacttttttgtgctacaagagtttcagaataataattcygcagaaaaaagtactgattgtccagcagttgtgtcaggtagaaaactgggatgcccgactgcattggtttagccagaactgtggccatgaaaccttgcct

SEQ ID NO: 14813 - DNA, 201 bp, Homo sapiens
aaatattttgagaactctgaaataatgcacaccagaaacgtccagctgaaaacaaaaagggaacaagatgacattttgcaatcccatgcacgttgcaggcrcgttgaatgtgaaggtcagtagtacttcagagggcaggcctgttgcccccaagcctgttgcctaagaaatgcccaggccctttgaacaaaatggattcga

SEQ ID NO: 14814 - DNA, 201 bp, Homo sapiens
cagtacttctgctacgagtgtatacaggctgaggatgggtgctttgtggcccttttcttttaccggctgactagaatgttgacgttaaagcagttagagtycgagcaggcaactccgaccccaagttggagctgtgtgttgaagatagaagagcaaatatgtagaaggaacctggatttctatttttttaaaaaatataat

SEQ ID NO: 14815 - DNA, 201 bp, Homo sapiens
tagttctgtccctggaggtgagggccagacaacacatcaaaactgactttttattttttttcaaagttgttaagactatctaagattcagatctccctaawactgttcctagttagtatttagaacgtatttgtttagaggatactagcctgaaatagccctatctccaggttgtctgatgcgatgaggatgtggtgttaa

SEQ ID NO: 14816 - DNA, 201 bp, Homo sapiens
ccggctgactagaatgttgacgttaaagcagttagagtccgagcaggcaactccgaccccaagttggagctgtgtgttgaagatagaagagcaaatatgtrgaaggaacctggatttctatttttttaaaaaatataataaatcatccagccccaaatgtcaggaacctgggtttctaatgatggttggctgtcaccccca

SEQ ID NO: 14817 - DNA, 201 bp, Homo sapiens
aatctctagcttctcaaactgtttcgtggtggagtgccttttgggcacaggagaaggaaataagagcctcgcgaggtttgggaatgctgcctctagctctyacactgcatgcagaattcctactctgagagctcactttatctcaaaaacccatgcatattctgcatctactctgaattccgcagtgttgtgtgttactat

SEQ ID NO: 14818 - DNA, 201 bp, Homo sapiens
atacgaagatttttgagaaaaactttgcatattttaattgctgtctggaatcctccttcagctgggatgagaaatcatctctgggttagttctgtccctgraggtgagggccagacaacacatcaaaactgactttttattttttttcaaagttgttaagactatctaagattcagatctccctaatactgttcctagtta

SEQ ID NO: 14819 - DNA, 201 bp, Homo sapiens
gcagttagagtccgagcaggcaactccgaccccaagttggagctgtgtgttgaagatagaagagcaaatatgtagaaggaacctggatttctatttttttwaaaaatataataaatcatccagccccaaatgtcaggaacctgggtttctaatgatggttggctgtcacccccatttcccacactttaaatgagagaagta

SEQ ID NO: 14820 - DNA, 201 bp, Homo sapiens
tttgaaaacttaccttgtttatatgtttcttctgttgcaatttcttccattacctggaatagctgctttggacggcaaaccaagcaatgccctttcacagstgtgggatgaatggggaaagaagtcttggtaaggaagcaattcagagaacatggaagcatctcatggcagcagtcacaattttgtgttgcgtaatatttc

SEQ ID NO: 14821 - DNA, 201 bp, Homo sapiens
tatttaaagctgtcatggaaagccttaaagttaaaatacgaagatttttgagaaaaactttgcatattttaattgctgtctggaatcctccttcagctggratgagaaatcatctctgggttagttctgtccctggaggtgagggccagacaacacatcaaaactgactttttattttttttcaaagttgttaagactatc

SEQ ID NO: 14822 - DNA, 201 bp, Homo sapiens
tccctttataagctaggaatactaagaacctaagagtctccatgaggattagatgaggtaatgtttgtaaagaatctgagatatagtaagttgatcagcawatgttatttatcctcttcttccctctacaaagataactaagctgagatagcctaactcccccagctcagaaaatagcaagttatttgcaaaatcaaatgc

SEQ ID NO: 14823 - DNA, 201 bp, Homo sapiens
ttctgaactcagaaaatggagataaatctcttgcaaggcttttgattttagtttttagatacagaacctttaaaaaaaaagaaaaataaacgttttgccamagtgtagtatatacaacagatgtgagggaaggacattgttttaagtgggaaacgtcagctctctcaacttctacacattcgactattccctactcctcag

SEQ ID NO: 14824 - DNA, 201 bp, Homo sapiens
tgctttcattgttgcttacatgtgttaaataattttgtctctgtataataacaacctctggcgatttttcctttctctctctctcttttttttttcttttstttagacggagtcttgctctgtcacccaggctggagtttagtggcatgatcttggctcactgcaccctccgccttctgggatcaagtgattctcctgcct

SEQ ID NO: 14825 - DNA, 201 bp, Homo sapiens
tgatttttcaagtaaggtaatggaagcaagagaggtttacatacatggtgtacatatacctcggcagcctgtttccttcccttataactatctcaaaaaamcatattaagttatttttcagaattatgttttttcctgttgcttttgactgtaaagggcagacttaaatttagttaacatctgctctaacgttggatcatg

SEQ ID NO: 14826 - DNA, 201 bp, Homo sapiens
acgaaggaggaggaggaggaaaaggtgacttgcctctagctgatgtggattatttctcttttttaatttccatgtctgcgtagcttcatcatagatctcarcttaaggacaatgaaagtcgtttattgagtacttagtatgtgctggttgcagagccaagtcttttttttttttttttttttcctccttttttgagagaga

SEQ ID NO: 14827 - DNA, 201 bp, Homo sapiens
atctcaaaaaaacatattaagttatttttcagaattatgttttttcctgttgcttttgactgtaaagggcagacttaaatttagttaacatctgctctaaygttggatcatgtgtggagtccccagttttcaacattaaaaataaagtatttgttgaagtggggtttttttcttcttacagtatatgtagaaccattttct

SEQ ID NO: 14828 - DNA, 201 bp, Homo sapiens
tgccatccacggacggcttaagtgttaacagttcagtggagggtcagcgtgacagccttttgcacccacatctgggttcttgtccagtgtccaggaggaaygaggtctcatgagcaaattttaaggatggcaaatgtgggggattttattgctgatgaaagtggctttcactgggaagataagctaaaaagaagacaaagc

SEQ ID NO: 14829 - DNA, 201 bp, Homo sapiens
cttttccttcatgagaattttctgaagctattgtgaatctatggaagactcaaggtagtatctttttcacagcattcaaaaaaatgctgctggctccttgrcttgtccggtgcatcctccgtgccagcccccgctgtcctagaaccatctaagctaactctccgatgagctctggcctctggacctcagcctatccaggcc

SEQ ID NO: 14830 - DNA, 201 bp, Homo sapiens
tttctttcttttttttttttagggagggtctggctgtattgcccaggccggagtacagtggcacgatcttggcttactatagccttgacctctctggctcmagtgatcctcccacctcagcctcctgagtcactgggactacaggtgcacactaccatgcccagctaagtttgttcattttttgtagatacagggtctgac

SEQ ID NO: 14831 - DNA, 201 bp, Homo sapiens
tcagccttttctctcgatctttttttttttttttttcctttcttaagaaagggtcttgctcttttgcccaggctgcagtgcagtggtacaatcagagatcmctgcagcctccaactcctaggctcaagcgatcctccagcctctgcctgccaagtatctgggactacaagcatgcactcctgtgcttggttaattttgact

SEQ ID NO: 14832 - DNA, 201 bp, Homo sapiens
aaaattttcccctttctggcagagggcttttttctgatcaccacccatgttaattagatatgcatgtatgtgtatgtatgatgtatatacccatatacacwcagtctatatatacatgtatgcgcacatacacatattttaaggaaagaattataaaatgatcaattcaagcttactatatgctagaggtgaggaatattt

SEQ ID NO: 14833 - DNA, 201 bp, Homo sapiens
acccaaagagatctgaaaagcaaaaacaaatttattgtatatttatagcaaatttatttggtggtgaaatttgacttcagctttagcgtccctgtttctcstttctagtgtgaatgttcattttgttttgtttgtttttttgaggcaaggtctcacttcatcacccaggctggagtgcagtagtgtgttcacagctcagag

SEQ ID NO: 14834 - DNA, 201 bp, Homo sapiens
aaagtaaacagatcttagagagggacaccgatccctaccctgcatggggttattcacagagccatggggacactaaacgtaccttatctcttgaccatgcyattgattagttatgtgtttgcctgtgttattaataatgtatacattgaaaaatctatgtgcattatagtctttgatcttgtcatgaatttcaaagccaaa

SEQ ID NO: 14835 - DNA, 201 bp, Homo sapiens
gtaatatgcagtatatgtgctaaattactttttttgttgttgttgagatggagtttcgctcttgttgcccaggctggagtgcagtggtgtgatcttggctygccgtgatctctacctcccaggttcaagcgattctcctgccgcagcctcccgagtagctgggattacagacatgtgccaccacacccggctaattttgta

SEQ ID NO: 14836 - DNA, 201 bp, Homo sapiens
agattttggaggacttgaaaggttcctgctacctttggctggggatggagggaacatggaagatgggtctttgtttagaggaagctctttatcctggtacsctggaagttggcatagtcttagcagttagtccagatgtgaatttcaggattattctgtgagtcttccaagtcctgtctcagcagtgaaataggctcagtg

SEQ ID NO: 14837 - DNA, 201 bp, Homo sapiens
tatataagacagtgccctttagaagatccctgtctcattgagaagcgttgagtaaatgggtctctctggtcattctctccagaacatgaagccaaagggcygagagggagagactccaagaatgaattagtgtccagcaaggtatcgcttgtctcaggatgacaacttgcaatttggggatctctcaacgtcctgacctcc

SEQ ID NO: 14838 - DNA, 201 bp, Homo sapiens
atgaaaagaagttgtatcaaacttgctgggcatcagaaataaagggttttagagacactggcttcaaacacaagttattccatccaagattctaaacttarcaatgcaacttgcacttaattttaaaacgctggaaaaataatgataaagattgtgtgatcaagtatagcagccctgtggtgtttcctcagaatggtgtat

SEQ ID NO: 14839 - DNA, 201 bp, Homo sapiens
tctctgccttcctttctctccctccttggtctgcttcctcctgttgctatcagagcctgcctgcctcatccttgttccagccttgatggtgatgatgattrtggttgctgttgctatttgtttttttggtttgtttgtttgttttgagagggagttttactcttgtcacccaggctggagtgcagtggcgccatctcggct

SEQ ID NO: 14840 - DNA, 201 bp, Homo sapiens
cttgggaagtggactcagaggccaagtgactttgatttttcactttatcctggagtttctcaaccttggcactattgacattttaggccaggagattcttkgttgggggggatttcctgtgagttacaagacattaagcaacatcactggcctctacccactagatgccagtagcatcttctatttcctcaagtctcaaaa

SEQ ID NO: 14841 - DNA, 201 bp, Homo sapiens
ccgatatttaatattatcaattgctggttcctgtaaatttgcatttatggatcacattataaaagcaattactcttatggattgttcatgcagaaatgcaytatgatgataatatacttttaaaagtatatttatttccagaattcaatttgtaagaggtttgagggaaaaataatactgagttttgagtgtttctgattt

SEQ ID NO: 14842 - DNA, 201 bp, Homo sapiens
ccatgcctggctaattctttgtagttttagtagagatggggtttcagcatgttgtccaggctggtcttgaactcctcagctcaaatgatctgcccacctcrgcttcccaaagtgttgggattacaggcgtgaaccaccacgcccctcacgcgcagccactgttgctattgatgattattatgacatcattgctcagattca

SEQ ID NO: 14843 - DNA, 201 bp, Homo sapiens
tacttttgttctcaccttgggaagtggactcagaggccaagtgactttgatttttcactttatcctggagtttctcaaccttggcactattgacattttargccaggagattctttgttgggggggatttcctgtgagttacaagacattaagcaacatcactggcctctacccactagatgccagtagcatcttctattt

SEQ ID NO: 14844 - DNA, 201 bp, Homo sapiens
tattatcaattgctggttcctgtaaatttgcatttatggatcacattataaaagcaattactcttatggattgttcatgcagaaatgcattatgatgatamtatacttttaaaagtatatttatttccagaattcaatttgtaagaggtttgagggaaaaataatactgagttttgagtgtttctgattttaaaaatgtgt

SEQ ID NO: 14845 - DNA, 201 bp, Homo sapiens
ttaacacaacttctccgtgtgtgggctaaataaatattcgggcaacactgattgagcactgccttgggtaaataattctctctccacacatttcctagttyataatgaggagttttcttcgtggtctgaccaaatgtaacattccattgaaaatgagacataaatccttgagtgagggagacgtggaaccagggtttgagg

SEQ ID NO: 14846 - DNA, 201 bp, Homo sapiens
cttttcaagtatcttactgtatgatggttgcttttgggttgaattccaccttgggttcaattcaacatgaaagttaaccttttggtgaaggaatgatccasgggaaatagtaaaatattagcctgtcctccaatacaaattgcctgtgagtcccactgatacttacaaatatacagaggtggtgtaaaaggattctgtgtc

SEQ ID NO: 14847 - DNA, 201 bp, Homo sapiens
gcccctctgaaagcccttcactgcggctcagcctgtggtggaaggtgtccaaggtggctggaacacctcctgctgggggtgtcagtcttggctctcctgtkttctgcctgtgcaatggtgggtaggtcccttgatacctcgtaacctcagcatccctgtgggtgataaggagatgataatagtctcttcccgatgggggtt

SEQ ID NO: 14848 - DNA, 201 bp, Homo sapiens
ggctggagtagtgtgcagagcctggcggtgattgttctcattagaaagtatagtgtaatactcaataaattacttttgttctcaccttgggaagtggactmagaggccaagtgactttgatttttcactttatcctggagtttctcaaccttggcactattgacattttaggccaggagattctttgttgggggggatttc

SEQ ID NO: 14849 - DNA, 201 bp, Homo sapiens
ggtggtgtaaaaggattctgtgtcaaaactattaatatttgagaaatacaatacttatcagagcctttgtatgtaaatgtctcatatacccctctaagaasgggagcgaatagtattttccaaacttacgtcaccacttaccatccacctgcatactttacacgtcttggaatcaaccttacagggaacacttggtcgaaa

SEQ ID NO: 14850 - DNA, 201 bp, Homo sapiens
cctttgtatgtaaatgtctcatatacccctctaagaacgggagcgaatagtattttccaaacttacgtcaccacttaccatccacctgcatactttacacrtcttggaatcaaccttacagggaacacttggtcgaaaaacagtgttttctaaatttatattacagttcccactccccccgcccccacttgtatcactttg

SEQ ID NO: 14851 - DNA, 201 bp, Homo sapiens
tccacctgcatactttacacgtcttggaatcaaccttacagggaacacttggtcgaaaaacagtgttttctaaatttatattacagttcccactccccccscccccacttgtatcactttgtatgacagtcttcttgggaacatccattgggaaactcttcccttgcaggtgtctgttacaagtcctggttcacacagtgt

SEQ ID NO: 14852 - DNA, 201 bp, Homo sapiens
gatcacctgaagtcaggacatcaagaccagcctggccagtgtggcaaaaccccacctctactaaaaatacaaaaaaaaattagctgaacctggtggttcaygcctgtaattgcagctactcaggaggctgaggcaggagaatcacttgaacccgggaggcggaggttacagtgaaccgagatcgtgtcactgcactccagc

SEQ ID NO: 14853 - DNA, 201 bp, Homo sapiens
cgcctgtaattgcagctactcaggaggctgaggcaggagaatcacttgaacccgggaggcggaggttacagtgaaccgagatcgtgtcactgcactccagmctaggcgacagagcgagaccctgtctcagaaacagaaaataaaacaaacaaaaaaatactattccatagctgactattttctgaaatgattttgttactt

SEQ ID NO: 14854 - DNA, 201 bp, Homo sapiens
tatatatttaaagctgtcatggaaagccttaaagttaaaatacgaagatttttgagaaaaactttgcatattttaattgctgtctggaatcctccttcagmtgggatgagaaatcatctctgggttagttctgtccctggaggtgagggccagacaacacatcaaaactgactttttattttttttcaaagttgttaagac

SEQ ID NO: 14855 - DNA, 201 bp, Homo sapiens
gcaaggtagaaagacacctgaaggtgaacatctttggcccatgtgaaattttgttacgtgttgttaggtttcatttgtctctcagtcaatcagtcaatcartcagtctctctccttccatccccccttgtcccccttttctcttctctccccttccctgctccctctactttaaggttttctcacagattaagagagtagc

SEQ ID NO: 14856 - DNA, 201 bp, Homo sapiens
gacccagtcacagtgattctatctgtacctaccacagctaggtaggcggtatgggaagaccacaaacttgagagtcagacggatcgaacttcgtctttagycccccacttaggtgttatgtgactgtggtcgggttattggtaacatcttcttgctcagcttcctgacctgcagaatgggaataagaatacctagcacata

SEQ ID NO: 14857 - DNA, 201 bp, Homo sapiens
caggttttgtttttttgtgtgtgtgttattttgttttttgtttttttgtttttcgggggctggagtagtgtgcagagcctggcggtgattgttctcattaraaagtatagtgtaatactcaataaattacttttgttctcaccttgggaagtggactcagaggccaagtgactttgatttttcactttatcctggagtttc

SEQ ID NO: 14858 - DNA, 201 bp, Homo sapiens
gtgttatgtgactgtggtcgggttattggtaacatcttcttgctcagcttcctgacctgcagaatgggaataagaatacctagcacatagggttataatgragatgaaactgcttaacgcatgtgaataacaacaatggctaacatgtatcagacgcttgtcttagtgtttattgttttatgcgtattgtcctgtttcatc

SEQ ID NO: 14859 - DNA, 201 bp, Homo sapiens
aaaagaaaagtagagaggatagtataatgaggttcctgtctgccagtcactctatagtaactattaggaaacccctttttttctctgaagtcattgctccggtgtgtgtgtgtctgtatataaaaaaaagtatgtatacatatacgtatatgtatgtgtatagataaaaatgcatgtatggtgctgggcgcagtggctcac

SEQ ID NO: 14860 - DNA, 201 bp, Homo sapiens
agaaacttggacagaggaaaatgaaaatgttctattaattccactagcatgagataatcactcttaatattttgttgcatgttcttttctttcttctgagkgatagcatttttttcaacaaattgggctcgtaatatataggcacatagatatataattaaaaaaacaagaatttctcatgtcattaaacattgcttgaaa

SEQ ID NO: 14861 - DNA, 201 bp, Homo sapiens
taagccctgaagtctggacactgagagaattctaggcttgacttctctgtacagccatcttgggagtgctcaaccctttgaatcggatgtctagaatggaytcagatgtcactgtgcaggtgactcacgcctagaatcctctgcctatcgtgacagggagaagcctgtgtgaccctgtggccatctcagtctctgcagggc

SEQ ID NO: 14862 - DNA, 201 bp, Homo sapiens
aagatcctcaagctgttccttccaccccctgggatgctgattaagttaagatttcagattttatttattctacgggtatttgttgaatatttatttcttamgataccacgcactgctttaggcactgggaatatagcaggatatacaaaacagaaaaatcatggccctcatggattattggttgtgagtaataggaacctt

SEQ ID NO: 14863 - DNA, 201 bp, Homo sapiens
gtataatgaggttcctgtctgccagtcactctatagtaactattaggaaacccctttttttctctgaagtcattgctcctgtgtgtgtgtgtctgtatataaaaaaaagtatgtatacatatacgtatatgtatgtgtatagataaaaatgcatgtatggtgctgggcgcagtggctcacgcctgtaatcccagcactttg

SEQ ID NO: 14864 - DNA, 201 bp, Homo sapiens
tctatgtaacctcagccatcttggattcccagcttactcacatcatagatggagagtcagttgtttagaaaaaaactttcttttttttttctttccttttkcttttcttttctttctttctttcttttttttttttagggagggtctggctgtattgcccaggccggagtacagtggcacgatcttggcttactatagcct

SEQ ID NO: 14865 - DNA, 201 bp, Homo sapiens
tcctcaagctgttccttccaccccctgggatgctgattaagttaagatttcagattttatttattctacgggtatttgttgaatatttatttcttacgatrccacgcactgctttaggcactgggaatatagcaggatatacaaaacagaaaaatcatggccctcatggattattggttgtgagtaataggaacctttcaa

SEQ ID NO: 14866 - DNA, 201 bp, Homo sapiens
agcaacacacaaggattgggagatgttcatggcaagaaaaattcagaagggacattgttgtttcactaattctgtaaaggagagcagcggcatttacttakgccgattccccattctctctttctgtttttaaacagagacagatcttgctctgttgcccaggctggagtgcagtggcatgatggcatgatcatagttcac

SEQ ID NO: 14867 - DNA, 201 bp, Homo sapiens
cactgggaatatagcaggatatacaaaacagaaaaatcatggccctcatggattattggttgtgagtaataggaacctttcaatctaacttaggaaaaaasgttagggagccaaggaggaagagtgggtgtgatgatgcatcaggataccagagaatcccgtggaatcccacagtgacacagccaagccttgggaggggtg

SEQ ID NO: 14868 - DNA, 201 bp, Homo sapiens
cccacagtgacacagccaagccttgggaggggtgacactagcgatagagacagaaacccacacaggagtccttttctctgtctctcatctctgcttttctytgtacatctggttcaattattctcttgccacgaatcagctatttgtattcctctgtgcacgtcgcagaagatcaggaatttgcacattatagtcacaacc

SEQ ID NO: 14869 - DNA, 201 bp, Homo sapiens
caaggcgagtggatcacgaggtcagcagttgaagaccagcctggccagcatggtgaaaccccgtctctactaaaaatagaaaaaattagccgggcatagtrgcatgagcctgtaatcccagcgactcgggaggctgaagcaggagaatttctggaacctgggaggtggaggttgaagtgagctgagatggcaccattgcac

SEQ ID NO: 14870 - DNA, 201 bp, Homo sapiens
gaggtggtagatgcttttaaacaaacagatctcaggagaactctttcacaagacagcactagggggatggtgattagaaagcacctcatgatcccgtctasttcctgcagagaacagactagccccctatgcagcacacacctttgtgaggtccctcctccaacacagggattacaattcaacctgagacgtgggtgggga

SEQ ID NO: 14871 - DNA, 201 bp, Homo sapiens
tgcacattatagtcacaaccatacctagaaccaaattgcctaacactgaatcccaaatccaaattcctgggagatagaattcaattcttctcttgccacamatcagctgtttatactcctctttgcacgttgcagaagatcaggaatttgcacattatagccacaaccatacccagaaccagattgtctaacactgaatct

SEQ ID NO: 14872 - DNA, 201 bp, Homo sapiens
aaggtttggcttaactgcaaaggggtggttgatatcagattcatacgccagaaccagaagaccactcgtgagaaattctgtaagcacaggagtgtggtttrtgtcaaaatcaatctgatggagtgaagccattccttgccaagcgaaaatacagcatcatcaactacatccttgagcctagaacctcttcactcagcacca

SEQ ID NO: 14873 - DNA, 201 bp, Homo sapiens
atatgtcgccttgggaaacagaggcagaggagaacaggaaagagtcagatggactttgatttgagacccgtttctgcttcttcccagggtgtgacctcagyggagttccagagcatccatctcctttgtaagacacagataataccaactgcatggatttgttatgagagttacatcaggggagggtcatgaggtcacctt

SEQ ID NO: 14874 - DNA, 201 bp, Homo sapiens
ccgtttctgcttcttcccagggtgtgacctcagcggagttccagagcatccatctcctttgtaagacacagataataccaactgcatggatttgttatgasagttacatcaggggagggtcatgaggtcaccttcccatggccaggagaagcaggtactcaggaatggctacttctctggccactttatagacctatggag

SEQ ID NO: 14875 - DNA, 201 bp, Homo sapiens
tataatttttttcttcttttctatctgctagcaaagtgggtaagttgacccatgacatggtccactggagggaccacatttgtgactctagcaattaagcytcccttctcatctgtggataaaactgacctcccagtgtgctggagtcaaacatattcagcatccaatccacattggactgtttgcatgtaacgtacagaa

SEQ ID NO: 14876 - DNA, 201 bp, Homo sapiens
caaatgcagcatcgcttgaagctgtgataaaatatcacacctttggaaatcaaggctcttcttgtttatttatttaactcacattaattagccttaatttwaaaaaaatgagaagagccagcatcatgatgcaagcattgactttgctcacaaaaacatcttgtggtcaacagtggggcttagggggcaggttttgtggct

SEQ ID NO: 14877 - DNA, 201 bp, Homo sapiens
agttccattaggtgacagtgtgtgcacagtttatggaggatgaagcggaaaacctgagccacaaggcagtagaggttggacgagacactcattccgaaggsgggtgtgtatgtgcaaactgtataatttttttcttcttttctatctgctagcaaagtgggtaagttgacccatgacatggtccactggagggaccacatt

SEQ ID NO: 14878 - DNA, 201 bp, Homo sapiens
taagtgtgtaagcagggaacagaaagtactgtgatttaaaatatgttaatttttctactgtacagatgagagccagcttggagatgggctgtagctcaagyatcttacctacctctgatttcttaatgccacgttataaggctgctgcttatagctcttgaagtcactccaaaaacagatgagtgagaccctgttgctaaa

SEQ ID NO: 14879 - DNA, 201 bp, Homo sapiens
ggaggccaaggtgggtgggtcacctgaggtcaggacttcgagaccagcctggccaacatggtgaaaccgcatctctactaaaaataaaaaaaaaaaaaaaattagccaggcatggtggtgcatgtctgttatcccagctacttgggaggctaaggcaggagaatcacttgaacctgggaggcagcggttgcagtgagccga

SEQ ID NO: 14880 - DNA, 201 bp, Homo sapiens
agaaaggaagagtttcctgagtcacctttgggaggtaggaagggtttgacatgtaggctgggcatctgggaacgagtgagggattctgtgagccccatctyagtggaccactcaaggaaggtgggtaagccctgggtataagtgtgtaagcagggaacagaaagtactgtgatttaaaatatgttaatttttctactgtac

SEQ ID NO: 14881 - DNA, 201 bp, Homo sapiens
tgtgtcattccgttgtgcctgtcgtcttgaccttgtaaaaggtcttgggtaagcatgcaagaagttttgaagagggagatacagctaatttgcagataaaragcaagggaagaattcctggagaaaggaagagtttcctgagtcacctttgggaggtaggaagggtttgacatgtaggctgggcatctgggaacgagtgag

SEQ ID NO: 14882 - DNA, 201 bp, Homo sapiens
acttgtgtcattccgttgtgcctgtcgtcttgaccttgtaaaaggtcttgggtaagcatgcaagaagttttgaagagggagatacagctaatttgcagatraagagcaagggaagaattcctggagaaaggaagagtttcctgagtcacctttgggaggtaggaagggtttgacatgtaggctgggcatctgggaacgagt

SEQ ID NO: 14883 - DNA, 201 bp, Homo sapiens
cagcactttgggaggccaaggtgggtgggtcacctgaggtcaggacttcgagaccagcctggccaacatggtgaaaccgcatctctactaaaaataaaaawaaaaaaaaaattagccaggcatggtggtgcatgtctgttatcccagctacttgggaggctaaggcaggagaatcacttgaacctgggaggcagcggttgc

SEQ ID NO: 14884 - DNA, 201 bp, Homo sapiens
gctggagtgcagcagtgtgatcttggctcactgcaaactccacctcccaggttcaagggattctcctgcctcagtctcccaagtagctgagattacaggcscccaccaccaagcccagctaatttttttggttttttttgtattttagtagagacgggatttcaccatgttggccaggctggtctcaaactctggacctca

SEQ ID NO: 14885 - DNA, 201 bp, Homo sapiens
tactagtgagtggcagatatgtgtggaccacagagatggactgaaaagagaagtaacagtccttggtttgtattccagcccccaccttcctatgtctttgrgcttggtaattagatgcttggagcttcagtttccccatctgttggatcagaacggcagtatgtgctctccagtattttcataagagtcacatgaaatatg

SEQ ID NO: 14886 - DNA, 201 bp, Homo sapiens
agtattttcataagagtcacatgaaatatgtacctacagagtctatcactgtgctttttaagttggggcttaatatgtggtagttgttgctgtttttgttrttattattattaatgttattttttgtttgtttgttttttgagatggagtcttgctctgtcacccaggctgaagtgcagtggcgtgatctcaactcaccgc

SEQ ID NO: 14887 - DNA, 201 bp, Homo sapiens
taatataattaatgtaaaaacacatacttcttttcaacaaaaactggctctctttgtagtctcttttttaatttggtgcaatcacttaaaaagtttagcasatttaaaattttacatcattttaaaattgtttctcttttataagaaggatgctatttactattaatgtagaagtacaaaggaaacggttactttggattt

SEQ ID NO: 14888 - DNA, 201 bp, Homo sapiens
tgttattattattaatgttattttttgtttgtttgttttttgagatggagtcttgctctgtcacccaggctgaagtgcagtggcgtgatctcaactcacckcagcctccgcctcctgggatcaagtgattctcctgcctcagcctcccgagtagctgggactataggcacctggctaatttttgtattttatattagagat

SEQ ID NO: 14889 - DNA, 201 bp, Homo sapiens
acgtgagtgaccacgcctggcccataaatgttatctttatataacatactcacagctcccttaggagtacttttgtccatttctacacaatggaaacttayaattttagccttagcaacatgtatttactgggcatctagatttcatttatttaagaactttttattgaatgccgattgttcagcagccaccatgcaaggt

SEQ ID NO: 14890 - DNA, 201 bp, Homo sapiens
gaaaaaaacttgcttgtttactgtcttctgagctgatttctcacctactggcaagtggataggtctactttttgtttagctgtttttctaatttaatcttrtacatgagacagctatagatggatgtatagtctttgaagtggggccagttggctccgtctattagctgtgtggcttttgtgcaggtgacttgtggccccc

SEQ ID NO: 14891 - DNA, 201 bp, Homo sapiens
caacactaataagtaattgagcagatgagatgctcttgctagctttggtaaaaagtcggggcaaggttacaacagaggagctctgatgagacttgggatgrtaaagtcaagtcgaatatctggtagggttaaaaatctaacagtgggccaggcgcagtggctcacgcctgtaatcacggcactttgggaggccaaggcagg

SEQ ID NO: 14892 - DNA, 201 bp, Homo sapiens
tcctgggctcaagcaatccgcccacctcggcctcccaaagtgctgggattacaggcatgagccactgtacctggactccactatgccttcccctccccttycctcccttccccaccctaaagagtctcgctcttttccccaggctggagtgcagtggcactatctgggctcactgcaacctgtgcctcccggattcaagag

SEQ ID NO: 14893 - DNA, 201 bp, Homo sapiens
ctctcctcggccttgcaaagtgctgggattataggtaccccgcctggctgatactttccttagttgttttcagtgtaataacctgtcttcagtctactctwtgtccttttctctcctttcctccctgaatactcaagcttccagtgcacagatttctccaaccctgaatgtgactgataccaacaccatactagctcttcc

SEQ ID NO: 14894 - DNA, 201 bp, Homo sapiens
agcctggccagcatggtgaaaccccgtctctactaaaaatagaaaaaattagccgggcatagtggcatgagcctgtaatcccagcgactcgggaggctgargcaggagaatttctggaacctgggaggtggaggttgaagtgagctgagatggcaccattgcactccagcctggcagacagagtgagactccatctcaaaa

SEQ ID NO: 14895 - DNA, 201 bp, Homo sapiens
tgggattacaggcgtgagccactgtgcccagccaaacctcggcacttttatccaacaaatatttatttcgtgactattatgagtcaggcttaagaatacaytagtaggtacagcaggagagcatgtagaagaggatagatgtagaaaatcgggacggcatgttaggaatatagataggaattactaaggaaaattgtattt

SEQ ID NO: 14896 - DNA, 201 bp, Homo sapiens
atgtgtggccaatctcacaagatactaattctttttttcaaatgcagcatcgcttgaagctgtgataaaatatcacacctttggaaatcaaggctcttctkgtttatttatttaactcacattaattagccttaatttaaaaaaaatgagaagagccagcatcatgatgcaagcattgactttgctcacaaaaacatcttg

SEQ ID NO: 14897 - DNA, 201 bp, Homo sapiens
tttgctctgttacgtgaggacacatcacttgcacctcagtgtgagtttgaaagtgttttctctggagaataattctgaagaaataggccctccagatatcrgtagtgacaggggtatcagtaatgttgattactaagttcttgccacaggtagaagccatgctactgcacaagtttcatacttgaagagtggacatctgac

SEQ ID NO: 14898 - DNA, 201 bp, Homo sapiens
agatgtgcataataagttcaggaggggctcggttttgggaggccggggatactagaagataaccctaaaatgtggaaatctacatcagagagtggtgtgartggttcccaaaatgcctacctggcactcctaccaaagacacagcagagaacttggggcctcttgtttcagccattttcatcttcactgtaaatctagaca

SEQ ID NO: 14899 - DNA, 201 bp, Homo sapiens
gtgaaaccccgtctctactaaaaatagaaaaaattagccgggcatagtggcatgagcctgtaatcccagcgactcgggaggctgaagcaggagaatttctkgaacctgggaggtggaggttgaagtgagctgagatggcaccattgcactccagcctggcagacagagtgagactccatctcaaaaaacaaacaaaaaaaa

SEQ ID NO: 14900 - DNA, 201 bp, Homo sapiens
ttcctccccttttatcaagagccgtaagtccttggaaaatgcaaagagggggaaaaagaagaaaaacagcaacgagtttattggagagttaacacttaaakactccagtacattgagtgtgacatgcctgtgtaggagactgtctgtcccccaaataattgacaatttctctccatctaacaagaaaatatatggcacttt

SEQ ID NO: 14901 - DNA, 201 bp, Homo sapiens
ttttttttttaatacttttctttttgccggcatctgcgtagaatttttttttttttttttggtagtttcttaatggtctttagcaaaggaagtaagtgacrctgatcggtgaaggcagacagtaagatttataatgtatttgtgctagctgattgccaacagaaccggcctttcccagtggtgctgtacgcagactcggaa

SEQ ID NO: 14902 - DNA, 201 bp, Homo sapiens
caggctctaatgcacgataagacagttaggttcgaaggaaaacaaagacaattgcacggcacagagggaatatactgctacggtaaaccgatcactaacayccggccctgaatttgcttcaaagttttcactaaggcacaaagggagccgtgtggagctccggagttcccatctgaggtcttgtctaactccttggcaact

SEQ ID NO: 14903 - DNA, 201 bp, Homo sapiens
atacacaatatgttatatgagatcttcacccaatcaaggattaaatggccaattcctaaatgatgcctacctttttatggccatgtatacctttgcctcartactactggcatttgctgacatccatttatcaagatacagggatggatttctagaaggcccaggcaggggtgctggccaggagacaccaggcatagacct

SEQ ID NO: 14904 - DNA, 201 bp, Homo sapiens
tcgcagacacggaaaaaaggattattcctccccttttatcaagagccgtaagtccttggaaaatgcaaagagggggaaaaagaagaaaaacagcaacgagkttattggagagttaacacttaaatactccagtacattgagtgtgacatgcctgtgtaggagactgtctgtcccccaaataattgacaatttctctccatc

SEQ ID NO: 14905 - DNA, 201 bp, Homo sapiens
tgatgcacccgcatcggcctcccaaagtgctgggattacaggcatgagccaccgcacctggaggacaagtaatttctaagtattatttcttttaatcctcrcagtgactccttgttagggtttgctgcattttatacaaagaagaaaggagtctgtggaagtgacataaagtaggacatgtattcatttactgattcaacc

SEQ ID NO: 14906 - DNA, 201 bp, Homo sapiens
gtggcgtttccacacacagggaagcagatagttccattaggtgacagtgtgtgcacagtttatggaggatgaagcggaaaacctgagccacaaggcagtakaggttggacgagacactcattccgaaggcgggtgtgtatgtgcaaactgtataatttttttcttcttttctatctgctagcaaagtgggtaagttgaccc

SEQ ID NO: 14907 - DNA, 201 bp, Homo sapiens
cccaaagtgctgggattacaggcatgagccaccgcacctggaggacaagtaatttctaagtattatttcttttaatcctcacagtgactccttgttagggwttgctgcattttatacaaagaagaaaggagtctgtggaagtgacataaagtaggacatgtattcatttactgattcaacctttcatttgtacatatatgt

SEQ ID NO: 14908 - DNA, 201 bp, Homo sapiens
aagatgagtggcgtttccacacacagggaagcagatagttccattaggtgacagtgtgtgcacagtttatggaggatgaagcggaaaacctgagccacaakgcagtagaggttggacgagacactcattccgaaggcgggtgtgtatgtgcaaactgtataatttttttcttcttttctatctgctagcaaagtgggtaag

SEQ ID NO: 14909 - DNA, 201 bp, Homo sapiens
gctggacaagaagtcctgagcactggggagttgacttcatattggaggcagagaagaattacctgccgatggctgttggcccatggcaacaccctagatcsttgcatttgtggtcctgctgaaagaggagacttaagttatagagttattggtacttgcaacactttctctggaatttggccatttctctgctcttttagt

SEQ ID NO: 14910 - DNA, 201 bp, Homo sapiens
tggagatttcaaggatcatcagggaagctagtgtggctggagatgaatggagtgggtaggagaggtgctgttgggggatgggtatctggtagactctgagrtagcggtgaggaagacattagagggtttgagctagagagtgatgcgagctgtttgatttttgaaacatcgctggatttcagaatgaagtccagactgcat

SEQ ID NO: 14911 - DNA, 201 bp, Homo sapiens
ccactttttaaacatgacattcgatccacgtggcatagcaaggatgggatccacaagatggagtgatctttacgccatcctcctgaccataaatactaaaygaatactctatttcagttgagtttttagtttgctctgttacgtgaggacacatcacttgcacctcagtgtgagtttgaaagtgttttctctggagaataa

SEQ ID NO: 14912 - DNA, 201 bp, Homo sapiens
tgaaattcagtatatttgaaatgagcccttatcttgagctcactgagcttattattttgggttaaataaaaaagaaaacagagtcttactttttctgatcmttttattgtctttctgactaatgttaaaaagtagtaacctctagtaggtgggatagtagcaatttttagggatgtattgagaagagtacaaatgggaata

SEQ ID NO: 14913 - DNA, 201 bp, Homo sapiens
tgacagggagatggagggaggcaaaaagaaaaagggagaaggaaagagaggaaagaggggaagggaggaaggaaagaagagagagaaggaggaagagaggraaggaggcacagaggtagagaggcagggagataatggagatcctggccaaaagttaatgctccgtttctagtagtccacagaaagcaccttgaccaagtg

SEQ ID NO: 14914 - DNA, 201 bp, Homo sapiens
gctatgtcagaagcaagtcaggatttgaaggcagatctgtctgcttttgcccctctgtaaatccagagctgctgcctcatttcttacgttgcccccacccrtgcagcaattcttcctgggaggcctcattgttcatattcataaagggccccattcagtctcctttttggagaaatggccactgcaactctctgttctgac

SEQ ID NO: 14915 - DNA, 201 bp, Homo sapiens
gctggccaggagacaccaggcatagaccttcctttctcagagccttcgtggcccctagtttgaatctttgagtcactgcagtaaagttcctgatgtttgasagtactccttatgaagggagtcatatgagttgctagctgggttctctggatggtggtgtcatgccaacatgggagccactagcacaaagaacatgctagg

SEQ ID NO: 14916 - DNA, 201 bp, Homo sapiens
cgcagattgccagtgactccgggaatgcctaggtttatgtatggattaacacagtgatagaccctgagtagcaaaagacgaagactaattacctgacagarctcccctccactcgcctgggtcattgaaattaatttctgctttcaagcttggcagaaagcagctgcagaatttcagttcaatacttaaattaacggggag

SEQ ID NO: 14917 - DNA, 201 bp, Homo sapiens
ggattaagttagggagacagtaatggtattgttagcaggctatttcaatgattttctctgcggaagagtagggaaaggtgacattccaactgggaatattmgactctgcagatccctactcggagtttttcagccctgttttaagtgccgagctgggttttgcctcatgatccaattgttttattagcgaaatcatcatct

SEQ ID NO: 14918 - DNA, 201 bp, Homo sapiens
tccttctttctgatcttgagaccttgatttgtccagtattttctcatcattagctgagtgtaagcattttttggcaagaacattataaaaatgatgtggtrtctttcttagtatattatctcaggtagaacataatgttgatctgtctcatccctggtaatgttaaccttgatcacttggttaaggtgatgtctgctgagt

SEQ ID NO: 14919 - DNA, 201 bp, Homo sapiens
tacagaccccaaagcttgctgtcccctgggcaggtgcatgagggggtcccaggcaatcaggctcttctcaaacctgaattatacccggcctcagggtatargggtcaggcagctgtttgacaggattcttgcaaatgtttttggtttctctgtctactcattacgtacactctgccagaggttgaaaactcaatgttgaga

SEQ ID NO: 14920 - DNA, 201 bp, Homo sapiens
tgttgaaggtcatttgaaaaatactctgtctttattctttgaaatggatttactctcaagaaagttgcatgtcactttacttggaagagacgggtctcagkgaggtgtgcctccgctttcatgaaaagtctcccgtctgcagaagcattggctgacatggaagattttttttttttttaatacttttctttttgccggcat

SEQ ID NO: 14921 - DNA, 201 bp, Homo sapiens
ggtgatgtctgctgagtttttccaatgtaatgttattaatttttcctttgaaattcataattatttgaagggagatgttttgagatgatgctggcagcccygttttccttaaactttcacatgctgactttctattgttggatcttgcctgcagcagtgtttaccatgatgcttggctagtggtgactatgtatttccctt

SEQ ID NO: 14922 - DNA, 201 bp, Homo sapiens
gcaaagtcaagttggagatggctctcgatatgcatgagtgtgttagactgcttttcttctattttttaaaaatgcacccaaatgtaaaagacacttttacstttttgatttgatgttgaaggtcatttgaaaaatactctgtctttattctttgaaatggatttactctcaagaaagttgcatgtcactttacttggaaga

SEQ ID NO: 14923 - DNA, 201 bp, Homo sapiens
taatttttgtatttttagttagacaccaggtttcaccatgttagccatgctggcctcgaactcctcacttcaggtgatctgactgccttggcctccgaaartgctgggatgacaggcgtgagctgccttgcctagccaaataactccattatttaagaaaaattaaccagtatttattgaatacttactgggccctgtgct

SEQ ID NO: 14924 - DNA, 201 bp, Homo sapiens
tcttgcttgtaggaagaacaagagacgagacacagcaaggtgatgatgggtatgtgaagcaggataaagaaaaaaacaggacaggcattacaggcttaagyctgtaatcccagcactttggaaggccaatgcgggtggatcacctgatgataggagttcaagaccagcctcaccaacatggtgaaaccctatccctattaa

SEQ ID NO: 14925 - DNA, 201 bp, Homo sapiens
ttcacagtgtttctagctcccctttccaatacatctctctctctctttctctctctctctctctctctctcacacacacaacacacacacacacacacagscaaatcagacaccaacataaactgtagagttaacattctttttccaccctcacactttttttagctccgatctgtgttcaatttctgcctgagagagtga

SEQ ID NO: 14926 - DNA, 201 bp, Homo sapiens
cagcccaacacaaatgtataaacttgcttaaaacatgatgagatattttttgccattttttttcaactcatcagctatcattagggttagtgtattaataytttatgcacagcccaagataattctttgtccagtgtcacccagggaagccaaaagattggacaccctgggaataaaacagaaaaaaggtgtaaaaggctt

SEQ ID NO: 14927 - DNA, 201 bp, Homo sapiens
aagtacatcctcttaatttgtttctggaaggcagagttaagagttaattccttcccatgatgtggccccagcggagaccttgtgttttttttttttttttycttcagtgctttttcaggactatgttatagaatacttatggggcatacgtgtaaatgaactgtcaaccttaaaatctaaacaaacagcttgtttgtggtt

SEQ ID NO: 14928 - DNA, 201 bp, Homo sapiens
agctgacttccctctccttcattcccaaccaagtttgaccccgccgcagtggagattgtggcagatgggtcagatagcatgtgtcctgtcgctgtcacaastttttaataagggctgggggtcctcttgaagagcccaggaactgcagtccctcctctatgccttcccctgaacacagtgcgccctcactaataaattctg

SEQ ID NO: 14929 - DNA, 201 bp, Homo sapiens
aatcgcttgaacccgggaggcagaggttgcagtgagccgagatcacgccactgcactccagcttggcgacagagtgagtctccatctcaaagaaaaaaaamaaaaaacaaaaacctgccctgcccagccatgcccaaacagagtggccagcagtcagcttagtgtgggcagagctcagggaattattctgcagtgcagcta

SEQ ID NO: 14930 - DNA, 201 bp, Homo sapiens
agatgcctccagcaattataattgaatcttgaagctagagtttcttggctatcctatttcccttttgtttccaccatgaagaagtggagagccgtgtgacstcagtggtagagctgatgtagaagcgccctctctgttcctggcagtgcctgtcctgctaacctcgtgtctcttgctggggtcttcatcagtaagagacct

SEQ ID NO: 14931 - DNA, 201 bp, Homo sapiens
ttttttgcccttttgggggacaaaatgtctttatgttaaattgttttattattgttatctttatggagttaagggcacataaaatattcttacagagagarattctgtagtttccacaagtaaccagagaattgttcatggcagagaattattttttcaatgcctattttctcctgaattttctgacggagttagagatag

SEQ ID NO: 14932 - DNA, 201 bp, Homo sapiens
tttctgttttcttcttccatttttatgttttgctatgccattcattcattctattcttttcatttctttttctttttgtaaaaattgtacagagtttaaarttagtcaggtatgtctattaaatttttacgtaaaaagttaaagcagccctcagcatcaacttcttcttcatttctaactcatttagtgaattcagttggt

SEQ ID NO: 14933 - DNA, 201 bp, Homo sapiens
aggcagcagaattgcctgaactcgggaggtggaggtagcagtgagctgagatggcaccactgcactccagcctgggcaatggagcaagactctatctaccmcccaccctgcaaaaaaagaaaagaaaggaaaaaaaatcttggtgcttgtaggagaggcatttatttcttttaggactggacggggcttggagggtttcca

SEQ ID NO: 14934 - DNA, 201 bp, Homo sapiens
taaacaagaacaaatggagaatctttcactatgactgcaactgaaaagaggagtaatggaaggacatgtactcttcccatatatttttaaacaattactgkatctgatttttcatttttcattttttttttttctggaagaaagagcagatctggataaagtcagtatacaatgtggtctttggtgacagacccaagttca

SEQ ID NO: 14935 - DNA, 201 bp, Homo sapiens
ttgataactccctggcaggttctcttcatcgggcctccacatagggtatgcgaacctcttcatgtttttaaaagggagagatttaataaaggcaatttggkacttaaaaattgttagaagagctaaaagagtagttttgaggttgaccttcagaacggcttcctgaataatacagaagtgaccctccaggaaggcccttcc

SEQ ID NO: 14936 - DNA, 201 bp, Homo sapiens
gtgacaataatggagatagagaaaacaggatggattcaggaaacatgaccacactgagcatattcaaatgtaattgtcagttttcgtgtctccctcccackggaccacaagcccctaactcttcatgtacacaccctgactcccagtgtgggctggccacccaggaggcacccagtttatgtgtgctgcgtgagtgatgtg

SEQ ID NO: 14937 - DNA, 201 bp, Homo sapiens
ttgtgatttattaaccatttacttggctttggagaaggcagcatttttagtagtactgttgagcctgcatgtagcttttccaggagggcagggtgcctggatatctgatcttacagttattactttgtgtcatatataattttgttttctccctgcaacaaataaatctttgggactccggaagaaaaaaaaatgggaaag

SEQ ID NO: 14938 - DNA, 201 bp, Homo sapiens
gcaacctctgtcgattctccttcctcggcctccgtagtagtcaggactacaggcatgcaccaccatagctggctaatttttgtatttttagttagacaccrggtttcaccatgttagccatgctggcctcgaactcctcacttcaggtgatctgactgccttggcctccgaaagtgctgggatgacaggcgtgagctgcct

SEQ ID NO: 14939 - DNA, 201 bp, Homo sapiens
gggaaagaaaaaaaaaatttgtggttacagtataataaaaataaactgtttgtcgtgactgcagctgacatttatcagcctgtttgtgggtgatctttctctctctctataatacagaacataatttgtcactttgtaaatacattccagtctaaatccctgccagcatctgttagtgtttgaaggattaatgtgctaccc

SEQ ID NO: 14940 - DNA, 201 bp, Homo sapiens
attagtgaagcagaggttgaaggaggtcacttgctttttatcccaatgtcaaataactccataattttttttattattttttgagacagagtcttgctctkttggccaggctagagtgcagtggcgcgatcttggctcactgcaacctctgtcgattctccttcctcggcctccgtagtagtcaggactacaggcatgcac

SEQ ID NO: 14941 - DNA, 201 bp, Homo sapiens
gaaagaaaaaaaaaatttgtggttacagtataataaaaataaactgtttgtcgtgactgcagctgacatttatcagcctgtttgtgggtgatctttctctctctctataatacagaacataatttgtcactttgtaaatacattccagtctaaatccctgccagcatctgttagtgtttgaaggattaatgtgctaccctg

SEQ ID NO: 14942 - DNA, 201 bp, Homo sapiens
gtcattgattgaaagagtcatggcatagatgctgaagttttgatgggaactttgcaggatgttcgtttgtttatcattagccctgggagagtcatccctcrcctcccaccaccccttaatttaaagggatttaaaatattttcaagtacatcctgatatcagcacgtggtacactgagcctagttgatggaattgtgaaaa

SEQ ID NO: 14943 - DNA, 201 bp, Homo sapiens
cttagatcagacgtgcttttgaaatatccagatatatacaacacaaagagcgaagtttgttttatattttgtttgtttaggttttttttttttttttttttggctggtgtttactgaatgcgtgcaaggctttctgtcacaggctctgtgttaagatatttaacgggtgtttcattttcccagcaatgctataggacacag

SEQ ID NO: 14944 - DNA, 201 bp, Homo sapiens
caacactcagtctgatagtttagaaagcttttgcaaggcattccccaatataaccattaagcatcaaactctcaaatggaagtttcgaaaaacagaaaaaagtgagcataaatgcaaactatcaccccatgtaatagtttatttatttcatgctccacttttctgggcagttttgttgtcattctctctctacctcttttt

SEQ ID NO: 14945 - DNA, 201 bp, Homo sapiens
attataaaaatgtattaaaactgagaaggagaaaaaatatggcggtagatgcgattttaatgattgtgtaaatgttcattgttccatggcaaaaaaaaaaagtcgagcttttcagccacagtatttcagacaaatgccagggcctgtttttctgtaaatgtgtaccgtgtgcttttaacacaaagacaaatatgttgcttt

SEQ ID NO: 14946 - DNA, 201 bp, Homo sapiens
tttaatccaaactgaagttatgctttgggcttccagaatctgggtcaaaaagagtagaagtcaggctcagattgacgcttttcaagagagagaaaaaaaaagaaaaaaatcttgcctttccctagctagaggtcagatgtcaaaaaagctaataacacaacccaaggatgtcatcgacaaatgaaaaaactggtgcgatgc

SEQ ID NO: 14947 - DNA, 201 bp, Homo sapiens
caagcacctatcgttttcctgtgtattccaagaggccagtgtggctggtggaataagatgttttcctgttttcaagatgcagtggactctcttttatttarcagcagtgtctatgtgttaggaatccatgtgagttctctaagtctgggacaacgataggtgtgtctgagtcctgcattaccatggtttattctttccttt

SEQ ID NO: 14948 - DNA, 201 bp, Homo sapiens
ttctttttctttttgtaaaaattgtacagagtttaaagttagtcaggtatgtctattaaatttttacgtaaaaagttaaagcagccctcagcatcaacttyttcttcatttctaactcatttagtgaattcagttggtctttatatatgtagctttaagtaattgcatgtaaactgttacttcttcattttctagtcttag

SEQ ID NO: 14949 - DNA, 201 bp, Homo sapiens
ttccttctactttggtgccccatgatgatgtgcatcttttttatttctgcatcatatccatatagtgatatcatgtataatgatgtttaagaagacagttwtttttgtttaaattgttataaataagtaagtgtatgcaccactatgccatgtagcatatcaagattatttttctttcctgcaccttattttttccctgga

SEQ ID NO: 14950 - DNA, 201 bp, Homo sapiens
tatttgtaacaaacaaataaacaaaaaacaaaataaataaaagctacccagcttagattattttgtcataaaagccccaaaagactatgacaaatccttcyatctatgtgtccttaggcaaaatacccaaactctctgaataccaattttctcatccaaaaaaatgggtgaataatatctaagaggtaataaccctaatac

SEQ ID NO: 14951 - DNA, 201 bp, Homo sapiens
agaagacagttttttttgtttaaattgttataaataagtaagtgtatgcaccactatgccatgtagcatatcaagattatttttctttcctgcaccttatwttttccctggagttaatactcatctttttttagaaatttgctgagtttgtgatgtacctatcattcaacctcaaactttcatgtgattgtctaaatctca

SEQ ID NO: 14952 - DNA, 201 bp, Homo sapiens
tatcattcaacctcaaactttcatgtgattgtctaaatctcagttccttttattagaaaaaaaaaaaaaaacaactcccctggagcctttgtaccttctgyagtttggggttgttgtcctttttgcttggtgcacaggaatacttggtgatgttctttttaaaactgccctcacattgtatcctggaaagttcatttacct

SEQ ID NO: 14953 - DNA, 201 bp, Homo sapiens
ttaaaggtagaaacagaaaaaaacaggcagaaacataaaaagctcggagatggcttcctattgcttcttcattctgggccagagcaaatcatatggtcgtrctccagggtgaggaagtatgtcccacttacagactgaaaaggtgctgcaagtctgcacggcagagggcatggataaggggttcgtaaaaacttagggcca

SEQ ID NO: 14954 - DNA, 201 bp, Homo sapiens
tcttaacttctttaaacctcagtttcttcatctgtaaaatgcacatcataatatctctattcagagatacaggtggttctattaaacacatcaactctgtgtatataaagtcttaacccattgtggaataaattaagtgctcaattaaatgttagctgctgctattaataacaacaataataatattttcttcacgcatga

SEQ ID NO: 14955 - DNA, 201 bp, Homo sapiens
ttaacttctttaaacctcagtttcttcatctgtaaaatgcacatcataatatctctattcagagatacaggtggttctattaaacacatcaactctgtgtatataaagtcttaacccattgtggaataaattaagtgctcaattaaatgttagctgctgctattaataacaacaataataatattttcttcacgcatgaaa

SEQ ID NO: 14956 - DNA, 201 bp, Homo sapiens
acacatgtgcagccactgtatgacgtctggattttccttgacttatggtgatcactattgggaggtggtaagcaaacaggtgacataatttgaatcatggktttaaaagacgccatggttgccatgaggaggacaatgcgtaggaggcaggagtgaaagctaaaggatatgctgggaggtgaccctggagttaaagagagc

SEQ ID NO: 14957 - DNA, 201 bp, Homo sapiens
tgcaaaggccctggggtggaaacacactcgatgtgttcaagggagagtaagtggtgaatgggtttggagccaacagggataatagacaacgctatcaagargggggccaaccacacatgtgcagccactgtatgacgtctggattttccttgacttatggtgatcactattgggaggtggtaagcaaacaggtgacataat

SEQ ID NO: 14958 - DNA, 201 bp, Homo sapiens
tctaaatccctgccagcatctgttagtgtttgaaggattaatgtgctaccctgtgtatgtctgcacttccagggaacagtgtagcatctgattacagatcktgggagagcaggagggaacaaggtgttttctgtgctttttcctacatgcagtcgttttggcctttttctgatttttcttgtctttatcccattctgtcta

SEQ ID NO: 14959 - DNA, 201 bp, Homo sapiens
aaatctcaagcacaggtgcagcaagtgcaaaggccctggggtggaaacacactcgatgtgttcaagggagagtaagtggtgaatgggtttggagccaacarggataatagacaacgctatcaagaggggggccaaccacacatgtgcagccactgtatgacgtctggattttccttgacttatggtgatcactattgggag

SEQ ID NO: 14960 - DNA, 201 bp, Homo sapiens
ccagatgtggaagaaatagcctcattagtaacttttctgtaagcaatctccttatttcttgttttttgttcttttgttttttgtgtgtgcttctgcgtgcmcctcctctatggctccccccaccaaatttctgtgtcttcatttgcaactctcttttctccagtaaagaggaaagtgtatagttctcctttccttacagaa

SEQ ID NO: 14961 - DNA, 201 bp, Homo sapiens
atagaatgatccaagtttataatttgtaaataagtagacatcttttgaggcgtatgcccttaatttttctaactgatgaaagcgtacttccatcaactcargacagttcaaagcagcttggagcctcttggattttaaaaagactctgtggcctctgtctctcttggttttcagtgctcagctgaggtctactctgtttat

SEQ ID NO: 14962 - DNA, 201 bp, Homo sapiens
ggactattgttgtccatatttcacagatgaggaaagagatgtgctaagaaaagaggtggcagagtagggattccagctcagtagccactttcagggtcccrtacttttcaatgtaagcatattggctctcaatttaaaaatgttattttttacagatagtacacagatgcactgacacaggtaccctctccagtcctctga

SEQ ID NO: 14963 - DNA, 201 bp, Homo sapiens
tatagaacatttctaccatagtagaatgctcttttggatacatctgctttaaagcattagtccccaaagtgtgaaggatgaaccacttgggttccgagagraaacattataacttctgtttatccattaaactctttcatttattattaaacatctcaacacatttattgggtggcaggtactgttttaagtgttttgcat

SEQ ID NO: 14964 - DNA, 201 bp, Homo sapiens
aggctcattgcttacataccgacagcatacaaattgtcaagtacttaaagttccattgttgctgaaagggcctccacccaatgtccttaaatggtcccccytttttttttttttttcaaaccacaggatttacatctctcgtagcatctaatgaaataccagcaagaattgtgtgttggtgtaagaaataataatctttcc

SEQ ID NO: 14965 - DNA, 201 bp, Homo sapiens
cagtctattgttacaatattgcgtgtgttaggcatcaggaaacagaatctctttgtctcctgtccttctttcacctgccccaaggcaggactctaatcttycccacctttttgattgtgagtcttcagaccctccccagagagtcagtcctgccttatgccctggggaaaggaatgctgacctcatgaagctcccataaaa

SEQ ID NO: 14966 - DNA, 201 bp, Homo sapiens
tatatattttgaggtataaaaagtacgtgctcaaggtattggtcactcctcaatttgttttccttgaaacaaaatgaaggtataaatatttcagccgggcrcggtggctcacgcctgtaatcccagcactttgagaggccgaggcgggtggatcatgaggtcaggagatcgagaccatcctggctaacaaggtgaaacccc

SEQ ID NO: 14967 - DNA, 201 bp, Homo sapiens
ttgacactaaaagcttaagtcccatgatttgcctttgtggatggaaggccttggccttcttttatgatatatgtgttggggggaggcatgtggtatgtggrgcgggtaaaatacgagcctcatgcctgtctaagctggtgacttggcttggaaaagatgatcattcgtcaacgcatcacaagtcacagggcttatctccat

SEQ ID NO: 14968 - DNA, 201 bp, Homo sapiens
ttctaaatactctcccagagtagggaggaaaaatcatccaaactacttggtaattgaattcaagagtgatggaccaaaaattattaatgcattcccttccstccaccagccaaagaggattccatctttattctcctcccaaatgcaggctccattaaccttttacctttctttctttccggtctttcttttctatatctt

SEQ ID NO: 14969 - DNA, 201 bp, Homo sapiens
tgaggcaggagaatcccttgaacctgggaggcagaggttgcagtgagccaaggtggtgccactgcattccagcctgggcgacagagcgagattccgtctcaaaaaaaaaaaaaaaagtaatcattttagaattgctttctcttcgggatggtttacctcgtgtttagtctgtaaacgcggataaccgagagctggtcaaat

SEQ ID NO: 14970 - DNA, 201 bp, Homo sapiens
aagaaatggagcaagggaggggtttcatcccgccgtgttcatttgcttggctgtcctgaaattgcgaatacgcagttgttacctgctcccggtgggagggrggggatatttatttggcatcttgcaattgataggagctgagtgattttagtaggtagtttaactccttaaaaacttccagtggtttcatattctacctag

SEQ ID NO: 14971 - DNA, 201 bp, Homo sapiens
tgaaacgccttacataaactgaccaggaatctggggcattcgcgttagagacaattttcttctcctcaagataagggatggggaattagtcatagggtatytccagataatgtagttaacacctcgtgtaatattaggtgggcagggagctctgctctcaggaccaaaattgctcctgccagctctaatagggaatgtgtg

SEQ ID NO: 14972 - DNA, 201 bp, Homo sapiens
agtagtagtgaatgccctgactttggggtttgcagtaagctaggattaagtgcttcacagtgaggcacagtggggagctactctgaggatgaattgcctartaaataagtgaggtttgtataaccgaggccagatcttagaacctcctgctatctgtacatagaagaatgttttagtcagaggcaaggcaaggtcaccagg

SEQ ID NO: 14973 - DNA, 201 bp, Homo sapiens
gtacaatggctgacgcccgtaatcccagcgctttgagaggccgaggccggtgtatcgcctgagtccaggagttagagaccagcctgggcaaacagcctgargcaaaacctcatctctacaaaaaatacaaaaaatcagctgggcgtggtgatatgcatctgtggtctgagctactcaggaggataaggtgggaggatcatt

SEQ ID NO: 14974 - DNA, 201 bp, Homo sapiens
acactctaaggaatggcatgacattctcctttcttctcctgcattcattggaacctgaatgtagtattaattataagactgttagacttcaggggactacmctcttattctaaaatagtggtcaactaactgtgcccttcagacagaattcctgcccagcacctggctttgtaattaaagttttactggaacagaggaata

SEQ ID NO: 14975 - DNA, 201 bp, Homo sapiens
ttgctgagaggtggggagggggtgggggctctgtgcatggaatggggggaaaagcttcagggaagggcagtgcaaattgtttctggactgatgccatcttytaataatagtagttaatagactgggtacaatggctgacgcccgtaatcccagcgctttgagaggccgaggccggtgtatcgcctgagtccaggagttaga

SEQ ID NO: 14976 - DNA, 201 bp, Homo sapiens
agaggaataccagttaatttatatctcgtctgttgccacttttgctttcatgctattaaagctgagtatttgggagatacttgaaaaatctaaaatgcttmctatctggccctttagagaaaaggttttccaatctctgttctagaggattcgtggtcatttggaaagaaaagtatgttaagacaaaatgagcaggtggtt

SEQ ID NO: 14977 - DNA, 201 bp, Homo sapiens
gaaaagtatgttaagacaaaatgagcaggtggttggattagtattttctttctacacatatagaaactgttcctatcatacctgactcagttttcaaactkgcttaatccaaagcctggggggtggatgtaggagagaagttgaaattagctggggttttttttttgtatcacaaaagttacatttttttttttttttttt

SEQ ID NO: 14978 - DNA, 201 bp, Homo sapiens
gcaaccaaagggagcataactctgataagaataataaaaagaaacaattcagcaactctcttacagatttttatcatcatcccattcataattgattccaracgtgcatgaatctttcaagataagtgtcttattgattatcctgaaaacaagcgatcacttggtgtcctgagattcgctcactgccctcccctgattacc

SEQ ID NO: 14979 - DNA, 201 bp, Homo sapiens
tggaactacaggtgcccgccaccaggcctggctaattttttttgtattattagtagagatggggtttcaccgtgttagccaggatggtcttgatctcctgwccttgtggtccgtctgcctcggcctcccaaagtgctaagattacaggcacgagtctccgcacccggccctgtttttgcatttttagtagagacgggtttt

SEQ ID NO: 14980 - DNA, 201 bp, Homo sapiens
gacgggttttcaccaggttggccagcctggtctcaaactgttgaccttaggtgatctgcctacctcggcctcccaaagtgctgggataacaggcgtgagcmactgcgcctgtctacattttctgtctttactggtattatggtgggaacccataaaccactgcgaggcagataccattttaagcaggaaaccttatttttt

SEQ ID NO: 14981 - DNA, 201 bp, Homo sapiens
aattctacattcctaagaagctcctaacaggctgataatccatggatcgcattttgaatagaaaggattatgcaaaaagccagagtttttttttcccttgycttataccagtggtgcctagcatggtgtcaggtttatagaggactaatacatataagaaggagaaagggagggaggaggaattccagttgtttttttttt

SEQ ID NO: 14982 - DNA, 201 bp, Homo sapiens
attgggtagcaccgatatagaacatttctaccatagtagaatgctcttttggatacatctgctttaaagcattagtccccaaagtgtgaaggatgaaccamttgggttccgagaggaaacattataacttctgtttatccattaaactctttcatttattattaaacatctcaacacatttattgggtggcaggtactgtt

SEQ ID NO: 14983 - DNA, 201 bp, Homo sapiens
acatggttggctggatttggccaagttgacatagagagccaatccctcatctccagcagggcttttactcaatgatacagtgcgcatgaattgcttgggggattgtgtacaaagtgcagatttggttataggaggtcagggaggggcctcaattctacattcctaagaagctcctaacaggctgataatccatggatcgca

SEQ ID NO: 14984 - DNA, 201 bp, Homo sapiens
tatggagtgtcagaaatagtgaagcttctggagcttcactgtccaatatggtagccacgtgtgactattaaaatgtaaattaattaaaattaaaagttcarttgctctgaaatagcagccacatttcaaatcttcagtagccagatgtggttattggctaccatattgggtagcaccgatatagaacatttctaccatagt

SEQ ID NO: 14985 - DNA, 201 bp, Homo sapiens
aaaacagcaggaaaaactacatggttggctggatttggccaagttgacatagagagccaatccctcatctccagcagggcttttactcaatgatacagtgygcatgaattgcttgggggattgtgtacaaagtgcagatttggttataggaggtcagggaggggcctcaattctacattcctaagaagctcctaacaggct

SEQ ID NO: 14986 - DNA, 201 bp, Homo sapiens
atcactgtgtaacttcatccaatacgtattgaatacctactatgtgtctggcaccacttcagacagtaaggatatggatatgaatttgtatcagtcaagcyttccaggatcttattatctagagagaaagattaaaacatatgcaaataattttgatagaagcaaagacctaactcagcctgagaggaggttgggtttaga

SEQ ID NO: 14987 - DNA, 201 bp, Homo sapiens
cttcttccccctacttccttcttatatctggctatctgggagagaaaaaatttaatacaattgattactttttagaagagttaatttttacttattactgkggattttttgttttttaacagtcacaccgaggagaagactcagtgggaacatccaaaaactggaaaaagaaaacgagtggcaggaggtttgtatgttgtt

SEQ ID NO: 14988 - DNA, 201 bp, Homo sapiens
ctgagtagctgggactacaggtgcatgccaccacacctggctaacttttatttatttttagtagagaggcagttttgctgtgttgcccagactggtcttgractcttgagctcaagaaatccttccacctcagcttgacattacaggtaagagccaccgtgtccggcccccctttcttcttttttaaagtggggtattaag

SEQ ID NO: 14989 - DNA, 201 bp, Homo sapiens
atctgataggaaggattcacagctttccccaagaatacaccacagtgcatacaaatcctcgaagccgcagaactttttcaagttgaactgtgaactgtgatttttttttttttttaagtaagtttacatgtagaagctcattggtagagagctttagatatattacttcccagggtggtgcatcctgtcaccatgaagtag

SEQ ID NO: 14990 - DNA, 201 bp, Homo sapiens
agtaagcacagtggctgggataggaccttggcatctcgtgcgaagcccctctgcctggagtcctgcctctgtgacacttgcttactgtgtgacctgggtcractcatacctactgttcgtcagttttctcatctgtaaaatggggattccagtggttattatgagaattaaatatgacgatacataaatagcacctggaaa

SEQ ID NO: 14991 - DNA, 201 bp, Homo sapiens
tcccaggttcaagtgattctcccgtctcagcctccagagtagctgggattacaggcacccaccatcacgcccagctaatttttgtatttttagtagagatgggtttcaccatgttggccaggctggtcttgaactcttgacctcaagtgatccacccgcctcggcctccgaaagcgttgggattacaggtgtgagtcagag

SEQ ID NO: 14992 - DNA, 201 bp, Homo sapiens
aattaacatttttatattagttccatgctgaaataatatttgagacatactaggttaaataaaatatcattgaagttcatttaatctgtttctttttacctttttttttttttgacacggctcctggaaaggttaacaatatgtaggtgaccctttattttcatcagacattgccgacctagagggtaaccactggagagg

SEQ ID NO: 14993 - DNA, 201 bp, Homo sapiens
atgtaagtgtagctccaatgtgagttgttacttgtagagaacagctatgtcaaaaccacaccaaaaacgatttggaaaggaaataatttgactggtcattktgtttatccatcaactgagttggattgatatatttttcctttggccttcaaaggaaatttgagcattcattcattcatccttttagagaaatattctcta

SEQ ID NO: 14994 - DNA, 201 bp, Homo sapiens
ggaacatgtgctctgtgtgctggaagctcctggaggccccagggttatctctgctcacttaggtttgtgatgttgggcaaaaggagaaaatgctgagtctrttcggacccaacttccattaatgcctgagaaataatttaaatcgcaagatttccaatcccataagcagccctagcctctcttctcctgatactccacata

SEQ ID NO: 14995 - DNA, 201 bp, Homo sapiens
gttgctgagaggtggggagggggtgggggctctgtgcatggaatggggggaaaagcttcagggaagggcagtgcaaattgtttctggactgatgccatctyttaataatagtagttaatagactgggtacaatggctgacgcccgtaatcccagcgctttgagaggccgaggccggtgtatcgcctgagtccaggagttag

SEQ ID NO: 14996 - DNA, 201 bp, Homo sapiens
aggtgtttcttatttttatcattttccgtaaaggtaggattgtgttgacagccctgtaataaatgtctcttggaagagatgtgttgctgagaggtggggarggggtgggggctctgtgcatggaatggggggaaaagcttcagggaagggcagtgcaaattgtttctggactgatgccatcttttaataatagtagttaat

SEQ ID NO: 14997 - DNA, 201 bp, Homo sapiens
tcttcttgtaaggtgtttcttatttttatcattttccgtaaaggtaggattgtgttgacagccctgtaataaatgtctcttggaagagatgtgttgctgaraggtggggagggggtgggggctctgtgcatggaatggggggaaaagcttcagggaagggcagtgcaaattgtttctggactgatgccatcttttaataat

SEQ ID NO: 14998 - DNA, 201 bp, Homo sapiens
ccatgcccaccttgctgttgcaccccccaccccaaggaaagccttcccacctttggaagctgcattaattcttccaggccacaagggggccgttgagttastggttcactgcactggctggcaggaaagagttttaatgcaggctccaaaggtgcttaatttcctgtggtccttatgaatatgcatacagtatgtgctcag

SEQ ID NO: 14999 - DNA, 201 bp, Homo sapiens
atagagttgtgtattgttgggaactaattatatgtattataaatccaagaattaatttaaatgacccagtttccacagagaaaaagccacattgtttttamatagctaactaaacaaaatgctaacccatatgggagaaatttccaaagaattaaaaccacccaccaggaaaatgggaaagtctcccctccacacacacac

SEQ ID NO: 15000 - DNA, 201 bp, Homo sapiens
acatcgcataaagatgcagatttgattccccctttactcacactataaaaacaaagtttttaaagtggttagccatacctggaaatgtaaatgcattcgcstaatgtaatgccaaagaaaaattaagacaaatgataccacatcgctgccacaaactgcggctcgtacaaaattcactttagttattatgctgtgaatacg

SEQ ID NO: 15001 - DNA, 201 bp, Homo sapiens
agaatacatacttcataagcaggaggcatatatgtttgtatatatgtatgtacatagacttcatacacatgaaataaaatttcaaatggttcctctgttcmgcaaacgtgacccaaagttttggcttatttggcgttttgttttcttgaagacatacttgaattttaaatagttaatccatttaagaagtttcatttaagg

SEQ ID NO: 15002 - DNA, 201 bp, Homo sapiens
gatgttaattgagatataggagtacttcattaagtctccagaatacatacttcataagcaggaggcatatatgtttgtatatatgtatgtacatagacttsatacacatgaaataaaatttcaaatggttcctctgttcagcaaacgtgacccaaagttttggcttatttggcgttttgttttcttgaagacatacttgaa

SEQ ID NO: 15003 - DNA, 201 bp, Homo sapiens
tattgtgaaataccatttgacccagcaatcccattactgggtatgtaaccaaaggaatagaaatgattgtattataaaggtacatgcacatgtatgttgaytgcagcagttttcacagtagaaaagacatggaattcacccaatccgaattttaacaagtcttccatgtgattctgagacagactcatgttcgtgtggttc

SEQ ID NO: 15004 - DNA, 201 bp, Homo sapiens
tttcaccatgtttgtcaggttagaccggaactcctgacctcaagtgatccacccacctcggcctcccaaagtgctgggattacaggaatgagccaccacgcccggctcaaatccttcttacttttcctcaagaactcacttcccacccaaacctttcctattgtggcagctgttatcttgtccagcacatgtgtccacact

SEQ ID NO: 15005 - DNA, 201 bp, Homo sapiens
cacccaatccgaattttaacaagtcttccatgtgattctgagacagactcatgttcgtgtggttctggctctgcagaactgaggtgggccccaaaacttgmgtttctaaaaggtactagctgagcatgatgactcacatttgtaatcccaccactttgtgaggccgaggcgggtggatcgcttgaggccaggagtttgaga

SEQ ID NO: 15006 - DNA, 201 bp, Homo sapiens
gaaggcctaggaggtgcagggatgtttatatgggctgctagcgcttagtttcctgccacagggagacagtaagaaaggtgacgtcaatctgagatgagagrgagagcaaaacagttcttttgaccaccttgaccccgaccttgaaataaggtggaactaataaatcccgctttgtgctggagcaagttttggctgagtttc

SEQ ID NO: 15007 - DNA, 201 bp, Homo sapiens
ttgaagattttgtgttcaagatttggaagagaatcttcttcccaagccagcattttatattttgcattaaaaaaaaccacaaaagacaaaaaaaaaaaaaacaaaaaaccttcacagacaaaacccagggcatattttaggtgtgtttaattcgaagctcctgatgtctagcaggaacctggaacttccctttctattttt

SEQ ID NO: 15008 - DNA, 201 bp, Homo sapiens
gccaccttttgccgcagtaacaaacaatcccagactctcaaggcttgcaaaaataaatgtgtgtttgtttgctcataacacatgtggctgagggttggccrtggctccacagtcacaggtgggctttcctgggctcagcttctcacagcgtctccttgcagggcccaggctgtaggagatgtcatcagggcctgcagaggg

SEQ ID NO: 15009 - DNA, 201 bp, Homo sapiens
caggactgaagagatgatattgattctcacttgatagaggttagaaagggcctctcccttccctagctgaatagagagggtttcctttttcttttcttttytttttttttttttaaatgggaaacttacagggaataagatctgtttcttcatttgctttgcaagagagttggatttgtacacgatgcctgagctggctcg

SEQ ID NO: 15010 - DNA, 201 bp, Homo sapiens
ttgctcagttacttttttcctgtttttttttcacttttgtcttcctgacttttttcttccatccctatttatgaaaacaaaaagataactaaattgaaacsttgacaatgtaatttgtcagaggaaggcagcctgttttataagctcaggtgatttcatttttgttcacctgtttatttcatgacacttgcaggaaaaaga

SEQ ID NO: 15011 - DNA, 201 bp, Homo sapiens
tttatgttgctattgtatcgtaaggttcttctgaagcgaccacttcataacactgtgtagtccaatccctaagctgggcaatttttttttcccctttcaawacatcacattgattttctgtatgactttatctgcttaatacaaagtgggattgaacagttatttgtctggatttgatcattccttattaaacatttatga

SEQ ID NO: 15012 - DNA, 201 bp, Homo sapiens
aggcaaacaaaagaagccacaacagtctaggaagaaatctttaatttctattcagctttaaagagtttgagagcgttttttcccctctgttaacaaacgasttcaagtacatgccttcatattataaaagtacctgaaattgcctagaatagcagcatgcatagcttgttagtatttacatatatttacatagggaaacaa

SEQ ID NO: 15013 - DNA, 201 bp, Homo sapiens
gctctctgagccaataaaagaagctatattcagcactggctgtataagatctttaatgttttaggctgtcaatgttggctgtggttaggctgacataattrtgagctgcatgtaccaatatatagctctttacccacaaaagcatgctgcaacggggaatctttcagagataataaaaggattcatcaagtgtctatacga

SEQ ID NO: 15014 - DNA, 201 bp, Homo sapiens
agcctctgacttgcaaggtgtgcttcagaaatttgcagcttctatttaggtaggaagagtttgccagcccgaaaactccagtaagcaaacagctttatagyaccccagccatagaaagtgagagctttcgaagaatctgtggttagaactaagaggatttttctttctcctttttctgctgttattatctcaaggagagag

SEQ ID NO: 15015 - DNA, 201 bp, Homo sapiens
aaagatagtgtgcatgcctcatctctaaggggcagccattattgacgtccagctgaatgttgccacgtggaaattagctataaacttgccagaacctccartttttctggagagattagattagaaattcatatatttttaaatattaaatcatccctttttcttgagatggtgtcacgtcgttgcccaggccaccgttta

SEQ ID NO: 15016 - DNA, 201 bp, Homo sapiens
gctaaatctatgtccccaatatagggaagacaggagaaagtgccaaagatagtgtgcatgcctcatctctaaggggcagccattattgacgtccagctgartgttgccacgtggaaattagctataaacttgccagaacctccagtttttctggagagattagattagaaattcatatatttttaaatattaaatcatccc

SEQ ID NO: 15017 - DNA, 201 bp, Homo sapiens
gccctgttaataattcataattatatagcatagcatagggcagtttcagatgcttcaactaccaggtaggtagaataaaggaatgaagttgctgtgtatasgatgataaatggtgctaaatctatgtccccaatatagggaagacaggagaaagtgccaaagatagtgtgcatgcctcatctctaaggggcagccattatt

SEQ ID NO: 15018 - DNA, 201 bp, Homo sapiens
cctttcccaaaccatagattcatggaactgtcaaagagcagcactgaactttgtactcaatgccttaatttttccagttgaggataattcacactaaacawgggatttcacctctctgactcatgcatcaggaacttggagataaagccctgttaataattcataattatatagcatagcatagggcagtttcagatgctt

SEQ ID NO: 15019 - DNA, 201 bp, Homo sapiens
ttggccattgcccactaagaaaatttaggtggtttttattgggattagtggatgaacttaggattagtgtggcccttccttgagatataatgacaaccttsgtgaaagcaagaccacagggcctatcttcagggaagtgccttgcattttaataccaaccatgccacgtgtatgtgtttcctgggcctgccataacaaatt

SEQ ID NO: 15020 - DNA, 201 bp, Homo sapiens
ttcgtcctgaaatcctccctgctcacaaaacagccagctacttggttttctaaaagacgtaattttgcaggcagacttcgtagagccattctgtgcagaasaagggaagggagaagctgtttgttttacctgtagtatgaagatattctttgcgctgttagaactgagctcattaattctgcctggcaataatttcaaagg

SEQ ID NO: 15021 - DNA, 201 bp, Homo sapiens
tattaaataaaatgaacactggggtatttcgctccaagtttggtgttcattatttatctctaaattatgatattcatagaacaactccttgctttttcacsaagaatctagaatctagaattatctgagcgttcgcatcagataactaggaagaaatcagagtcattttctctctaaggcaggctcgatgatacctgcaca

SEQ ID NO: 15022 - DNA, 201 bp, Homo sapiens
tttttcttttttttttttttttttttgagatggagtcttgttcttatgccgaggctggagtgaagtggcaccatctctgctcactacaacatctgcccccygggttcaagcgattctcctgcctcagcctctcgagtagctgggattctgggtgccccccgcaaccatgtcccacgaatttttgtattgttagtagagttg

SEQ ID NO: 15023 - DNA, 201 bp, Homo sapiens
ggaaaatgtgatatgacagactggaaccagcacagggacgcagcccctcacctgctgggggtctttgggtgggtcctgtagccccagagcctctcgatgasctatgaacaggaacagaaccagcaccccgagtggtgacagtgacaaaagggtcctcagtaacagcagtctgctattgttttgaatcattcaaaggaattt

SEQ ID NO: 15024 - DNA, 201 bp, Homo sapiens
caatttcctcatgatactggaaggcagtctccggtcagcacggggctgggtctagagttttcagttcacaaaagtggaaaatgtgatatgacagactggawccagcacagggacgcagcccctcacctgctgggggtctttgggtgggtcctgtagccccagagcctctcgatgacctatgaacaggaacagaaccagcac

SEQ ID NO: 15025 - DNA, 201 bp, Homo sapiens
gcgctgttagaactgagctcattaattctgcctggcaataatttcaaaggtttattttggtgtagatggcgaatacagatgcatacatttatacgcagtayacgagctagctataaccataacagaggttaaagaagtagagtaaaaatgtaaaatgtttcaaataaacacacactaaatatcttcttttatatcttataa

SEQ ID NO: 15026 - DNA, 201 bp, Homo sapiens
ggggtcagggggagggtgcacctgtccgccaccccaatttcctcatgatactggaaggcagtctccggtcagcacggggctgggtctagagttttcagttyacaaaagtggaaaatgtgatatgacagactggaaccagcacagggacgcagcccctcacctgctgggggtctttgggtgggtcctgtagccccagagcct

SEQ ID NO: 15027 - DNA, 201 bp, Homo sapiens
tgaggctaaaataagctgcttttagtatcacatttggcaagtagtaaactctggataaatatacttttgaattgtgtgattattgttgttaccatttattraaagggaatgatgaatgtagtgagagaaggaaggaagagagagagggaagaaggggaaaaagagggatggaaaggaggaaggaaggaaaggagggaggag

SEQ ID NO: 15028 - DNA, 201 bp, Homo sapiens
acctacagaaaaaaatgccaagaatgcacgctgggaattcattaagagatttcaggacgttgaaatactgtgtgtacttgcaatccccacttgaccaaagstgtccaaacctcgacagacagcggccagagaaggccccatcatagactctgcgcctggctaattactcaggagcaaagcaggtcgttaggggtcaggggg

SEQ ID NO: 15029 - DNA, 201 bp, Homo sapiens
gtcagtagcaggccaccaagagccatcccacctcagaaagacagaagccatcactgcaaatggcaagggcatgaggcagtttgaaactggcaaaactggasctttcatggaatccagggcttgagctttaatgctttacacttttgttttttcattccatacgcttttgctttagcttcctggcaaaattcagacaaacct

SEQ ID NO: 15030 - DNA, 201 bp, Homo sapiens
acagttgatctaactgattcatggggaccctgggagtatgtttgtgtatttgggggttgggatgggggggtgggtggagggtcagagaggtggcaaaagcrggtgggaacagggttacagagcaaagtaattagatgccctttagatgctcttagttaaagaccatgcaaaaaggatgaaatcttttgatcatgttcttca

SEQ ID NO: 15031 - DNA, 201 bp, Homo sapiens
ttggagacctacagaaaaaaatgccaagaatgcacgctgggaattcattaagagatttcaggacgttgaaatactgtgtgtacttgcaatccccacttgascaaaggtgtccaaacctcgacagacagcggccagagaaggccccatcatagactctgcgcctggctaattactcaggagcaaagcaggtcgttaggggtc

SEQ ID NO: 15032 - DNA, 201 bp, Homo sapiens
gccttgctgaggaaattaaattcctgttcgagtgctatttctttatggcactgaggagcaagcatttctaacaatcatattgcttaagaagtggatggcargaagataattactaatatgtctgcaattgatctgaaattgacacagttgatctaactgattcatggggaccctgggagtatgtttgtgtatttgggggtt

SEQ ID NO: 15033 - DNA, 201 bp, Homo sapiens
tgagtccttttcagagagtcatttggagacctacagaaaaaaatgccaagaatgcacgctgggaattcattaagagatttcaggacgttgaaatactgtgygtacttgcaatccccacttgaccaaaggtgtccaaacctcgacagacagcggccagagaaggccccatcatagactctgcgcctggctaattactcagga

SEQ ID NO: 15034 - DNA, 201 bp, Homo sapiens
tgtgctgacaactataaattgatggctagcagttatcaaatgaatgttgatgaaaagcagctacttaacattttcatcccaacaccgagttttggaaggayggataatttagatctgagggcctcaactataaataaacagcaactgctttctaaatcccacctttctgtagttgaagattgtgctgcaaatctgacagat

SEQ ID NO: 15035 - DNA, 201 bp, Homo sapiens
atcaaagttgaaagaattttacagcgaaccaccattaacattttgctataatggctttatcatatatccattcatccgtctatcatatttgtaaaacaaayaatattttaatgccaaacatatacaaaggatagatcagtaatttccgagaaatattagttgacaacttgacatcaaattatgtacggttaagtattgata

SEQ ID NO: 15036 - DNA, 201 bp, Homo sapiens
aagggaggctgggaaatatagtttgctgtgtgctgggtgggtgggagggagcgtccacattagtgaacagccaggcagtcgctgcctcaaatttctttagkgttatcctttcattccagcaattgaatttgatttgcactgtttcacttctctacaagggtgtaaaaagtagaggttcctcttgaaagaatttcctcccca

SEQ ID NO: 15037 - DNA, 201 bp, Homo sapiens
caacttctacatatatctagaaatatgattgagttttgtgtgttgatcttgatcctatgagcttgctgattgcatttattataaagttccaggagttttttatttttgtttgtatttgttagtttttttgagatttcttgggattttctatctagcctgtcatgtcatatgcaaatagagaattttatttcttcctttata

SEQ ID NO: 15038 - DNA, 201 bp, Homo sapiens
tggccattgcccactaagaaaatttaggtggtttttattgggattagtggatgaacttaggattagtgtggcccttccttgagatataatgacaaccttgstgaaagcaagaccacagggcctatcttcagggaagtgccttgcattttaataccaaccatgccacgtgtatgtgtttcctgggcctgccataacaaatta

SEQ ID NO: 15039 - DNA, 201 bp, Homo sapiens
ccttggcttggaaacaccacattctaatctctacttcctcccttacatcaccttctcctctggctttgtgtcctttctgtctcttacaaggacaccagtcrttggacttaggacccacctaattgagtatgatctcatctcattccttatcttaattacatttgcaaagaccctgtttccaaataaagtcacattcgttgg

SEQ ID NO: 15040 - DNA, 201 bp, Homo sapiens
ttttagtcagggtacataagtgtcagctgctacgacaaacaacttgcaacgtctcattatcttcatacaacaaacgctgatttgttcctttcattacatayccagtgtgagttggctggaaggtccaccctacacaaccactcgtgaaggcagacttgaaggggactccactgtcttggagctacactctaaaacaaatag

SEQ ID NO: 15041 - DNA, 201 bp, Homo sapiens
ttatgagggaggctgagatgtgagaagcacatgggtgttgggagagcactaaaggtctctagcccagaagcatgacttccagccaagtgagacagggaagsccagaaaaatgtgtcacagaacttatggcatcagaatctgattcccaggcatgctttccaccatatgcatagacatttgcaccccagggatagcaccatt

SEQ ID NO: 15042 - DNA, 201 bp, Homo sapiens
ttgtacaattatttgagtatactaaaacagctgtacagtatacataggtagattttatggtatgtgcattatatttcagtaaagttctttaataaattagytaatgcttattgtagaaaagttggaaaataccaaaaaccataaacaggaaataggaaaaaaagtaatcctgactgtatatctggaaatcttttcgtgggg

SEQ ID NO: 15043 - DNA, 201 bp, Homo sapiens
ttctaggcacattaaacggtcagtgcacaggtcctcatttttctcatgcttccatttccatattctcaatcaatcactgatggccagctgtcaacaggcaycatttttggtgggacctgaagatgtatatcccttgttttcagattcctcgcctctcatcatgtaaggtgatgctctgagctgggtcttaaagcttctggg

SEQ ID NO: 15044 - DNA, 201 bp, Homo sapiens
gtacactgatggtgttttgggaataagagtgtaggtagatagagggtggctagtgattgctaatttttttttttttttttgagttaaaaaagtgctataawattagaatgtagttatggttgtacaattatttgagtatactaaaacagctgtacagtatacataggtagattttatggtatgtgcattatatttcagtaa

SEQ ID NO: 15045 - DNA, 201 bp, Homo sapiens
atatgcacccggctagggacctctttaatggtcattcatttgggagatgacctttggttcctaaactggtggacataccaaggactaaaggagtgacttgytctcagttctttgtcattcagctgctttaatattaatatgacacccgttttgggcttgaaaagttttccttctgctgagaaatgatgatggtgacaatga

SEQ ID NO: 15046 - DNA, 201 bp, Homo sapiens
taaaatgtccggaataggcgaatctataggacagaaagtacactgatggtgttttgggaataagagtgtaggtagatagagggtggctagtgattgctaagttttttttttttttttgagttaaaaaagtgctataaaattagaatgtagttatggttgtacaattatttgagtatactaaaacagctgtacagtatacat

SEQ ID NO: 15047 - DNA, 201 bp, Homo sapiens
acgtattgtatggttccatttagtatataaaatgtccggaataggcgaatctataggacagaaagtacactgatggtgttttgggaataagagtgtaggtrgatagagggtggctagtgattgctaatttttttttttttttttgagttaaaaaagtgctataaaattagaatgtagttatggttgtacaattatttgagt

SEQ ID NO: 15048 - DNA, 201 bp, Homo sapiens
ctgttcctgaggcccccactgggaacccttagctggagaacacccgtttcattatggaacatggagaaaagggtgattgtcagctccaatttattccatamtatctgattcaatctgtagtttgactttgctaaaggaattaatttttaagatcttaacaaatccagtaacatttaaaatgacctatccagtccatgcata

SEQ ID NO: 15049 - DNA, 201 bp, Homo sapiens
gaaaacagtttggccattattcaaaaagttaaacattgaattaccatatgacccaataatcccactcctagatgtatcttgaagagaaatgaaaacatgcrtttccatagcatcttacaaatgaatgtacatagtagtgatattcctaatagccaataaatggaaacaatccaaatatccatcattggtgaatggataaac

SEQ ID NO: 15050 - DNA, 201 bp, Homo sapiens
gggaaatacttacaaattaaatattaaataagggatttgtatctagaataaagaacttttacaattcaataatgaaaactcatttaaaaaatgagcataaratctaaatagatattcctccaaatatgatacacaaattgccaatgaatacataaaagatgttcaatctcattagggaaatgcaaatgaaagccacaatga

SEQ ID NO: 15051 - DNA, 201 bp, Homo sapiens
ctttctctgttaccttcggaggaagccttctctagataccatctttaaaacagcaatcttccttctccatccccagcagcacctctgacccccttcacctsctttatttttctccatattatcattgccatcaatccaagcacaatttccagttacttacccattttgctttctccccgctctttgagaatgctggctcca

SEQ ID NO: 15052 - DNA, 201 bp, Homo sapiens
aagtccctttgaggtgatttctggtccacaaattgaggcaaaataatcctcacaatttcttggatattctctgccccagccccgttctattgcaaaggagscttctctaaaaggcttcccaatgccttagaatctacttaagggtatttttgctggagaaagagctgctgtctttgtccacctgtcgttttcctttctacc

SEQ ID NO: 15053 - DNA, 201 bp, Homo sapiens
agttaaacttgttcctcttctccaatcattgatacttttctctcttgcttcccctccccctgcccttcgacacagagtgacaggcctgaagtaaaaagggwaaaggggaaccgagtgactcagcccagagtgggcctcaccgcagcttcctggccactttctcgctctctccttccaagagagaaaggggaggaagcccag

SEQ ID NO: 15054 - DNA, 201 bp, Homo sapiens
ggtatttcctggcaacctttggtgtttggggcatgttgtcacctcattgccatctctgcctctgtcttctcaccaccatcttccttgtccatgtctctctrtgtcttcaatgttcttcttataaggacaccagtccttggatttagagtccaccctaattcactgtaatcacatcttacctaagtccatctgcaaagaccc

SEQ ID NO: 15055 - DNA, 201 bp, Homo sapiens; identical to SEQ ID NO: 2520

SEQ ID NO: 15056 - DNA, 201 bp, Homo sapiens
aaacaaaacaaatgtcacggtgtggttgggaggaggtggggagagaggcagattttggaggcgaaagatacacagaaacactaaatacctgtctattaatrctgacagtagttgcgtttaggggatgagactctaaatttgtttatttaaattttctcattttaaaaaatgagtcctttcaattatgagatcaaaaagaaa

SEQ ID NO: 15057 - DNA, 201 bp, Homo sapiens
acagagacagatgtatgtacctttcatggacataatttccccaagactgaacacaaaaatgagggtttttggagatctctctggaattaatgtaaacgttrttgaaaacatattattctatggctccttcataaaccctaggccatcccgaggctgtctcactcaggcccctcagccctcataaccccccagctccatagg

SEQ ID NO: 15058 - DNA, 201 bp, Homo sapiens
tcattacatgtgtgtttagcccaccgattattaaggctttaacaatattaaaacctaaagagataacagaggggaagcctttgggagctaggaatcaatcrtgctgggtggcttgaaaacagggcagtaaaatggcagccgcctagcctgtggtctttaatattaataaagccagaggcgatatcacttagttgttccaac

SEQ ID NO: 15059 - DNA, 201 bp, Homo sapiens; identical to SEQ ID NO: 2524

SEQ ID NO: 15060 - DNA, 201 bp, Homo sapiens
ttggtgtctaaagccatgctcagtatatagttatatatttcattcattcatccgttcattcagttatctcacgtttctggagggccctctatgtgcaatasctagtgatacagcagtgaacaaaggaaatccctgccctcagggagctttcattctacttggggaaagagacgtgaaagaaatcaagacatgcaagcaagg

SEQ ID NO: 15061 - DNA, 201 bp, Homo sapiens
gagctattttggaaattctgcacctcaatttctaaaaagttggaaggacaggaaaggggagctgtgtttgagatctcagaaatctgcaccccaccttgctrtccaccactggtattccgtcagtcttactaccccctcccacctctagcccaccctctaccatcctcaccaggaaggaggctgcattcatttcaagaactg

SEQ ID NO: 15062 - DNA, 201 bp, Homo sapiens
gtgtgtgtggaaaaaaggggctttaatcaagctataaatatctgtttctttgaagttttatgaccaacaattaatgttactggaaggcccataaaaagggytgtttcttgacttggtgggtctgagtgggccagggtcgggttaagatgctagcctcgtggggtgccatcctgacagattctactgtgtgcgtgtgtgtgt

SEQ ID NO: 15063 - DNA, 201 bp, Homo sapiens
actggtgtggccgaaggagtgccgtgactcctctgccacctctccacatttggaagattgttttgcagctgcaacctcaaaacagaagcctcctaattacsaggtagctttctagagccaaacaaatgctgttgtttctgacaggtaaatcaagacagggaaatgatgacacattcaccacaactgaagtgttgatggggt

SEQ ID NO: 15064 - DNA, 201 bp, Homo sapiens
ggtgatgtttgaacttaagaatcaaaaacagtgcaagcgctgcatgggggagaacagtctaggcaaggtgaacggaagtgcagggtccctgaggcagaaargagctcagcctctttgttagctagaacaagaaaggggcccgtatggctagcataggatgggataggggatcgtggtggataccagctaggatttcactgt

SEQ ID NO: 15065 - DNA, 201 bp, Homo sapiens
aaactggtccttgtggaagcaacttcgggggaggaggaaagacagggaagaccattttaaggaggtgatgtttgaacttaagaatcaaaaacagtgcaagygctgcatgggggagaacagtctaggcaaggtgaacggaagtgcagggtccctgaggcagaaaggagctcagcctctttgttagctagaacaagaaagggg

SEQ ID NO: 15066 - DNA, 201 bp, Homo sapiens
aaggcctctgacttaacaggacttccgtgatgcgggggaagaagacaataggcaagtaagcaagtaaatatacaagataaatagaaactgtgatgagggarttaaagaaattaaactggtccttgtggaagcaacttcgggggaggaggaaagacagggaagaccattttaaggaggtgatgtttgaacttaagaatcaaa

SEQ ID NO: 15067 - DNA, 201 bp, Homo sapiens
tcatgtcatcctttggatgtcttgcagagctgagtgctgaaataaaatgataaacaagtcaaaaacaaaaaggcctctgacttaacaggacttccgtgatkcgggggaagaagacaataggcaagtaagcaagtaaatatacaagataaatagaaactgtgatgagggagttaaagaaattaaactggtccttgtggaagc

SEQ ID NO: 15068 - DNA, 201 bp, Homo sapiens
ttctcttctccttccaagaaaaaacacccataccattcttaacatctctggaagctgggggtcaggagagggagatccataaagttcttgtcttccccgaytcaagaagcttaagggtacattcactcactcatgaattgactggtttattcattcactggttgattaattcattcattcactggttaattaattaattca

SEQ ID NO: 15069 - DNA, 201 bp, Homo sapiens
tcccctcctctccagccctcacctggttttctcttctccttccaagaaaaaacacccataccattcttaacatctctggaagctgggggtcaggagagggrgatccataaagttcttgtcttccccgactcaagaagcttaagggtacattcactcactcatgaattgactggtttattcattcactggttgattaattca

SEQ ID NO: 15070 - DNA, 201 bp, Homo sapiens
tggtgtggccatggttctcgtacttcaggtccctgtgagcccctggggtcctacacaacttggggtaatgctatggtcacctgcatcccctcctctccagycctcacctggttttctcttctccttccaagaaaaaacacccataccattcttaacatctctggaagctgggggtcaggagagggagatccataaagttct

SEQ ID NO: 15071 - DNA, 201 bp, Homo sapiens
tgcatagacatttgcaccccagggatagcaccattactcccaaaaattgcaggtttgaaagggtacctaaaaacaagccaccagattgtcccattccactrtcattctgccatcaacaccgaggtgtcggagtagcaggagagccacatatttcttagtgaggggacccagaatgatcccttttgtgctagaggatctgag

SEQ ID NO: 15072 - DNA, 201 bp, Homo sapiens
gggaaggagaagggcctttgggactgggtggatgtaacactttctgccacctctactcttcctgctatagattaaaacagaagctctgaattgcagccacwaatcaataatgaaaagctaccagaccaagccctttcttgtttagtgttgtgtcttctgtgtcaacatctctggaacatagtcaatggcagtacccagtag

SEQ ID NO: 15073 - DNA, 201 bp, Homo sapiens
tcatttcaagtcttcctacctttgctctgagttgtcccacctttccagaccgaacgagtgttcatcttgcatatgttgattgatgtctcatgtctccctagaatgtgtacaaccaaactgtgctctgaccactttgggcatgtgtcatcaggccctcctgaggctgtgtcacaggtgcacatcctcaaccttggcaaaata

SEQ ID NO: 15074 - DNA, 201 bp, Homo sapiens
ctggaagccccctcctcatttcaagtcttcctacctttgctctgagttgtcccacctttccagaccgaacgagtgttcatcttgcatatgttgattgatgkctcatgtctccctagaatgtgtacaaccaaactgtgctctgaccactttgggcatgtgtcatcaggccctcctgaggctgtgtcacaggtgcacatcctc

SEQ ID NO: 15075 - DNA, 201 bp, Homo sapiens
atgaaagccagccgggcacagtggctcacgcctgtaatcctagcactttgggaggccgaggcaggcagatcacttgaggtcaggagttcgagaccagcctrgccaacatggtgaaaccctatctctactaaaaataacaaaattagctgggtatggtggtgtgcgcctgtaattccagctacttgggaggctgaggcatga

SEQ ID NO: 15076 - DNA, 201 bp, Homo sapiens
gcctgggaataggatggcaggtcgtgggaccagcattttaattacctaaagggaacttattgattttagtccagaacacggtggggaggagttcatattcwttttttttttgagtctggattttagaataaattcactgtgtacatagctattccatctttaaaaacctttgtgaatgctaatatacagcctttataaatt

SEQ ID NO: 15077 - DNA, 201 bp, Homo sapiens
cctaaccaggatgtgagagacattcttgtcctaggcagcacgttggtggcagaggtgggatctagactgaggctctcattctgtaccctctctggccccarggaaggaaaggggaaggagaagggcctttgggactgggtggatgtaacactttctgccacctctactcttcctgctatagattaaaacagaagctctgaa

SEQ ID NO: 15078 - DNA, 201 bp, Homo sapiens
tcacaagtctatgaatagagtatattacccacttcattttaagtaggaaattgaagctcagggaatcgtagcagagggccccagttcacactgctgatcartgatgcgactgggatcaccacagcccatctggttcagaagcttgttctcctaaccaggatgtgagagacattcttgtcctaggcagcacgttggtggcag

SEQ ID NO: 15079 - DNA, 201 bp, Homo sapiens
cccaaaaattgcaggtttgaaagggtacctaaaaacaagccaccagattgtcccattccactatcattctgccatcaacaccgaggtgtcggagtagcagkagagccacatatttcttagtgaggggacccagaatgatcccttttgtgctagaggatctgagttcatttcatgaaactgaagcatcttcttggagatata

SEQ ID NO: 15080 - DNA, 201 bp, Homo sapiens
tcccaggctggagtgcagtggcatgatcttggctcagtacaacatctgcctccctggctcaagggatcctcccatctcagcctcctgagtagctgggactrcaggtgcatgccaccacacctggctaacttttatttatttttagtagagaggcagttttgctgtgttgcccagactggtcttgaactcttgagctcaaga

SEQ ID NO: 15081 - DNA, 201 bp, Homo sapiens
gcaggagagccacatatttcttagtgaggggacccagaatgatcccttttgtgctagaggatctgagttcatttcatgaaactgaagcatcttcttggagmtataagctcaccttgggataggcccttgcagatgacaataaaggtattttggcacataaaaaaactgctcagcacaccttgtatttgtatttcctttgac

SEQ ID NO: 15082 - DNA, 201 bp, Homo sapiens
aataaaaccaatgagcttaatctacttgtggaatgttatagccggaagggattcatagagatcactctatcgcctaaaattctctcttctacatatctcastgttggaaaacataaatgtgactccaacttgtcttttttgttgtttgtttttgagacagggtctttgtttcccaggctggagtgcagtggcatgatcttg

SEQ ID NO: 15083 - DNA, 201 bp, Homo sapiens
ttagtgaggggacccagaatgatcccttttgtgctagaggatctgagttcatttcatgaaactgaagcatcttcttggagatataagctcaccttgggatrggcccttgcagatgacaataaaggtattttggcacataaaaaaactgctcagcacaccttgtatttgtatttcctttgacgtgaaccatggccatccagt

SEQ ID NO: 15084 - DNA, 201 bp, Homo sapiens
tccatctatttcaggggatgaccagtctgaataaaaccaatgagcttaatctacttgtggaatgttatagccggaagggattcatagagatcactctatcrcctaaaattctctcttctacatatctcactgttggaaaacataaatgtgactccaacttgtcttttttgttgtttgtttttgagacagggtctttgtttc

SEQ ID NO: 15085 - DNA, 201 bp, Homo sapiens
tgtgaaatgggaacatgacttaccatctactcacctcctgtttgagttcaagggaaggtttgcagattggcctgaaggaagacttctcttgaaaaactcawaccaaagagcacaccgccgtccccaaccctgagccatttctgtccttttcatggaaagggaactgtgttcgccagctcgtaaagccccggcgtctcctcc

SEQ ID NO: 15086 - DNA, 201 bp, Homo sapiens
agttttctcatctgtaaaatggagatcgcagtatctaactcatgggtgtgtttaaggattcagtgatggagaaaatagctgaaaagtgaccgtatgaaatragcagcagttgtcaagtacttggcatagttcctgtcacataggaagcatccagtaagtagtggtatctgttgtgattatgatcatattttatttcatgga

SEQ ID NO: 15087 - DNA, 201 bp, Homo sapiens
ccgcagctcctgtagtagttatggtcactgactccgggttcagacggacttggggttcagtcctagctctggcgcttaccagttttctcaagtgactttgrgcatctttactcaaggctcttggtctcagttttctcatctgtaaaatggagatcgcagtatctaactcatgggtgtgtttaaggattcagtgatggagaa

SEQ ID NO: 15088 - DNA, 201 bp, Homo sapiens
gccacgcaacattcccactgccatgttggcttgtttttcttttgttttcttgtcaacataagcctcatgagacaacagcaggatgcaagattgtacaatgrcaccatgactctgctttctgggtgtcctctgtgggctctcagcagtgtccccgatgtggagggtcttcttattctgtgtgtgtgccctctgctgttgaaa

SEQ ID NO: 15089 - DNA, 201 bp, Homo sapiens
ccaaggaaatgaccagcacgtggctcactccctgtctgtccagtagaggacaccaaggcacgatgaccgcagctcctgtagtagttatggtcactgactcygggttcagacggacttggggttcagtcctagctctggcgcttaccagttttctcaagtgactttgagcatctttactcaaggctcttggtctcagttttc

SEQ ID NO: 15090 - DNA, 201 bp, Homo sapiens
gttgattctcttcaaaaacttggcagtagcccttggatcccattaattgcattcaacagtcatgtattttattaatttttgttcctaaagaaaaaaaaaaatccagattgcttagaaaataaatgtgactcacgcagagcagaatccgaattttctaagtgatgaacatgttaacatattattttaatctaaagacatcct

SEQ ID NO: 15091 - DNA, 201 bp, Homo sapiens
ggtggaggttgcagtgagctgagatcacaccactgcactccagcctgggtgacagagcaagactgtctcaaaaaaaaaaaaaaaaaaaaaaaaattcaacwtacgaattttgcgaggacgcaaacatttaatccgtagtactgatgtggatatgatttgagctaagactctgctgttgattctcttcaaaaacttggcagt

SEQ ID NO: 15092 - DNA, 201 bp, Homo sapiens
atttcacagtgtttctagctcccctttccaatacatctctctctctctttctctctctctctctctctctctcacacacacaacacacacacacacacaccgccaaatcagacaccaacataaactgtagagttaacattctttttccaccctcacactttttttagctccgatctgtgttcaatttctgcctgagagagt

SEQ ID NO: 15093 - DNA, 201 bp, Homo sapiens
aaccacacttacatttaaatacaggcctttcccatttcacagtgtttctagctcccctttccaatacatctctctctctctttctctctctctctctctcwctctcacacacacaacacacacacacacacacagccaaatcagacaccaacataaactgtagagttaacattctttttccaccctcacactttttttagc

SEQ ID NO: 15094 - DNA, 201 bp, Homo sapiens
aaaaccacacttacatttaaatacaggcctttcccatttcacagtgtttctagctcccctttccaatacatctctctctctctttctctctctctctctcwctctctcacacacacaacacacacacacacacacagccaaatcagacaccaacataaactgtagagttaacattctttttccaccctcacacttttttta

SEQ ID NO: 15095 - DNA, 201 bp, Homo sapiens
ttgaaattttttatactatgttctattgggaaccatttcagggttttgagatatagtatgatataataacagctatgctaaattctttgaagttattggtrgtggaatatcaatccagaatgaaaataaataattttggaaatgagcctgtcattgaaatatactttatttctcgttaaatgtcccagcaaaagtattttg

SEQ ID NO: 15096 - DNA, 201 bp, Homo sapiens
ctttattattttaatggagtgcaaggtgcagtctttttgaagatgtagaatgtggccttataaaagctaagtgctactttatatttctgctgtccttgccsgtggcctgcactggggagttgtatattgtatcagtaattttaaaagccagcaagtgttctaccagctgaagaagttttcctaatggtggctggtcaaacg

SEQ ID NO: 15097 - DNA, 201 bp, Homo sapiens
tgaactgaagtgctaatgtgaaatgttcatgatggtacccgagtacttgcggtggtacctagcgtgtgctttccaagtgctggcaaagaaaagaaaagaawtgcttggggctctgcctacctgtctaggctcctgtctggccattctctttcttgttccaaccatatcaaactcactgctgttgctaaaccttcctgtctc

SEQ ID NO: 15098 - DNA, 201 bp, Homo sapiens
ttaatatcctcaaattaaaacatacgtttttaaagaaagattttgcagacttttaagctgggcaactgtctgccttacaagatgcgtctggaaaccccagygccatcctccttttttagtcttgtatatttatgtatccccggccagagttggctggggcacagtctaacagtgtcaccgtgtaagctgacccagtgacct

SEQ ID NO: 15099 - DNA, 201 bp, Homo sapiens
ggaatttattttaaattacagctttttctattggaagcattcatttatgttggattattgttccctgagtgaaatttcactgatgctgtataattaaatayagatttttttagagatagtatatattttagatgtataagtggataaactggaggtatggaaggtctttatttaaggagaataaatagcccaccccatcaa

SEQ ID NO: 15100 - DNA, 201 bp, Homo sapiens
ggctgggcacggtggctcactcctgtaatcccagcactttgggaggccaaggcagatgggtcacctgaggtctggagttccagaccagcctgaccaatatwgtgaaaccccatctctactaaaaatacaaaaagttagccgggcgtggtagcacacacctgtaatcccagcaactcgggaggctgagacaggagaattgct

SEQ ID NO: 15101 - DNA, 201 bp, Homo sapiens
tgactttaagccttaatgaaactaaggccggagcgggtggcacactccgtggctgggatccacagtgaaatctacgctgggagaggaggaatttagggtgrtaatttggttctttgctattgacgaaattttctaattgactggggttacttaataccagataatatttttttcttgctataaagagagtaaatttgtttt

SEQ ID NO: 15102 - DNA, 201 bp, Homo sapiens
agggtcattcatgttgtagcatgtatcagtacttctttttttagggctgagtaatattccatttacggatatgccacatttcatctatgcattcagttcayggacatgtgggttgtttccacattttggctattgtgcataatgcttccaggtacacttgtctacacatttttgtgtggatataggttttccttttttggg

SEQ ID NO: 15103 - DNA, 201 bp, Homo sapiens
ccactgccatgttggcttgtttttcttttgttttcttgtcaacataagcctcatgagacaacagcaggatgcaagattgtacaatgacaccatgactctgytttctgggtgtcctctgtgggctctcagcagtgtccccgatgtggagggtcttcttattctgtgtgtgtgccctctgctgttgaaagttgcctgtcaccc

SEQ ID NO: 15104 - DNA, 201 bp, Homo sapiens
ttttctagaaggtggtattttgcatattaatacttgcttaaatcaagaagctaagactttgtattatattttgctttacgtgccttgattaaggtcatgaycctgacattccagtcccaaaggagaccaaggaaatgaccagcacgtggctcactccctgtctgtccagtagaggacaccaaggcacgatgaccgcagctc

SEQ ID NO: 15105 - DNA, 201 bp, Homo sapiens
caacagcaggatgcaagattgtacaatgacaccatgactctgctttctgggtgtcctctgtgggctctcagcagtgtccccgatgtggagggtcttcttaytctgtgtgtgtgccctctgctgttgaaagttgcctgtcacccatgatgctgtgctgattgagcaaactaatccataacccaccgccacgttcctcgccta

SEQ ID NO: 15106 - DNA, 201 bp, Homo sapiens
tcttctttagaagtcatcaatggtaagcctagggcagcctgaaccacttgtgttagaaatattttttataaagcaggacatgtgctttgaaatttgattcstccgtcactggctgtgtgaccttaaagaaataaattgacctgcctgagcctctcggaaatattggctggccagtagcatcctcacagagtttttctggga

SEQ ID NO: 15107 - DNA, 201 bp, Homo sapiens
atgctaaggtaggagaatcgcttgaacccaggaggtggaagttgtagtgagccaagatcgcatcactgcactccagcctgggtgacagagtgagactccakctgaaaaaaaaaaaaaaaaaaagacatttacattttatctttactgtagctatggctgcctatcccaaggatgggaagtctgaagttcaaactggtgatg

SEQ ID NO: 15108 - DNA, 201 bp, Homo sapiens
ctgtacaaaaaatataaaaatgagctgggtgtggtggcacatacctgtagttccaactgctcagaatgctaaggtaggagaatcgcttgaacccaggaggyggaagttgtagtgagccaagatcgcatcactgcactccagcctgggtgacagagtgagactccatctgaaaaaaaaaaaaaaaaaaagacatttacattt

SEQ ID NO: 15109 - DNA, 201 bp, Homo sapiens
ggtggctcacgcctgtaatcccagcactttgggaggccggggcaggcagatcatgaggtcaagagatcaagagcatcccggccagcatggtgaaaccctgyctgtacaaaaaatataaaaatgagctgggtgtggtggcacatacctgtagttccaactgctcagaatgctaaggtaggagaatcgcttgaacccaggagg

SEQ ID NO: 15110 - DNA, 201 bp, Homo sapiens
ctaaaaaggtaatcattttataagtacctattatgtgccagatactaggataggcactttgcatagaaactcacatttcgactgggcctggtggctcacgyctgtaatcccagcactttgggaggccggggcaggcagatcatgaggtcaagagatcaagagcatcccggccagcatggtgaaaccctgtctgtacaaaaa

SEQ ID NO: 15111 - DNA, 201 bp, Homo sapiens
ccaaaccataccactcatggcatctcgtttttacagagtatatgtgttttcagattttgcatgacattttaggataaatgtgatgaaaatgaggaaaattrggaatgaagtttaggtcagaaaagtttcagtgattattttttcagaatcattgtttcttggtttctagggtccaacatgccattgttcaatggctgtatt

SEQ ID NO: 15112 - DNA, 201 bp, Homo sapiens
gcatttatctttgatgctgggaatgcgttcattttctttatcttgccattactgtacctctattgggaaatttactctctcttcatagataggatccgathcagtacatatttataaaaccacacttacatttaaatacaggcctttcccatttcacagtgtttctagctcccctttccaatacatctctctctctctttc

SEQ ID NO: 15113 - DNA, 201 bp, Homo sapiens
aaaaaaaatccccaaaaaatctcataatgttttaagaaagtttatgaatttgtgttgggccagattcaaagttgtcctgggccgcatgtggcccaccagcyatggtttggacaagcttagtctacaggttcttcaagaggggcttgagcatttgaaagacttctagtgggagagatcacaaggtacaagtagaaaatcctg

SEQ ID NO: 15114 - DNA, 201 bp, Homo sapiens
atgctttgtaattttttttaaggattgatactagctagggtgttgataagaaacagcaggcatagttactgggtgattgagaagagtttaacaaaagactrtattagtctgttttcatgctactgataaaggcatacccaatactaggtcatttacaaaagaaaaaggtttattggacttacagttccttgtggctgggga

SEQ ID NO: 15115 - DNA, 201 bp, Homo sapiens
gcaatctatggtctttatcacttctccattaactgtccttgttttattaatgctgattactttttgatttggtttggttctttggagttgtttgcatttcrtgagtcttggcatctttttggtagagaaccttgctaggttctcacaatgtagaaattaagcagaaaacagaggtctcaatttgccttttcagcgtgaatg

SEQ ID NO: 15116 - DNA, 201 bp, Homo sapiens
ttcattctgtttctttattattttaatggagtgcaaggtgcagtctttttgaagatgtagaatgtggccttataaaagctaagtgctactttatatttctrctgtccttgccggtggcctgcactggggagttgtatattgtatcagtaattttaaaagccagcaagtgttctaccagctgaagaagttttcctaatggtg

SEQ ID NO: 15117 - DNA, 201 bp, Homo sapiens
ttataagttacattttacataaaaaggcagcagtggtgaagctggaagagggcacctagactttgatttcaggcaagattttgttaggtcccagtattggracttccggttggtggattttgctcaagaatagttttctctttgtctaacgcttcatgagagacaacctaaataaagccacagccagtgttacagaaatag

SEQ ID NO: 15118 - DNA, 201 bp, Homo sapiens
caatcatatttaaatcattgctgctggaactttagttgactttataagttacattttacataaaaaggcagcagtggtgaagctggaagagggcacctagrctttgatttcaggcaagattttgttaggtcccagtattggaacttccggttggtggattttgctcaagaatagttttctctttgtctaacgcttcatgag

SEQ ID NO: 15119 - DNA, 201 bp, Homo sapiens
aaacagggttagtaaaggcctcagagagaagatgtcctttgagctgagtcttgagactccagagatcaggactcaaggactgtggaacctgtacattcacrtcctggtaatcttacattgctcagaagactccagggacattgaggttgcccccatggagttgaaactcctatgctgatcacttaggaagccaagaacaaa

SEQ ID NO: 15120 - DNA, 201 bp, Homo sapiens
tgatgattaatacaactaataaatagtgcattagtattataggcacaaaagacagtatgaagtacagcacagatcatgaggagggtagggtcagttctacrtaaaaacagggttagtaaaggcctcagagagaagatgtcctttgagctgagtcttgagactccagagatcaggactcaaggactgtggaacctgtacatt

SEQ ID NO: 15121 - DNA, 201 bp, Homo sapiens
atggactgcattccatgcctggcactgtgcctatgatttattaaaatctaaagccattaataaataaattattcaatccatgcattgaattatctagctcwttcaaagacagtcacagtccatccctcaaagagctcatggaccagtcgaaggagggtgacagcctgggtcaaattggtgctgagcacacaggcaggggtc

SEQ ID NO: 15122 - DNA, 201 bp, Homo sapiens
tctttgaaagttgtccttctgcacccattttccccagacctaacctcgatttgtgctccaggtctgagcagaaatgttattccctccagaaagccttcccyggatgttgagggatgaagttgtagccccctcccgaatgcgtcctcagaactcgctggttctcgtcctcgccctcagcatacttgctcattgtttgtttcc

SEQ ID NO: 15123 - DNA, 201 bp, Homo sapiens
tgattattttgctctttgaaagttgtccttctgcacccattttccccagacctaacctcgatttgtgctccaggtctgagcagaaatgttattccctccaraaagccttccctggatgttgagggatgaagttgtagccccctcccgaatgcgtcctcagaactcgctggttctcgtcctcgccctcagcatacttgctca

SEQ ID NO: 15124 - DNA, 201 bp, Homo sapiens
tggcccaccagccatggtttggacaagcttagtctacaggttcttcaagaggggcttgagcatttgaaagacttctagtgggagagatcacaaggtacaastagaaaatcctgggctggcctgagaggcagacctgtgattattttgctctttgaaagttgtccttctgcacccattttccccagacctaacctcgatttg

SEQ ID NO: 15125 - DNA, 201 bp, Homo sapiens
tcaagatgagtgttatttggcagaggaagatgatgcactgcttattttaggggatgccctcacttttgggtccctatgtcacctgtgtgtactccatgccrgtgtcttcccagcccctgccaggcaagttcgtgtggttctgtgataaccctcatctctataggttctgtgataacgctcctctcactgtgctgctccttg

SEQ ID NO: 15126 - DNA, 201 bp, Homo sapiens
gttttaagccagagagagattgataagacatggaatgatatggtgtgatatatgaaatgacatgtttgaaatgatagatgacgtgattgtgatataatatsatgcggctgaggacaacactataactgctcggtagagaatggattgtcatggcctgggtgtggtggctcataatcccagcactttgagagctccaggtgg

SEQ ID NO: 15127 - DNA, 201 bp, Homo sapiens
attggcttggctcggtggttgggatggtttggctcttactgggcagtaagcacagtggctgggataggaccttggcatctcgtgcgaagcccctctgcctkgagtcctgcctctgtgacacttgcttactgtgtgacctgggtcaactcatacctactgttcgtcagttttctcatctgtaaaatggggattccagtggtt

SEQ ID NO: 15128 - DNA, 201 bp, Homo sapiens
ctgctccaatgaggatgaaaatgtctttcttatagatgggacaggagccttagtaatatggtgcgagcaatggttcacataggggacaggtgttcattcartggtgggtattattataataatcattagcatcattgctagtgactttatttttcctttagccaatggagcagtggcttttggcccactactttcgactga

SEQ ID NO: 15129 - DNA, 201 bp, Homo sapiens
gagaagaagagtgacagagtcaccaactcactccatcaaatgtggctgtatttttagaagtgtctggttcctgaaatacctcaattccttttgcctgcctrgctcctctcctctcttctgcctgttcattgaactgaaagattatcaggactgtattcagcccggccaataatatcacaaaacaaaaatatcttgtgggtt

SEQ ID NO: 15130 - DNA, 201 bp, Homo sapiens
tgtgatctgtctacatatgtagctgtttgtattcatggtgattaaatagttgggtgctagacatgcccttagcgagcagctcatgagagcagattttgccwgtttcttccaaaatctggattcagtgacatcgtgttggtagcttgaaactgaccgtggtgagaatatttacaccatggaaagtggcaaatgctactaata

SEQ ID NO: 15131 - DNA, 201 bp, Homo sapiens
ggtagaattcacaaagctggttttatgtctccttctcttcctcttccagtgttgtcttttccctgcattgagatagcattgcatggagatccttgtactcytcgaacagaggctgcagatggacacaggatctgctcagggagataagatcacctgctaattctgctttctccatcagagtctgaatgatcagtgatgggg

SEQ ID NO: 15132 - DNA, 201 bp, Homo sapiens
cttgctatgctgcccaggctggtctggagctcctggcctcaagcagtcctcctgctttggcctcctgaagtactgagattacgggtgtaagtcaccacacscagcccagaggccttctttaaatgctagtcctttttctcttcctccatctgggtcttggttccatgcgtattcagtttgtgaaaaatttgagtcgtgcac

SEQ ID NO: 15133 - DNA, 201 bp, Homo sapiens
tgtagtggtgtgatctcagctcagtgcaggcttggcctccagggctcaagcagtcctcccatgttgacctcctttgtatctgggaccacaggtatatttcmccatgcctggctaatctttgtgtttctgtaaagatgaggtcttgctatgctgcccaggctggtctggagctcctggcctcaagcagtcctcctgctttgg

SEQ ID NO: 15134 - DNA, 201 bp, Homo sapiens
tcagtggagggtcagcgtgacagccttttgcacccacatctgggttcttgtccagtgtccaggaggaatgaggtctcatgagcaaattttaaggatggcaratgtgggggattttattgctgatgaaagtggctttcactgggaagataagctaaaaagaagacaaagcaggaaggtaattttcccctggagctatgccat

SEQ ID NO: 15135 - DNA, 201 bp, Homo sapiens
cctcacatttgcttgcagccagtgctcaaaaccatagacaggcagtgtccccaaccactccctgcgtttctctttctttgccttccgaagctgccatcttrgtggtttttgaagcatcaacacttacttcacatgcagaggccccttttatttatttatttttaatttttttgagacagggtctcgctctcttgctcaggc

SEQ ID NO: 15136 - DNA, 201 bp, Homo sapiens
gtgagccctcttactgaattatgtggctggggttcttgggtatgttttgttctattttctggttggtggttttctttctgtcgggtcccgtgggctctttytggacctcttctcagaatgtttttcgttttttttattttttgagatggagtcttgcactgtgtcctgggctggaatgcaatggcaagatccctgctcact

SEQ ID NO: 15137 - DNA, 201 bp, Homo sapiens
ttaacattctttggcagttgtaatttattaattgatttttaaatttggccggtgaaaatgaactttaggtaggggtttgaggaaaatgaaaaggcctattkgtttttcagtggctggttcttcgtgttcagcattaaggattggtagaaatcaggcaacctctatgtaacctcagccatcttggattcccagcttactcac

SEQ ID NO: 15138 - DNA, 201 bp, Homo sapiens
atgaaggttgtgattcagttgcccaagcagtaaggcctgactggtgtcacgatcccacaacccgcacaaaggcgccattgttgcccagtgtgaagggagctgaggcatcaccaaagggggccaagcgtcccttctctgggttagaaatgttgttttccatttgctggtaaacaacagtccaagttcattgtcctgacacag

SEQ ID NO: 15139 - DNA, 201 bp, Homo sapiens
atactacatttcatcaggtagtgttagaaatttaggctgagccaaaaaagaaaagggaggaggtgggagggaggaagcaacgagtcccttgttcaggcggyattaacccccttaccctggctattggaacaatagcgcttctaaaagccgcacaaaatcctccaatattaagaacggagaaaaggagtgtggaaaaggtgt

SEQ ID NO: 15140 - DNA, 201 bp, Homo sapiens
agccccagtaaccctaagattgaacaaaaccctacttacgtgctacggatttaatatagcgtcaggctcctctaggtacaataaaataccaagttaagagyattaattccttacaaccctgatgggtcccagctgtgcacacgcatgtagggtgtgagggtgtgtgctcagcgggcacaggtgctgacggggctgttccac

SEQ ID NO: 15141 - DNA, 201 bp, Homo sapiens
atcagaaaagaggtcgtgtgtgtgtttgtgtttttttaatatcccatccagcccccagccccagtaaccctaagattgaacaaaaccctacttacgtgctwcggatttaatatagcgtcaggctcctctaggtacaataaaataccaagttaagagcattaattccttacaaccctgatgggtcccagctgtgcacacgca

SEQ ID NO: 15142 - DNA, 201 bp, Homo sapiens
ctgaagcttcaaatatgaacccttgccaccagctgcataaatatgatagccaaagggtttcaaatttgtgatttgtcataaacgctcctattgcaggctgrgtctagtccttcttgactttgtggaaggagaaggcttgaggaagtattcacaattggagaagggcgccttctgttatgttcttagctcactaaaagtggt

SEQ ID NO: 15143 - DNA, 201 bp, Homo sapiens
aacttgtgtagggaaactctcccttatgataccgtcagattccttgagacttatttgctattgtgagaacaccttgggaaagacctgcctccatgattcarttacctcccacctggtccctcctgcaacatgtgggaattcaagaagagatttgggtgggtacacagccaaaccatatcaaaaaccatttacaaaactcta

SEQ ID NO: 15144 - DNA, 201 bp, Homo sapiens
ttcagcagtctgcctttccctttctgttataaaatcatgtttttattgaattacattttaatattggtatcactttaaaatgaaaatgagtacttgcaaamtgtatttttgaaggagttgggtggtggtggggggatgccattttggcaacagatgacttcggttcaagtcctctctctgtctcttacttgctttgtggct

SEQ ID NO: 15145 - DNA, 201 bp, Homo sapiens
cttctaagcacttcttaggtgcctctgggctttttaacattctttggcagttgtaatttattaattgatttttaaatttggccggtgaaaatgaactttargtaggggtttgaggaaaatgaaaaggcctatttgtttttcagtggctggttcttcgtgttcagcattaaggattggtagaaatcaggcaacctctatgta

SEQ ID NO: 15146 - DNA, 201 bp, Homo sapiens
ccatgtatgtgtcagtcctactatgcaccttacagctcactaaccctgtttaataatgtatgttgctacatttaatctttatggtagcctcatgaacaggytcttatttagttcagtggttcttgatcaggagtgatattgcctgccagggaatgcatgtcaatgtctggagacatctggggttgtcagttcaggagggta

SEQ ID NO: 15147 - DNA, 201 bp, Homo sapiens
aaaaaacaaacaaacaaacaaacaaaaaataggaaaaaaagaaagagcgtatttatagatggtagagaattctgggcatgagaaacccagccaaacaagtrgaatgtgtgcataggtgggactgctgatcttgttttatgaaagaaataaaggcaagtcaaacagatcctttcgcaaggatccccatgtgtgtatgtctaa

SEQ ID NO: 15148 - DNA, 201 bp, Homo sapiens
actgtaaatgcacgagtattgatcacaattattccgtaaacacatcttacaaattccctcagtgcacgcgccatctaaattaatccaaattcagaacaaasctctcttggaaaaggaaagagcatctctttcaggagcttccctcttggacattaaatcttccataatctgtgctagttcggcaaagaagccccaacgtcc

SEQ ID NO: 15149 - DNA, 201 bp, Homo sapiens
cgcttaaaaatgtgtttttatagtgccattcctatataacatcgtctgataaatgtatttgagacgaacaggccaaatgaaagaaccttccataaggggaygcagcacagtttgaatataagtgttccctccaattcccatgttagtgctttactatgagtattgaccagtgttaaagagtgagcgcacaggagccttctc

SEQ ID NO: 15150 - DNA, 201 bp, Homo sapiens
gcactttgggaatacgaggtgggccaatcactgaggtcaggagttcgagaccagcctggccaacatggtgaaaccccgtctctactaaaaatacaaaagtkagtcggggttggtggtgtgctcctgtagttccagctacttgggaggctgaggcaggagaatcacttgaatccgggagccagcggttgcagtgagcttaga

SEQ ID NO: 15151 - DNA, 201 bp, Homo sapiens
tggtgggtcatgcatgtaatcccagcactttgggaatacgaggtgggccaatcactgaggtcaggagttcgagaccagcctggccaacatggtgaaacccygtctctactaaaaatacaaaagttagtcggggttggtggtgtgctcctgtagttccagctacttgggaggctgaggcaggagaatcacttgaatccggga

SEQ ID NO: 15152 - DNA, 201 bp, Homo sapiens
aataaaaaataaaataaaaaaataaaaataaaaataaataaaaagtagttgggcgtgtgttgtggagcatgtgggggtcccagctacttggcaggctgaascaggaggatcgcttgagctcaagaggttgaggctgctgtgagctatgatctcacctctgtactacagcctgggtgacagagtgagaccgtgtctttaagt

SEQ ID NO: 15153 - DNA, 201 bp, Homo sapiens
atcagtgtggacaacatagggaggtcctgtctctacaaaaaataaaaaataaaataaaaaaataaaaataaaaataaataaaaagtagttgggcgtgtgtkgtggagcatgtgggggtcccagctacttggcaggctgaagcaggaggatcgcttgagctcaagaggttgaggctgctgtgagctatgatctcacctctgt

SEQ ID NO: 15154 - DNA, 201 bp, Homo sapiens
ttgcctaggctggagtacaatggcgcgatctcagctcacagcaatctctgcctcctgggttcaagcgattctcctgcctcagcctcccgagtagctgggawtacaggcatgcgccaccatacctagctaattttgtgtttttagtaaagacagggtttctccctgttgttcagggtggtcttgaactcctgacctcaggtg

SEQ ID NO: 15155 - DNA, 201 bp, Homo sapiens
gctgagaaaggattcccagtccccctggtaaaaagtctgaaggatgccgaggagttcactgtgcccttagataataacagtttgtcttggctctgatcacycctttttgtgacttagctggctgggaagtagcaaaagtatcttccaagctcagcttctctctgcttgcattctttccaaatacgtgattccaaagcccat

SEQ ID NO: 15156 - DNA, 201 bp, Homo sapiens
caaagccagcaacagaaactctcttgtgcatggagtcccctcctgctttgaatctctctgactttccttgactttgatgtctaggtctggatttcaagggytcagaaactctctcatgcatgtagttccctcctgctttgaatctctctgactttccttgattttgatgtctaggtctggatttcaagggctcacgtgatg

SEQ ID NO: 15157 - DNA, 201 bp, Homo sapiens
ttttttttttttttttttgtttttcctcccagcctctctcctttcccattatgcacaatgcgctgagaaaggattcccagtccccctggtaaaaagtctgraggatgccgaggagttcactgtgcccttagataataacagtttgtcttggctctgatcacccctttttgtgacttagctggctgggaagtagcaaaagta

SEQ ID NO: 15158 - DNA, 201 bp, Homo sapiens
tccccactttcaggctctcctttcacacgcatgcattaattcgttcattcttggaatctacccacctgtgatgtgctagttactaaagatgcagcaatgartgaaaggtaatcctgtccttgaggcattcacaggtaaagaagcctgcttgggacattgggccgtgagctccaacaatgtcactattcttctaggctttgt

SEQ ID NO: 15159 - DNA, 201 bp, Homo sapiens
tattcctttccaacttccacttgccccaaataggtagaagttagcctttatttttggtgtcatgtcttctttccctcctcctatcagtttttcagaaactscagaaatttaacctagtacacaggggccccccacccctgtttccagatgccttctagaaagaggactgggagtgtgaatgaggccatgtgggctttgttt

SEQ ID NO: 15160 - DNA, 201 bp, Homo sapiens
atttatgacttggcttacaatccgttgcagaaagcctagctccccagcttctcctgaatctacgtttttctattttgtctgaactagccaaggtctctggwgtttgctgttatattgcttcagagaaattagtgacattgaaaggctgttgtcttttttagtgtacttttggttgttaggagaaatttacaaggccatttt

SEQ ID NO: 15161 - DNA, 201 bp, Homo sapiens
caccacccaagttgtaagatggtagagcgaacaggccagaatgtgataaagtaaaatgaaagaagaaaaaggaggaaggaaaaagagagagggagaagcasatagaggaaagaaggaagaaggaaggaggaaggagggagggagggagacagggaaggaaggaagtctggcaagagggcacagtcagacctgccaggatcc

SEQ ID NO: 15162 - DNA, 201 bp, Homo sapiens
aaagcaaagccaatagagatcttgaaaaaaaaaaaaaaaagaaaaaaccaccgtggtattctaggaagaaaaaagcatttttcgaatgaaaactttttatkatatttgatatattctgcttcccttccctagtatgtattaatgagatgaaatcacttcttaattttcaggttaatattaaagttgaagcccatccctcta

SEQ ID NO: 15163 - DNA, 201 bp, Homo sapiens
tcctcctcaagggaaacattcttctcacaatagcttcctggtagaaagttctaactaatgactttaatcgtgtgaatgtattgcagaaatggacaggacarttctcagcccattcatcttacagacctcaagtgaacaggcacaaaacaacaggctccaccctccttcccccctctatctcatactttacctcaatttatg

SEQ ID NO: 15164 - DNA, 201 bp, Homo sapiens
cattctatcaatgccaaaatgcacatcacactgacaacagctctttgtttacaccggggagcccccaaagccccagggtaattccatcaccacccaagttktaagatggtagagcgaacaggccagaatgtgataaagtaaaatgaaagaagaaaaaggaggaaggaaaaagagagagggagaagcacatagaggaaagaa

SEQ ID NO: 15165 - DNA, 201 bp, Homo sapiens
caactgttctctgcacgacctagttctgggctagggaatggctgtctagcttcagtggatttccagggtccggagctactaaaggtcaacagctgtgttaytgcaaactctgtggcctgcattctatcaatgccaaaatgcacatcacactgacaacagctctttgtttacaccggggagcccccaaagccccagggtaat

SEQ ID NO: 15166 - DNA, 201 bp, Homo sapiens
tttcctgcatcagctaagcatttatttcatgtagtcctcacactagattgagtggttccatattaatatcctacgtcaaagatgagtaaattgagatgcgkaggttctaatttgcccagtgtcgtggtgtgtgatcttgaccactagcctaaactgctattttatgtccacccatcaacctctacggctgcccctcatttg

SEQ ID NO: 15167 - DNA, 201 bp, Homo sapiens
ccagcccgttatgtcgcaagggctttgggaaatctcaatttattgctagcctggtagatattgagcagggtgtgatcctgttattgggctttcagactttmgcttagcaacctcattgcacccaggacccccatttaatcagcgactcctatggctgtttgggggctctctttcaaataattcttctcacccatgaacatc

SEQ ID NO: 15168 - DNA, 201 bp, Homo sapiens
cagtttctttaattttttttctcttctaacagaatctagaaatgtagattgtgtgtgcgtgtgtgtgtgtgtgtttgtgagagagagagagagagagagagagaaatctttaggagttttaaatattggcaactaattcaatttatttctgtttttaacatattgcaccaaatacatgggtatgggccgaaaataacatga

SEQ ID NO: 15169 - DNA, 201 bp, Homo sapiens
tgacctcaggcagtctgcccacctcggcctcccaaagtgctgggatgacgggtgtgagccaccgcaccaggccatttcctcagttttaaaaagcaaataasaaacaacaacaaactgcatcagagtaaccgtttcaaaaacccatctcaggtctgttttttcttttttttttaagttagcattttctagaagttttggtat

SEQ ID NO: 15170 - DNA, 201 bp, Homo sapiens
tggcataatttagccagataaagtgcccacctagcactcatcccacctcctcactcctctatcctgtgaatgcagaaatacaattcctcatttacaaacarctgtgcatgtagggttgcttgcaaaagttcgtcgtgtgccgatatttcattaccacttttgccagcgctctcgtctgcatttcctgaggtttttcttttt

SEQ ID NO: 15171 - DNA, 201 bp, Homo sapiens
ggatcgcttgcatccaggaggttgaggctgcagtgagccatgactgtggcactgcacttcaacgtgggcaacagtgtgagaccccatctccaaaaaaaaaagcagtatagtcagtaagaaagaaaacaaactaacagtcaatattgtggctgctctcaatgttctttaaacggatcacattgccacttttttctctttgta

SEQ ID NO: 15172 - DNA, 201 bp, Homo sapiens
tttggttctttaacattctcttcttcactaaacccaaattaataattccttactattgtcattaaaagttctcactggatcattccatttatactcagagkaacaaagcaaacccaattatttgagagacactgaaatgaattttgagtctagaacagcatctgcaaactttgcaaaggttcacatgataaatattttctg

SEQ ID NO: 15173 - DNA, 201 bp, Homo sapiens
gagataaaatgggtaattaacaaatgtaatccctcccacccaccccccacattatttatttatttatttatttatttatttatttatttatttttaccatrtctgttactccatcagtcaggatccagttaggagacagaaactatatcataattttaacagggaagatttaatattaagaattattagctacaacagggt

SEQ ID NO: 15174 - DNA, 201 bp, Homo sapiens
ctttggttctttaacattctcttcttcactaaacccaaattaataattccttactattgtcattaaaagttctcactggatcattccatttatactcagartaacaaagcaaacccaattatttgagagacactgaaatgaattttgagtctagaacagcatctgcaaactttgcaaaggttcacatgataaatattttct

SEQ ID NO: 15175 - DNA, 201 bp, Homo sapiens
tctttatttcaaaaagagtggctgtgaatctttaaaaatttctttggttctttaacattctcttcttcactaaacccaaattaataattccttactattgkcattaaaagttctcactggatcattccatttatactcagagtaacaaagcaaacccaattatttgagagacactgaaatgaattttgagtctagaacagc

SEQ ID NO: 15176 - DNA, 201 bp, Homo sapiens
attaaaaagatacatgacgttgaaatcagtgacagaggcataaggctccttgagggaagaaaccaggtgttggccataaaaaaattatttttcacagcgcycagcaaagggcttgtatgcaaaggaccctcagtataagctggttgttgactgatgtgtttcaagagtaagtcagaaaaataaaaagaaggcagggaaaga

SEQ ID NO: 15177 - DNA, 201 bp, Homo sapiens
cgtagtactgatgtggatatgatttgagctaagactctgctgttgattctcttcaaaaacttggcagtagcccttggatcccattaattgcattcaacagkcatgtattttattaatttttgttcctaaagaaaaaaaaaaatccagattgcttagaaaataaatgtgactcacgcagagcagaatccgaattttctaagt

SEQ ID NO: 15178 - DNA, 201 bp, Homo sapiens
actaccttgggaaatgactctgtatcaagcgtttaccatctgctgaaagctttgcatactctgttgcttatcatgacaactgccctgaaagttgggtgtamttgttacccctttccagattaaaaaacctaggggtcagagaggttaagtaacttgctcaagacctcacagtgaactgtggtggaccactgggattagaac

SEQ ID NO: 15179 - DNA, 201 bp, Homo sapiens
tagtcattaaatatattcacaatgttgtgtaaccatcagcattacctatacctaaaatattttcatcacatcttttaaaaaataactgccccttcctcacwtccccaagcttgtggtctctggtaacccctactttactttctgcatctatgaaattgttttcaaggtcaatccatattgtagcatatatcaaaatttctt

SEQ ID NO: 15180 - DNA, 201 bp, Homo sapiens
cctcacacgtttgctaatgtaagaagtgctggctctgctcttagcctgcagtggtgcagcttaaaaattctgggagggtttcatgcagtaaatacttaaartaacagaaaaggactggggaaaagctgatgttgtagctgtatgatcacccatgtaaaactgtttatttagttatttatttatttatttgcttttttactt

SEQ ID NO: 15181 - DNA, 201 bp, Homo sapiens
ggaaggggcactcagctgttacctcctgtcataggaccattcctcactgtgccatcatattatacttccatatcgtgtgtcttgtggcattcctgggcctrcagtgagcctgtggccacctcatagtcttgttggccacagcctctagaaccagggattggaggaacagccatcgctagcatggtgcttggcactgagcgg

SEQ ID NO: 15182 - DNA, 201 bp, Homo sapiens
ggatgccatgcttggtgagaaatgaattcgtaagtgtgcactgtctgccataaagagccaggcaaggcacagaaaatattcttctgtttctttttctattstaccctctctctgctttttcttctctcactgctgctgaagcagtgagagcctgttgagttaaaataagccagtgaggattttggtggtgtttgcccttga

SEQ ID NO: 15183 - DNA, 201 bp, Homo sapiens
ttgagaagggccctgtccgcagcctgaggagcctcaactgttctctgcacgacctagttctgggctagggaatggctgtctagcttcagtggatttccagrgtccggagctactaaaggtcaacagctgtgttattgcaaactctgtggcctgcattctatcaatgccaaaatgcacatcacactgacaacagctctttgt

SEQ ID NO: 15184 - DNA, 201 bp, Homo sapiens
gaaaattcaaaaaattgcaacctgaggcataaatgggttttaagctccatacagtaaaacctagcatatgaaaacagttctggctgatgggttggtagaartgatagatatagatacatatatacacatatatgcacagtaatagatataggtaaagaccttgatatatgtacatatattgtatgatacatatccatgcat

SEQ ID NO: 15185 - DNA, 201 bp, Homo sapiens
tatatcctaccgctcaaagccatcaccaaggtctgatcgtgaaaattcaaaaaattgcaacctgaggcataaatgggttttaagctccatacagtaaaacytagcatatgaaaacagttctggctgatgggttggtagaagtgatagatatagatacatatatacacatatatgcacagtaatagatataggtaaagacct

SEQ ID NO: 15186 - DNA, 201 bp, Homo sapiens
gatattttctactatggatgaatgctcctcttttgaattttcatttttgtctgacataactcaaagtgcttgctttgggagttcttgttaaccctgacaawtcttgtcaaatatcttactcctgggctgtgctggggatggcagcagagtggggtggttggatgggaaggcgggaaagagctagcttggagatgatacgct

SEQ ID NO: 15187 - DNA, 201 bp, Homo sapiens
aacctttttgatgcctccaggcaatttcctacaagctctaatatcttcctctttactcccatatgtggtatctctggtaccctatatatcattcactcaastgtttgttttgaaccacttattttggcaagacttcttcagacaggagagccctgagagctcttcaaaggctgggcctgatggtgtttgtcagagaggttc

SEQ ID NO: 15188 - DNA, 201 bp, Homo sapiens
aaagttaccttgatagttcaggtgtgcagagaaaattcacagccatcaatagaaaagaaaaaaaaatcctgtttataccttaggcattctgtgatccttasgatgtagccatgacagtattacgggttttaaaagccacccaagtaatctaaatttcctccaaactaacaattcctgaaagattgaaatattgctaccaat

SEQ ID NO: 15189 - DNA, 201 bp, Homo sapiens
tgtcctgtcgctgtcacaagtttttaataagggctgggggtcctcttgaagagcccaggaactgcagtccctcctctatgccttcccctgaacacagtgcrccctcactaataaattctgagggctgacactgcctgagccggctggtctttgccctcaatttcattgagatgggccattgaaaactcattacaagctgtt

SEQ ID NO: 15190 - DNA, 201 bp, Homo sapiens
tggaagaaggaaggcgcccctccttcttagctgattgatgatgagatagaaagatagaaacagccccatcactatgagatggaaacccttctttccttcakctgacttccctctccttcattcccaaccaagtttgaccccgccgcagtggagattgtggcagatgggtcagatagcatgtgtcctgtcgctgtcacaagt

SEQ ID NO: 15191 - DNA, 201 bp, Homo sapiens
gggtgtccaaacttttggcttccctgggccacattggaagaaaaagaattgtctttggctgcacataatatacaattgttgatgagctaaaaaaaaaaaaatccccaaaaaatctcataatgttttaagaaagtttatgaatttgtgttgggccagattcaaagttgtcctgggccgcatgtggcccaccagccatggttt

SEQ ID NO: 15192 - DNA, 201 bp, Homo sapiens
ttcttaaccctttaagaaatatgacttgttctaattgccttttcttatttacattatacttaggctggtgttaggatgccgtggctgccaagtttacacartgcactttctctctctctttcttcttttggtttatgatgtttttcaatagtgtcatggaactcacttaatctgatttcatcaagtaaatatatgggaagt

SEQ ID NO: 15193 - DNA, 201 bp, Homo sapiens
gctgggaagtccaagatcaagctgctggcagattgagtgtttggcaacggcccactttctggttcctagatgttcacctccttgctatgtcctcatatcgkgggaggggcaaagggtctctctatctggcctcttttaagcccttaacccattcatgaaggctttgcctcaatgacctaatcacctcccaaaggccctacc

SEQ ID NO: 15194 - DNA, 201 bp, Homo sapiens
cttatggtcaccattctgtaatgattatcatttgtacatttaaaatagaaactgttaggccaatgtgttattctagaataggacttgacagactttttttwaaataaaatgccagatagtgtttctagctttgcagttcagatggtgtgtgttacaactgttcagctctaactttgtatgaaagtagccataggcaataca

SEQ ID NO: 15195 - DNA, 201 bp, Homo sapiens
gggtgagatgaacattgattgagcctttacatcggagacactataacaaatgctttgtgtacatcagctctttcaaattaatacaattctactagaggggrcactattagtatccccaatttacagatgaaaaaaatgagggacagagaggttagatgtgtatctaaggtcacatagctcacaaacgacacagcatgcacc

SEQ ID NO: 15196 - DNA, 201 bp, Homo sapiens
agatgaggttcttgagtactttcaattaggtttaccactgaccccatcagtgtgcagacgaagggagatgagagatacagatggttaatgggatttttggrgtatcttccagcctttgtgagcacagaggtttcgctacattttgaaaattaaaattcatttcattcgcattacagattttaaatcctagctcctttttaa

SEQ ID NO: 15197 - DNA, 201 bp, Homo sapiens
caaggcctgttggaatgtctgccagtttcaacccacggggatagggtgagatgaacattgattgagcctttacatcggagacactataacaaatgctttgygtacatcagctctttcaaattaatacaattctactagaggggacactattagtatccccaatttacagatgaaaaaaatgagggacagagaggttagatg

SEQ ID NO: 15198 - DNA, 201 bp, Homo sapiens
cagatgaggttcttgagtactttcaattaggtttaccactgaccccatcagtgtgcagacgaagggagatgagagatacagatggttaatgggatttttgkggtatcttccagcctttgtgagcacagaggtttcgctacattttgaaaattaaaattcatttcattcgcattacagattttaaatcctagctccttttta

SEQ ID NO: 15199 - DNA, 201 bp, Homo sapiens
tcctgctatgtccttacatgacagaggaagagatcatctttcttcagcctcttctgacaagtccaccagtctcattcatgagggttccactctcatgactkaagtacctcctaaaggctccccctcctaataatatcaccttggagattagggtttccaaatatgagtttggggggacacattgattccacaacactgacc

SEQ ID NO: 15200 - DNA, 201 bp, Homo sapiens
atcaaatggtagttctacttttagttcttcaagaactctccacactgttttccatagtggttgtactagtttacattcccaccagcagtgtagaagtgttscctgttcaccgcattcacgccaatatctattattttttgcatttttggtaatggccattcttgcaggagtaagatggtatcgcaaatgcaacaaaaacaa

SEQ ID NO: 15201 - DNA, 201 bp, Homo sapiens
gccgtgtctcttttctgtgattcgggagcacattgatacccttcttttggagcagagaagcttgtctttcatgatagaagtaggtcatgggggcggttagytgacttcatcagagagtagcatgcagatcccacctgtgaggctatggtctgccaaggagagttcagcgggctggatcagagagagcagagccatgctggc

SEQ ID NO: 15202 - DNA, 201 bp, Homo sapiens
aggagagagttactattagctcccagtttataggtgagtgatatggtttggatgtgtccccacccaaatctcaacttgaattgtatctgccagaattcccrcatgttgtgggagggacccagggggaggtaattgaatcatggggcccagcctttcccatgctattctcataatagtgaataagtctcatgagatctgatg

SEQ ID NO: 15203 - DNA, 201 bp, Homo sapiens
ctcccgagtagctgggattacaggggcacatgccaccatgcccagctaattttgtatttctagtacagacagggtttcaccgtgttggccaggctggtctsaaactcctgacctcaagtgatccaaccgcctcagcctcccaaagtgctgggatgacaggtgtgagccaccacacccagccactctctttcaactagaaca

SEQ ID NO: 15204 - DNA, 201 bp, Homo sapiens
tctctctctctcttttttttttttttctttttgaggaagggtctctctctgtcacctggctggaatacaatggtgctatcttggcccactgcaccctccayctccctggttcaagggattctcgtgcctcagcctcccgagtagctgggattacaggggcacatgccaccatgcccagctaattttgtatttctagtacag

SEQ ID NO: 15205 - DNA, 201 bp, Homo sapiens
ctgggcaaggaaacaaaactgaacaacattagcaaaatcactacatattataggaatcaagtacattctgaacggcttaatcctacagtttagatatgaascctaagggtaagatgaacgtcttagatgatctgagatatccaaatacctgtaacaaacatttgtatggtgtatgtagggcaggaaccccatcagaattgg

SEQ ID NO: 15206 - DNA, 201 bp, Homo sapiens
taataaacaaataagttttgggttgggcgggagattagttagagacaggatctgtaggtcagaagtggtatttgggggagtagggagttttttttttttttctttttcccttatgcatttgggagtggaagagctgtcagattctgaatttagttagatttataatgctagagacattcagcagtctgcctttccctttct

SEQ ID NO: 15207 - DNA, 201 bp, Homo sapiens
catgctatctcgacttctgtgtgtctcctttttgtccatctcttaaatcagtcacttggcagcagcaagacatgtggccactccagaccatttgatcgaaragctcttgttaggagattaggctgctaatctgcaagcgagctaatggaaatcattctgggcaaggaaacaaaactgaacaacattagcaaaatcactaca

SEQ ID NO: 15208 - DNA, 201 bp, Homo sapiens
tccattagagacctggcgtataattgtgggagggagaagccagtggagcagtcaggggactccctggctgtttctgtgtctggtcttatgggtctgggcaytgaattcagtcacaaaccctagcatgctcctttgctacctcaggggacaaagtcaagaaaataacactaggattgccaccctgctctctctctctctctc

SEQ ID NO: 15209 - DNA, 201 bp, Homo sapiens
aaagtaaagtaataaacaaataagttttgggttgggcgggagattagttagagacaggatctgtaggtcagaagtggtatttgggggagtagggagttttktttttttttctttttcccttatgcatttgggagtggaagagctgtcagattctgaatttagttagatttataatgctagagacattcagcagtctgcctt

SEQ ID NO: 15210 - DNA, 201 bp, Homo sapiens
gaccattaatcatgctatctcgacttctgtgtgtctcctttttgtccatctcttaaatcagtcacttggcagcagcaagacatgtggccactccagaccawttgatcgaagagctcttgttaggagattaggctgctaatctgcaagcgagctaatggaaatcattctgggcaaggaaacaaaactgaacaacattagcaa

SEQ ID NO: 15211 - DNA, 201 bp, Homo sapiens
aatagcacagcttttttccactttcaaatgtataacaaaatagaactttatatttccagatggactgcctggaacccggggagtggctcagctaccaggcyccagtggcccttgtcttgttatttcctccattagagacctggcgtataattgtgggagggagaagccagtggagcagtcaggggactccctggctgtttc

SEQ ID NO: 15212 - DNA, 201 bp, Homo sapiens
gtatgtgtttaatctaccattccttgtggcacagtgcatggtctgcatggcacagtgtgtggtctgtatggcacagtgcatggtccgcatggcacagcgcrtggtccgcgtggcacagcgcgtggtccgcgtggcacagcgcgtggtccgcgtggcacagcgcgtggtctgcgtggcacagtgcgtggtctgcatggcaca

SEQ ID NO: 15213 - DNA, 201 bp, Homo sapiens
atagttctctctgtgaccctgtagaatgcactgaagcaaaaataacaggtaatgctaatcataaagttttacaaatctcctgaagagtcttgttggtttcygtgttgatgaagcaggaaatttccctgacccctttgcaggcaggaagtggagtgcggatgctggaactagctggctgctttggtgccagtagaggtgaac

SEQ ID NO: 15214 - DNA, 201 bp, Homo sapiens
agttctgtgtttatacttctcatttagcccataccccactatattaaaagaagatgtataagtgtatgtgtttaatctaccattccttgtggcacagtgcrtggtctgcatggcacagtgtgtggtctgtatggcacagtgcatggtccgcatggcacagcgcgtggtccgcgtggcacagcgcgtggtccgcgtggcaca

SEQ ID NO: 15215 - DNA, 201 bp, Homo sapiens
acctggctaatttttgtattttttgtagaggtggagtttcgccatgttggccaggctggtcttgaattcctgacttcaagtgatgagactgcctcagccasccaaagtgctgggattacaggcatgagccatcgcgcccagccagacttgtatctcttaatgagtttaactacatttaaccatgtatgtgtcagtcctact

SEQ ID NO: 15216 - DNA, 201 bp, Homo sapiens
acatggtgaaaccccatctctactaacaatacaaaattagctgggtgtggtgatgcacacctgtaatccctgctacacaggaagctgaggcaggagaatcrcttgaacccaggaggtgaggttgtggtgagccgagatcatgccattgcactccagcctgggcaaaaagagcggggtaaaaaaacaacaaaaaaatgatgt

SEQ ID NO: 15217 - DNA, 201 bp, Homo sapiens
ttggcctcccagagtgctgggattacaggtgtgagccactatgcccaataccccctatgtagacttttaaagaaatacaggaaacagccaagactggtgtsattcagatttagcttgggagagtctagtgggtgttaggttcccacaggatgaaggatcaccatgaacggtcaggacctgacttaggaggactcagaagct

SEQ ID NO: 15218 - DNA, 201 bp, Homo sapiens
gagggtggcagtgatcttgaggggggtctgggagggaggagccagcctggcctggtctggcctggcccagtgtgccagctagggcaggtgcaatggctcaygcctataatcccagcactttgggaggccgaggcaggtggatcacctgaggtcaggagttcaagaccagcctgaccaacatggtgaaaccccatctctact

SEQ ID NO: 15219 - DNA, 201 bp, Homo sapiens
cctgcttaggaaatttgggttgagggtggcagtgatcttgaggggggtctgggagggaggagccagcctggcctggtctggcctggcccagtgtgccagckagggcaggtgcaatggctcacgcctataatcccagcactttgggaggccgaggcaggtggatcacctgaggtcaggagttcaagaccagcctgaccaaca

SEQ ID NO: 15220 - DNA, 201 bp, Homo sapiens
aaaaaaaaaaaaaaaaacaactacccaaggcctgttggaatgtctgccagtttcaacccacggggatagggtgagatgaacattgattgagcctttacatyggagacactataacaaatgctttgtgtacatcagctctttcaaattaatacaattctactagaggggacactattagtatccccaatttacagatgaaaa

SEQ ID NO: 15221 - DNA, 201 bp, Homo sapiens
cataccatatgctgaaagacttggaatgcaaaaacctaaggccaagggcacttctcaatattaaaccctcagttgtaatggaggcatcaagactataagayccaagaccttaacttttgtgctccttgtcttgtggagggaacatccatcctcaaaacagaaacctgtgagatcccttgaatatactgacaatacactgat

SEQ ID NO: 15222 - DNA, 201 bp, Homo sapiens
agtagatattggaaatatgaacccaatatgttcttaacatctccatgtcgtaattctaatttaaaatcaaaatctcatcaaattacattttagattaaagsattgtacctatcgaaagaagagaatcgaaaatgcgaaagtccttcattttcagtgtggcctgagattgttgaaggatttgttctattgcatgctgataaa

SEQ ID NO: 15223 - DNA, 201 bp, Homo sapiens
ttagaagaaaaccagaggtctgtgcacactatggatttttactacaatgatgccctttcacatacagcgagaaggattaagaggtactgtattgttggttrataaagtcaaacttgtgaacagagcaaaagggcattgcttggtcattgcagcttccacccatgcaccttacacagaagtttgggccctaacatggaaact

SEQ ID NO: 15224 - DNA, 201 bp, Homo sapiens
ttcaacacagttctcttgtctctgttcatgatataacagtaaatccaagttgctttaagtagatattggaaatatgaacccaatatgttcttaacatctcyatgtcgtaattctaatttaaaatcaaaatctcatcaaattacattttagattaaagcattgtacctatcgaaagaagagaatcgaaaatgcgaaagtcct

SEQ ID NO: 15225 - DNA, 201 bp, Homo sapiens
ttttccaatgagagtactgatgacataaaaggttatacattgaataaccacccaaattagcagtgtttcatatttacactgttcaacacagttctcttgtstctgttcatgatataacagtaaatccaagttgctttaagtagatattggaaatatgaacccaatatgttcttaacatctccatgtcgtaattctaattta

SEQ ID NO: 15226 - DNA, 201 bp, Homo sapiens
aaaagaaatctgttagaaatgcatattttctgttttcaccccagaaatcctgaataagaaacactaaaggggagtgggcccagctatttgtgtttttggargaactcctgttttaatttgttttttcggaagtcctccagtttgagaaccaatgataaggacatttttccgggaatccagttgttttaggaaaggcccagt

SEQ ID NO: 15227 - DNA, 201 bp, Homo sapiens
tttaatcacataattacttaaatggcctggcgagccgccttacctagctggccaggaattccaggagtcaggcttcctgatctaaatctgtcctggtcccrtcttggctgggtgccaccagcagcaacggcacactccagcttaaatatcagtggggataattctaggccgtttgtctgcctggttcttccaggatagagg

SEQ ID NO: 15228 - DNA, 201 bp, Homo sapiens
agatcttgcttttcagtctactggtatctccacttctctctgcagcgtgatgtctagtcagagtttccattctgtttttatgaccctgggaggactgggasagatctgtgaggtcatcttgtccaccctcagccagggcaggagtattccctaatggtagagtcaagtgtttggtttggtcttgtttctaatgactcaagt

SEQ ID NO: 15229 - DNA, 201 bp, Homo sapiens
agcagctttagataatgcattgtaggtgttttgcaaaaacatactttcgtgactaaacatcataagctccaagtgagtgatttccccgcgtaaatgaatgwttctgtgaggataacacttctaagatgtgagatttcaataaatgaatctgtaggctgctgtgatggatacctttggtggggtaggaaggatcgtcattta

SEQ ID NO: 15230 - DNA, 201 bp, Homo sapiens
tatgtatttttgataaatacctaggtgtgaaattattgactcttagtgtttaacttgtaagaatgctgccaaacagttgtctaaagtaattgtatcattttaacccctcgctagaagtgtgtaagagtttatgttgcttcacatcctcatcagcactttgtaatttcagtctttttaattatagcctttttgtgggtgaga

SEQ ID NO: 15231 - DNA, 201 bp, Homo sapiens
cctagagcaggttgggcaagaggcttttctctcagtcaccagccccaaaccctgtggtcttgccagcccaggacgtgtcaagactgcagcctttgctgacytgtgaccatctccaagtccatgcccaggcccctactaggagttgagggcaacaggggcagtgggtctctcctgcttaggaaatttgggttgagggtggca

SEQ ID NO: 15232 - DNA, 201 bp, Homo sapiens
agaagatccattgcaaaatgaaaatatggggttctagccaggggcagggaacttaatctcccttttccatgggcccaacacctgaatctagggcaaacagstgtcccccagattggatcctctgctctaggacacattcttgtcctagagcaggttgggcaagaggcttttctctcagtcaccagccccaaaccctgtggt

SEQ ID NO: 15233 - DNA, 201 bp, Homo sapiens
gtttttagacagaatatcacttttttatattattcatggtaatgtaattcccccctttaatctcttcagggtttcccattcagtcatgatatgcggttcaragaaagttggatcgaccattaatcatgctatctcgacttctgtgtgtctcctttttgtccatctcttaaatcagtcacttggcagcagcaagacatgtgg

SEQ ID NO: 15234 - DNA, 201 bp, Homo sapiens
ggttatttccttgaggagaaaggaaaggagaagttgagtacttttcagtgtttgttactacaaaagcatggtggcatgccattgttctgagaggaaggggsttttttgccttgtcagctcctgatgaaaaagatgttgggttggaaagctaagttacagcaggtgaacttgaatttgaggaaagacaaagcaaaccctggc

SEQ ID NO: 15235 - DNA, 201 bp, Homo sapiens
ggagggacaatagaacctctgtagaatcaaaggcagaattaaaatctgcatgttaatagctttcctgccagccacgaatagattcattcttcacgtctcaratatataaagcttatttcaaaataaattctggggagcgttcaacctgattgaatctgctgtaagctctgttaatatatttgttcgagtcacttgcactca

SEQ ID NO: 15236 - DNA, 201 bp, Homo sapiens
ttttcccttcttgataggttgtagattccatgtctaatccatgcttttccaatattccctcctaatctttcagttgaattatggtctttagctcaaatgcrtgacatgatgtgtgtgcctttggagtggggcggtattagtcagtcgatggttatttccttgaggagaaaggaaaggagaagttgagtacttttcagtgtt

SEQ ID NO: 15237 - DNA, 201 bp, Homo sapiens
caggtttgtcccatttgtactgactctgacccaggttgtcatgacttgagactcactagaagtttcagaaagatgcagactgctttaaaaaaaaaaaaaaagggcaaggggaggtgtgagaagaaagtataattctttttcttctaactggagatataaaaatcatataagcatgatttatgatttgattggaacattgta

SEQ ID NO: 15238 - DNA, 201 bp, Homo sapiens
gtgggcttagaagaaaaccagaggtctgtgcacactatggatttttactacaatgatgccctttcacatacagcgagaaggattaagaggtactgtattgktggttgataaagtcaaacttgtgaacagagcaaaagggcattgcttggtcattgcagcttccacccatgcaccttacacagaagtttgggccctaacatg

SEQ ID NO: 15239 - DNA, 201 bp, Homo sapiens
ttattacagcgcaggtgcatcttgcttttgagtgctaactgagatgaaaggagtgaggaaacgctctcttcttcttgcaggggagggctggcaaattcagygaatgcagagtcggctgggagcctttcggctggaaagctcttcctctgatgagctgtctgttacagattttcagggatggcccttgataaggcaggggtg

SEQ ID NO: 15240 - DNA, 201 bp, Homo sapiens
catgatctcggctcactgcaagctctgcctcctaggctcatgccattctcctccctcagcctcctgagtagctgggactgcaggcgccagccaccacgccyggctaattttttatatttttagtagagacggggtttcaccatgctaaccaggatggtctcgatctcctgacctcgtgatccaccagccttggcctcccaa

SEQ ID NO: 15241 - DNA, 201 bp, Homo sapiens
gctccaggtaaccactcatctactttctgtctctatatagatttgcctattctagacttttcatataaataaatcagatactgtgtggccctttgtgtctygatccttacacttagcatcatgttttcaagggtcattcatgttgtagcatgtatcagtacttctttttttagggctgagtaatattccatttacggatat

SEQ ID NO: 15242 - DNA, 201 bp, Homo sapiens
tcttttttttttttttttttgaaatggagtcttgccctgtcccccaggctggtgtgcagtggcatgatctcggctcactgcaagctctgcctcctaggctyatgccattctcctccctcagcctcctgagtagctgggactgcaggcgccagccaccacgcccggctaattttttatatttttagtagagacggggtttca

SEQ ID NO: 15243 - DNA, 201 bp, Homo sapiens
ggaatgcagtggcacgatgttggctcactgcaaaccctgcctcccaggttcaagcgattctcctctcccagcctcccgagtctctgggattacagacgtgyatcaccaggcccagctaatttttatatttttactcgagacgtagtttcaccatgttggccaggctggtctcaaactcgtgaccttaggtgatatgcgccc

SEQ ID NO: 15244 - DNA, 201 bp, Homo sapiens
tctaaaccaaaggacctaaataaaatattaatttttcatagtgtttaatatgtgccagtatatataaattcaaggtaaggtagacagctgtaaactggatsccctgctgtacccagcaaatgctgagagccctgcttcccctcttgtattcaaatggctctataagagaggaagtagtacagctatcagtaacaatgccat

SEQ ID NO: 15245 - DNA, 201 bp, Homo sapiens
tcaagcgattctcctctcccagcctcccgagtctctgggattacagacgtgcatcaccaggcccagctaatttttatatttttactcgagacgtagtttcrccatgttggccaggctggtctcaaactcgtgaccttaggtgatatgcgcccctcagcctcccaaagtgctgggattataggcatgagccaccacgcccag

SEQ ID NO: 15246 - DNA, 201 bp, Homo sapiens
gtacttcatgatcttggaagaaggaaggcgcccctccttcttagctgattgatgatgagatagaaagatagaaacagccccatcactatgagatggaaacmcttctttccttcagctgacttccctctccttcattcccaaccaagtttgaccccgccgcagtggagattgtggcagatgggtcagatagcatgtgtcctg

SEQ ID NO: 15247 - DNA, 201 bp, Homo sapiens
ccttctcagagtcagtaggatagtttcccttcctggaagattgagatgaaataaagctttaggagttggtatcgcacgcaggcattaaatggattgtgaasagggactttgttccccctcagtcttgtctctgcctccgtaaaggagtaagttaaaaaagaaagtttctttttttaaaaaaaagccttactgctcaataaa

SEQ ID NO: 15248 - DNA, 201 bp, Homo sapiens
tgatgatccagagctttggagtcagcgagacagtagagagtggtggagatggtggcgcacaagagggtcagtgccccatctcaaggaacagctgcacctcrgcctacgcgattgtgaaaatgtgagcatatgcaggccagaccttggcttctctgtcttcatttttcacaggagccagaagtttggatgtgcaatgtgaaa

SEQ ID NO: 15249 - DNA, 201 bp, Homo sapiens
aagtaaaaccacaggggatctgttggaagtggcatgatggaggaattttaaaagaattgaacaaataaaatagtcagagctcaaaaattgagtactgcttygtttctcccaaataaccatcaccagacaaacaggtgtgtgtgtgggtgggggaggtggcctggtggtacttcatgatcttggaagaaggaaggcgcccct

SEQ ID NO: 15250 - DNA, 201 bp, Homo sapiens
tccagagctttggagtcagcgagacagtagagagtggtggagatggtggcgcacaagagggtcagtgccccatctcaaggaacagctgcacctcggcctaygcgattgtgaaaatgtgagcatatgcaggccagaccttggcttctctgtcttcatttttcacaggagccagaagtttggatgtgcaatgtgaaatctcac

SEQ ID NO: 15251 - DNA, 201 bp, Homo sapiens
agcaaaatggggtaagaacagaatctgccttgcagagaattaaccgagatgatgtgtggaaagggcctatcccagaggctggtgtaccatggtggcttctyctggctctgctggttattattattagcattattgtcattgtgaaagtgacaaggaatgtgcctgtgcgtgaatctcactcttagatcagacgtgcttttg

SEQ ID NO: 15252 - DNA, 201 bp, Homo sapiens
ttgaaggaatgtttcacttccaaatccagatctctgacttcccttgaaaatttggagtgccactcaagtcggccgctctgagctagaatcctggtgttcaraattggcaggaagggcacaggggcaaggtataggctcacgtctccacattctgcacctcccaggctcctgccattgatgtgagcgggttcctgtactgca

SEQ ID NO: 15253 - DNA, 201 bp, Homo sapiens
ggatcttcaggtttggagggaggccgatagagagtgtctggagttgccaacgtcctctccttgggtcatgggtgtgtgtgtgtgtgttttcttcttgttgktgggtttttttttttttttttttttttttttggcttttgcgcctatggtgacttttagcgaatggatactattgaaggaatgtttcacttccaaatccag

SEQ ID NO: 15254 - DNA, 201 bp, Homo sapiens
aatggatcttcaggtttggagggaggccgatagagagtgtctggagttgccaacgtcctctccttgggtcatgggtgtgtgtgtgtgtgttttcttcttgktgttgggtttttttttttttttttttttttttttggcttttgcgcctatggtgacttttagcgaatggatactattgaaggaatgtttcacttccaaatc

SEQ ID NO: 15255 - DNA, 201 bp, Homo sapiens
cccctgtgggcttagaagaaaaccagaggtctgtgcacactatggatttttactacaatgatgccctttcacatacagcgagaaggattaagaggtactgwattgttggttgataaagtcaaacttgtgaacagagcaaaagggcattgcttggtcattgcagcttccacccatgcaccttacacagaagtttgggcccta

SEQ ID NO: 15256 - DNA, 201 bp, Homo sapiens
gtgggaatgtctcatccccctgtgggcttagaagaaaaccagaggtctgtgcacactatggatttttactacaatgatgccctttcacatacagcgagaargattaagaggtactgtattgttggttgataaagtcaaacttgtgaacagagcaaaagggcattgcttggtcattgcagcttccacccatgcaccttacac

SEQ ID NO: 15257 - DNA, 201 bp, Homo sapiens
cctgggaaatatagcaagatcccaaccctattaaaaaattaaaaatgaaaataaaattttaaagaaaggtatttctccccttcacggtaatttggagccartacttcttgcaccattcatttgtccacagcatgggacaaaggataatgccttaatgcctgctgcaaatagaacagtggtgcttagcagctttagataatg

SEQ ID NO: 15258 - DNA, 201 bp, Homo sapiens
atacttgaaggtagccagtggacacgtggggccatttcaagctaaattaaattttaaataaaattaaagattcaatctctcactcacacattacaagtgckaaacatccggacacatctagtggctcccactgtgggtagcacatacagaaagaacgtttccgtgacagtagagtgtcccattgcacagtttgggtatgga

SEQ ID NO: 15259 - DNA, 201 bp, Homo sapiens
ttagccaggtgtggtggcatgcatctgcagtcctggctactcagaaggctgaggtgggaggattgcgtgagcccaggagttcaagaccagcctgaacgacrtaaaaagacctatctctacaaaaattagctgggcatggtgtcacgtgcctgtagtcctagctactcgggaggctgaggtgggaggatcgcttgagccccg

SEQ ID NO: 15260 - DNA, 201 bp, Homo sapiens
taatgaaaagtgagtgaatgggctgggtgtggtgggtcacacctgtaatcctggctactcaggaggctgagacaggaggatcgcttgagcccaggaggtcraggctgcagtagggtatgagcgggccactgcacttcagcctgggcaacagagcgagaccttctgtctaaaaatatttatctatattgagtgaataaatga

SEQ ID NO: 15261 - DNA, 201 bp, Homo sapiens
cacaggtcaaacatcctgagcctgttctgtggtcagttactcattagcagcctctgctctaggaggaatagttatgggtcctttcagacatgcaacccccmaaactccatgttgtttacagtgtgggacacctgactttcaccttttatgatacctgcctggggcatgcatgtggtgactttttccatctctggtctctat

SEQ ID NO: 15262 - DNA, 201 bp, Homo sapiens
ggtcaggcagctgtttgacaggattcttgcaaatgtttttggtttctctgtctactcattacgtacactctgccagaggttgaaaactcaatgttgagatyacatacatcctgaaaacactgtttaaataaaattttggcctgcatcctgtttttgaaaacttgcaatggcttgccaacgttttcaagttgagaagtttca

SEQ ID NO: 15263 - DNA, 201 bp, Homo sapiens
gttttcgagactgagtcttgctctgtcgcccaggatggagtacagcagtgcaatctcggctcactgcagcctccaactcccggctccagtgattctcctgyctcagtctcccaagtagctgggattacagggatgcgccaccatgcccagctaattttttgtatttttagtagagacggggtttcaccatgttggccaggc

SEQ ID NO: 15264 - DNA, 201 bp, Homo sapiens
ttaaaaaaaataaattaaatttttaaaaacatgactttctggccaggcgcagtggctcatgcctataaccctgcacttagagagggcaagacagaaggatygcttgaggccaggagtttgagaccagcctgggcaacatagcgagaccttgtctgtactaaaaaattattaaaagaaaatatatatatttttttaaatcat

SEQ ID NO: 15265 - DNA, 201 bp, Homo sapiens
caggagccagaagtttggatgtgcaatgtgaaatctcacaaattaaacatgttacataactgtattttgtttcctatctctgctgtaataaattttctcawtgttagtgacttagaaccacacaaaagttacactttacagttttggaggtcagtggtccaaaataggtctcagtgggctaaaatcgatgtgtcagcagga

SEQ ID NO: 15266 - DNA, 201 bp, Homo sapiens
ttgtttgtaagaatcagttgaggacagatgggactatttgcatggattggtgtcatgtttgaagtcagttaccagagggtttctttcaacagagtataccmaaaaaaaaaaaaaaaaaaaaaaaaaaaaagtaaattgcacagaccccagcttaggacctggacttaatcttcatgatgtttgtaaagtaatacttcttgg

SEQ ID NO: 15267 - DNA, 201 bp, Homo sapiens
acttagaaccacacaaaagttacactttacagttttggaggtcagtggtccaaaataggtctcagtgggctaaaatcgatgtgtcagcaggacaccatttytttctgtaggttctagaagagaacccacttccttgctgtttccagcttccagggactgcccaaatcctttggctcatggccccttcctctatcttcaaag

SEQ ID NO: 15268 - DNA, 201 bp, Homo sapiens
agcaatttacaaaattgcacatactctataaatacacttctgttataaaaatagacacgtacggccgggcgcggtggctcacgcctgtaatcccagcactytgggaggccgaggcgggcggatcacgaggtcaggagatcgagaccatcccggctaaaacggtgaaaccccgtctctactaaaaatacaaaaaattagccg

SEQ ID NO: 15269 - DNA, 201 bp, Homo sapiens
cccaaatcctttggctcatggccccttcctctatcttcaaagccagggatggctgctcaagtccttctcaaactgccctgttcctggttctctctcttctkcttctgcttttaaggaaccttgtaacttcagggagtctaccctgataatctgcgataatctgcctatttgaaggtcagccaattagcaatcttaatgcca

SEQ ID NO: 15270 - DNA, 201 bp, Homo sapiens
aaactcctgagggatgctcaggaaaccaaaaaggatgtctgcatggaggacaagaaggcacaaatcgtctgatttcaccccatcctaagatcttgtgactycagctttgttttggactggggcattggatctcccacatgccctctcttaagtcgtgcatttgacgcatatttaataagcacctactgtgtgccattagag

SEQ ID NO: 15271 - DNA, 201 bp, Homo sapiens
ccgctgatctgcatagcacttcgcaatgaagctgtgctctagaaacataccacgatctactggactttcttaaataaggtggttgttcaggaaattcctcyagttaattttactttaattccccctacaagaatgccgagacacctctgcctattttctctttctgtgtttgttgtttcttttgtttttgttttcgagact

SEQ ID NO: 15272 - DNA, 201 bp, Homo sapiens
tgctcaagtccttctcaaactgccctgttcctggttctctctcttctgcttctgcttttaaggaaccttgtaacttcagggagtctaccctgataatctgsgataatctgcctatttgaaggtcagccaattagcaatcttaatgccatctacaaccttaattaccatttgctatgtaacatatttatagatatcagggat

SEQ ID NO: 15273 - DNA, 201 bp, Homo sapiens
cctaaggtattgctgtcctcaccgtcctatggggagataggtcactttcccaagtctgggcagccagcagcagggctaagatcaccactcagaccctgtgwttttatttttcatctcctcacatctggcgctgaatgtcaggaccttcctggcctctgggaaagacacaggatggctgttttgagaggagtgtgaaataca

SEQ ID NO: 15274 - DNA, 201 bp, Homo sapiens
ctcaaactgccctgttcctggttctctctcttctgcttctgcttttaaggaaccttgtaacttcagggagtctaccctgataatctgcgataatctgcctrtttgaaggtcagccaattagcaatcttaatgccatctacaaccttaattaccatttgctatgtaacatatttatagatatcagggattagttcatgaaca

SEQ ID NO: 15275 - DNA, 201 bp, Homo sapiens
ttgaaggtcagccaattagcaatcttaatgccatctacaaccttaattaccatttgctatgtaacatatttatagatatcagggattagttcatgaacatmttggggtagagggcattccacatacagcagtacctataatgtatatgcttcttaaagaatgcatgagtcttatttattttatgtccttggagtgtatagc

SEQ ID NO: 15276 - DNA, 201 bp, Homo sapiens
ctcaaatttctggctggtacaccctgggtaaggtccacaggctggatgggttttggaacatgtcttgattgtactttttcctcttggtttggaaagcaacrtaccctaggtaaggagagatttctgacaacagctcagcaatcacagtttccagaaaatggctccagtggatcaactatgagttaagtaaaaaaaaagtca

SEQ ID NO: 15277 - DNA, 201 bp, Homo sapiens
cactttgggaggccgaggcaggaggatcacttgagcctgggagttggaaaccagcccaggcaacatagtgagacctcatctctttaaaaaaaaaaaaaaaagaaagaaaaattagctggcatggtggcacatgcctgtagtcccagcttctggggatgctgcagcgagccatgattgtgccactgctctctggcctgggca

SEQ ID NO: 15278 - DNA, 201 bp, Homo sapiens
gccaggggtggtggtgcatgcctataatcccaacacttttggaggccaaggtgaggagaccacctgaggtcaggaattcaagactactgggcaacatggtraagctctgtctatcctaaaaatgcaaaaattagccgggagtggtggtgcatgtctgtagtcacagctacttgggaggctgaggcaggcgaactgcttgaa

SEQ ID NO: 15279 - DNA, 201 bp, Homo sapiens
gggcttagcttgggtatcatcgtggttattccaagcagtcttccagctggactagcttttcgggaacacgtgtgtgtttgtgctggaagccccagtaatatcatttaattcgaaagcttttttctatgatgaattattcaggcagtgtttaccaaaattgtcattgatcagtacagacccagagagcatgtacaacagcgc

SEQ ID NO: 15280 - DNA, 201 bp, Homo sapiens
tggtggtgcatgcctataatcccaacacttttggaggccaaggtgaggagaccacctgaggtcaggaattcaagactactgggcaacatggtgaagctctstctatcctaaaaatgcaaaaattagccgggagtggtggtgcatgtctgtagtcacagctacttgggaggctgaggcaggcgaactgcttgaacctgggag

SEQ ID NO: 15281 - DNA, 201 bp, Homo sapiens
ggaggagactttgactctagatgacatgatgtaccctgtgttctgcaagctggagaacatcatgtagaatctgaaaattaggagagagaggcaatcagaaraagacagagtggtgttgcagggacctgcagtcagcctagtcccccagtttgcgtttgaatttggtcccagattttttttgtttttgttttttagtagtta

SEQ ID NO: 15282 - DNA, 201 bp, Homo sapiens
ggtgccattttcctgactgtagatacttgggtaaggaggagactttgactctagatgacatgatgtaccctgtgttctgcaagctggagaacatcatgtaraatctgaaaattaggagagagaggcaatcagaagaagacagagtggtgttgcagggacctgcagtcagcctagtcccccagtttgcgtttgaatttggtc

SEQ ID NO: 15283 - DNA, 201 bp, Homo sapiens
aagcacgggggtttatgtgatggctccacagagcagtgaaaagactcccgccctactgctcgcaacctcagatgtccctgggcactagcccatctgtatgkctttaaaaaaaataaattaaatttttaaaaacatgactttctggccaggcgcagtggctcatgcctataaccctgcacttagagagggcaagacagaagg

SEQ ID NO: 15284 - DNA, 201 bp, Homo sapiens
gtcaggagatcgagaccatcccggctaaaacggtgaaaccccgtctctactaaaaatacaaaaaattagccgggcgtagtggcgggcacctgtagtcccarctacttgggaggctgaggcaggagaatggcgtgaacccgggaggcggagcttgcagtgagccgagagcccgccactgcactccagcctgggcgacagagc

SEQ ID NO: 15285 - DNA, 201 bp, Homo sapiens
gtgaggtgagatcagtagaagagtacaataaaacaggaattttcagagcatgtaatttcttcttggaagtgaaaggcactggagaatggtgcagaataagyactagccttagagagaggatgccctgccccagtctctttctctgagtagcagagagctggctgtgctaggaaactcttcgcctctctaacaccacgttta

SEQ ID NO: 15286 - DNA, 201 bp, Homo sapiens
ttctatggattttcactaaaatagaatcatcgccttggtgatggatagaaaaagtaaagcaatacatcctgataaatgctgtgccttcctccttcgtctcyctggcggtgaccttgtgcaatccataagagggcaaggctgagagccccggccaccgccgccgtgtgtcagaacttggaaatttaagtagctttgaaaccc

SEQ ID NO: 15287 - DNA, 201 bp, Homo sapiens
gatagcatgagactgtgtctcaaaaattaaaaaataaaacataaataaatttctattgttttaagacaatttgcctgtggccctaggaaaccagtatagayaacttgtgatggtttagcttatttagtacaacaaccctgccccttctagtttttatgataacctcattaattgccggtactctcagagccctgattttct

SEQ ID NO: 15288 - DNA, 201 bp, Homo sapiens
gggaggctgaggcaggtggatcacttcaacccaggagttcgagaccagcctgggcaacaaggcgagaccccgtctctacaaaaaataccaaaaaatgagcygggtgtggtggggcatgcctgtagtcccagctacttgggaggctgggatggaagcatcatttgagcctgggaggtggaggttgccgtcagctgagattgt

SEQ ID NO: 15289 - DNA, 201 bp, Homo sapiens
aacagagcctgcaagcatttctcctgcagaacccccagaagggactcagcctgcagacactcagatttcaaacctctggcttcctgaactgtgaaagaatraattgctgttgggccaggtacagtggctcatgcctgtaatcccagcactttgggaggctgaggcaggtggatcacttcaacccaggagttcgagaccagc

SEQ ID NO: 15290 - DNA, 201 bp, Homo sapiens
gaagctttacccctgagaagagcaggcatcagatgggctttggaatctacatgggtgtttgtaggtagaccatcctggaagttgagtgatggggaataaarggaagaaagtgcattctgaacagagggaatagcaggtacagcagctcagacatgggcaccttcagagcgtgtctgagtcttcctgatgagacacgtggtg

SEQ ID NO: 15291 - DNA, 201 bp, Homo sapiens
gacagcagggggtgaggataagaaggaggaagctttacccctgagaagagcaggcatcagatgggctttggaatctacatgggtgtttgtaggtagaccaycctggaagttgagtgatggggaataaaaggaagaaagtgcattctgaacagagggaatagcaggtacagcagctcagacatgggcaccttcagagcgtgt

SEQ ID NO: 15292 - DNA, 201 bp, Homo sapiens
gtgttaatcttacacctacccattagtctataaaactcctgagggatgctcaggaaaccaaaaaggatgtctgcatggaggacaagaaggcacaaatcgtytgatttcaccccatcctaagatcttgtgacttcagctttgttttggactggggcattggatctcccacatgccctctcttaagtcgtgcatttgacgcat

SEQ ID NO: 15293 - DNA, 201 bp, Homo sapiens
tcaggtgggactcatggagattttccgttctttggagactagcagcgactgcagattactcatcagctgtctccttgagtccacaatgccgggcggtggaygggcttcctgcctcctggcccagggcccctttgccggctcttagtgtagagcactagttgtaccatctggtagttgtttgtgcctgcgactctcttccct

SEQ ID NO: 15294 - DNA, 201 bp, Homo sapiens
ctgtagtcacagctacttgggaggctgaggcaggcgaactgcttgaacctgggaggtggaggttgcagtgagctgagatggagccactgcactccagcctrggtcacagagggagactctgtctcaaaagaaaagaaaagtagagaggatagtataatgaggttcctgtctgccagtcactctatagtaactattaggaaa

SEQ ID NO: 15295 - DNA, 201 bp, Homo sapiens
gggagggaagaaccctatgggcagaaatgtgactttctgtagcaaagatgtactgtttcccactgagaagaatcaaaaatagaaaagtgcttccttgtctytctatattgttattaaaacaagtagatgcattttcattgaatcaaggcagttttcctttataaaatgtcctatttcatatcactgttcaaacttgacatc

SEQ ID NO: 15296 - DNA, 201 bp, Homo sapiens
ttacaggatacctagggacctgttggggtgggagggaagaaccctatgggcagaaatgtgactttctgtagcaaagatgtactgtttcccactgagaagawtcaaaaatagaaaagtgcttccttgtctctctatattgttattaaaacaagtagatgcattttcattgaatcaaggcagttttcctttataaaatgtcct

SEQ ID NO: 15297 - DNA, 201 bp, Homo sapiens
atctgtaaagtaaaaataaccgtcgtcgtcatttctcaagcgtgacgatactgttacacgtttactgcatattctgcataccaagcacatatccgtcacaygcagtgtggccaacttccgagaggccggcattcagccaaacagcctgaagaaccaggagaaatgcctgagtttccaaatggcttatggtaagttgttgct

SEQ ID NO: 15298 - DNA, 201 bp, Homo sapiens
ccagtcactctatagtaactattaggaaacccctttttttctctgaagtcattgctcctgtgtgtgtgtgtctgtatataaaaaaaagtatgtatacatayacgtatatgtatgtgtatagataaaaatgcatgtatggtgctgggcgcagtggctcacgcctgtaatcccagcactttgggaggctgaggcgggcgaatc

SEQ ID NO: 15299 - DNA, 201 bp, Homo sapiens
taaactcccactgtttataagtcacccaaattgttggtattaaattagatgtgtaccatcttatgtctcttctttcagaaaatgaatctctgtttttttttctctttctcctaaatgttaggaattttctgaagtttgaaaccaagtggcacaaaaacattgcatttattacataattgctcctagggaaatacacataca

SEQ ID NO: 15300 - DNA, 201 bp, Homo sapiens
gtgtgtgtgtctgtatataaaaaaaagtatgtatacatatacgtatatgtatgtgtatagataaaaatgcatgtatggtgctgggcgcagtggctcacgcytgtaatcccagcactttgggaggctgaggcgggcgaatcacgaggtcaggagatcgagaccatcctggctaacacggtgaaaccgtgtctctactaaaag

SEQ ID NO: 15301 - DNA, 201 bp, Homo sapiens
tgctgggcgcagtggctcacgcctgtaatcccagcactttgggaggctgaggcgggcgaatcacgaggtcaggagatcgagaccatcctggctaacacggygaaaccgtgtctctactaaaagtacaaaaaattagcctggcgtggtggcgggcacctgtagtcccagctactcgggaggctgagaccgaagaattacttg

SEQ ID NO: 15302 - DNA, 201 bp, Homo sapiens
actaccttgcttgcctatgggacatgttcccatttcagtgcatacttgacctttaccataaatcacatatttgtaaactgtaccctcctgctgttttattrggcatggagaagcagtcttttctttttcttgatggcctgggttgaccagatcctgacttttgtggagacattaaagtgctagaaatgataatggtgaaag

SEQ ID NO: 15303 - DNA, 201 bp, Homo sapiens
tggctaacacggtgaaaccgtgtctctactaaaagtacaaaaaattagcctggcgtggtggcgggcacctgtagtcccagctactcgggaggctgagaccsaagaattacttgatgaaacatggcagacgacatagaccagcagcaaactaccaacactgtggaggaccccctggatcttaggctcagcccagaggagcga

SEQ ID NO: 15304 - DNA, 201 bp, Homo sapiens
acaagggccctgacagccttttctggacttgtagtatgtgcaagaattaagctttttctgtatcaagtcaccgtgttatgggggttgttcctcactgcagsagaaccttgttcatccgtattagaacagtgtggtgtttcatgttagcagagtgtatcaggatcttttgtttttttttttttttaaattaaggatgctgta

SEQ ID NO: 15305 - DNA, 201 bp, Homo sapiens
tgtagtcccagctactcgggaggctgagaccgaagaattacttgatgaaacatggcagacgacatagaccagcagcaaactaccaacactgtggaggaccycctggatcttaggctcagcccagaggagcgaatttgtgtgaaaatgagaaacgaccgagagcttcgaggcagattacatacttatgatcaacatttaaat

SEQ ID NO: 15306 - DNA, 201 bp, Homo sapiens
tactatagaaattgatgaggaaacatatgaagagacatatgaatcaacaaaacagaatattccagtgttctttctccggggagatggcattttcctggttscccctccactgagagttggctgaaacaaagaatttgtcctgtatggaaaacaggagactttgtacagtggcctctctaaatgtgcaagatattcaaaaga

SEQ ID NO: 15307 - DNA, 201 bp, Homo sapiens
aactctctcattgccttcagagagttggtgattttggggggggcaccagtgtgagtcctttgatccttgaatgacaatttggatttgtctcaaggtcctgmtaaatgggaactggaggaactggcctactatggtattacaggctagcacatggtttgcattctgagggagctcagaataggcaaggtagaagacataggt

SEQ ID NO: 15308 - DNA, 201 bp, Homo sapiens
agccaagggatggctcagaagggtgaaggaactcacccgaattgcacagctggtgagctcagagtcaggctccttgcttggtccatctggcttccaaactscaagtctgtctgctccaccccatggcccatctttttaccatgtttagtatcaatgttcatactttgcagattttgctttcaaactctctagctgcggttt

SEQ ID NO: 15309 - DNA, 201 bp, Homo sapiens
tatatttcctgtggctgagctgagccgcacttggagatttgatccattttaactctctcattgccttcagagagttggtgattttggggggggcaccagtktgagtcctttgatccttgaatgacaatttggatttgtctcaaggtcctgataaatgggaactggaggaactggcctactatggtattacaggctagcaca

SEQ ID NO: 15310 - DNA, 201 bp, Homo sapiens
gattttttttttcataaaaccagtctaaaaaagccatgggttattttgtcatggcacgttttgatatgaatatttccacccccattatttgcataacaaaktacagattatccagaacaggtgggctgtacataaacaggctggtgggctggatttgtcctgtggactgtagtttgctgacatccaggctagatccttaat

SEQ ID NO: 15311 - DNA, 201 bp, Homo sapiens
acgaggtcaggagatcgagaccatcccggctaaaacggtgaaaccccgtctctactaaaaatacaaaaaattagccgggcgtagtggcgggcacctgtagkcccagctacttgggaggctgaggcaggagaatggcgtgaacccgggaggcggagcttgcagtgagccgagagcccgccactgcactccagcctgggcgac

SEQ ID NO: 15312 - DNA, 201 bp, Homo sapiens
attcatatatttaggtatagttagaaaaagcaaaatggtaacaatagaatcttgatgggattgatctcctgcagcaaggagcaacagaaaaaaaaaaaaakggaatcaagaacccaggtgctttttataggttaattgtgcagggttatcatgtatctctttaaaatcaccatcttgattctgagctttggttctacacat

SEQ ID NO: 15313 - DNA, 201 bp, Homo sapiens
caaatcagacaccaacataaactgtagagttaacattctttttccaccctcacactttttttagctccgatctgtgttcaatttctgcctgagagagtgawatattcatatatttaggtatagttagaaaaagcaaaatggtaacaatagaatcttgatgggattgatctcctgcagcaaggagcaacagaaaaaaaaaaa

SEQ ID NO: 15314 - DNA, 201 bp, Homo sapiens
tcttacacgttttacgggctatcagtagatgcatctaataatcctaacactgtcatccttatacttgaggtcttattgtccacttctaccttagctatgtwaacagatgagtaacctactctggatttacccagatagtgctgttaggcaccacacacgatgagattggaggcacctgggtgtcagcctcttgggctggct

SEQ ID NO: 15315 - DNA, 201 bp, Homo sapiens
ctggagtgacagagtgtgtcaagcctgcagctcgtcccgtgtctaatggaacagaaacaagcaccctgctgcccttgttttccagtggctcaccggggctytgcgaggtttattaatcttagcgtataatggaaaatgtgttgccatgtgaaatctagagcctctgttcactactccgcgaattgaaggcggcaggagtct

SEQ ID NO: 15316 - DNA, 201 bp, Homo sapiens
ctgtgtgtcaccttctctctgagctcaccctctctaggaagccttccttgctggaatgcccattccctgatataaggattccacccaccacgccccttgcrgttccttgccggtgtcctgtcctgggcagacataagccctgtgggttccagtttctcattaggaacctggatgatggagcagggatcatgctcattaagt

SEQ ID NO: 15317 - DNA, 201 bp, Homo sapiens
ccagccagggtggtctcgaggaggcccattaccggctggagtgacagagtgtgtcaagcctgcagctcgtcccgtgtctaatggaacagaaacaagcaccytgctgcccttgttttccagtggctcaccggggctctgcgaggtttattaatcttagcgtataatggaaaatgtgttgccatgtgaaatctagagcctctg

SEQ ID NO: 15318 - DNA, 201 bp, Homo sapiens
attagcatcaccctgctgtgcctcagtgtttccatctataaactgggtataataatcattcctaccccataggttgctgtgaagattggctcacatcagtmatgtacttggaatggatcctggcataaaaagagcccttggaaaatgatagcgttcatccttggtatgacctccaagttctttgaacctcaaagagccaag

SEQ ID NO: 15319 - DNA, 201 bp, Homo sapiens
acacaggctggagtgcaatggtgcaatctcagctcactgcaatgtctgcctcccagattcaagcaattttcctgcctcaggctcccaagtagctgggattrcaggcacccaccaccacacccaactaatttttgtgtttttagtagagacagggtttcaccatattggccagactgctcttgaattcctaacttcaggtga

SEQ ID NO: 15320 - DNA, 201 bp, Homo sapiens
agtgggagaacatggtatcagaaccaggagagggtcctctggctttctgagttctgccaaaaaccaagttttgctgccttgggcctgtggcttctcctccytgattgtcgctggccttgctgtaaattgtgaggcatccatgtgaggcacaggatggttccaaggaccaactgaggctgtctgtgctgaggctgggagggt

SEQ ID NO: 15321 - DNA, 201 bp, Homo sapiens
ttcagtgacatgccatcagatttgttccatgtagaaggacgacactatcagttagatgcttattttgttggcaaatttctatggcacttctgcttggccayttcaaaccaaccatggaagaatagataccccaatgcgatgtttcatccctattcataaagaaactgtactttgagcaatgtaggtatcccaggcagcatc

SEQ ID NO: 15322 - DNA, 201 bp, Homo sapiens
atttcagtgacatgccatcagatttgttccatgtagaaggacgacactatcagttagatgcttattttgttggcaaatttctatggcacttctgcttggcyacttcaaaccaaccatggaagaatagataccccaatgcgatgtttcatccctattcataaagaaactgtactttgagcaatgtaggtatcccaggcagca

SEQ ID NO: 15323 - DNA, 201 bp, Homo sapiens
taaaaatgtaaaatgtttcaaataaacacacactaaatatcttcttttatatcttataaacacccagcagtcctttagcacgggcatcaaggtggcccagytggaaaatttcagtgacatgccatcagatttgttccatgtagaaggacgacactatcagttagatgcttattttgttggcaaatttctatggcacttctg

SEQ ID NO: 15324 - DNA, 201 bp, Homo sapiens
gcatagaatgtttatatggtggccaaaaaagcagattggtatcatgctttatgtgtgttcattctagtcctgcacgtgtagaaatgtaagattttaatgtrtggtaaggtagatagatagatacatacatacatacatacatacatacatacatacatataaaattaggtaagaggatacttttaatgtatggtaagctat

SEQ ID NO: 15325 - DNA, 201 bp, Homo sapiens
ggtgcccgccaccaggcctggctaattttttttgtattattagtagagatggggtttcaccgtgttagccaggatggtcttgatctcctgtccttgtggtycgtctgcctcggcctcccaaagtgctaagattacaggcacgagtctccgcacccggccctgtttttgcatttttagtagagacgggttttcaccaggttg

SEQ ID NO: 15326 - DNA, 201 bp, Homo sapiens
caaaaaagcagattggtatcatgctttatgtgtgttcattctagtcctgcacgtgtagaaatgtaagattttaatgtatggtaaggtagatagatagatasatacatacatacatacatacatacatacatacatataaaattaggtaagaggatacttttaatgtatggtaagctatgattgcaccactgcattctagcc

SEQ ID NO: 15327 - DNA, 201 bp, Homo sapiens
gtatagtagtgggagaacatggtatcagaaccaggagagggtcctctggctttctgagttctgccaaaaaccaagttttgctgccttgggcctgtggcttytcctccctgattgtcgctggccttgctgtaaattgtgaggcatccatgtgaggcacaggatggttccaaggaccaactgaggctgtctgtgctgaggctg

SEQ ID NO: 15328 - DNA, 201 bp, Homo sapiens
gtcgcttgaacttgggaggcagaggttgccgtgagctgagatcatgtcattgtactccagcctgggcaacaacagcaaaactctgtctcaaaaaaaaaaaagaagaagaagaagtaattcctaacagtctggaatctctagggtctctggtattatcctttagtttaagcctcacatttttctaaacattttgaaatctgg

SEQ ID NO: 15329 - DNA, 201 bp, Homo sapiens
agtgattcagaaaatagcaagtatagtagtgggagaacatggtatcagaaccaggagagggtcctctggctttctgagttctgccaaaaaccaagttttgytgccttgggcctgtggcttctcctccctgattgtcgctggccttgctgtaaattgtgaggcatccatgtgaggcacaggatggttccaaggaccaactga

SEQ ID NO: 15330 - DNA, 201 bp, Homo sapiens
ctgatgtactcttgctggcggtccatctgagagttcacataagtgtgagtgactattttttgacaacactacctttgggagaagatggtttcaaagaactwactgtatcaaatggaaagacaatgtgttttcccaacatgggagtatgtttctaagttgggatcagttcacgattcagagaaatgctctgccttcttgtct

SEQ ID NO: 15331 - DNA, 201 bp, Homo sapiens
tgggggaaaaaaccaatagaataatgttttattacatgtaaaaattgtatgaaattcaaatttcagtgttcataactaaattttaaaaacttttattgaarttccagagagatctgaagtagttttattggaacacagccctacacaccttcatttataagctatctgtggctacttttgcactatgccagcaaagttgag

SEQ ID NO: 15332 - DNA, 201 bp, Homo sapiens
caaacatgtaataccaccctggtcttcaagtccactctcaaaaaaaaaaaaaaatttggcctttggcctcgtgaccaccaaatctgatttccatccaagargcaacattgtttgtgcttagaaggaattcctggctgggcatgatggttcacgcctgtaatcccagcgctttgggaggccgaggcaggcggatcacctaag

SEQ ID NO: 15333 - DNA, 201 bp, Homo sapiens
gtagttttattggaacacagccctacacaccttcatttataagctatctgtggctacttttgcactatgccagcaaagttgagtagttgggatggagactrtatggcccataaagcctaaaatactctctgctcctttccagaaagcttggcaacccctactatcatctccacgtctgcctttgttcttcttatttgtccc

SEQ ID NO: 15334 - DNA, 201 bp, Homo sapiens
taggtagaaatttttatgtcacaggtgggcctaattaaccttgattaatgttctgcaaacccggatagactggagactcagaaagggacgcaaaagctagyctggttcccatgttagtccctgctctgtgagcagctgccacacagtcatgctgatggctcctgcagcagccattctggtttgactgtgctcgtgctgccc

SEQ ID NO: 15335 - DNA, 201 bp, Homo sapiens
agaatccctatggtctcttgagtccaggagtttgagaccagcctgggcaagatagcaaaatactatctctacaaaaaaatgaaaaaaaaaaaaaaaaaaaagcctgtcatagtggtacatgcctatagtcttagctattcaggaggctgaggtgggaggatcgcttgagcccaggaatttgaggttgcagtgagctatcat

SEQ ID NO: 15336 - DNA, 201 bp, Homo sapiens
tcccaattagtttcttcatgccataaggacaaaatccacatctcatactttttcaggatctgctctcacttccccaaacatgtaataccaccctggtcttmaagtccactctcaaaaaaaaaaaaaaatttggcctttggcctcgtgaccaccaaatctgatttccatccaagaggcaacattgtttgtgcttagaaggaa

SEQ ID NO: 15337 - DNA, 201 bp, Homo sapiens
tgtggagtatgcatttaattcacatttacaaattggtttctgtttttaactaaaggtactttttcagcagaaatgatgtgtatgatgtcatatctaacttktgatctcactggtatttgatgttaagcctcaaaatcatcaaattttttttacggcactgaaaaaaatacataaatctgcttgattggttcatagaaaaag

SEQ ID NO: 15338 - DNA, 201 bp, Homo sapiens
ggcaggagaatccctatggtctcttgagtccaggagtttgagaccagcctgggcaagatagcaaaatactatctctacaaaaaaatgaaaaaaaaaaaaaraaaaaagcctgtcatagtggtacatgcctatagtcttagctattcaggaggctgaggtgggaggatcgcttgagcccaggaatttgaggttgcagtgagc

SEQ ID NO: 15339 - DNA, 201 bp, Homo sapiens
tttctaaaactttaagtttcagggtacatgtgtaagatgtgcaagtttgttacataggtaatcatctgccacggtggtttgctgcagagatcaacttatcrcctggatatgaagcccagcgtccattagctgttgttgctgatgctcttcccaccacctgcaagccccagtgtgtgttatccgcctccaccgtgtgtccat

SEQ ID NO: 15340 - DNA, 201 bp, Homo sapiens
atgcctttgtgtgtcctctcatggcagagagaggaaggggtctggaacctttctcttataaggatactaatcccatcgtaccccgtcccccatgatctcawttgaaattagtcacctcccaaagccccacctccaagtactgtcacactggggcatagggcttcagcatatgaatttgggggagctggggagaggaacaca

SEQ ID NO: 15341 - DNA, 201 bp, Homo sapiens
catagactgggcaggttaaacagcagacctctattcctcacagtctagaggctgggaagtccaaggtgaagccatgggcacattctgtgcctgcctgaggstctctttctggttcccagatggatgcctttgtgtgtcctctcatggcagagagaggaaggggtctggaacctttctcttataaggatactaatcccatcg

SEQ ID NO: 15342 - DNA, 201 bp, Homo sapiens
gcattacctggggctccctctggaaagaaaatggtggagaggttactggcctgatgacccagggacccaggcagtccttacagggacccagaatttcacawgcaaatgtgacctccaattaaagctggacttgattaaccccatttcccctcaaaagatgatacttgtaatgccgttccgatgaggccgtctcactccgta

SEQ ID NO: 15343 - DNA, 201 bp, Homo sapiens
tgtggaaaagggacatggcccagggaaccagagtggtttgggaaagcactttgtcaagaggcttggggaccccagggtggaagctgccatgcgcatgaggytgtgttagcagaggcagtggcagaagaagacattgcaaacctgcaaaagcaacctctgaggatgggtagacatatacttcattgcaggcagctgctgctg

SEQ ID NO: 15344 - DNA, 201 bp, Homo sapiens
catcttacaaatgaatcaatatttagtggtttgaaaatatgttgtttaatttggggcgattcaatatcaaattaagatttttaggtttatttatcgatctytagaattacatcaacattaagctaattactttaaattgtgtttttaagtaaccaagaatacatctgtggacgctgttctgtgccatcttgagtcacgttt

SEQ ID NO: 15345 - DNA, 201 bp, Homo sapiens
taaaacgtggatgttccaatttatgtatagccgcataatacattaccccaaaacttagaggcttaaaacaacaaccattttgttttatcttgtgatttctstaagttagggctcagtggagtgactcttctgccccttgtggtgttgactggggtcagtcagtggtgctatgctggaggatgaattggactggcacttcag

SEQ ID NO: 15346 - DNA, 201 bp, Homo sapiens
tggatgttccaatttatgtatagccgcataatacattaccccaaaacttagaggcttaaaacaacaaccattttgttttatcttgtgatttctctaagttrgggctcagtggagtgactcttctgccccttgtggtgttgactggggtcagtcagtggtgctatgctggaggatgaattggactggcacttcagctggtcc

SEQ ID NO: 15347 - DNA, 201 bp, Homo sapiens
atgaattggactggcacttcagctggtccaggatggtcacccatgggtctggcactttcacgaggatgactgggatgcttggctcagctgagggactcttrcccagagccctacacatggcctttcctgcatggcagatatagggccatcagatttcttacatggtggctcagggctcccagaggattccaaaagaaagta

SEQ ID NO: 15348 - DNA, 201 bp, Homo sapiens
gtgtagctccaattgccttcatccttagaagacctttaatgatatcctatgccaaacttcctagcctccacctgtaccctgaattggccctagcctagttktccaaactttatccccaggtggttgaactttctaagtttccccaagctgatcagtgttttggggtggtatggaactcagaatagatcactttttttattg

SEQ ID NO: 15349 - DNA, 201 bp, Homo sapiens
cttctctttgcgtcaccagagaggaagatcccctaagacaaagcattccctgtagtttttagcataactagtactggctcagtaagtatccactggggttsggaatacaactgccctgcctcttgagcagccatgcctgcttccgaggtggtgctgcatgctattcaggaggacagaccatggatgggaatcctgagccac

SEQ ID NO: 15350 - DNA, 201 bp, Homo sapiens
tggaccctctgatgttgacaacatgatgtcaaagatggtgtttgctgttgtttcaaatgtcttatttcaaattcccaattagtttcttcatgccataaggrcaaaatccacatctcatactttttcaggatctgctctcacttccccaaacatgtaataccaccctggtcttcaagtccactctcaaaaaaaaaaaaaaat

SEQ ID NO: 15351 - DNA, 201 bp, Homo sapiens
gcactttttctgtttttgatgggatttatcacttgaaaatgcatattatagtaatttctgaattcatcctgattctcctactggtttctaaactcttcagkttagaattcctgttggatatccctctggcccgaaattcctgaatgagttaagcaggacacctagaactatgcagaggtaataccttccttgacctgtccc

SEQ ID NO: 15352 - DNA, 201 bp, Homo sapiens
ggtttagaaataggtatgtgacccagttctgaccaatggatatggagggtgcttatgaggaaggtttcctactcctaaaagagatacacaggaagagagamcttctgcttcctctggacactggcgcagcctggactagcagttgccagcttgggtttggacaacctccgaccttagttgaaaatgaccctgtgtaggaca

SEQ ID NO: 15353 - DNA, 201 bp, Homo sapiens
gggcaaggagctcatctttcacggtcatagacctcagttgcaacatctggaaaaagagctggttgggcatgccgggcaggcttttgtgacaatgtaagagsaagtgaagattgcatctcagtatgagacaccgtaagagcttgataaatggtggaccctctgatgttgacaacatgatgtcaaagatggtgtttgctgttg

SEQ ID NO: 15354 - DNA, 201 bp, Homo sapiens
tgatgggatttatcacttgaaaatgcatattatagtaatttctgaattcatcctgattctcctactggtttctaaactcttcaggttagaattcctgttgratatccctctggcccgaaattcctgaatgagttaagcaggacacctagaactatgcagaggtaataccttccttgacctgtcccttttctgggtcagttt

SEQ ID NO: 15355 - DNA, 201 bp, Homo sapiens
tttgagaaacatggatgtaaatctgattttcagcatctgggaaactttttttgtaagagcctttttctgggccccacttccagagggtttttctttttttkttttcttttgagacggagtcttgctctgtcgcccaggctggagtgcagcggcgcgatctcggctcactgcaacctccgcctcccgggttcacgccattct

SEQ ID NO: 15356 - DNA, 201 bp, Homo sapiens
catgtaaatgaattgtattttatgtaaccattccctagtgttggatagctaggccatttataatttggacactattttaaaaaataactcaggcttatttwactatttatttttgccttacactttttgtaaaagtaatcagagcagtaataatagatgactccccaaaatccttttgcctctaatgattagtctaagccc

SEQ ID NO: 15357 - DNA, 201 bp, Homo sapiens
aggtcttgtgtacccaccgatcgcaattgagcatatagtacatgctgtcctgtgtacccactgatccctggtcctgcccctggtatgagggtattaacatyttgcattagtgtggcacatttgctacaattaataaaccaatatcgatacattattaactagtctatagtttacatgaggggctgctgcttgtgttgtaca

SEQ ID NO: 15358 - DNA, 201 bp, Homo sapiens
cttgaaaatgcatattatagtaatttctgaattcatcctgattctcctactggtttctaaactcttcaggttagaattcctgttggatatccctctggccygaaattcctgaatgagttaagcaggacacctagaactatgcagaggtaataccttccttgacctgtcccttttctgggtcagtttgcccttcatgatttc

SEQ ID NO: 15359 - DNA, 201 bp, Homo sapiens
ctgtaatcccagctactcgggagcctgaggcaggagaatcacttgaacccgggaggtggaggttgcagcgagtcaaggtcacgccagtgtactccagcctsggtgacagagcgagactccgtctcaaaaaaaaaaaaaaaaagaaaaagaaaaagaaaaaggtgtttggaagccatgtcccatgaattccaaatacaattg

SEQ ID NO: 15360 - DNA, 201 bp, Homo sapiens
cctgacaatgttagtgaagttgcttgcttgaaatttaccaggccaggcttatggctgtaatcccagaaactcaagaagctgaggcaggagaatccctatgrtctcttgagtccaggagtttgagaccagcctgggcaagatagcaaaatactatctctacaaaaaaatgaaaaaaaaaaaaaaaaaaaagcctgtcatagt

SEQ ID NO: 15361 - DNA, 201 bp, Homo sapiens
agacatagaaattcttgggctttattccacacataatgaatcagaagcttatggggtggggcctgcagtctgacgtttattttttctaaaactttaagttycagggtacatgtgtaagatgtgcaagtttgttacataggtaatcatctgccacggtggtttgctgcagagatcaacttatcacctggatatgaagcccag

SEQ ID NO: 15362 - DNA, 201 bp, Homo sapiens
tctggctctgcagctgaaattgggatcgcatggagaaaatagaaagtccagtgtttgtagctgtgatctctcagttgcttgcatgaattgtgctttaagaytgtaaaattttagcccattaaaaataaaatctgttgctttccacccacacctggcaatttggtgagggacgggggctaggatatttaatgtctgaaagtt

SEQ ID NO: 15363 - DNA, 201 bp, Homo sapiens
tgtgtttttagtagagacggggtttcaccgtgttagccaggatggtctcgatctcctgacctcgtgatcctcccgcctcggcctctcaaagtgctgggatyacaggcgtgagctaccgctcccggccttttttttttttttttttttttttttaaagacagggtctcgctccgtcgcccaaactggagtgccgtggtgcga

SEQ ID NO: 15364 - DNA, 201 bp, Homo sapiens
aagctccgattttcttgttgaatagccgtgtttcctcagcattctgtagatttttggccaggtttgtgtaagggatgaacgactctctataaaatgatgtmaggatcctttctttcctgcccattgccatttctagcattctctccttgagggaagttgcagttttctccctctgtgtattcatccttctgacctgtgctc

SEQ ID NO: 15365 - DNA, 201 bp, Homo sapiens
agtagctggtactacaggtgcctgccaccacgcccggctaattttttatatttttagtagagacagggtttcaccatgttagccactttggtctcaatctmctgacctcgtgattcaactgcctcgccctcccaaagtgctgggattacaggcgtgagccaccgcacccagccgaaaagttataattttaatggtctaaat

SEQ ID NO: 15366 - DNA, 201 bp, Homo sapiens
tcctgacctcgtgatcctcccgcctcggcctctcaaagtgctgggattacaggcgtgagctaccgctcccggcctttttttttttttttttttttttttttaagacagggtctcgctccgtcgcccaaactggagtgccgtggtgcgatctcggctcactgcaacctctgcatgccgagttcaagcgattctcgtgtctca

SEQ ID NO: 15367 - DNA, 201 bp, Homo sapiens
tcttgagcagccatgcctgcttccgaggtggtgctgcatgctattcaggaggacagaccatggatgggaatcctgagccacaactccttagcctcatgacrttgggcagatgactgagcttgtctgagttacaataaataaaaataccatgctgaatgatggcctagcatgacattgggaagtacagactttgcaggcagg

SEQ ID NO: 15368 - DNA, 201 bp, Homo sapiens
actttgaacactttaaatgggtgaattgtatggtatatgaatcatatctcaacaaagctgttaaaaaattgtatgaaaactgtgatgggattcaagtagtstaacgctcaaatttcccaagtgccctcatttaagtctggaccacgacaggaacccagatgtggcctgagtagcacatcgtggaatgggcctgtcacctct

SEQ ID NO: 15369 - DNA, 201 bp, Homo sapiens
tgaacactttaaatgggtgaattgtatggtatatgaatcatatctcaacaaagctgttaaaaaattgtatgaaaactgtgatgggattcaagtagtctaaygctcaaatttcccaagtgccctcatttaagtctggaccacgacaggaacccagatgtggcctgagtagcacatcgtggaatgggcctgtcacctctaccc

SEQ ID NO: 15370 - DNA, 201 bp, Homo sapiens
cggtgttggctctcagttagagactcagatttatccctgcccgaatcattttctttgattctctgcccttccccactacagtgtaaactccatttggactytctctagttcactgtgaatggtttttgaataacatcaattagcataacctcatgcccagcatcgtccttattgttgagagcacagcagtgacaaaggtgc

SEQ ID NO: 15371 - DNA, 201 bp, Homo sapiens
caaaagggagtatgttggttcatgtaccaggaagtcttggagtgatggcttcaggcacggctggatccaggggctcaaaaatataatcagatgatttgttygcttctgtcttttgctatggtggtctctgttttgcttacttctgcagcagattttctctacctggtgggagaaacagctgccagaaaatccagattccca

SEQ ID NO: 15372 - DNA, 201 bp, Homo sapiens
taaagacagtgcctccttccaggacaacggtttggcagatttgcttgataaaggttggggtttgtaagcttggggctcctcagccatgactgaaacgtacyatgagcacggcatctaccgggctgttccacatcctccctgtgggactaggggccagggcaatgggaatcagtgcagaaataaagctcatgctgtttgctc

SEQ ID NO: 15373 - DNA, 201 bp, Homo sapiens
agatctcactcactatggtgaagacagcgccaagccatgagggctccgccccagtgattcaaatacctcccattacggacatgtttcaacatgagatttgrgcggggacaaatatccaaactatatcaggatcccagcagactgggtgggtggaggttcagggatatctgggaaggactaagaatagctttttcttttagt

SEQ ID NO: 15374 - DNA, 201 bp, Homo sapiens
tctcactcactatggtgaagacagcgccaagccatgagggctccgccccagtgattcaaatacctcccattacggacatgtttcaacatgagatttgagcrgggacaaatatccaaactatatcaggatcccagcagactgggtgggtggaggttcagggatatctgggaaggactaagaatagctttttcttttagtaga

SEQ ID NO: 15375 - DNA, 201 bp, Homo sapiens
tagggttcctttttttcaagttaaagcattgagtcatgtctctgataaatcgcccccccaccccgatccccaccctctgccgccccggccttctttttgtrctgttgggttccaaactttacctgaggattttcacatgcacatctgttaaatgccatttaaagagaacactaacaagagaaagctagttcatttttcttc

SEQ ID NO: 15376 - DNA, 201 bp, Homo sapiens
atgaattttccgagactctgttatgacagaaactcaccagttctctgttgttaatcaacaaatagattgtgaatgcttgactcttctttttttttttttttaaaggagtttcaagggtaagatctgctgtcttgtgaatgtcaaagaagtttctcattcgcccctttcttctctctcccagtgtctttaatttgttaatgc

SEQ ID NO: 15377 - DNA, 201 bp, Homo sapiens
tgcaagagtcagcaaagtttctctgtgatgggatatttaataaatattttggggccttgtagtgtttgttgccaactactcaactctgccctcatagtgcraaaacaggcataaacgatatgtaaaggagcaggcatggctgcgagaaactttatttatggatactggaatttgaatttcatatacattttcatgtgtcac

SEQ ID NO: 15378 - DNA, 201 bp, Homo sapiens
tttgtgctgttgggttccaaactttacctgaggattttcacatgcacatctgttaaatgccatttaaagagaacactaacaagagaaagctagttcatttytcttcctgggacctcagtttcctcatcagcagaatcgggatattagtgcagaccttgcaggctctttatgaggatccatcgggagcctcaggcgcacact

SEQ ID NO: 15379 - DNA, 201 bp, Homo sapiens
tttgtgaaaaaggatgaattttccgagactctgttatgacagaaactcaccagttctctgttgttaatcaacaaatagattgtgaatgcttgactcttctctttttttttttttaaaggagtttcaagggtaagatctgctgtcttgtgaatgtcaaagaagtttctcattcgcccctttcttctctctcccagtgtcttt

SEQ ID NO: 15380 - DNA, 201 bp, Homo sapiens
ttctctgtgatgggatatttaataaatattttggggccttgtagtgtttgttgccaactactcaactctgccctcatagtgcaaaaacaggcataaacgayatgtaaaggagcaggcatggctgcgagaaactttatttatggatactggaatttgaatttcatatacattttcatgtgtcacaaaatattattctttccc

SEQ ID NO: 15381 - DNA, 201 bp, Homo sapiens
tgtttgtaacattgaatacttaagacatctgctcagagtctcgcattataaatgaatggaaaggatccaggagggctttattggatgggagccgtgaagtsagcgccgtgtatttcaaagcaggatcttaatcagacattatttatatctataatattttacaaattaaaagcagtagaaatagtcactggaaggaagtca

SEQ ID NO: 15382 - DNA, 201 bp, Homo sapiens
atccactggggttcggaatacaactgccctgcctcttgagcagccatgcctgcttccgaggtggtgctgcatgctattcaggaggacagaccatggatggraatcctgagccacaactccttagcctcatgacgttgggcagatgactgagcttgtctgagttacaataaataaaaataccatgctgaatgatggcctagc

SEQ ID NO: 15383 - DNA, 201 bp, Homo sapiens
acagccgtgtttggcccagcggttatagtttgccaacccctgcttagagtctagctttattcagagcttaaatatgtcatcgaggtcccctctttatttawtcccttagttttgatgatcttttatgggttatattcttcaaagggaaaattctctccgaatggggctgccactggcagacgagcactgtcccatcttggc

SEQ ID NO: 15384 - DNA, 201 bp, Homo sapiens
aacattgaatacttaagacatctgctcagagtctcgcattataaatgaatggaaaggatccaggagggctttattggatgggagccgtgaagtgagcgccrtgtatttcaaagcaggatcttaatcagacattatttatatctataatattttacaaattaaaagcagtagaaatagtcactggaaggaagtcagcaagca

SEQ ID NO: 15385 - DNA, 201 bp, Homo sapiens
gtttaaaaatttgttttagatagaggtttgaatgtcactaattaccaacgtgtagctcctaattggaattaagaagggactagctcctattatcagagatctggtcatcacccttcaagttgactatctccttatgctgattttttttttcttttaaatagcagcacaaatatttaccatctagcagatgtggtaagaatg

SEQ ID NO: 15386 - DNA, 201 bp, Homo sapiens
tagagaaaaggtggcttggctgtttggtttatgtcctaaaaccttatcgtaatgtgattctccttaacagagggattcgtaagcttaggactgatagagawttggcttttctgctgttggattgatagctccttgactgctgaagccattgcccatctgttcaactgttgtattcacgaggaggttagacccctgacccaa

SEQ ID NO: 15387 - DNA, 201 bp, Homo sapiens
ggcctcttgttcttcttcagctgttcctcagacatgccaggtgtgttcctgtctcagacgctttgcctttgctgctccttctgcctggagtattcttccaygtagcaccatgagctgttcttctccaaaaggctttgctcaactgacactttctcagtgaagctgtttctcaccactcactataaaatggcagcctgcctc

SEQ ID NO: 15388 - DNA, 201 bp, Homo sapiens
attcagagcttaaatatgtcatcgaggtcccctctttatttattcccttagttttgatgatcttttatgggttatattcttcaaagggaaaattctctccraatggggctgccactggcagacgagcactgtcccatcttggcttgttcccccagtgacaagaagctgttttccccactacccttggcccaaaagccacag

SEQ ID NO: 15389 - DNA, 201 bp, Homo sapiens
ctattcatgtgttcttgaattaaattttcatggcaagcctaagaggccatgactgtccacattttgcctctgagagacgcaaggcttggaggcaggaaatsactcactgaaggccacagcacaaagtggggacttgagtcccgatctcactgattctaaagtccttgctctccaacctctgtccatctgaaatggaaaagc

SEQ ID NO: 15390 - DNA, 201 bp, Homo sapiens
tcgaggtcccctctttatttattcccttagttttgatgatcttttatgggttatattcttcaaagggaaaattctctccgaatggggctgccactggcagrcgagcactgtcccatcttggcttgttcccccagtgacaagaagctgttttccccactacccttggcccaaaagccacagggagaaccaggattggcctag

SEQ ID NO: 15391 - DNA, 201 bp, Homo sapiens
tttaggcagacacctatccctgaatcagtcatgtccccggatgatgcggttctctgcagcctgggcagtcaaggctggagataattctctgcttctccacrgagtctgagaggccccgttccctaatggaaaaatgaggtccaattttgcaaaaggaggcacctggggaaacattctggacacacaaatctatagcttcta

SEQ ID NO: 15392 - DNA, 201 bp, Homo sapiens
catgtccccggatgatgcggttctctgcagcctgggcagtcaaggctggagataattctctgcttctccacagagtctgagaggccccgttccctaatggwaaaatgaggtccaattttgcaaaaggaggcacctggggaaacattctggacacacaaatctatagcttctaccgtcaatctgctatgatccttttatggt

SEQ ID NO: 15393 - DNA, 201 bp, Homo sapiens
aattttgcaaaaggaggcacctggggaaacattctggacacacaaatctatagcttctaccgtcaatctgctatgatccttttatggttctgacgttgcarttttatttttgcatgtttctagagacatcaggaggggatcttttcgggatgtggcttcagaaaggagcctgttggatggtctcttactagtggtcagcaa

SEQ ID NO: 15394 - DNA, 201 bp, Homo sapiens
ctttgccactcagccccagaggtgcttctgcttccctgcaggcttgccctggagcctggcgctagggccctggggctcccttgctcctgcgtgccccctgygcctgccttcctgctgcctggcctttctcccatctgctttcttcctgagtggcccctggccaggggactcgggtgcatacatggtttccaaacgcctttc

SEQ ID NO: 15395 - DNA, 201 bp, Homo sapiens
cccctgcgcctgccttcctgctgcctggcctttctcccatctgctttcttcctgagtggcccctggccaggggactcgggtgcatacatggtttccaaacrcctttcctccagccctcccgactagtgtcttaaatctcaagctggcctctctggctccgctgttttttttttttttttttttttaatttaatttaacttt

SEQ ID NO: 15396 - DNA, 201 bp, Homo sapiens
tgacagtccacttcattaagtggaggacagtgttttgattgctatttaatctgtttttccttctgtctgttcttggctatatggaattcactttgcctctsttcccgactcttcatatcccttatctcaaggtgagtatcgtcagaatcccggtacatttcaccagccaccttttatagaagcttagaaagatggaggcaa

SEQ ID NO: 15397 - DNA, 201 bp, Homo sapiens
ttaaagcgatagtcctattttctaagtaaaagtccaggcatgtgacttaaaaaagaaaaaaaaaaatgttttctggtcaagtcacatgcctctgaggtttktttttttctttctttcttttctttttttttctttttcccagactcctcatacccctcctaggagacagtgattccctggcttcaccaggcaggctcttgg

SEQ ID NO: 15398 - DNA, 201 bp, Homo sapiens
ctttgggaggccggggtgggcggatcacaaggtcaggagtttgaaaccagcctgaccaaccctgtctctactaaaattatttaaaaaaaaaatagctgggyatggtggcacacgtctgtaatcccagctactcgagtggctgaggcaggagaatcgcttgaacccaggaggtgaaggttgcagtgagctgagatggcgccg

SEQ ID NO: 15399 - DNA, 201 bp, Homo sapiens
gactcgggtgcatacatggtttccaaacgcctttcctccagccctcccgactagtgtcttaaatctcaagctggcctctctggctccgctgtttttttttkttttttttttttaatttaatttaactttaaattccgggatacatgtgcaggatgtgcaggtttgttacataagtaaacctgtgccatggtgacttgctgc

SEQ ID NO: 15400 - DNA, 201 bp, Homo sapiens
ttgcctgtcatctgttgtttttctaatcttctagtaaacatttggaaagtgaaggtttaggcatgtatgtttctcttatgtaggaaggggaaataaggccwtgagattgcatgagttttctttccaagtttgtgcagatctgcacaatgattgaaatatttgcaacctgtagagcagcagggtatttatttggcagcaaac

SEQ ID NO: 15401 - DNA, 201 bp, Homo sapiens
taatcagacattatttatatctataatattttacaaattaaaagcagtagaaatagtcactggaaggaagtcagcaagcaggggtgaaaaaaaaaaaaaakaaaagaacctgaagccgccaagagaggctcactgaccatctctgggggaggaagggtgaagagtagcaaatttaccgtcatcagcaggtgtgtaaatgtt

SEQ ID NO: 15402 - DNA, 201 bp, Homo sapiens
aaaaaaaataaaagaacctgaagccgccaagagaggctcactgaccatctctgggggaggaagggtgaagagtagcaaatttaccgtcatcagcaggtgtstaaatgttccatttacattgaatggcacatgtcataaagtacataccgctgcacatcccaccctctgtttctgtttcaactgcagagcctatttttcttt

SEQ ID NO: 15403 - DNA, 201 bp, Homo sapiens
cctgaagccgccaagagaggctcactgaccatctctgggggaggaagggtgaagagtagcaaatttaccgtcatcagcaggtgtgtaaatgttccatttamattgaatggcacatgtcataaagtacataccgctgcacatcccaccctctgtttctgtttcaactgcagagcctatttttctttcccttccagctcagct

SEQ ID NO: 15404 - DNA, 201 bp, Homo sapiens
ataaagtacataccgctgcacatcccaccctctgtttctgtttcaactgcagagcctatttttctttcccttccagctcagctgccttctcctccctgacytcaggtcacccaagactcccactttatgatttccttttacttttagttcattattctctgtgattcagtggaaacataaaaaatggtttttaattttaat

SEQ ID NO: 15405 - DNA, 201 bp, Homo sapiens
cgtctccccgccttgtaagggctgcctgtcattttattagcgctggagcctcccgaccgaagggctgagtaattgacaaaaactgcaggtaaggcaagagrcccgtaattgattcataagatcccttcctccgatcgcattgaagagttaattatttttcctgcagttgggactcagctgttgtttccactgggattaaac

SEQ ID NO: 15406 - DNA, 201 bp, Homo sapiens
ctccccgccttgtaagggctgcctgtcattttattagcgctggagcctcccgaccgaagggctgagtaattgacaaaaactgcaggtaaggcaagagaccygtaattgattcataagatcccttcctccgatcgcattgaagagttaattatttttcctgcagttgggactcagctgttgtttccactgggattaaacagc

SEQ ID NO: 15407 - DNA, 201 bp, Homo sapiens
agaccctgtctctgaaaaataaaaataaaaaaaaaaattaagttagaagggagggattacgaccctcatgtgtatcaagaaacaagctccatgaagccccrtaggatggctcagcaccagaacgaggtctgactgttaagcaaagtcaagtgcatgatggctgaacattgctgggggaagattttgcaattatgcattgtt

SEQ ID NO: 15408 - DNA, 201 bp, Homo sapiens
ttgtttgctttgctttgccttgtctggtttttcaaagtgctcttttaacaaatgaaagtttaaagcttgagttcaatttgagtaatttgttcccagagaaraagtaaatgaaaagtatttctgggtatttttaatgacacaagtttctgtgctgatatgcgggcaggggttcgggagtgggggcaccagggctcatgagcc

SEQ ID NO: 15409 - DNA, 201 bp, Homo sapiens
gcacacacacacttttaagcatttttgatttatatatccctctgcatattttgtgccttgtgatgtgtttaacgaatgacagtgtctttagtgcattgctrcttggggtttctacactggaagtgtaatccgaggccttggaattggtcaaacaaaactcacttggcaacatttacttagagagcactctgcgagcactct

SEQ ID NO: 15410 - DNA, 201 bp, Homo sapiens
tcaatttgagtaatttgttcccagagaaaaagtaaatgaaaagtatttctgggtatttttaatgacacaagtttctgtgctgatatgcgggcaggggttcrggagtgggggcaccagggctcatgagccgagagcccctgcttcccttggaaaacggaaatttctatctccaactagggaaaaatttgcatgtgtagaatt

SEQ ID NO: 15411 - DNA, 201 bp, Homo sapiens
cacacataattcaaaggtaatgtaacttgccgtgtcggactttagtccattccgttaaatggagaaaaatgactgacgtgaagaatgacttattgattctyggtgggaaaatgacttctgtaatatgggaagtatggtaaaaggaatagcttaattatttagggagcacttttcaaaatgtgcttttacagcagtacaaat

SEQ ID NO: 15412 - DNA, 201 bp, Homo sapiens
cactgtttccagccacgggctatccagggaattggggacagtctgtaatgtatcttgagctaggaccatatccaaattactggcctttccagtttttcttwaaatagtagggtcagtaggtgaccacactcagaagccaagcctgcagcatcagggctgaggagcaaactctttctttggtctgaagcttcaaatatgaac

SEQ ID NO: 15413 - DNA, 201 bp, Homo sapiens
caccagggctcatgagccgagagcccctgcttcccttggaaaacggaaatttctatctccaactagggaaaaatttgcatgtgtagaattttggttttttsttcggcgtgtttatttaatttaacattacctatcctacgattatttcaaggtgattttattactagtcagctttcttttccctagcacaaaactcatgca

SEQ ID NO: 15414 - DNA, 201 bp, Homo sapiens
tttacattatacttaggctggtgttaggatgccgtggctgccaagtttacacaatgcactttctctctctctttcttcttttggtttatgatgtttttcartagtgtcatggaactcacttaatctgatttcatcaagtaaatatatgggaagttgagatgacatatttttatctgacatttgaagaaatattcataaaat

SEQ ID NO: 15415 - DNA, 201 bp, Homo sapiens
tctcaccagactgatggtgccatgagggcaggggcaactcctatcctaaggcgtggcccatagtaaggggtattggttagaagaatgaaagattgaatacrtcaaagtgatgagtacagagctgtctgtcattttcttatctttggcctaacaactgaacacattttatgaaatttgcaaatctgtttccaaacatgtttg

SEQ ID NO: 15416 - DNA, 201 bp, Homo sapiens
actttacattttgagtttcgatttttttttttcacctgggctagtaatacgtggtaggatactctctcacaatgctaggccacagcagcgagctgcagctyccagtgatcacaagggcaaagaatcgatattctaccaggcacggtgttgcctgataaccttgcccagctgtaggctaatgtaagtgttcttttttatatt

SEQ ID NO: 15417 - DNA, 201 bp, Homo sapiens
tgctaaataaggcaggaaattccattaagtttaaatgtgctgcccttaccctaaagtgtttggagggcttcgtagaagagccaaatagattcacacagatyttatttgtagagctgaatgtgcacttcattaaaatactttgtaaggtattcaaggatgggctaggagggtgaggattccaaatcagaatcttcaagccag

SEQ ID NO: 15418 - DNA, 201 bp, Homo sapiens
caaatgaatgaatgtatgagtgggtcaagaacaagattcggccccaaggagatacgcgactttctactttgttttctatttggatttcacacaaaggctckaaggtctcctggtaggccatgctcagaagtctgggttgtcccctgcccaggacaggctcaccctggcctgtgtcctaggtattgtggggccgctgtagga

SEQ ID NO: 15419 - DNA, 201 bp, Homo sapiens
gcagtcagaggcctcaatggtgcctgtgtccacagggctggctgtcctcaccgtgaagtctagatctccctgctaacttacactgtgctcaaaacacacacacacacacacacacacacacacacacacacacacacactggctgtcctcactgtcaactctagatctccctgctaacttacactgtgctcaaaaaacaca

SEQ ID NO: 15420 - DNA, 201 bp, Homo sapiens
tgaaggagaagcaggagttggtataccaatattcccactgtgccagcagagagcgggttatccttactagagagccagagagtcagaacggtttttttttkttttttttttttttttttgagatggagtttcacaattgttgcccaggctggagtgcacgatctcagctcaccgcagcctctgcctgccgggttgaagcaa

SEQ ID NO: 15421 - DNA, 201 bp, Homo sapiens
ttgcccgttgacctccatataagtatctgcatttgctgcatcattcatgacatgtgaggcctttgacaaaccctcctatggtgcagcttcctccgagcagstcctaaggaagtgccagagtcagggctttcctctgcctgaattatcggagctcttggcttaatgtgggagaagagatgaatgatctgtccttctatgaaa

SEQ ID NO: 15422 - DNA, 201 bp, Homo sapiens
atctgatgggtgtatcaggagtttccgcttttgcttcttcctcattttctcttgccactgccatgtaagaagtgccttttgcctaccaccatgtttctgargcctccccagccatgtggaactgtaagtccagttaaacctctttttcttcccagtctcaggtatgtctttatcagcagcgtgaaaacggactaatacagt

SEQ ID NO: 15423 - DNA, 201 bp, Homo sapiens
ttcctacattcaacattgtactctaatatccagtaaagtgaaacaaacaaacaaataaatacacttttttcaagaaaaaataaatatctgtgatctcatcrtttgaccgtcagtattttcatttttgcatgtgccactttaatttccctaggcaacactagctagtggcccacaataagacgtagaaaacaagaccacgta

SEQ ID NO: 15424 - DNA, 201 bp, Homo sapiens
ttcagtgttggatgttcaccgcttctttagggttctaccactcccagtaaatcaagtaataggtttctgttaaaaaccccagtgtgctgatctcagtggcrgccatcttgctttgtaagccttctctagctttatgatgctcccagtatataagacatttccagtgtctagtccaaattagtatttctctaattctcgagt

SEQ ID NO: 15425 - DNA, 201 bp, Homo sapiens
gcctgggtgatagagcgagaccctgtctctgaagatacaagaaggccacatgtggtggttcacccctgtaatcccagcagtctgtgagactgaggcagaargattgcttgagaagtttgagattggcctgggaaatatagcaagatcccaaccctattaaaaaattaaaaatgaaaataaaattttaaagaaaggtatttc

SEQ ID NO: 15426 - DNA, 201 bp, Homo sapiens
acccacagaacactggctcctcatcacctccccaagcccagcccctggcaaccaccattctcccctactttgtctatgaattcgactactcttggtacctyatataagtggaatcacacagtgtgtgatgtgttcttttgtggctgacttatttatgatactggattctcagcatcatgggagttaggactgtctgtcgca

SEQ ID NO: 15427 - DNA, 201 bp, Homo sapiens
ctcccagtatataagacatttccagtgtctagtccaaattagtatttctctaattctcgagtgtctgatctgcctggctagaatgattaaaacaaaaaaayagcaaatcagtttgacagtccacttcattaagtggaggacagtgttttgattgctatttaatctgtttttccttctgtctgttcttggctatatggaatt

SEQ ID NO: 15428 - DNA, 201 bp, Homo sapiens
ttttaaatagttaatccatttaagaagtttcatttaaggtactgttaaaaagaaaaaacacagaacaacacagtgagagcagaaaaggtatcatctcctcyccctcttcttctcttttagaaaccttgctgcgtgatccactgatggtaaatatttcatgtactttgcatatcagcctgagttccttttgtgaagtcaggt

SEQ ID NO: 15429 - DNA, 201 bp, Homo sapiens
taagtgatggctgcttatggccatgccctttcttctgcactttgggtgttttgtctggaattttctctcctttccttttgtgaaaaaggatgaattttccragactctgttatgacagaaactcaccagttctctgttgttaatcaacaaatagattgtgaatgcttgactcttctttttttttttttttaaaggagtttc

SEQ ID NO: 15430 - DNA, 201 bp, Homo sapiens
cccagattgatcttttctggatattgggtcaaccataagatggtacctttccctgtgtaacaaagtcagattctgtgaaacacctgttttttgtatggctyatgagatgaggatgatttttacctttttttttttttttttcccttgagacagtgtcattctattgtccaggctggagtgcagtggtgcaatctcagctca

SEQ ID NO: 15431 - DNA, 201 bp, Homo sapiens
agagctgcaggcattaatgcaaagctgcactgcctcacgaggtcgctgatgcactctcattccttttcctccagggactcctgcactttgccaggcgtggrccagaatgccactcgtattgtttatcttaatgcttagtgatagtagctacctccagtgcacgccgcattagcctctccaatgagtttctcctttatttta

SEQ ID NO: 15432 - DNA, 201 bp, Homo sapiens
tcaggaaaattcaatctcgttaatacttttggagggaaaagaaggcaagcgtactcttcagagaacggattcttttggatttgtgttagagaaaaactgtstctaatgaccgcacagcacaaagcaaagcagttaaatgaataaccgccttccagtacagataataaagcaggagaattttgtgtgtcacatcaataaaca

SEQ ID NO: 15433 - DNA, 201 bp, Homo sapiens
tgcagggaattattgcagttttgttttttatttagcacaaacctaaatattacacgtagcaaatgtcacccgatgcaactgtctgtcctgaagaggaggayagattattctgtggctacctaatggtgtttacagagttgccactttgccaaaccccaagacccacacttggtctctggtgttgggtccgccagctctcca

SEQ ID NO: 15434 - DNA, 201 bp, Homo sapiens
aatgtcacccgatgcaactgtctgtcctgaagaggaggacagattattctgtggctacctaatggtgtttacagagttgccactttgccaaaccccaagasccacacttggtctctggtgttgggtccgccagctctccacccttcagaatgggatgtttagggcgtaatcttctgagacccacaacctaagccgggaagc

SEQ ID NO: 15435 - DNA, 201 bp, Homo sapiens
ggatgtttagggcgtaatcttctgagacccacaacctaagccgggaagcagaggcaatttattaccccagcttcctgtccactggaggcccggggagaccktgaaatgctcagctgcaagtcagggtccaccgatgcagcctcggaatttaatgaggcctctccggacccaaagggagatggacatttctaggcttgtgga

SEQ ID NO: 15436 - DNA, 201 bp, Homo sapiens
ccctcttctctcctggtgagaccgttgttggatgtgaaaaggccttcactattgtcaaggctgggcccctgcttttgccttgttactctgcattttaactstggaccagaattgattgccaccaataaaagatactccagtccttaaaaagtcaacattgttatgttttacttagttatgacttagtgaacacctatacga

SEQ ID NO: 15437 - DNA, 201 bp, Homo sapiens; identical to SEQ ID NO: 2521

SEQ ID NO: 15438 - DNA, 201 bp, Homo sapiens
cagacccttgcaacaaaatcttacgtggtcctggatgaaaataacactggaggtaagaaaccttggcctagagggttccccaacctttttttttttttcaktatggccccctcccccaggagccttttgagatacgactttcctaatggtctttgcccatgaaatctgaataccacagatgtgctgaatgcctgttcgtgt

SEQ ID NO: 15439 - DNA, 201 bp, Homo sapiens
acatggcaaccaaataagagtagctggagcagagactttctcttcttcagattattaagatttgagcaattcattttttttggatggtgtttattaaagtmaagaaatcttttgcttatttgctaatgattctctcccctttctcttcttatatttttgaaggctgaattggtaaaattatctggcccaataaaaatatgt

SEQ ID NO: 15440 - DNA, 201 bp, Homo sapiens
tggatgtattgtcacccctgttgggaatacaccgctcagagaagggttttgtccataggcaacacagagccaattgaggcctttgggcaagcggaggtcawgatggaattcagcctttcagacaattctgccaggcccttggagggtgggaggaaacaggcaagacctctggctcctagaaccgtaaggacccttgccatt

SEQ ID NO: 15441 - DNA, 201 bp, Homo sapiens
atctggcccaataaaaatatgtcctgggttggaaaagagcacaagtttctttttctagccctggagtgaggtggctctctggcctctgggttcgtttggtrtcctggggagtcattgacacccacacactcctagtcacaagacctttccctcccatccagattgtgtttattttacggctctcgcacggagcatgcagct

SEQ ID NO: 15442 - DNA, 201 bp, Homo sapiens
tgggcaagcggaggtcaagatggaattcagcctttcagacaattctgccaggcccttggagggtgggaggaaacaggcaagacctctggctcctagaaccrtaaggacccttgccattaggaccaaacctcttccagctttctcagcagccacatgtcaccccctcttccaccctttgccctgccaccctccatcccctga

SEQ ID NO: 15443 - DNA, 201 bp, Homo sapiens
ctttcctttataaaccacccagtcttgggtatttcttcttagcagcatgagaagggactaatacaggggtgatcacaaacagcctgcagactgggccatckttcttaggcaggatctcgagctaggagatgagaagagctctataggcaaaaagaatgacttggaaggccacatatggcagagtagctaagactttggggt

SEQ ID NO: 15444 - DNA, 201 bp, Homo sapiens
gaattcagcctttcagacaattctgccaggcccttggagggtgggaggaaacaggcaagacctctggctcctagaaccgtaaggacccttgccattaggascaaacctcttccagctttctcagcagccacatgtcaccccctcttccaccctttgccctgccaccctccatcccctgataccctcctgccttttagttgc

SEQ ID NO: 15445 - DNA, 201 bp, Homo sapiens
ttttgtcagttcatctatctgtccatctctttgtccatccatccaactacccacttacccatccatccatacatttatccatccatctacccacccatccrtccatccatccatccatgcatccatccatccatccatcatccatccatgcatgtaagttgcagacatcaacaaactttacccttaaggactttggctggc

SEQ ID NO: 15446 - DNA, 201 bp, Homo sapiens
ccaaagtatgcacgccgcactccacctcccatgcccttttctttttctcagggccatcagaaaggaagtaactggcttagatttgacacctctttttttgktcgttttatgtttttgaatctagcatgtataagctcatcagagagctttcccctggcctgggacaatcaggtttcaactgaggctcacgcacacgtcaac

SEQ ID NO: 15447 - DNA, 201 bp, Homo sapiens
gccactgtgcccggccttagatgaggtttgtagatgtgtttttcatattcccaaagccatgaaatttgacaggtaaatatatcagttataaaagttttagsattaattatcaactaactcccagaagttgcctcagcctctctttttcagccttgtcttgccccagcccagagacaagccacagctataggttttatttct

SEQ ID NO: 15448 - DNA, 201 bp, Homo sapiens
ctggagtgcagtggtgcagtcatggttcactgcagcctcgatctcctggggctcaagccatcctcccacctcagcctcctgagtagatgggaccacaggcrcatgccaccacacccagctaagttttgtatttttttgtagaggcaaggtttctccatgttgccaaggctgatcttacactcctgggatcaggagatccgc

SEQ ID NO: 15449 - DNA, 201 bp, Homo sapiens
tcttattggaacagctggttttccctttaaaacagggagtccagcagcttctaggatgcttagaatcagaattgttgctcactttttaaggtatagagtakttgtcttattcttaactacattttatatctttgcccttttttcccctactttaaataaaatctatctctaatttatgttacttaagcaatgacaaattct

SEQ ID NO: 15450 - DNA, 201 bp, Homo sapiens
ttctttccttccctttttccttttctttccttctttccttgccatttaaaacatactgataacttggcagcacagggcagtgattaaactcaggcactcaycccaccctacctgggaatctgaattctgtcttttctgctgctgtggattctcagtccccaagttgtgtaaatcaaagcttctcctgccacactagtgtgt

SEQ ID NO: 15451 - DNA, 201 bp, Homo sapiens
aggaagaactcttccaaatgatggcagggatatttggaatctttccccctgagttccctctggaagttaaagcccagatcccgtgaactgattaaaaagcyccagaccattcccgttccagtcatcttgaaactgagcaagaccgtgtcatccatggagcttgaacataggagcactttaaaaaaaaaaagaatgaaaagc

SEQ ID NO: 15452 - DNA, 201 bp, Homo sapiens
tcttagaatcttctgaaataatatgcagcattatattccatttgtacctgggaagagggtacttgtctttcatcagagagtcaccaatggaccactggtcyctgctgatttagtgtcacagctcaaaaccatcagtagtcctcgtgatctttcggcattgtggctccctttgtgagaagggcctaagagtgaatctcccaa

SEQ ID NO: 15453 - DNA, 201 bp, Homo sapiens
ggaagaactcttccaaatgatggcagggatatttggaatctttccccctgagttccctctggaagttaaagcccagatcccgtgaactgattaaaaagccscagaccattcccgttccagtcatcttgaaactgagcaagaccgtgtcatccatggagcttgaacataggagcactttaaaaaaaaaaagaatgaaaagcc

SEQ ID NO: 15454 - DNA, 201 bp, Homo sapiens
caaagttacacaacggctgtaaaaaataaataaaaaaaaagcaaaattagcactttatcaagtttggggcatatttccaaggccaccagggagcagggaargtcaccaaaagaccgctccttgaaaccaggcaagaagccatctttgcagtgagctgagaggtctgatggccgccagctgagggagggaattccccttttg

SEQ ID NO: 15455 - DNA, 201 bp, Homo sapiens
caagggtaagatctgctgtcttgtgaatgtcaaagaagtttctcattcgcccctttcttctctctcccagtgtctttaatttgttaatgctttcgacttaytttgctttggataattttcaaagtactgctttctctagagatctctaaaaggcagaagttctggctattaaagatttgccattctcagaacagcccagtt

SEQ ID NO: 15456 - DNA, 201 bp, Homo sapiens
acccattgtacacatttggtattttttctttaaaaaaaaaaagcatttactttttgcctcatgaatctctgagtacattttgtgcattctgtattctactktatttactcaatattaattatatgagaaataaatcctaaatgtaattttgaatggtggcttcacaaaagaacatttcctcttcttttggacatttgctcc

SEQ ID NO: 15457 - DNA, 201 bp, Homo sapiens
gacagctctaggcagaaagcctttctcaggatcccagcttccctgtcttccagaactcaaagacggcttttgtttgttagttttgaggatggagacagctrtcattctaatgaggacttaaatgtgtccctgctgaccgagccagaacttatttttatgttgccactaggagtcttctgagatgctcttgtggctggatgt

SEQ ID NO: 15458 - DNA, 201 bp, Homo sapiens; identical to SEQ ID NO: 2533

SEQ ID NO: 15459 - DNA, 201 bp, Homo sapiens
agcacaggaaagacttgccctcatgattcagttacgttccaccggggccctcccacaacacatgggaattgtgggagcgacagttcaagatgagatttggrtagggacacagccaaaccatatcacagggtcacctgtaggttaccgtaaataagagaaacagaccaagtagagactcagcatagctggagggggggcccc

SEQ ID NO: 15460 - DNA, 201 bp, Homo sapiens
cctgaggcataaatgggttttaagctccatacagtaaaacctagcatatgaaaacagttctggctgatgggttggtagaagtgatagatatagatacatayatacacatatatgcacagtaatagatataggtaaagaccttgatatatgtacatatattgtatgatacatatccatgcatatacgtgggtgtacacacac

SEQ ID NO: 15461 - DNA, 201 bp, Homo sapiens
ctgcctcctaggctcatgccattctcctccctcagcctcctgagtagctgggactgcaggcgccagccaccacgcccggctaattttttatatttttagtmgagacggggtttcaccatgctaaccaggatggtctcgatctcctgacctcgtgatccaccagccttggcctcccaaagtgctgggattacaggcattagc

SEQ ID NO: 15462 - DNA, 201 bp, Homo sapiens
ctgtttgttttgaaccacttattttggcaagacttcttcagacaggagagccctgagagctcttcaaaggctgggcctgatggtgtttgtcagagaggttygagctcttaaatttaaatggcctcccacagggaagcagaagtccttttggatcctccagaggactgagatcctccagatgctgttcatttgccttattcg

SEQ ID NO: 15463 - DNA, 201 bp, Homo sapiens
aaagtctgtaccaattaagcagctactacccattcctcttccctaccattctaccttctgtctcagtaggtttgcctatttgggatattttatttaagtgsgatcatacaatagcatcatgtgttcaaggttgacccacattgtggcatgtatcagtacttcattcccttttatcactgaatagtattccactgtatattg

SEQ ID NO: 15464 - DNA, 201 bp, Homo sapiens
tgggtaatggctgaagaaaagaggtttaattggctcatgattctgcaggctgcacaggaagcatagaagcttctgctactgggggcgcctcaggaaacttrtaatcatggcagaaggtaaaggggaagcaggcacatcttacatcgccagagcaggagcaacagagagcgactggggaggcgctacacacttttcaaccac

SEQ ID NO: 15465 - DNA, 201 bp, Homo sapiens
atgaagggttcatcctcatgactcagtcacctcccaccaggccccacctccaacactggggattacaattcaacatgagatttcggcggggacacagatcyaaaccttatcaccagcgcttgttatttcctcaggtacattttgatgtccctccccactttactctcccctacaccttgaagcaggtgcaatcattttagg

SEQ ID NO: 15466 - DNA, 201 bp, Homo sapiens
agttaggcattggtttggctccaagtgaaaactgcttctgttattaacatcagcagcagcaacaagaagagagaagtttatgtctgtctcggaatacgtaygtgacaggctcccccatcgaggtgctcagatatggtggccactgcatgattttgctcaggactgaattagaggcaggtgaaaggccctcactccctggaa

SEQ ID NO: 15467 - DNA, 201 bp, Homo sapiens
tcacaattaattgtgccgcagttaattaaattgactgcctggcaatccagtctcaattaaaatactaatagtttatttatttattttgtcttttacgaagygttttcttttaccatctctcaggatcctatgtaggtatcctgatggtaagaatgataataccatgactgattattccatagttgcaggaaccccacatgg

SEQ ID NO: 15468 - DNA, 201 bp, Homo sapiens
cttcccacaattcccagtgagcccaactccttaccacaattcccaccccatgccttccccaaattcctgatgagccctatgccttcccacaattccctgtraattttgctccttcccacaaccccagtgagccccactctgtcccataattccctgtaaatctcactccttcccacaatccccactgagtcccattccttc

SEQ ID NO: 15469 - DNA, 201 bp, Homo sapiens
gaataagtattttgcagggcttattttcatcatctggaaaggaggaatagatagggttatcttgaaagtcctctcttggaagggattatggttctgtaatsctgtaggactggactcagtgggtaaatgtagaggtgatggtatctccgtttttattgtcttcagaaatgttgagatcgagtgatataaagtcacagggtt

SEQ ID NO: 15470 - DNA, 201 bp, Homo sapiens
ccactccttcccacaattcccagtgaaccccacttgtgtagtgtgtctgtgagtagtctgcccactctccttatgacaggtttccagtattatctgtttcmtaacccatttccaaccttctgggttttttccttcaacgttttcctgtgacagttctccattatatctttgttagataatagttagcaacccattaataac

SEQ ID NO: 15471 - DNA, 201 bp, Homo sapiens
ctttgcagacccctgggagcctcattcgagttcttcctgtggagtcccatgccttggtgttgaaccagtgtcctagctgggaggaccgttgtactgcagcrctttcctaaactctgcatgtggtctccatgatgtcctggctgtgttagcatcagaaatggctttgcccacatctcccaactctgccctcttattaggatt

SEQ ID NO: 15472 - DNA, 201 bp, Homo sapiens
tgttagaaaaggtattttttttatgaagtaagtagggaactaactacctgttcactgctgcccgttcattgctagcacaatgccaagtgtcaaataaatgyttcttgaacaagtgaatagagtacgcttctaggcttctggaaacggtgaatgttgctttatgtggcaaaaagggactttggagatgtgatcaagttcagg

SEQ ID NO: 15473 - DNA, 201 bp, Homo sapiens
ctgggaactagctaaaattagggagttaaaatgatccagcttagctcaggctatagggaggatttctctcccaggtgtttgttttgttttgtttttgagawagggtctcactctgtcacccaggctagagtgcagtggcctcaacctcccaggcccaggtgatcctcccacttcagccccctgagtagctgggactacagg

SEQ ID NO: 15474 - DNA, 201 bp, Homo sapiens
tatgtagtcatatatatatatgtgtgtgtgtgtgtgtgtatgtatatatatgtgtgtgtatgtatatatatgtatgtatctgtatatgtataatggctgtmcatgatataattttgagttggaaaaagcaaattgaagaataatacatgtattatcatgtctttaaaaaaaaactatacacatagctgaatgtttttgtgt

SEQ ID NO: 15475 - DNA, 201 bp, Homo sapiens
tgaccatccatctccagaatgattttcatcgtgcaaaactgaaacgctgtacccacagaacactggctcctcatcacctccccaagcccagcccctggcarccaccattctcccctactttgtctatgaattcgactactcttggtacctcatataagtggaatcacacagtgtgtgatgtgttcttttgtggctgactta

SEQ ID NO: 15476 - DNA, 201 bp, Homo sapiens
ttattttaagttcaggggtccatgtgcaggtttgttatataggtaaactggcgtgatgggggtttgttgtacagatgatttcatcacccaggtattaagcmtagtgcccattagttatttttcctgctcttctccctcctgccaccctccaccctttggtaggccccagtgtcttttgttcccctctttgtgtctatgtgc

SEQ ID NO: 15477 - DNA, 201 bp, Homo sapiens
atcacttttaaagaatctgggcttacccagttaacagaaatagaacctgcctgtttatcagtgggtttgcctcacttttctgtgggtttcttttcttttcytaattatgcattaagaaaataacttaagtttctgtgcatacaacatcttcctttctcattcccagtaccctagaaacacagccgttcactgaagaggatt

SEQ ID NO: 15478 - DNA, 201 bp, Homo sapiens
gggaagagatcacttcacagtttcctgaaccactagaaaaaaaaaatgttcataaatttatagccgctgacattgaagttggagaaaagagcatatctagyacctatgctatgtggagaacactctccatgtctttgaaaaataagcacaatacaaattatatttgaggatgacctgccaaagggttgattatcctggaaa

SEQ ID NO: 15479 - DNA, 201 bp, Homo sapiens
atatgtagtcatatatatatatgtgtgtgtgtgtgtgtgtatgtatatatatgtgtgtgtatgtatatatatgtatgtatctgtatatgtataatggctgkacatgatataattttgagttggaaaaagcaaattgaagaataatacatgtattatcatgtctttaaaaaaaaactatacacatagctgaatgtttttgtg

SEQ ID NO: 15480 - DNA, 201 bp, Homo sapiens
ttctttagtggcgatttatcagatttcagtgtacccatctgagcagcatatgctgtacccaatatgtagtcatatatatatatgtgtgtgtgtgtgtgtggatgtatatatatgtgtgtgtatgtatatatatgtatgtatctgtatatgtataatggctgtacatgatataattttgagttggaaaaagcaaattgaaga

SEQ ID NO: 15481 - DNA, 201 bp, Homo sapiens
caggggactgttgttattcctcctttacagaggtgggtctgaaggtacagagtggataagtcattttctccgggccagccacacagcgaatgaatggagaytccttgtgtgtagtaaatggctgcagccctataagctataatcatatatcatcaacacctttaccctgttattaacgtgtctgaaattagggaacaccac

SEQ ID NO: 15482 - DNA, 201 bp, Homo sapiens
ccacctttctgaagaaaactgcagagcttttgcagttattaaactagcaacagatgtaaagtccaactgttagagtttttctttaaagcagaagttagcarttacaggtgcttgtgatgtcatcacttagatgatcttataaatgccttttttttttttttttttttttttagtcggagtctcactctgtcgccaggctgg

SEQ ID NO: 15483 - DNA, 201 bp, Homo sapiens
gccaggagggtttctctgaggagatcccatttcaacagatctagaaatgtaatggagccagtcctagggaaacaggactaccaggaatcctcaccagcccsgcaaagacgagggagcagcaagttccaaagcccgtggcatgtcaagggtcgatgaattcaccaactgcaaggggctttggtgaccccagtgaacagatga

SEQ ID NO: 15484 - DNA, 201 bp, Homo sapiens
gatggctttctttccagtataataaagacagtgcctccttccaggacaacggtttggcagatttgcttgataaaggttggggtttgtaagcttggggctcytcagccatgactgaaacgtactatgagcacggcatctaccgggctgttccacatcctccctgtgggactaggggccagggcaatgggaatcagtgcagaa

SEQ ID NO: 15485 - DNA, 201 bp, Homo sapiens
tacagcttttaaggagaactaacttgccactttgatagcagtataggactccaatatttctcatttgtaattttcagaagcacacgggaggtctttgaaayttaatgtctccctgcatcacaaaccaaaagacgagtcagtttataagtaggctgtgcttattaactcagtcctggctttattgattgctttaggttccat

SEQ ID NO: 15486 - DNA, 201 bp, Homo sapiens
tccctcatgtttcaagtggcttttttgcatgatggtgcatatgtctttgtttctgtacagggccctccatgttcagaggcagagtaacgtgaattcatttygcgctaatgagagttgcgatatgtcggcccaaactctctgtgtccttttcttcttgggctgatgaacttgtcaacttttaaaaaatgtgctctccaaaaa

SEQ ID NO: 15487 - DNA, 201 bp, Homo sapiens
aggagtttgagaccagtctggccaacatggtgaaaccccgtctctactaaaaatacaaaaacttagctgggcatggtgacaggcatctgtaatctcagctmctcgggaggctgaggctggagaatcacttgaacccgggaggcagaggttgcagtgagccaagatcacgctattgcactccagcccaggcaacaagagcaa

SEQ ID NO: 15488 - DNA, 201 bp, Homo sapiens
ccccaatcgatcagtggagaaacgagctctggtgggcagtcaggcaaagcagatacacgtgcttcttttcagctttgttggaaggtttcattttgcttcasgaactaggcaggagaattcctgagttcctgtacaacctgagttctctgttaaaacaaggaggaagtaatcatcctgagttcgatgattcagagtaagcca

SEQ ID NO: 15489 - DNA, 201 bp, Homo sapiens
tcagagtaagccatttaacttgtagagctttgggactaacaatgatccctttttggagtccttaattactaaaattatcagcatatttagagttctgaagwtgctgaacccttattgtatctccccagggttagtgagtaattgggaatagtgttccatcttggatgcccccatccactaaccagctttcctcttcgggtg

SEQ ID NO: 15490 - DNA, 201 bp, Homo sapiens
aaacttctttccacaagagtaggtttataatttattttctttacattatctggataattacatttggtttgcttacatagatggaggcgaatggttttccratcttcaaaccaacctatatcacaaaagcattctgaaaactgggaagagatcacttcacagtttcctgaaccactagaaaaaaaaaatgttcataaattt

SEQ ID NO: 15491 - DNA, 201 bp, Homo sapiens
acagatctagaaatgtaatggagccagtcctagggaaacaggactaccaggaatcctcaccagccccgcaaagacgagggagcagcaagttccaaagcccrtggcatgtcaagggtcgatgaattcaccaactgcaaggggctttggtgaccccagtgaacagatgagaaaggggaggaggctgggatcagtgcacagctt

SEQ ID NO: 15492 - DNA, 201 bp, Homo sapiens
cggggtttcaccgtgttacccaggatggtctcgatctcctgacctcatgatccacctgccttggcctcccaaagtgctgggattacaggcgtgagccaccrcgcccgactgctttattttcctttgtgttcctaatacctggcccagtgtctggcaaatggaaagttcccctggatgtagttgggtgacactatgagtgta

SEQ ID NO: 15493 - DNA, 201 bp, Homo sapiens
agccccagttgttttgaagcatgtcctatcattaacacaggtaatcaggatatattcattgaagtctcactgtgtgccaggcactatgctatgcaccttaygtgtgttattttatttcatccttccagctctgggaggtgatgactgtcatctgcattttgcacatgacaaatctgagggtcagagaacttgcccagggtc

SEQ ID NO: 15494 - DNA, 201 bp, Homo sapiens
tccccgttctggagagcctttgattataacatcagcctgtcatttggacctctgacctgaattatatgaatctgaaaaatctcttcctttcctatcgtgarttcggtcattgttataagccaagctttgcaaaggtggaacaccttggagatacttatctcctccttactctacccaagtaatgactcatccttttataca

SEQ ID NO: 15495 - DNA, 201 bp, Homo sapiens
agaatttggggagattctgctctaaagggaaaagctttgtaaaggagaattaccagtagagtgaccttataatttaccatccaatggattttgaatacttytgagagagaaatgagatactgataataattataccaagacaacagacataaattgggattggcctagacgagcaaagatgaatggtcattctgtctgtta

SEQ ID NO: 15496 - DNA, 201 bp, Homo sapiens
ggtgcaatcttggctcactgcagcctccacctctgcctcccaggttcaagtgatactcatctcaagtggtttctacctcattaaaacaaacaaacaaacascactcaccatttttgtggtgggcatggtggctcatgcctgtaatcccagctctttgggaggccaacgcaggtagatcccctgaggttgggagtttgagac

SEQ ID NO: 15497 - DNA, 201 bp, Homo sapiens
gcagctgacggccaaaggggaagctgagaacagcaaagattcaactgaaaacattttagggggttcctgacttcaggcctcttttcagaatgagggaattrtctaaaatcccaaatgcattcttagctaaggtcagtgtgtctgggtctgtgtcaggcatgtagcagccacagcaaacttctcttgagatagcatctcctc

SEQ ID NO: 15498 - DNA, 201 bp, Homo sapiens
agggatggttctgtggtgtcccacactcaaataaacatcctttaaatacctctagatgcttataattcctgttgcagccttagtcagtgggagccactgasctgcattcgtgtaggaactgagcaaggttcatctagtctcggtagctagctaccccgagagctggctgattttttttttcttaaatttaattcaagactt

SEQ ID NO: 15499 - DNA, 201 bp, Homo sapiens
tcactggctatgaaaatggccccaaataaagtggtatccacacttcttctttctcctacgaatttggaggtctaggaacgggggtaagcctatatggtcakaattagcctgcaaacgtgaattaatatgcagaatctgtccccactgtgatagaatttgccattcgcttcctttgctaaatggcttgcagtggcagctgac

SEQ ID NO: 15500 - DNA, 201 bp, Homo sapiens
ctctagatgcttataattcctgttgcagccttagtcagtgggagccactgacctgcattcgtgtaggaactgagcaaggttcatctagtctcggtagctasctaccccgagagctggctgattttttttttcttaaatttaattcaagacttcatgaagtcaacaaaatggtctgttggaaattattcctaacccccaacc

SEQ ID NO: 15501 - DNA, 201 bp, Homo sapiens
ttagtcagtgggagccactgacctgcattcgtgtaggaactgagcaaggttcatctagtctcggtagctagctaccccgagagctggctgatttttttttycttaaatttaattcaagacttcatgaagtcaacaaaatggtctgttggaaattattcctaacccccaaccactgtcactgccacaatcaaacatattttc

SEQ ID NO: 15502 - DNA, 201 bp, Homo sapiens
aagaaagtacacaaatggagagagggggaattggacatgccattgggagaacaaatttatttagatatctttggctgtgttgacagaagctgcccaattawacccaatatacaaattttaaatgcatattagtcaaagttccagttatgtagctttagaaaaatttctatgtgaatgactacttttccctgaaatacgtcc

SEQ ID NO: 15503 - DNA, 201 bp, Homo sapiens
cgcctgccttggccttccaaagtgctgggatatacattttttttttttttttgagagatggagtgtcactctgttgccgaggctggagtgtagtggcgcartctcggctcactgcaacctcctcctccggggttcaagcgattctcctgcctcagcctccccagtagctgggattacagtcgtgtgccaccacgcctggtt

SEQ ID NO: 15504 - DNA, 201 bp, Homo sapiens
tctacaaaaaatacaaaaattagctgggcttggtgacagacgcttgtagtctcagctactcgggaggctgaagtgggaggatctttagagcccaggaagtytaggctgcagtgagccatgaccttgccactgcacaccagcctgggtgacagagggagaccttgtctcaccaaaaaaaaaaaaaaaagagagagaggttga

SEQ ID NO: 15505 - DNA, 201 bp, Homo sapiens
agcttcccaaagaagagttgtggagaaggaaaagtgaaggaaagtaccttactaagtcattgatggcacattcagcccttgtcaaagtcaaagaagaaatytggagaaattctcaccactgtgcttaggagtcaccctgaactatttcttggatgaaattaccaccctcccacttttggcaatgagacagcaagcttggaa

SEQ ID NO: 15506 - DNA, 201 bp, Homo sapiens
gtgttctgcgaatcccggtctctactaaaaatacgaaaaaaattagccaggtgtggtggtgggtgcctgcaatcccagctactctggaggctgaggcaggrgaattgcttgaacccgggaggcagaggttgcagtgaacccagattgcgcctctgcactccagcctgggcaaaagagtgacactctatctcaaaaaaacaa

SEQ ID NO: 15507 - DNA, 201 bp, Homo sapiens
agagtgacactctatctcaaaaaaacaaaacaaaacaaaaacaatttggctccagtgagctcattttacgttgtatgtaccagtatgcaagtgttgtatgsatgtgagcgtctgcgtaggtttttatttttctctctcagaatgaaaggtttgattcgtaccagctccccatcccttcccacgatcccatcttaatgtctg

SEQ ID NO: 15508 - DNA, 201 bp, Homo sapiens
aatactcccttctggacactggaagggcaaatgaggtgcaagccttttttttttctttcttttcttcttcttcttcttcttttttttttttttttttttgkttttcctcccagcctctctcctttcccattatgcacaatgcgctgagaaaggattcccagtccccctggtaaaaagtctgaaggatgccgaggagttcac

SEQ ID NO: 15509 - DNA, 201 bp, Homo sapiens
aaaatcacttttaaaaaatgtatggtgtccatctgggttagcaaacacatgctcacacgtctgtgcttgctggatttttaagaacttaccagcatttaagrttttcttatgaaactgattttactcaccagggatagagtctcaaagttggaggtattttatgttgttttaaataatatcgtcatcacatgtcattttaga

SEQ ID NO: 15510 - DNA, 201 bp, Homo sapiens
taaaactctgcctttctaaagaaacagggacacggtgcagaaaagttcatctggagttaggcttgtgtcttgctgtctctttaacggagagttcatgggcwgggtacagtctgtgagaaggaatgaaaaccccagggtagatgctaacaaaaatcacttttaaaaaatgtatggtgtccatctgggttagcaaacacatgc

SEQ ID NO: 15511 - DNA, 201 bp, Homo sapiens
caagtgattctcctgcctcaccctcccgagtagctgggataataggtgcctatcaccacgccgagctaatgtttttggatttttagtagagatgggttttmgccatgttgtgcaggctggtctcaaattcctggtcccaggcgatctgcctgtcttggcctcccaaaatgctgggattacaggcatgagtccccatgccca

SEQ ID NO: 15512 - DNA, 201 bp, Homo sapiens
aataaatatctgctagtttttaaagtttgagaaaaacccgtattgtggaatgaaaatgatactgacaagggaatacatctagatcagaaatactgatatcstaagtgagatcttgttttttaaaacaaaaaaaagtttaagaaattgtcatataggctgggcgtggtggctcacacacataatcttagcactttgggaagt

SEQ ID NO: 15513 - DNA, 201 bp, Homo sapiens
gcactgttccaactccagtctggctgctttttcaacctggggctttagtcatgtcaatattcctgagcttccatgtgcttatttgaaaaataggaagattygtccagtctcaaggaactatgataagtagcaaacaatatcccagaaaaatctccagtcaaaaatccactggaggccaggtgcgttagctcatgcctgtaa

SEQ ID NO: 15514 - DNA, 201 bp, Homo sapiens
ctgatgtctcagcttgaagtcaggcatagagaggcaattctttctcactcagccttttattttattcaggccttcaacagattgtatgaagccacccacaytgggaagggcagtctgctttactcatagtactaatcgaaacgttaatgtcctccagaaacgccttcatggacacactagagataatgtttaacataatat

SEQ ID NO: 15515 - DNA, 201 bp, Homo sapiens
tgagatcttgttttttaaaacaaaaaaaagtttaagaaattgtcatataggctgggcgtggtggctcacacacataatcttagcactttgggaagttgagkcaggagggccacttgaggccaggagtttgaaaccagactgggcaacacagtgagaccccacctctacaaaatattttaaaattagccaggcgtggtggtg

SEQ ID NO: 15516 - DNA, 201 bp, Homo sapiens
gcatcattgcaaagtattagaaagggccctgcctgggctaggagccagaagcattcttcagttcccaacggccatccagccactcattgctgtgtgagctstggctggtcagtaagaacctttgatcccatgtttctttatcttcttctttttttttttttttttagccatagtctcactctgtcacctaggctggagtgc

SEQ ID NO: 15517 - DNA, 201 bp, Homo sapiens
gtgtctgtctgtatctttacacacctatgggtgtgtctgtctgtatctatacacacctatgggtgtgtctgtctgtacctatacacacctatgggtgtgtstttctgtatctatacacacctatgggtgtgtctttctatatctatacattatatgtactaaataatatatataaacactatagtatatagagtatacata

SEQ ID NO: 15518 - DNA, 201 bp, Homo sapiens
gatcaagcagagggcaagtggtagattctagaatttgcatccaggcagttgagtctagaattgtctttgtgtattttgctccatggtctagcacaggatcmccattggtagatcatcacttagaatgccatcactaccttctaacagcaatcagtccccttaagtggctttcttctcttttttttcttttatctttttgtt

SEQ ID NO: 15519 - DNA, 201 bp, Homo sapiens
cacctgcttcccattggccagaattcagtcacatgatcacaaccaactgcaagggattctgggaaatgtagtctggtgatgcctcgaggaggcaagagaartgttttcagtgaacacattgccttctcaggcttgctttctattgtagattgcttacaatattgcttttaaattgcatggtcttgtacaaatgatacgagt

SEQ ID NO: 15520 - DNA, 201 bp, Homo sapiens
tatatctgtatctatatctaatctattttttgagaaaggctctcactctgttgctcaggctggagtgaagtgatgcaatctcaggtcactgcaactgctgyctcatgggatcaagtgatcttcacacctcagcctcccaagtaactgggaccacaatgcccagctaatttttatatttttttgtagagacggtgttttgcc

SEQ ID NO: 15521 - DNA, 201 bp, Homo sapiens
ctcttctttttttttttttttaaaggagtttcaagggtaagatctgctgtcttgtgaatgtcaaagaagtttctcattcgcccctttcttctctctcccastgtctttaatttgttaatgctttcgacttattttgctttggataattttcaaagtactgctttctctagagatctctaaaaggcagaagttctggctatt

SEQ ID NO: 15522 - DNA, 201 bp, Homo sapiens
tgcaataggaaatctctttatttcgttggtgctcaagtgataccattaagtcccttaagatgcggaatttccttgcccccgctgccccctttctttctttyatcttatctatatatctgtatctatatctaatctattttttgagaaaggctctcactctgttgctcaggctggagtgaagtgatgcaatctcaggtcact

SEQ ID NO: 15523 - DNA, 201 bp, Homo sapiens
tgttaatttagtcagacgaggaaggaaacgagaaaagttattcctatttcatccatctaagactttatatcccatttcaggctgattaaaaggcaaaatcktcacagtaggacaccaaaccctctgtatgccctgcctgcctccccccctctgacccgcctgcctcccccctgtgagctttttccacctactggcctcttg

SEQ ID NO: 15524 - DNA, 201 bp, Homo sapiens
gattgtccacagctctgctctctgctcaccccggggatttagcagtaacagaatccacactagaaggacagagtgctgtacagacagaaggaaagacgcasacccaaaccttgataaccatggcaatgcaataggaaatctctttatttcgttggtgctcaagtgataccattaagtcccttaagatgcggaatttccttg

SEQ ID NO: 15525 - DNA, 201 bp, Homo sapiens
agtcacgtagaaagcagttattgtttccaagttccctgcccttgttaaatgtcagctttgagtgaaaatgttcctaattttactcagagtgcaaagaacayccaggtcaggtacctgacctgcttgattcatgtcttggaaacactcctttgtctttcagagaaagtaaagagtgatggagacagagagagaaagtgtgac

SEQ ID NO: 15526 - DNA, 201 bp, Homo sapiens
taatctttcccacctttttgattgtgagtcttcagaccctccccagagagtcagtcctgccttatgccctggggaaaggaatgctgacctcatgaagctcycataaaaacccaagagggctgggtttgggagcttccagatagctgaagacaaggaggttcctggagcgtggctgcctaggaagggctggaaagctccatg

SEQ ID NO: 15527 - DNA, 201 bp, Homo sapiens
ttcagagaaagtaaagagtgatggagacagagagagaaagtgtgacctactttttattatcagcaccatttcatctgcaaaacacgacttttctcttcttrttacgctgagcatgaaaataaaatgttttccaaaagacctggctttggctgttgtgaggaaggccagggacttgttcaaaactctgatgagctcgatgag

SEQ ID NO: 15528 - DNA, 201 bp, Homo sapiens
agggctggctgtcctcaccgtgaagtctagatctccctgctaacttacactgtgctcaaaacacacacacacacacacacacacacacacacacacacacmcacactggctgtcctcactgtcaactctagatctccctgctaacttacactgtgctcaaaaaacacacgcacgcacgcacgcatgcacgcacatacacac

SEQ ID NO: 15529 - DNA, 201 bp, Homo sapiens; identical to SEQ ID NO: 2536

SEQ ID NO: 15530 - DNA, 201 bp, Homo sapiens
tttcatagataccactgacactatttttcacctcccatgttatcagtttgtgtaatagtagcttgctggtaatgtagttacagtaacaagttcaaatgacwtgtgtgttttttgagcaaacctggtgaacttttggtgcaaaactgatattgagagcaaataggccaaagcttgcttgagagaagtctcccaggccaccat

SEQ ID NO: 15531 - DNA, 201 bp, Homo sapiens
acgaaactcacatcttctttaaataaaatctccatttagaaatttttgaagacttgtggatagaagaagtaaccttgaaaagggcagagctgagccagacmccttttcagctgggtgctccctggaagatggatcttgccttgtggatgtttttctaccgtgacagaagatagaaaggatgaaatagaaagagtgtgagtg

SEQ ID NO: 15532 - DNA, 201 bp, Homo sapiens
cgaaactcacatcttctttaaataaaatctccatttagaaatttttgaagacttgtggatagaagaagtaaccttgaaaagggcagagctgagccagaccmcttttcagctgggtgctccctggaagatggatcttgccttgtggatgtttttctaccgtgacagaagatagaaaggatgaaatagaaagagtgtgagtga

SEQ ID NO: 15533 - DNA, 201 bp, Homo sapiens
tattcagttgcccagctcttttcattccctgtcctttccccctctggctgggtctgcctttccaaccgctaccaccttccaccaccattttttttttgttkcctctgcaagcaacatctgaaaggcccagacccagcttgttggccttgggctctgataagatctgtctgcactccttttgtctggcctgtacctgccttt

SEQ ID NO: 15534 - DNA, 201 bp, Homo sapiens
tgcctcagcctcccgagtagctgggattacaggcatgcgccaccatacctagctaattttgtgtttttagtaaagacagggtttctccctgttgttcaggstggtcttgaactcctgacctcaggtgatcccgcccgcctcggcctcccaaagtgctgggattacaggcatgagccatcgcgcccggcctagcctccaaca

SEQ ID NO: 15535 - DNA, 201 bp, Homo sapiens
tgttgcaaatttccagtggctagttcagggacagtgccggggcttgaacccctgtctctgtgtctcccagctcataaggtgtgctaccaagtcacccatgwgtagcaattaggcgacttctaacatgtccagctttaaacctgtgacctcaaggcaaatgacttccacatctcattagcactccccagagccttccagccc

SEQ ID NO: 15536 - DNA, 201 bp, Homo sapiens
cagagccagctcaagaacccagcgccagtggctgatgcttcttctttttttttttttttaatggattcttctaaggatggctgcatcagccaggggcagcrggtcatacctgtaatcccagcactttgggaggccaatgcaggcggatcatctgaggtcgggagttcgagaccagcctgaccaacatggagaaaccccgtc

SEQ ID NO: 15537 - DNA, 201 bp, Homo sapiens
gattcctccccattctataaaataacagctaccatttcctgagggcatactgagtgctgacaggcacatcaacatcagaccatcaccttcttatacctcaraatagtctgcagggtgactcagaagctcctggctggtaagtggcagatccagagatgaaacccagatctaactggacccaagacagaaatttctagaaca

SEQ ID NO: 15538 - DNA, 201 bp, Homo sapiens
gcaccattgcactccagcctgggcagcaggagcgaaactccttctcaagaaagaaggaatagctgcatcacttatgctcttgatggtacagaaaatgatcygcatggaggaaatctagacatcagcgattcagagtcaaaatgttattcaggggagagagacccttcatgtgaagaaattttaggaatactttaattattt

SEQ ID NO: 15539 - DNA, 201 bp, Homo sapiens
cttggcctgatgttaccagctttaaagagggaggaagcgtccaggagccaaggaattcaggcagcgtctagaagccagaagaggcaaggaaagagattctstcccagaacttccagaaaggcacgaagccctgctgacctttgattttagcacagtgatacccattgtggccttctgaccttcagaaaataaatttgtttt

SEQ ID NO: 15540 - DNA, 201 bp, Homo sapiens
aagagggaggaagcgtccaggagccaaggaattcaggcagcgtctagaagccagaagaggcaaggaaagagattctctcccagaacttccagaaaggcacraagccctgctgacctttgattttagcacagtgatacccattgtggccttctgaccttcagaaaataaatttgttttaagccactaatttgggggtaattt

SEQ ID NO: 15541 - DNA, 201 bp, Homo sapiens
gaccttaggtgatctgcctacctcggcctcccaaagtgctgggataacaggcgtgagccactgcgcctgtctacattttctgtctttactggtattatggygggaacccataaaccactgcgaggcagataccattttaagcaggaaaccttatttttttccgaagcacatttaaaaatattttccagtttatctattaaa

SEQ ID NO: 15542 - DNA, 201 bp, Homo sapiens
gcgatttaatttgctgctgaatgcacttttgaataaagggcctagaagatgcagtctcgaggaaccgaggccggttagagacaggctggcagctttgcctyctctcccaagacaaaggcctccccgcccccctaaatccagcacacaatcagctgctctccctccccctattctcagcaggagagtcaggatgcatatttc

SEQ ID NO: 15543 - DNA, 201 bp, Homo sapiens
tcgctgcaggctacttggttgtacttgagtaatttactcaagattctcttcagcccagtttccttatctgtaaaatccttccactgttgttaggaggatargaaagccagtattggtaaaaacatatatcagagtccttttgactgtttagaaagtgttaatttactccacgattatccattcaacatttattagttggct

SEQ ID NO: 15544 - DNA, 201 bp, Homo sapiens
tgcagcctctacttcctgggctcaagtgatcctcccacctcagcttcctaagtagctgggagcacaggcaccagcaatgacacctgcctaattttgtattktctgtagagatggggttttggcatgtttcccaggctggttttaaactcttgagctcaagccatccacccgccttggcctcccaaattgctggaattatag

SEQ ID NO: 15545 - DNA, 201 bp, Homo sapiens
ctctgaaagatttatctctttcgattcatctgtaaagtaaaaataaccgtcgtcgtcatttctcaagcgtgacgatactgttacacgtttactgcatattstgcataccaagcacatatccgtcacacgcagtgtggccaacttccgagaggccggcattcagccaaacagcctgaagaaccaggagaaatgcctgagttt

SEQ ID NO: 15546 - DNA, 201 bp, Homo sapiens
ttcagccaaacagcctgaagaaccaggagaaatgcctgagtttccaaatggcttatggtaagttgttgctgccactatgagtagcctacttgcatttctayttaatggcttttccccatatttgatggtatgttaaacagtcaatcattcattttctaaattaaagcctgtcctgaaaacgtgctcagtgctattgactgt

SEQ ID NO: 15547 - DNA, 201 bp, Homo sapiens
ctgcatgctgcagccagctcaggaaagatttcaggaagagcgtttaggaaggcagctttgaaaagaaaatggaaagatgaggttgcagagggtcagtccawggtgaccagaatctgacctggggcaatgccataaatccaagaaagactgggtttcaggtgcaggaaatgcgattgtgcacggacccttgcctttttaccc

SEQ ID NO: 15548 - DNA, 201 bp, Homo sapiens
aaaataatattaccggagaaacaatgagtaacatgtataggattttttttttttttttttgacggagtcttgctctgttgcccaggctccagtgcagtggygtgatgttggctcactgcaactccgcatcctggtttcaagtggttcttctgcctcagccttccaattagcggggactaccagcgcatgtcaccatgcctg

SEQ ID NO: 15549 - DNA, 201 bp, Homo sapiens
caggtgggaacagggttacagagcaaagtaattagatgccctttagatgctcttagttaaagaccatgcaaaaaggatgaaatcttttgatcatgttcttyacaatattagaggtaaaacatgaactcaacgcttttaggaagaaacaactggattgcgttttctattttattgacagaaactagatggggaggccagggt

SEQ ID NO: 15550 - DNA, 201 bp, Homo sapiens
aggtgaccagaatctgacctggggcaatgccataaatccaagaaagactgggtttcaggtgcaggaaatgcgattgtgcacggacccttgcctttttaccmagtatctagcccatccttctttcttagaagcagaattttctaagaggtacacggtagttcaggataaaaattccctgtgctaactgcccttgcagctagc

SEQ ID NO: 15551 - DNA, 201 bp, Homo sapiens
tggtctttgctttcataggttatttctcctcttccatagcaacacatgtcaaggcaaggaccatatcttattcagttcctagtcatcttttctttcttttsctttttcttttttaaattgttaagatctgccataaaaatgtctgtcagagtaggcatgattgcatattctttagatggatgggtggatggatggatggat

SEQ ID NO: 15552 - DNA, 201 bp, Homo sapiens
tgtaactcgagtgttctgtgaagccagatattggtgccaagctaaatttgtgcgtgcagcttctgtttaaggcaattatatagtgtgtaatacccagtagmgaaattaagtcgaagtacattttgcccatagagattatcctctcagttggatttattttaaacaagttttgccccttatacattaaggtgcatgcaataa

SEQ ID NO: 15553 - DNA, 201 bp, Homo sapiens
ttttttttttttttttttgagatggagtttcactcttcttgcccaggctggagtgcaatggcgtgatctcagctcactgcagcctccaccttccaagttcragtgattctcctgcctcagcctcctgagtagctgggataacaggtgcacaccaccatgcccggctagtttttgtatttttagtagagacagggttttgac

SEQ ID NO: 15554 - DNA, 201 bp, Homo sapiens
caggtgcacaccaccatgcccggctagtttttgtatttttagtagagacagggttttgacatgttgccaggctgctctcgaactcctgacctcaggtgatycacctgccttggcctcccaaagtgctgggattacaggtgtgagccaccgcacccggcccctgcctttttattttgctaaacctgatgacccttgccatag

SEQ ID NO: 15555 - DNA, 201 bp, Homo sapiens
tttgacatgttgccaggctgctctcgaactcctgacctcaggtgattcacctgccttggcctcccaaagtgctgggattacaggtgtgagccaccgcaccyggcccctgcctttttattttgctaaacctgatgacccttgccatagcagaactaaagtgatgatgatgattacagcagatcagttattttgagctctgac

SEQ ID NO: 15556 - DNA, 201 bp, Homo sapiens
gtgtgagccaccgcacccggcccctgcctttttattttgctaaacctgatgacccttgccatagcagaactaaagtgatgatgatgattacagcagatcarttattttgagctctgactttgcatgaggccctttattaagtgcttcacttgtgtgatctgatttaatcttcacaagcaaactgggacagagggactgtgc

SEQ ID NO: 15557 - DNA, 201 bp, Homo sapiens
cggcccctgcctttttattttgctaaacctgatgacccttgccatagcagaactaaagtgatgatgatgattacagcagatcagttattttgagctctgastttgcatgaggccctttattaagtgcttcacttgtgtgatctgatttaatcttcacaagcaaactgggacagagggactgtgcctattcccatttcacag

SEQ ID NO: 15558 - DNA, 201 bp, Homo sapiens
aggagcagaggacaggatggctttctttccagtataataaagacagtgcctccttccaggacaacggtttggcagatttgcttgataaaggttggggtttstaagcttggggctcctcagccatgactgaaacgtactatgagcacggcatctaccgggctgttccacatcctccctgtgggactaggggccagggcaatg

SEQ ID NO: 15559 - DNA, 201 bp, Homo sapiens
ttttcacccgggttctccctgtctataaggggaaaagacagggttcacaccaaggcctgtctggatccaaaacccatgctcataatcactaagttatactmcctcttcgagatgctgatttggaaaataactccatgatgaaacatgtcaagggagactgcctgtactccgtaatgcagaaatgcattagagctcaaaaat

SEQ ID NO: 15560 - DNA, 201 bp, Homo sapiens
gttccctgtactctgcaatgctgagtacttctcatccttcaggtctactgcaagtgtcacctggccaacacaccatgccttcccagtctctggtgttactstctgcatactgtagaccatcatcttgtttgcatacttgtctgttatctctttatcatccgtctacccacatcaggcaattccaagagagaagaccactgg

SEQ ID NO: 15561 - DNA, 201 bp, Homo sapiens
agtccctgtgcaccttcagaaccacatctagcaatagaaggcgctgcacggggaattctggaatgaataaaaacgcttggcagtaccgcatggcgagccaktacccgtgaatgctacttcctccaaagagaattcctgggataacagagaatccattcatggctgccaggaggacttggatatttctcattttccattggc

SEQ ID NO: 15562 - DNA, 201 bp, Homo sapiens
tttccattggccctggagtggaggaacagagccgaaaagtacgtggggggcaggcaaagctgcggtcagaggcagaccctgttggtgttggccgtgtcaascagctttgctggtttctattatagccctggtgtggcaaaggacactgtgtgactgtgagctcaggtcagcattgcgatcccttcaggcctctggcttgca

SEQ ID NO: 15563 - DNA, 201 bp, Homo sapiens
gaaggcaatactattatgctcattcataattaaggcaattgaagcccagacccttccagtagctttcctgaagtcaagttgccagtgcattggacatactrggctgtagttccagggcagcctggctctggtgtctttgctgcaatgacaatatctccccatttctctgtttaaataccacacactccccatatggtttct

SEQ ID NO: 15564 - DNA, 201 bp, Homo sapiens
taaagaaatattcgtaatcaataagaacacaaaatatggaatatattaactgagttataaaaatgtttgtagtatagcacagaatgaaaaacacagcaagktatgtacggtttaaagtgtaatcaattttgaggttgtatacaaggatatacatgataaatacaagtagtagcatttttagtaaaggctgttacaaaatac

SEQ ID NO: 15565 - DNA, 201 bp, Homo sapiens
cctcccttcctgatttcccatcttcttcctccctcttctctcccctctcccccttctcctttccgtccttcctccttcagttccctctttcctctttttcrcccttttatttaacattataaatacgatgggattgtgtctgcgcttttgttggtaattaaataaattatttatacatttaacacaatcttgaattaccag

SEQ ID NO: 15566 - DNA, 201 bp, Homo sapiens
tgttctatttatttatttgttattattatgttttttgagacagagtctcgttctgtcactcaggctggagtgcggtggcatgattgtagctcactccagtsttgagctcctggactcaagagatcctcctgcctcagtttcctgagtagctgagaccacaggcacgggacaccatgccagtctaatttttaaattttttgt

SEQ ID NO: 15567 - DNA, 201 bp, Homo sapiens
ctcagtttcctgagtagctgagaccacaggcacgggacaccatgccagtctaatttttaaattttttgtagggacagggcctcactgtgttgcccaggctyatctcaaactcctggcttcaagtgatccttctgcattgtcccccacaaagtattgggaatgtattctttcctgatcaggaaactccgcagagagaaagtg

SEQ ID NO: 15568 - DNA, 201 bp, Homo sapiens
ttttttttttttttttttgagactcactctgtcacccaggctggagtgcagtggcatgatcatggctcactgcagcctcccgggctcaagctttccacccmcctcagcctcctgagttgctgggaccacaagtatgcaccaacatgcctggttaatttttgtggttttttttttttttttttttttcctgctgagatgggg

SEQ ID NO: 15569 - DNA, 201 bp, Homo sapiens
ggggatttcaccatgttctccaggctggtttcaaactcctgagtccaggtgatccacccatcttggcctcccagagtgctgggattacaggtgtgagccaytatgcccaataccccctatgtagacttttaaagaaatacaggaaacagccaagactggtgtcattcagatttagcttgggagagtctagtgggtgttagg

SEQ ID NO: 15570 - DNA, 201 bp, Homo sapiens
taaaaccaggggagactcgacccaaggcattgtgtttgagctaggctttgaacaatgtatagaccctcaccaagtatggaagtggaagagtaagacattcmaggtagaaggaacagtatgaggaaagtcagagagctaacaaagattatagtgtaatgccagaatcatgagaaatttgctgagaattcatttgaggccata

SEQ ID NO: 15571 - DNA, 201 bp, Homo sapiens
gccatctctgcctctgtcttctcaccaccatcttccttgtccatgtctctctatgtcttcaatgttcttcttataaggacaccagtccttggatttagagyccaccctaattcactgtaatcacatcttacctaagtccatctgcaaagaccctatttccaaataaggtcacattctgaggccctgggtggacatgcattt

SEQ ID NO: 15572 - DNA, 201 bp, Homo sapiens
tttaaggacctttgtgatagttttgcacccactggatgacccagaatcatcttcctcttttaagatcagctgattagcaacgtcagttccacccacaatcytcatttccctttgttgcgtaacctaacatattcacaggttctggtgagtgggatgggggtatctctaggggaccattatccagccttccacaggcacttt

SEQ ID NO: 15573 - DNA, 201 bp, Homo sapiens
gatagttttgcacccactggatgacccagaatcatcttcctcttttaagatcagctgattagcaacgtcagttccacccacaatcttcatttccctttgtygcgtaacctaacatattcacaggttctggtgagtgggatgggggtatctctaggggaccattatccagccttccacaggcactttgtcacaggccaggcg

SEQ ID NO: 15574 - DNA, 201 bp, Homo sapiens
ttgctgtgtaagaaattaccacaaatttagtatatttgttatctcatagctccataggttaaaagtcctggttcaggctgggacttctgctcagggtctcwtgaggctgaaatcaaagcgtcagccagggatggggtcttatcagaggcccttggttactaacagaattcattttcttgtaactgtaggactgaggtgctt

SEQ ID NO: 15575 - DNA, 201 bp, Homo sapiens
ggagcttgcagtgaaccgtgatcgcttcactgcactccagcctgggcaacagagcgagaatccatctcaaaaaaaaaaaaaaaaaaaaaaaaaaaaaaaargaaagaaagaaattacaggtaggctagagcacggatgagcaaactgtttttataaaggaccagagagtatatatttcaggctttgcaggccctatgacgt

SEQ ID NO: 15576 - DNA, 201 bp, Homo sapiens
taaagtttagacctattttaataaggctgacttgggttgaagataactagagccatgactttcatcttgatggacaatgagtactcactctacttttttaktttatatttttattttagttcatttcatttaagacagcgtctgttacccaggctggagtgcagtgacatgatctcggctcactgcaacctacaccttctg

SEQ ID NO: 15577 - DNA, 201 bp, Homo sapiens
tgcagggagatttggggatgttggatgctaaggcccaagccgtctattgtatgccttttgctttggcataaaacaacagatgaccttctgttaggtgtatstctgctcatgcttgagagtggtggtgtttggaaagactcaatagcatatgcacatgaggaagttgaccaaatgattccacagcgcatactcattttttgc

SEQ ID NO: 15578 - DNA, 201 bp, Homo sapiens
tctacctggtgggagaaacagctgccagaaaatccagattcccattctcatgctagcttcataacagcaggagagctcctcactctgtttcccagggtgtrtatatatatgtatacatatgtatatgtatatcaatatatatatcaggtaagattctagtccagtgtgagccatatgctttattcctgagcaatcgctgtg

SEQ ID NO: 15579 - DNA, 201 bp, Homo sapiens
cctatctgtgatgacctgtaaatggaatttaagggaggaatcacacgtgttagcacggggttggcattgcgtggctgttttcaattaacttgaccactatsataacatcaaaggtgtgtgtaccattctatgaccattgaatctccatggacatgttttgggaaatggatttgtcccattacactgctttctttagtgcat

SEQ ID NO: 15580 - DNA, 201 bp, Homo sapiens
gggcacggtggcctacacctgtaatcccagcactttgagaggctgaggcgggaagatcacttgttgaggtcaggagttcgagaccagcctggccaacatgstgaaatcccatctctactaaaaatacaaaaattaggtggcaggcacttgtaatcccagctactcagaaggctgaggcgggagaatctgttgagtccggga

SEQ ID NO: 15581 - DNA, 201 bp, Homo sapiens
gaagagcataagaaaaaggaagggtactgggtggaccaaatctattgttacaatatcccttatattccttagggttcctttttttcaagttaaagcattgrgtcatgtctctgataaatcgcccccccaccccgatccccaccctctgccgccccggccttctttttgtgctgttgggttccaaactttacctgaggattt

SEQ ID NO: 15582 - DNA, 201 bp, Homo sapiens
atcccttatattccttagggttcctttttttcaagttaaagcattgagtcatgtctctgataaatcgcccccccaccccgatccccaccctctgccgcccyggccttctttttgtgctgttgggttccaaactttacctgaggattttcacatgcacatctgttaaatgccatttaaagagaacactaacaagagaaagct

SEQ ID NO: 15583 - DNA, 201 bp, Homo sapiens
cctacttttaaaaaattgaggtgaaattcacataatataagattaaccatttcaaagtagacagttcaatagcagtacattcacaatggtgtgtaaatacygcatctatctatttccaaaatatttgtatctccccacaataaaagtctgtaccaattaagcagctactacccattcctcttccctaccattctaccttct

SEQ ID NO: 15584 - DNA, 201 bp, Homo sapiens
aaggcagactttagtctggtttataatgctttaatatttttttgaaggaagaaaaatgttcattacttaacgtaataattatttttaaaaagcagcctggsgggggggtattcatttttctgtggctgccataacaaagttcttcaaacttagtgtcttgagacaagacatttattttcttaaagttctggaggtcagagg

SEQ ID NO: 15585 - DNA, 201 bp, Homo sapiens
tggctgcctgcaagggaggctgggaaatatagtttgctgtgtgctgggtgggtgggagggagcgtccacattagtgaacagccaggcagtcgctgcctcamatttctttagggttatcctttcattccagcaattgaatttgatttgcactgtttcacttctctacaagggtgtaaaaagtagaggttcctcttgaaagaa

SEQ ID NO: 15586 - DNA, 201 bp, Homo sapiens
tgttttaaacccatctgtttttgtttctggtaactgtatccaaaagtaatacagaattttccgtaagaacatttattgtgtttccttctacccacgaattktcttatgctacacacacaacccactgaaatttcacctctattgtatgtggcttttctagaaacgtgtgcttctgggctttgtctcacacctcctggccag

SEQ ID NO: 15587 - DNA, 201 bp, Homo sapiens
ttatgtcattggctacaactcagtcacatgaccatggctgcctgcaagggaggctgggaaatatagtttgctgtgtgctgggtgggtgggagggagcgtcmacattagtgaacagccaggcagtcgctgcctcaaatttctttagggttatcctttcattccagcaattgaatttgatttgcactgtttcacttctctaca

SEQ ID NO: 15588 - DNA, 201 bp, Homo sapiens
tcagcttgttttgctcctgcatctttgcatcagctgggctttctgccctaggctggacatgggtggggcactttagctggggtggttctcctccacatgtstctcatcttcctgggaccagcagggctagaccagacatgactttcttatggcaagggcagaaatgcaagacagcaactcaaaacacataaggactttcaa

SEQ ID NO: 15589 - DNA, 201 bp, Homo sapiens
agcatgtagaaagatcactgcagatgtccttgtcgtgttgaccttattggagaatttcctatctgtgatgacctgtaaatggaatttaagggaggaatcamacgtgttagcacggggttggcattgcgtggctgttttcaattaacttgaccactatcataacatcaaaggtgtgtgtaccattctatgaccattgaatct

SEQ ID NO: 15590 - DNA, 201 bp, Homo sapiens
aaacaaacagatctcaggagaactctttcacaagacagcactagggggatggtgattagaaagcacctcatgatcccgtctacttcctgcagagaacagaytagccccctatgcagcacacacctttgtgaggtccctcctccaacacagggattacaattcaacctgagacgtgggtggggacacagagccaaaccacac

SEQ ID NO: 15591 - DNA, 201 bp, Homo sapiens
ggaccaagttttattccctgtttaaccttggcctgacaacctaataggtgctcagtgaacagttcttgaatttaattctctccctttccccacactgatgkgtatttaagctccagtggtactcgatgtgttgttttctttgttcttttttttgagacagggttttgctgtcacccaggctggagtgcagtggcagagtct

SEQ ID NO: 15592 - DNA, 201 bp, Homo sapiens
ttttcaggtagaggctgaatgatttccgcacctttttatagattgcatgacttcaaagatgcacactaatactacggctccttgggaaatctttctgcactgatccctttgaatcttcagtgtttcaacatagacttgttacaaagagaaggaatataagcctctgttctttcttgtttccctttgttaattcctttttcc

SEQ ID NO: 15593 - DNA, 201 bp, Homo sapiens
agaatataaaattttgttctattttattttaaagctctggttacatatggtcaagttgcttcccaaaaagcgtctctgtcaggatgatcttatgaacgacsttagtacctcaattttactgtcccatccttttttcctccttccttgcctccttccctctctgcctccttccttttcttcccatttccttccttccagcat

SEQ ID NO: 15594 - DNA, 201 bp, Homo sapiens
ggattgcttaagcctgggagattgaggctgtagtgagctatgattgcaccactgcactccagcctgggcagcagagcaagaccctgcctcaaaaaaaaaaagtaaaaataaaaataaaataaatatatatatgcatgcacatcctaattcctgtaacacgtggatatgcccttacttggaaaaagtgcctttgtagaatgc

SEQ ID NO: 15595 - DNA, 201 bp, Homo sapiens
tggaggaagggagtcaactaaacaatttattagggctttatgtaaagccctagggttagttggttggttggttttgttttgttttgttcctttttttttttgccaggggatgctgtggttgaatttccctctgtggtgagagttgcatggggcaatgaggaggtagtccagaatagttctatggaaataggaggctttcag

SEQ ID NO: 15596 - DNA, 201 bp, Homo sapiens
ataaatatttattgagtagtaagcacatgcaaggcattgagggtggggagggaaaaagacacaaattgtccttaccctcatggattcaccatctatttaamggccacaaatacttgtgtgagaagcaagtcttaatagtctgaagtattttcttagattcccttgagccgcaatgctgaaaagcttatggtggttttgcta

SEQ ID NO: 15597 - DNA, 201 bp, Homo sapiens
agctcaccggggagtgtttctcccagttcctccccagtacacagaaaaacaaagctttctgtctcaccaggaggactccacggtgagcatagcttggctcmgcccagcaggagattttgaaccgactctggtagattcttcctgcagccattcagctcccacctctttctctcaaaaagaaatccagggctgggtgtgtgt

SEQ ID NO: 15598 - DNA, 201 bp, Homo sapiens
gttgcccctaggatcatttttttcaaagctaatgtctgccacaaatgggagttttaataggttataattcatatgacttagtgttaaacctctacgttggkattcttaaatttaacatggataaactgaacttgatttcctgcattaaaaaaaattaaagaaatgaaagttctgactgttttattgtagctggggaattct

SEQ ID NO: 15599 - DNA, 201 bp, Homo sapiens
gttgtaaaagaatacaagtaagtagtcaagtgacaccttagcattctgatgaaaagagctttgacctcacagagcttctggaagggtctcagagacatccstgagggtcccttgactgcactttgacaaccacaggtctacatgatctgtatagccttttccagttttcacatcctatgattccaagagggaaaacaatct

SEQ ID NO: 15600 - DNA, 201 bp, Homo sapiens
ccacacccggcctcttctcgatagatcttatttggctgacaacgaaagctgttgtgctggtagcatcatccctttgcatgcaaaagataaactgaaatctraagtagccatatccttccggccaggtttttcaagtggttactctgttctgatcattgtcatgacaggaatagtgaaaataacaataaatcatttttcttt

SEQ ID NO: 15601 - DNA, 201 bp, Homo sapiens
gctcctacaccatgagtgcttttgtatggtgactgtctggttacaaggtcatcttttcccctggatgagacgccccttggggaaaggaccaagttttattycctgtttaaccttggcctgacaacctaataggtgctcagtgaacagttcttgaatttaattctctccctttccccacactgatgtgtatttaagctccag

SEQ ID NO: 15602 - DNA, 201 bp, Homo sapiens
ttttggaggacttgaaaggttcctgctacctttggctggggatggagggaacatggaagatgggtctttgtttagaggaagctctttatcctggtacgctrgaagttggcatagtcttagcagttagtccagatgtgaatttcaggattattctgtgagtcttccaagtcctgtctcagcagtgaaataggctcagtgtag

SEQ ID NO: 15603 - DNA, 201 bp, Homo sapiens
tggttcagggtgttgaggcttcgtgctgttaatattggaaggtgggtcatttgtactgggcatctgtcctgtatcttggagatgtttagtaacatccctgrcctctagccattagataccatctctcccagtagggataataaaaacatgtctccagatgttggcaaatgtctggccttctggggagtaaaatggcccctg

SEQ ID NO: 15604 - DNA, 201 bp, Homo sapiens
gatagtaggtaaattaatggaggaagggagtcaactaaacaatttatttgagcaattaatggaggaagggagtcaactaaacaatttattagggctttatktaaagccctagggttagttggttggttggttttgttttgttttgttcctttttttttttgccaggggatgctgtggttgaatttccctctgtggtgagag

SEQ ID NO: 15605 - DNA, 201 bp, Homo sapiens
gtttatgccactgcaacattttagaatcacctgggaagcttttgaaaactcccagcatcatgaagcatggtctcttgccttggggtcagtgtctgtcaacrtggcttttgctaaagagccttcccctatgagaagtgaggcaggagaaggcggagtgaccacaagatgccctgatggtgccaagctattattataaatgaa

SEQ ID NO: 15606 - DNA, 201 bp, Homo sapiens
agtttatgccactgcaacattttagaatcacctgggaagcttttgaaaactcccagcatcatgaagcatggtctcttgccttggggtcagtgtctgtcaaygtggcttttgctaaagagccttcccctatgagaagtgaggcaggagaaggcggagtgaccacaagatgccctgatggtgccaagctattattataaatga

SEQ ID NO: 15607 - DNA, 201 bp, Homo sapiens
tcttctttatattataagtttatgccactgcaacattttagaatcacctgggaagcttttgaaaactcccagcatcatgaagcatggtctcttgccttggrgtcagtgtctgtcaacgtggcttttgctaaagagccttcccctatgagaagtgaggcaggagaaggcggagtgaccacaagatgccctgatggtgccaag

SEQ ID NO: 15608 - DNA, 201 bp, Homo sapiens
gtatagtgatgggtctctcatggctcacgtattaactgtatttgttgttactgcttctcaggcactctgttaagaatgcagggctcttcctcagactcagsgcggggcctgggctttacagcaatggttttcagtttgtaatctctctcaaggaagggagaggagcacaaagctgccttgactgccagcaccatcagaaaa

SEQ ID NO: 15609 - DNA, 201 bp, Homo sapiens
acaaaaggccaaccccattagacagtggccaagggaggtgaactaaagttggtgctgtgaacagggctaatggtttgtgatttacccataagtggaaggtrtactccggctgctcctttaatattttatgattagcagtagaggtgtgtctgggggaaagagtcagcttattttatttatttattaattttttgagatgga

SEQ ID NO: 15610 - DNA, 201 bp, Homo sapiens
tccagaatcattggccctggctctactcctggaaacccagtccatctctaatccctttgatttccaatgggaggcaaatccaggggagttctagactgtckagaatattgtaccaagaacaaaaggccaaccccattagacagtggccaagggaggtgaactaaagttggtgctgtgaacagggctaatggtttgtgattt

SEQ ID NO: 15611 - DNA, 201 bp, Homo sapiens
cctggcttggtgtgttttgtggcatttggcaggcaaacgttttgaaaagaaatctcctttcaaaaatcacagcactggttgaagcaggagcatctctcccyttaaatgcaaaaggagttaatatgccagtgactacagtgtgcctggaaaggtcactggaggcatttttgtctggggcagcccctggagtcttggcttttg

SEQ ID NO: 15612 - DNA, 201 bp, Homo sapiens
agcccctgggcattatttccccaattccgtatcccatctactaatacaaactaatgagatctattaaggatgagtccacaagtttgaagggagtctcttaytaatgttccgtctttgcatggtgttacaacagcgggaccattttacactgagggtttgcgagaggcatggctcccctgttatgtatttgggacttactgc

SEQ ID NO: 15613 - DNA, 201 bp, Homo sapiens
ttttttcccttttctttttttttctccccatcttgaacatgttgctgtagacaggtgctaggtttccctgaatgactaaagcagagatttggttattttcytcccagaaaaagtagatgcatcagcagagttgagcccctgggcattatttccccaattccgtatcccatctactaatacaaactaatgagatctattaag

SEQ ID NO: 15614 - DNA, 201 bp, Homo sapiens
actaggggaaacaaaccctgttttgtagtatttgctgattactgtggtgtaaatactcacaccttggctgatttcaagttgcagcttggaacttggagttrgaaagagatgtgtagtcccataccattttatgtatgtaaagtatttgcactatgccgactaatagacataaataacctcatgagcatagataatagtcac

SEQ ID NO: 15615 - DNA, 201 bp, Homo sapiens
aatgtctccagacatttgcttctgtcccctggggatcaaaatcacccctggttgagaacttggggtaatttaagtggtgctccggtaaaggccattcaacwtgactcactgtgttgatgttatgttttctaacattgactttcctttaaaccatagggttcgaaaccgccaagtcttttgccctccatggtgcacatgtga

SEQ ID NO: 15616 - DNA, 201 bp, Homo sapiens
gtcccacaattggcaagtgccataaatatattataggccattatactttctacagtatctttaattgatatgccccatgtctaagaaaaaaagtagtttttcatgatgaaggtgatgaactacttctttccattattctatttcccccttttcttcttcaggctttaaagatatcataataccatttacatttactgttta

SEQ ID NO: 15617 - DNA, 201 bp, Homo sapiens
tggactctgatggatctaatcgaggattaggatggaggtaggtgggaacatatttagaaggatgccctgtggtttttctccttcctgctatttatatttcyctctctgtctttcccacctgtttggtgatgaggaaggagctgtgtactggtttgaaacctattcacgacatagtggacccaacaccaagtgtcttattgt

SEQ ID NO: 15618 - DNA, 201 bp, Homo sapiens
cctgccgtgctcaaagcacttgcttacttggaatgccataaattacatgaaggaattattcattgtatcacgaaacataccttccagtctcccgagtagtstattaggctaagtatggtcttttaaattattactttaaaaataaaagataatggaattatagcattaaatacattttgcaaatgatcttctagtaggatt

SEQ ID NO: 15619 - DNA, 201 bp, Homo sapiens
ctgttaggacattgtaattattttgtattacttaggaaaacttttatgattctactcttttaatttttttaataattactttatgacttcttcattagggwttctctcctccagtgcgtacgcagatcttctgaaaaggaatctgacaaatttagttgctgcatttttctaaattgctttcaagactacccagcacttcag

SEQ ID NO: 15620 - DNA, 201 bp, Homo sapiens
tacctctggaggccccaggctgggactttgggtacagatgcacaggagacctttgccccaccccgtcacggctgggcctactcagttccacgtctttgagktttcacgcggaaactggatgtttcttacatcctcagctgcaggcatggggaagagacgcacatcagccattaagaaaaaggtatgcagtctacatgcctc

SEQ ID NO: 15621 - DNA, 201 bp, Homo sapiens
ttgaaggaaagttttggctacccagttgttagctgctgaagtttaactgtgcattctaagcacaccagtattttattacatcatacctgggcagcagatarttttagtaaaaccttgaaaagatatgactattgggaagaaatttgggattctatcctttttctctccattcttctctcctgcaccaagtttctaagctcg

SEQ ID NO: 15622 - DNA, 201 bp, Homo sapiens
tacctttgtctcagtcaatatttacctctgaggtcaatacgtgtggatattcacctcagctgcagtcaatatccatttcgtattacaatatatgatgtgcrtatgtgaaaataaagaacagcatggtacaaaaaaggtctgctaggcaaagaagctttttgcaaagcggatgtgtttttgttttattttttgtttgtttgt

SEQ ID NO: 15623 - DNA, 201 bp, Homo sapiens
ccactgaccactctctgtacagatgcgctcaagcgaccataaccaccagtgttcctaacaatgcgcctattgacttcttatttcaatagatatccagattkattatccctcaaggtaagcatcgattttacctttgtctcagtcaatatttacctctgaggtcaatacgtgtggatattcacctcagctgcagtcaatatc

SEQ ID NO: 15624 - DNA, 201 bp, Homo sapiens
cctgattgagtaactgctctctgaaggtggaggctggactgcttcactggacagggtggcctggggttattctagtgcagtggtagctggtgacaaaactsaaagaagatgtaactagagaaaaggtactcagtgcagcctctgtgagctaccaccactgcctctagttttccagaaaaccaccactgaccactctctgta

SEQ ID NO: 15625 - DNA, 201 bp, Homo sapiens
ggcttcatatattattgagagcaaacctactttccaccgccactcctggatgcacttattttgcgagccttattcagaatgtcagcatggatcacttggcracaaaggcctaaagggcaagccaggaagcttccatggatacgttatttatggtgtttaattattattgtacagatttattaaatgactctgttacctagg

SEQ ID NO: 15626 - DNA, 201 bp, Homo sapiens
tgaaactacatgttcattgaaaatgatcttttgggtggttgatgttcgattttggctctgtgttgggcctgcccagtgaggtccttttgactccctaaggraccctgttttgggtttcttttgaggttgaagatatttcagactctttccccctcaacttccataggaaccaaactctctttcttcctcccgtttggttgg

SEQ ID NO: 15627 - DNA, 201 bp, Homo sapiens
cccggactcgaatcccagctctgatccatctcagctctgccatattgccaagttccgctgagactccatttactcacctgttgtatcatctgaattatttycatatccataatgtgcaaggatatccttccatgttattagaaatacagatacaccatcattatcagtggccaaatcattcaaatcgctgtttgcttcttc

SEQ ID NO: 15628 - DNA, 201 bp, Homo sapiens
ataaagtttatttttacagtaattttaagttcacagcaaaactgagtgggaagtgtagagtttcatatactccctgtcctcacacatgcacagcctcctcyagctatgcacattttcaatgaaactacatgttcattgaaaatgatcttttgggtggttgatgttcgattttggctctgtgttgggcctgcccagtgaggt

SEQ ID NO: 15629 - DNA, 201 bp, Homo sapiens
tggaggttgcagtgagccgagatcaggccactgcactccaatctgggtgacagagcaagactctgtctcaaaaataatagtaataataataataataatartaataataataataataataagaatctgactaaggttattaaccattaaggtatgctgtgctaaggagcagggggccccttccatccgtagagggcagaa

SEQ ID NO: 15630 - DNA, 201 bp, Homo sapiens
ggaagaatgaggatttggggaaggaaaattttgagagccattttacagcatttcaagattcagtgatctcagaacctcttttggttaaacaagcatgggargatggatgattggatggatggatgaatggataggtaggtgggaagataaatggatagacatataggtaggaaggaatgagggatatatggaaggctagca

SEQ ID NO: 15631 - DNA, 201 bp, Homo sapiens
tctttaaggaaaaaggttggatggatgatgtcaaagacccactgttcagtctttctttcttatattttgagccttaattgggtccctgtgagtcaatttcmgatgatagaatttgctgttttatagttttactctaacatgtagtaccttgagatagaccagtgatcccagactaagaattattcagaatcattcaccgtc

SEQ ID NO: 15632 - DNA, 201 bp, Homo sapiens
acaaaaagcagctttcgtttgcttaaaatttttgttctctgcctttatttttcaaaaatattttcactaggtatagaattctaagatgaaagttttatttkttttcagctgtggcttccatcattttcctgagaggtataactatcagtcttgtagctactggtctctaactacttctaaaactatctgcagtttttagca

SEQ ID NO: 15633 - DNA, 201 bp, Homo sapiens
ctagtgtgggtctatacgtgacactaggtgtagtgtaggtgacaaacaaaaagcagctttcgtttgcttaaaatttttgttctctgcctttatttttcaaraatattttcactaggtatagaattctaagatgaaagttttattttttttcagctgtggcttccatcattttcctgagaggtataactatcagtcttgtag

SEQ ID NO: 15634 - DNA, 201 bp, Homo sapiens
ttccattactcacctcctaggttaagcattgttattattattgatatagtaatttttgctatatattttaaaactcacagatttcactcttaccatttggrtcttaacatgtcgttaccctttatgttgctctttgttactttctgcatctctgggtttatagctaaggtcattttcctcctgcctgaagagcatccttta

SEQ ID NO: 15635 - DNA, 201 bp, Homo sapiens
atgacacaggagacagggaaagagttttgttatcctgatacacacattcttaaatgcctctagctgtgtagacattggtttgtccatattaatagtatttyacgaagtgccagttgtgtgcctgctttgtggcatatgcattggcattcattgctttatttaattcttccaacaacgtgtcagatgtctgttcaaattatt

SEQ ID NO: 15636 - DNA, 201 bp, Homo sapiens
ctcccattttacaccctgtttattgatactaagaagagcctccaactgaataagaactaatgacttctgcctgccatcattttggaatgtccaattccccrttctggagagcctttgattataacatcagcctgtcatttggacctctgacctgaattatatgaatctgaaaaatctcttcctttcctatcgtgaattcgg

SEQ ID NO: 15637 - DNA, 201 bp, Homo sapiens
ttgctgaatactgagtaaataaagaaaagttaacacagtggagtccaggtacagtggctcatgcctgtaatcccagcactttgggaggtcaaggcaggagratcacgtgagcccagcagttcaagaccagccttggcaacatggtgagaccccatctctacaaaaaataaaataattagctgggcatggtggtacatgcct

SEQ ID NO: 15638 - DNA, 201 bp, Homo sapiens
ggctgggacaacatgcccactctcaactaatttttgtagccatggagatttggaagtctggcaagtcttgggtcacatgatctaccttacagctgttactrcagacctcccaaagctcacgaactgagagtcaggaggcgtggttcccctaactcaaatcagaatttcgttatcaaaagaagagagggatggttctgtggt

SEQ ID NO: 15639 - DNA, 201 bp, Homo sapiens
gatggagtctccctctgtcgcctaggctgcagtgcagtggcgcgatctcagctcactgcaacctccgcctcccgggttcacaccattttcctgcctcagcstcccaagtagctgggagtacaggcgactgccaccacgcccggctaatttttttttttttttttttggtatttttaatagagacggggtttcaccatgtta

SEQ ID NO: 15640 - DNA, 201 bp, Homo sapiens
gaaaaggaacaacaaaaaagtatatctgtgaacttattaaatgactttaatcatatgaaaatcagccatcagccttattagagtggttgattttttttttratctaagagctttcttggttattttctgttcttaatcattgttgtatatccttaatgcgcaggacatgacaccgtataacaagtgttttaaaaatattta

SEQ ID NO: 15641 - DNA, 201 bp, Homo sapiens
ccagaatgagtgtgttttctagctgtcactgcctgatgtttactgctcaaagcttaggacttggattagagcccaggacttggcagccaagataaaccagstgcaattacgctgaacatctcagcccagctcctgtccatccctgaacaggacacttagggtagaggatgttctcagcagtgccatttgcatcccccttca

SEQ ID NO: 15642 - DNA, 201 bp, Homo sapiens
ctaaagtcagttacataaccaagcccagcttcagaagggaaattgtatgccttacaaggaggtgagaggatggaaaatgaatatttgctgaacagactttytgtccagtttgttgtatttggtggtggtgcagggcaaatatatgtttaaaaccttgttcagatttttagctttcttcagaacagagcttttaaaactgag

SEQ ID NO: 15643 - DNA, 201 bp, Homo sapiens
atcatacccattcccaagatttcagtcatcaaatccattccaatatgactcctgtatccatatgtccagttccaagtatctgtccatggtgttggtcccakgttattcgcacctcatatgtctttggcacagcactcttgacagctcataaagtcacgctgttacccccacaatgtccccccacatatcattgctatccct

SEQ ID NO: 15644 - DNA, 201 bp, Homo sapiens
cgatgagattggaggcacctgggtgtcagcctcttgggctggctcattacaggccactctgtctgaggaacactcaggtttgcaaaccgtttcttaaaatwacaggatacctagggacctgttggggtgggagggaagaaccctatgggcagaaatgtgactttctgtagcaaagatgtactgtttcccactgagaagaat

SEQ ID NO: 15645 - DNA, 201 bp, Homo sapiens
tacaggattttacatggcttagagaaatactgtggtggtgaaaatatgcataaaaaagcgagagattttacttttgaaatgctgccaaagtgaaatctctyttggataggcagatgacagtttagtacttgcaggtctttcgattctgacaactgtcagaagtgaatttaagtgctggtgactaggctgccagagaaacac

SEQ ID NO: 15646 - DNA, 201 bp, Homo sapiens
gtctttggcacagcactcttgacagctcataaagtcacgctgttacccccacaatgtccccccacatatcattgctatccctcctcgacacccacacctcytgcatgttcctgagcttcttaggcgtgttgcatcttcctgaccttcccagtccgaagcccaaggagatacttgataaatattcgtctaataaataaatga

SEQ ID NO: 15647 - DNA, 201 bp, Homo sapiens
aaactggctgactgagttaaatgaatgccaaagtcacagagctgctgagtggcagagttgtaattcccatgcagaactgtgtggcatcaaagccatttttwaactcattgcaatgcacagtgggttaaaatgagatgattgaaaatgagatgtggctgggcatggtggctcacacctctaattccagcactttgagaggat

SEQ ID NO: 15648 - DNA, 201 bp, Homo sapiens
tgaactttctgtcaccggtataatttaaagaaattatacttaagctttgtctcacttagaagataatatagaacagtggtgtttttttaattaaaaaaaargttaaaataacggttttgtatccttgctttacttcttaaacatatgggaggaaaaaaaatctttaacaagtttatttattttcattttctgctaaattac

SEQ ID NO: 15649 - DNA, 201 bp, Homo sapiens
gttacatcaaggctgggaggaggtctttccactggttttccgggctgtttgtgtactacacagcctgtgtacctggcaaggcacgctctgctctgccctgmcttctgatgagctgactaacaccttatagatgaggttcccttagaaccaaagatgccccatgaaactccctaggatgaatgttggaagtccttccaactg

SEQ ID NO: 15650 - DNA, 201 bp, Homo sapiens
ctctctctctttctttctctttcctttctttcttccatttaaattgagacagggccttgctctgtcactctggctggagtgcagtggcataatcatagctsactgtgcccttgaactcttggactcaggcaatccctcgacatcagccttctgagtagctgggactaccggtacctgccaccacacctggctatttctttt

SEQ ID NO: 15651 - DNA, 201 bp, Homo sapiens
gcaatgggaacagagctgaggctcctaaggtctagagtcaacatgaaaatacctttgcttctgggccatagctgtgtttcttcttaacaaggcagaagccyagaagagacttcatgtactgtgactgtaataaagagggttgtaagtagagaagctggaatttgaaaggttacgtacaagtcaagctgcctctgtaatgtc

SEQ ID NO: 15652 - DNA, 201 bp, Homo sapiens
ttattttcagtttatcaattaagttgttcaagtcttctatatactttgtgtttgtctgcttattttatctgttactaagagggatatgttaaaatcttccrttataattgtgaatttgtctatttattgtcctaattctgtcaatttttgacatatatgagaggctctattattaagtacatataaatttagaattgtcat

SEQ ID NO: 15653 - DNA, 201 bp, Homo sapiens
tgatcatcctcctgagtagctgggaccacaggtgtgcaccaccacgcccaactaattttttgtagagatggaattttgccatgttgcccaggctggtctcraactcttgggctcaagcgatccacccgcctcggccaccccgattcctgggattacagccatgagccactgtgcctggtcttctttttaatatatgtagtt

SEQ ID NO: 15654 - DNA, 201 bp, Homo sapiens
cttagggttcataggatctgtagtccttttctttatttttcatttttaaaaacaactttattgaggtatgattgacgtacaaaaagcctcacgtatttgaygtatagaacttgataagtttggagataagtatatacctgtgaaaccattatattttataagtacatgatacaatatgagcacagtactatatggtagatc

SEQ ID NO: 15655 - DNA, 201 bp, Homo sapiens
cttaagatcttcttagggttcataggatctgtagtccttttctttatttttcatttttaaaaacaactttattgaggtatgattgacgtacaaaaagcctyacgtatttgacgtatagaacttgataagtttggagataagtatatacctgtgaaaccattatattttataagtacatgatacaatatgagcacagtacta

SEQ ID NO: 15656 - DNA, 201 bp, Homo sapiens
gttgttcaccatatcttaagatcttcttagggttcataggatctgtagtccttttctttatttttcatttttaaaaacaactttattgaggtatgattgaygtacaaaaagcctcacgtatttgacgtatagaacttgataagtttggagataagtatatacctgtgaaaccattatattttataagtacatgatacaata

SEQ ID NO: 15657 - DNA, 201 bp, Homo sapiens
gtgactcagataggtgtgtattctcaagaagctttcattctaatgacacatactttgtctccagtcagagttatggcaggttttttttttttttttttttttgactaaattcacccatatttgatggcaagtgtgatcacagcatgtttataaaaatcattcttaattaaggcatttccatcttatcaagccccctattta

SEQ ID NO: 15658 - DNA, 201 bp, Homo sapiens
aacctgcctggccttgtgttatatcgatgctttctcaatctgttaaaaacgtagctgctattgaatgactaagaattgtttactctcatttccactctctkacatcttttttttttcttttaataccctgtgatgaaactgtgaagaaagatattcctgatcattgctttgacctggaaatttcaaagggacccacagtcc

SEQ ID NO: 15659 - DNA, 201 bp, Homo sapiens
tgtcagatgtgccctttctggtaataaaaagtcctttgccgtgggttattttgtcaagtgagatagcaggacttaacaggtttgtttgggaaaataaaatytgatagaaaaacggcatgcttttcccccacagatttcttggtagcatcattcaaaactacagtgagcagtatctttgcaggattttaatatttattcatt

SEQ ID NO: 15660 - DNA, 201 bp, Homo sapiens
aagtatgggccacacaaaacaggtctgtgggcttgacttgtcctctgatcatcagtttgtgacctctgttctaaagagtgaaaactatgtaagatagtatmagataagtaggtatttaaattactttgcaccttttccatttcatagaacttgaatgtttgtgttcaaagcttaaaacccaagacagtgagctattaagcc

SEQ ID NO: 15661 - DNA, 201 bp, Homo sapiens
ctctactaaaaatacaaaaattagccaggcacagtggctcatgtctgtaatcccaaatgcttgctcgggaggctgaggcaggagaatcacttgaatctggkaggtggaggttgtagtgagctgagattgcaccactgtacttcagcctgggcaacagagcaagactctgtctcaaaaaaaagaacaaaaaaaaaaaaagaa

SEQ ID NO: 15662 - DNA, 201 bp, Homo sapiens
gtaatgccagcagcacgggtgatgatcatggtcaacatgaccaactagaaagcccaaaccccacctctagctgacagtggcttctcagctaacctgtcacyacgtgggattgggcccccagtggtgtaagctttttcagagaagctacacatctagcttttggacctgtgatctccccaatgttttaatgctggcaactaa

SEQ ID NO: 15663 - DNA, 201 bp, Homo sapiens
agccctatgcctttgggaaggagaggaaggactaatatttgtgtggtacaaaggatgtgcctggcataccccatatcttttacaaagacataaatgtcttstgaataaaagtatgatgatgatgatcatggtgatgaagatgagggtgatgatgttgatgatgatgatggtgatggtgatgatggtagtatgataatgctg

SEQ ID NO: 15664 - DNA, 201 bp, Homo sapiens
cttgaaggggagggaaattgttagctacacgaccaagagacagaagagaggaaggagtttgtacccacaactcagctttattttatgtaagctctttctgyaaagggaaagtagctctttgtaccaaagcaagggcctctgaatgagagctgggagaggccagaatgggcctgtaagaggttgatgtgtatgagacctgaa

SEQ ID NO: 15665 - DNA, 201 bp, Homo sapiens
gcaatagaaattcaaggtatgaaattcaaggtgtggtctcagagtcattttatcttacagcttctctgctgtgttttctcagtatgtgaaatgggaacatsacttaccatctactcacctcctgtttgagttcaagggaaggtttgcagattggcctgaaggaagacttctcttgaaaaactcaaaccaaagagcacaccg

SEQ ID NO: 15666 - DNA, 201 bp, Homo sapiens
tgtcaccggtataatttaaagaaattatacttaagctttgtctcacttagaagataatatagaacagtggtgtttttttaattaaaaaaaaagttaaaatracggttttgtatccttgctttacttcttaaacatatgggaggaaaaaaaatctttaacaagtttatttattttcattttctgctaaattactttcagaac

SEQ ID NO: 15667 - DNA, 201 bp, Homo sapiens
tatgactatttcatgagtgcttactatataccaggcgctgttacagcccgtgtaatgccacctgggagttggggggagtcaccatcgtccatccgtctgtscatccatccatccatcctgcctccctccatcctttctctttttcacaatgtctcttgctccgccccctctcttcccctccttccttcctatccagtgctt

SEQ ID NO: 15668 - DNA, 201 bp, Homo sapiens
aatttgtaggagctgctcttaatgattattactgcataggctggaatagaagcaaaatttgcagtaatacttttgtacctttctctttaggccttggcatrtattaaagtactatacatttgtcttaaaaattgaaattgtagattattttcatctaagacccttttgttcacagatttttttttccaagtatacctattc

SEQ ID NO: 15669 - DNA, 201 bp, Homo sapiens
aagaccaacgtgtaaattacatattaatctttctttttctccctagctcggttttaagaataatgttttagccaacatatctgcattactcttggctcaayatgagaaatccatttttggtttgcctaacagaagatcatgttgctttgcttctctacacagtatgaaaacccaaagaaaagaaaaacagaggcagttttt

SEQ ID NO: 15670 - DNA, 201 bp, Homo sapiens
ttgtggtcaacagtggggcttagggggcaggttttgtggctgtgacagaacacgtggcccctagtgtgtctgttgaaagatgggcccctttcaggaaaatkgcttaccttactttttagacataatttttgttttctgttaaagggtcagttatagataagtatgctcccttgcaatgaaatgaacccactttatcaattt

SEQ ID NO: 15671 - DNA, 201 bp, Homo sapiens
atgattttttaaggaaaattttgaaaagtctacaagttaaatttttttttctatcccatacattttccatcctaaggcattgaaaaagcacactgtgaaatacttagtgtatctagaaacatcagggaagaatgcttccctcctaagcaaaattttgccttctgaaactttttcagcattcagtctttttatataatactt

SEQ ID NO: 15672 - DNA, 201 bp, Homo sapiens
aggaaaattttgaaaagtctacaagttaaatttttttttctatcccatacattttccatcctaaggcattgaaaaagcacactgtgaaatacttagtgtatctagaaacatcagggaagaatgcttccctcctaagcaaaattttgccttctgaaactttttcagcattcagtctttttatataatacttagaaaaatatt

SEQ ID NO: 15673 - DNA, 201 bp, Homo sapiens
ctgtttgaagcactgtattgagcataccatatgctgaaagacttggaatgcaaaaacctaaggccaagggcacttctcaatattaaaccctcagttgtaakggaggcatcaagactataagatccaagaccttaacttttgtgctccttgtcttgtggagggaacatccatcctcaaaacagaaacctgtgagatcccttg

SEQ ID NO: 15674 - DNA, 201 bp, Homo sapiens
gaagagattctcgtccgctcagttaaggtactcagactattttccaaccaatcaagagggtgctgcttcatggagttcgtttaagctgaagcggcagctgktgactgtcatttgcatcatctttatacatttactgtgaatgtcactgtccatttccactttctttctacttgtcttcaaattgatgcttatcaagtagac

SEQ ID NO: 15675 - DNA, 201 bp, Homo sapiens
tggccaaattctgtttgaagcactgtattgagcataccatatgctgaaagacttggaatgcaaaaacctaaggccaagggcacttctcaatattaaacccycagttgtaatggaggcatcaagactataagatccaagaccttaacttttgtgctccttgtcttgtggagggaacatccatcctcaaaacagaaacctgtg

SEQ ID NO: 15676 - DNA, 201 bp, Homo sapiens
tcaagtgatcctcctgccttgagctcccgaagcgctgggaccaatagagatttctctgagaattaggtcccccactattaataaggtcattgtcagctgarttggggaggtggcgtgggtagatacaattaatttagattttttaaaaggcttttgagaatattcggagaacctaatatattttgagacctgacatttatt

SEQ ID NO: 15677 - DNA, 201 bp, Homo sapiens
ggagatgttctttgagattcggtgattgagttgtgaacatatggactgagggtgttttgtggtaaggcttgagtcatgtctgtagcaaggatgtttcctgrataatgtgcactgagcatcaagtgcctgcagtggcctggcgggtaatgccagcagcacgggtgatgatcatggtcaacatgaccaactagaaagcccaaa

SEQ ID NO: 15678 - DNA, 201 bp, Homo sapiens
agtctcacacttgacatagtagggtttgacatggtttaaataaaatctcaaccagatcagtgggagatgttctttgagattcggtgattgagttgtgaacrtatggactgagggtgttttgtggtaaggcttgagtcatgtctgtagcaaggatgtttcctggataatgtgcactgagcatcaagtgcctgcagtggcctg

SEQ ID NO: 15679 - DNA, 201 bp, Homo sapiens
tgagcctgctacccttgtgcttctctgtccacgcaaagccaagtgctactgcggggttttccaaggcatagctagcatcctaatagtctcacacttgacakagtagggtttgacatggtttaaataaaatctcaaccagatcagtgggagatgttctttgagattcggtgattgagttgtgaacatatggactgagggtgt

SEQ ID NO: 15680 - DNA, 201 bp, Homo sapiens
aaacttaaaccagaaggaaccttcctggcatcggggaaagaagctgcctttttcttagctcctacctctgtgggagctttgtcagtatttgaggggacagrgttcccaccttcatgttttttgtgcctgaggattctgtgggcgactgtccccacctgtccagcctaccagtgagtctcatggtgtgcggctgcctgctcc

SEQ ID NO: 15681 - DNA, 201 bp, Homo sapiens
ttaggcctatcttcttgctttatgcataatggcagatctccagggagggagaggatgtgtgctggaagattctacaacttgttgattggttcctaaagatsgttttagtgctatgtttgtggggcggggctggagggggctggaaatcaccatctctgtggccttttaattgtgcccagttacaagtaacatttgtcccca

SEQ ID NO: 15682 - DNA, 201 bp, Homo sapiens
tattgatctagactgcctgctactttcatttaccatgttactgctcgtgggattacaggcacaaaggtttcataaatttcaaatgaaatatgaacatttgktgtcaaagtactgttaaggtatgaaaaccctgctagtattagttcccttttgttattattctattattattattattattgtgtttacatccacaggcaa

SEQ ID NO: 15683 - DNA, 201 bp, Homo sapiens
ctactaaaaatacaaaaaattagccgggtgtggtggcgggcgcctgtagtcccagctactcgggaggctgaggcaggagagtggcgtgaacccgggaggcrgagcttgaagtgagccgagatcgcgccactgcactccagcctgggcgacagagcgagactccgtctcaagagaaaaaaaaaaaaaattataacatggaaa

SEQ ID NO: 15684 - DNA, 201 bp, Homo sapiens
tgcctaccaccatgtttctgaggcctccccagccatgtggaactgtaagtccagttaaacctctttttcttcccagtctcaggtatgtctttatcagcagygtgaaaacggactaatacagtgaggaaatccatgtgttaggaagggagtgtggttgtacttcaacctggaactgtctaactcctaaggttttattaatat

SEQ ID NO: 15685 - DNA, 201 bp, Homo sapiens
tttaggagctctgtgccaggaacctggatgaagacccagtatgtatttcttattatatcacaatatcacaaatccacagtcacatggtgattgtggtagtktggggggcctgatggtggggtacacctgcttgaagtcaggctaccatgcccattggggtcctcccccttttttgccctctgatcttgtgagttccttaac

SEQ ID NO: 15686 - DNA, 201 bp, Homo sapiens
accccatgcctggccaatttcaaggattttaggagctctgtgccaggaacctggatgaagacccagtatgtatttcttattatatcacaatatcacaaatscacagtcacatggtgattgtggtagtgtggggggcctgatggtggggtacacctgcttgaagtcaggctaccatgcccattggggtcctccccctttttt

SEQ ID NO: 15687 - DNA, 201 bp, Homo sapiens
tcagcttcccaatgtgctaggattacaggcatgagaccccatgcctggccaatttcaaggattttaggagctctgtgccaggaacctggatgaagacccartatgtatttcttattatatcacaatatcacaaatccacagtcacatggtgattgtggtagtgtggggggcctgatggtggggtacacctgcttgaagtca

SEQ ID NO: 15688 - DNA, 201 bp, Homo sapiens
gtattccaaataattggtggaaggatggaaaggttaaatggaaattatgtaagggctgcaaagagattcatatatgactatttcatgagtgcttactatayaccaggcgctgttacagcccgtgtaatgccacctgggagttggggggagtcaccatcgtccatccgtctgtccatccatccatccatcctgcctccctcc

SEQ ID NO: 15689 - DNA, 201 bp, Homo sapiens
cccatctcatgttgacttaatttctccagcattcagttaagacctagccgaagcataattgtcagcatagtagagctggctctcctctttctaattgcccwgcagagtttttggggagtctgtatgcaattgtgtacaccccaatgccccaaaaccctcttctatttcctttagcactcttgagctgaagaagccccactc

SEQ ID NO: 15690 - DNA, 201 bp, Homo sapiens
gggtccctcccacaacatgtgggaattatgggagctacaattcaatatgagatttggatggggacacagccaaaccatatcacaggatagttccccatatsaaggtccttaacttaatcacacttgcatttgattttatcatgcaaggtagcatactcacaggtgggattaggacttagacaccttcagcaagaaacatta

SEQ ID NO: 15691 - DNA, 201 bp, Homo sapiens
ctcactttcgccatttaatagctttgggtctacaagtaaccaccccagatttttctcctcctctatgcaccagtcatatcaagaattactgtaacttcatwggatttttgtcaggacgctatgatgagaagaacatatgccaaggagacagttttctggcaaatcagaggcctgtaagaaatgatggctttttgcttgtat

SEQ ID NO: 15692 - DNA, 201 bp, Homo sapiens
ctttgagggtcctcaaaatagaaggtcagagagtagacttttaaaagtcttgcactgtttacaagtcagatgctttttggcagagtgactctcagctcccyccaacaatcccttcttgtcgttcagtagtagatagactctatcagggaaaaataggagaaataaaataagacagcatatggaaggcattgctgaaagtct

SEQ ID NO: 15693 - DNA, 201 bp, Homo sapiens
cctctgcagttatttttcatgcacactcggattacactgctcggtgatattacatctgcatgcgtcttgccctctgacacggcaaacacagatgctgcccraatccttgtaaagccatatatcttaagtaggaaggagcatctttgcaggggaggtgaattgatttgcaaagcagcctgacacatggtctcttatttctcc

SEQ ID NO: 15694 - DNA, 201 bp, Homo sapiens
aaattttcatagacatccaccccctcactgccacaccccctcatagatttcttcttttcctcctccttctcctcctccctcttcctcctctttttcccccmccttcaaatagttccaagaccagagttgagggtgggtgggtagagggctagtttacagataaaatggttggtgtagatcatctagtttggaaaaagcaca

SEQ ID NO: 15695 - DNA, 201 bp, Homo sapiens
tacccctgattggttgctttccacgaccattcagccgtttgcataggagctgtaactttgtaacttcgcttcaccctctgattggttgcttttcacaaccwatcagacatttgcataggagtgtaacttctttccacaaccaatctgactgattgtgggccattacttcatttccatgaggtgtacaccaagtggccaatg

SEQ ID NO: 15696 - DNA, 201 bp, Homo sapiens
tagggtctggtcaaggaaagggccacttcctgggcctcccaaaaagaggaaggagaaggccctggcttgtggaagagtaagaggggcctcgttaatgtctmccaagcacagtaccccaactccccacatacagtcccaacccttactgcagccgggaggttaggtgtctgccgtgctcatgaacaggaagtgaacccgatc

SEQ ID NO: 15697 - DNA, 201 bp, Homo sapiens
atttgaaaaaaaaaaaaagtcaccaagttgtttccaattgtttttgtaaatttgcttagtcattttcagagacaaaaatttgggaaaaggattgtagaatsactggcttcccaaaaccacttggtgtttacaaagttatcaaaaacgggctgggaccactgatggtaataacaaaacctggggccctgaatcgtgtattct

SEQ ID NO: 15698 - DNA, 201 bp, Homo sapiens; identical to SEQ ID NO: 2522

SEQ ID NO: 15699 - DNA, 201 bp, Homo sapiens
catgtagattgtacatcgtttgtcgataaatcagtgtacaaatactaggggtgagtgtgctcaaaacttatttttactgataatagtccatgatcaaggcrgtttggagaccactcaggacagggaaaacgcagactcatgtgacccatcagggcttcagggtgtcctctggtgaagggcagcagcaggacagagccccac

SEQ ID NO: 15700 - DNA, 201 bp, Homo sapiens
agtgtgctgaatcatgttttaaacataattatatccggaatgcacttacccatttgaaaaaaaaaaaaagtcaccaagttgtttccaattgtttttgtaartttgcttagtcattttcagagacaaaaatttgggaaaaggattgtagaatgactggcttcccaaaaccacttggtgtttacaaagttatcaaaaacgggc

SEQ ID NO: 15701 - DNA, 201 bp, Homo sapiens
taccaccacgcctggctaattttttgtatttttagtagagacgggatttcaccatgttggccatattggtcttgaactcctgacctcaagtgatcctcccrcctcagctgcccagggtgctgggatcacaggcgtgagccaccgtgcgcgacctcagggtcccttctaacctgtgctgttgtcataaaccctggaggagaa

SEQ ID NO: 15702 - DNA, 201 bp, Homo sapiens
aggatcctaaagagaagatgtaattataagatctaaaacgtggaggggggtggtgaattcagcctgcaggcatgtgtttgctgcccccacccccacatccyctttttttaaagttcgcataaaaacctggattcttggtttctcttaaaaaactggaaggtctggcacctttgctcccacatttcccgggcgcagcccttg

SEQ ID NO: 15703 - DNA, 201 bp, Homo sapiens; identical to SEQ ID NO: 2523

SEQ ID NO: 15704 - DNA, 201 bp, Homo sapiens
aagtgtgctgaatcatgttttaaacataattatatccggaatgcacttacccatttgaaaaaaaaaaaaagtcaccaagttgtttccaattgtttttgtaratttgcttagtcattttcagagacaaaaatttgggaaaaggattgtagaatgactggcttcccaaaaccacttggtgtttacaaagttatcaaaaacggg

SEQ ID NO: 15705 - DNA, 201 bp, Homo sapiens
cctacccaaggtctggtcattgctatacttgagttcttttcaggctcaagatctctacctttttgtgttttttttttttttgtacagagtcttgctctgtygtccaggctgtagtgcagtggaacaatctctgtatgctccctgcaacctctggctccaggtttaagtgattctcctgcctcagcctcccaagtagctgga

SEQ ID NO: 15706 - DNA, 201 bp, Homo sapiens
ctgtcaaacaacacagtccccatctgtactttgggagggaaggacttcttaattccagctgcctgttgccatgggggaacatagacccagaactgccatcytttctaatttttttaaaaattaaaaggctaaaagttttggcttataaaaatggtatttcctgagtttttacaattatagtattaagatattcctaggttt

SEQ ID NO: 15707 - DNA, 201 bp, Homo sapiens; identical to SEQ ID NO: 2526

SEQ ID NO: 15708 - DNA, 201 bp, Homo sapiens
cccacctcagcctgagtagatgggactacaggcatgtgtcaccatgccaggctaatgtttaaaaatttttcttagaggtagagcctcactttgctgcctargctgatctagaactcctggcttcaagtgatcctcctgccttgagctcccgaagcgctgggaccaatagagatttctctgagaattaggtcccccactatt

SEQ ID NO: 15709 - DNA, 201 bp, Homo sapiens
tgctgggaatgcgttcattttctttatcttgccattactgtacctctattgggaaatttactctctcttcatagataggatccgattcagtacatatttakaaaaccacacttacatttaaatacaggcctttcccatttcacagtgtttctagctcccctttccaatacatctctctctctctttctctctctctctctc

SEQ ID NO: 15710 - DNA, 201 bp, Homo sapiens
gttttcgagacgaagtttcgctctcatttcccaggatggagtgcagtggtgcaatctcctccgcctcccagtttaagccattctcctgcctcagcctcctragtagctgggattacaggcgcccgccaccatgcccggctaattttttgtattttttagtacagacggggtttcagcatgttggccaggctggtctcaaac

SEQ ID NO: 15711 - DNA, 201 bp, Homo sapiens
accaactccattgttactagatatcctgacactgaagaagctaaaaccaaacaacaatgacaacaacaaacccaagtctgccttatggcacattcttcacrtcgtaacaccttccttgggaccctatttctcagtatggacctgactctcccagggatcctagaatgcaagcatagtgattgcaaaccagaccatttgagg

SEQ ID NO: 15712 - DNA, 201 bp, Homo sapiens
tggtggggaaggatgttgcggtggggttggggtggcaatgaaaggtgaaaaccactgtggtcccacctgcccatcgtcagatttcggttcctctcagagtyaacgtagaaggtttctgggggcatggacctgagtcttatcccctttgcaaaagtaagaattgtatcgtagcctgactcagggttttagccaacttctctg

SEQ ID NO: 15713 - DNA, 201 bp, Homo sapiens
caatggacggagaactaccatcccatttgggccaacctcttttttttttttctttttgtttcgagatggagtctcgctctgtcaccaggctggagtgcagyggtgcaatctcagctcactgcaacctctgcctcccgagttcaagctattcttctgtctcagcctcctgagtagctgtgattacaggtgcgtgacaccaca

SEQ ID NO: 15714 - DNA, 201 bp, Homo sapiens
cgcccagagtcgtatcacttgactgcatttgaccattcagttttcagaccaactccattgttactagatatcctgacactgaagaagctaaaaccaaacarcaatgacaacaacaaacccaagtctgccttatggcacattcttcacgtcgtaacaccttccttgggaccctatttctcagtatggacctgactctcccag

SEQ ID NO: 15715 - DNA, 201 bp, Homo sapiens
aggatcgcttgcatccaggaggttgaggctgcagtgagccatgactgtggcactgcacttcaacgtgggcaacagtgtgagaccccatctccaaaaaaaaragcagtatagtcagtaagaaagaaaacaaactaacagtcaatattgtggctgctctcaatgttctttaaacggatcacattgccacttttttctctttgt

SEQ ID NO: 15716 - DNA, 201 bp, Homo sapiens
aggaataataattcagtgaaaggaaatttggatgacatgaactcatttccattagacttgagccacacaaatcaatgggaaaagaaacagctgaatccagsataatatctggctatttggagtgggcatgataatggagggagattggggaggtaacaaaccagctactattaagttcaagtcatgtcagttattcaaatt

SEQ ID NO: 15717 - DNA, 201 bp, Homo sapiens
tagtcccagctactcacctgtagtcccagctacttgggaggctgaggcaggaggatcgcttgcatccaggaggttgaggctgcagtgagccatgactgtgscactgcacttcaacgtgggcaacagtgtgagaccccatctccaaaaaaaaaagcagtatagtcagtaagaaagaaaacaaactaacagtcaatattgtgg

SEQ ID NO: 15718 - DNA, 201 bp, Homo sapiens
cagggttattaggaataataattcagtgaaaggaaatttggatgacatgaactcatttccattagacttgagccacacaaatcaatgggaaaagaaacagytgaatccaggataatatctggctatttggagtgggcatgataatggagggagattggggaggtaacaaaccagctactattaagttcaagtcatgtcagt

SEQ ID NO: 15719 - DNA, 201 bp, Homo sapiens
ctcagcctcttgagtaactgggactgcaggtgcatggcactgtgctccacaattttttttttttttttagagatgggatctcactgtgttgtccaggctgrtctcaaacccttgggtttaagtgatcctcttgcctcagcttcccaatgtgctaggattacaggcatgagaccccatgcctggccaatttcaaggatttta

SEQ ID NO: 15720 - DNA, 201 bp, Homo sapiens
ggggttgtacttggaatgactggcctagaaaaccctacaggtaccatttaagctccatagttcttctgtgtgtgtttcggatcccaggttccaaacctgctctaaaacttgttgctgcatctcacctaatcgtgtagtgagccaggtgagctcatctgtgaaatgcagacctttctggacgtaccacctcgtggggtgaag

SEQ ID NO: 15721 - DNA, 201 bp, Homo sapiens
agagagtattttgtaacctgtgacgctcttttcaagtcttagagaggaagtatggaaagagcatgcgcttttgactgaggaggtcttgggtttaaaggtcraattttgccacttactttctccatggccttggtcaacatcctgaagtctcaggtccttgtctgcctttgctttgacacgagatgttgcctgcctcaggcg

SEQ ID NO: 15722 - DNA, 201 bp, Homo sapiens
ttctcctgcctcaaggagctgcttctagtgtgtgctcttaaccctaaaggaaggaaacactgtgtcttcctcttctctcatacagagcccttcccatgacmaatgtgtggagtgttccctccttttacgtaattctccaattttctggaccccagcttggtgtcctacaattcagttttgacactaacgacccagagtcag

SEQ ID NO: 15723 - DNA, 201 bp, Homo sapiens
tttttttgaggtggaatctcctctgtctcccaggctggaatgcagtggcattttctcggctcactgcagcctccgcctcccaagttcaagccattctccartctcagcctcctcagtggctgggattacaggcatgtgctactacccccggcaaacttttatatttttagtagagacagagttttgccatgttcaccaggc

SEQ ID NO: 15724 - DNA, 201 bp, Homo sapiens
agaatagatggcaaatcccatgatttgtatttgactgacagtcaagaccctgtggggtgtgagcctggtgggggcattccaggctggtttctcctgcctcmaggagctgcttctagtgtgtgctcttaaccctaaaggaaggaaacactgtgtcttcctcttctctcatacagagcccttcccatgacaaatgtgtggagt

SEQ ID NO: 15725 - DNA, 201 bp, Homo sapiens
ctcctctgtctcccaggctggaatgcagtggcattttctcggctcactgcagcctccgcctcccaagttcaagccattctccagtctcagcctcctcagtrgctgggattacaggcatgtgctactacccccggcaaacttttatatttttagtagagacagagttttgccatgttcaccaggctggacatgaacttctga

SEQ ID NO: 15726 - DNA, 201 bp, Homo sapiens
tatttggaccacttctccctctttccggacagctgcttagtaggtttagcttaaattatacacatgccaagcatgtacacatatgagaagcctatatctcrtaatatccacagagaatagatggcaaatcccatgatttgtatttgactgacagtcaagaccctgtggggtgtgagcctggtgggggcattccaggctggt

SEQ ID NO: 15727 - DNA, 201 bp, Homo sapiens
tggcattttctcggctcactgcagcctccgcctcccaagttcaagccattctccagtctcagcctcctcagtggctgggattacaggcatgtgctactacmcccggcaaacttttatatttttagtagagacagagttttgccatgttcaccaggctggacatgaacttctgacctcaagggatccacctaccttggcctc

SEQ ID NO: 15728 - DNA, 201 bp, Homo sapiens
gaagagacctcaattctgtgccttgatgggattacaccgaagggagcactggtaggctgttgatgaaacaggtggtatttggaccacttctccctctttcmggacagctgcttagtaggtttagcttaaattatacacatgccaagcatgtacacatatgagaagcctatatctcgtaatatccacagagaatagatggca

SEQ ID NO: 15729 - DNA, 201 bp, Homo sapiens
ttggttgtcttagtagataggagtgtgagtacagaattatacgaagtgagaccatgggtgtgtgtgtgcacgtgtgtgcgcatgcctgtgtgtgtcattgsttagttaacaaaaggattgccctctgaagaacatgaacttgggccagacagcacgtgtagggggtggaattatggagcaattgttactttcttgtattaa

SEQ ID NO: 15730 - DNA, 201 bp, Homo sapiens
cgtcctaattgtgactctgccttgccattctatgttttatcggaatacgcagacatatactttatgaggttgggtaatgaagagagagagaccccaataaacatattttctaagagtaatggttatctatagctcaggaacccttggttagcacagcctctattacacagtactaggcaagcagttcatagctcaattaga

SEQ ID NO: 15731 - DNA, 201 bp, Homo sapiens
ctaaatcataaagaaccctgtctcgagcagacgagaaagagtaacggaggcctcaatggtgaaaggaaatcctgtaccagctgtgaaaacaatgagacacrttcagtaatagaatatagtgtgcttacaaattcagagttgggttcccttcttctcttgaagtggctataaattaattcatcaaaataaaaaaggccaaac

SEQ ID NO: 15732 - DNA, 201 bp, Homo sapiens
agagccaaggtcaatctgaatttttctttttctttcttcctttttttttttttttttttttttaaaaaaaaaaaggtgcttgaattagaaaggtagcacaytgtccacatggacagtgcaggatggggctggctttttcatttctgagagctggcaatggaatgaaggtcttttttttttttcttaatttttcttttttaa

SEQ ID NO: 15733 - DNA, 201 bp, Homo sapiens
aaagtaatataccacttttcgcttttttaatggtgagagccaaggtcaatctgaatttttctttttctttcttcctttttttttttttttttttttttaawaaaaaaaaggtgcttgaattagaaaggtagcacattgtccacatggacagtgcaggatggggctggctttttcatttctgagagctggcaatggaatgaa

SEQ ID NO: 15734 - DNA, 201 bp, Homo sapiens
ttatctcaacccatttaaatgtcttttccttgcaatgttttgtaatattacatgtagattgtacatcgtttgtcgataaatcagtgtacaaatactagggrtgagtgtgctcaaaacttatttttactgataatagtccatgatcaaggcagtttggagaccactcaggacagggaaaacgcagactcatgtgacccatca

SEQ ID NO: 15735 - DNA, 201 bp, Homo sapiens
ttcaacctggcaaccctgtgacctcagcactaggatatggatagaaaacatagtagcccctatttacctttatcttttatctcaacccatttaaatgtctwttccttgcaatgttttgtaatattacatgtagattgtacatcgtttgtcgataaatcagtgtacaaatactaggggtgagtgtgctcaaaacttattttt

SEQ ID NO: 15736 - DNA, 201 bp, Homo sapiens
tgttaaagtaaattttaattttagataaacaatggataattttttagcaaaaggatgttccacatttaactggacattatctctgtctctctccctccttmcctgcctcctatcctctcttcccaccccctacgatgtctatgtatagtttcaacctggcaaccctgtgacctcagcactaggatatggatagaaaacata

SEQ ID NO: 15737 - DNA, 201 bp, Homo sapiens
aatcttagctaagatttatcagaaattaaaactgtatacttaactaaccacctagataggtgcaggcatatatgaattcaccgaaatttgactcaactccyttggttaatttaaataaaataaaagtaaataaggggaaattgcatactcctatctggactgttttcttatggttttggaatctctggcaggtagaagtaa

SEQ ID NO: 15738 - DNA, 201 bp, Homo sapiens
aaaagtgtagtggtttgtagggtcatccccctaaagatatcccgccccaccaaagatatccctaaagacatcctgctggtttcagtggctcatgcctgcawtcccagcactttgggaggctgaggcaggcggatcacttgagctcaggaattcgagaccagcctggccaacatggtgaaaccttatccgtaaaaaaaataa

SEQ ID NO: 15739 - DNA, 201 bp, Homo sapiens
ggtatgtcacttaaaccttgtgttggagtttcctccttgttacatggaggtcacaagaataacaaactatgcatagatcacctaatttagtcattccaackgtgtggagagatagaggattaggatggactttatttcctaagtgagaaacgttggctttagtaaaagtgtagtggtttgtagggtcatccccctaaagat

SEQ ID NO: 15740 - DNA, 201 bp, Homo sapiens
tgtggggaggactttggacttggggattggactccatgggagaggtcagctccttgtctccctggtggtgagacagggaatggtagagtgtgtcctacctrtgtgcctgccttgctctacatcagtgcttcttggatattttggtatcaggactctaaactcttagtagttatccaggacccaaaatagcatttgtttatc

SEQ ID NO: 15741 - DNA, 201 bp, Homo sapiens
ctgtagttcatgaaacattcccttcgattctttgaactctctcatacctttcccttaaattcttctttttcccttatgtcaagcttctttcagtaacaacwgaaaggctaatagtagtgctgtgtggggaggactttggacttggggattggactccatgggagaggtcagctccttgtctccctggtggtgagacaggga

SEQ ID NO: 15742 - DNA, 201 bp, Homo sapiens
tccagtccgtgggggccctggtgctactgctgtagttcatgaaacattcccttcgattctttgaactctctcatacctttcccttaaattcttctttttcscttatgtcaagcttctttcagtaacaactgaaaggctaatagtagtgctgtgtggggaggactttggacttggggattggactccatgggagaggtcagc

SEQ ID NO: 15743 - DNA, 201 bp, Homo sapiens
tagggaggctgaggcaggagaatcacttcaacccggaaggcggaggtttcagtgagctgagatccagcctgggtgacagagcaagactccatctcaaagcraaacaaaacaaatgagggtcctcatcagcgtgcctttgacactgtcctctggtcctggtgatctgaatacatcaccacagaactgccagggtacgtgttt

SEQ ID NO: 15744 - DNA, 201 bp, Homo sapiens
tgcaggcttaaggctggaagaaaccccaagcatttggccaggaagaggcaactagttccagctggcccacatactacactttaaaaattacccagatgatstgattctgtagagagagagtgggtggagaggactccagggccatggaggaagattcggcctttctctccctaatcatgagcaatgtgatttggagagaga

SEQ ID NO: 15745 - DNA, 201 bp, Homo sapiens
ttgaaggtgacagagactgagaaagggctgcacacctttggcctaaagggtaatgagcaacacacaaggattgggagatgttcatggcaagaaaaattcasaagggacattgttgtttcactaattctgtaaaggagagcagcggcatttacttaggccgattccccattctctctttctgtttttaaacagagacagatc

SEQ ID NO: 15746 - DNA, 201 bp, Homo sapiens
cttcaaagatacaaagctagaaactacaaaactaggcatggttaataaataactgaaataccaggtgtatagaaatgcatctgtggaaaaatgaaatcatrtattctctaggatatattaggaaatggctctttggcaagtctagagggtaaagtatccctgaagggggaaaaggtttaaaaacagtaaactaaagaagat

SEQ ID NO: 15747 - DNA, 201 bp, Homo sapiens
tctttccccctcaacttccataggaaccaaactctctttcttcctcccgtttggttggaaagttattttgcctcactgcgtgatttttctactgcaccaaytcccctttcaaacgttattccacaacatactaaattaatgtatactgtgttctttgggtaatggggaggggagcctgtctcacagcacgcatttgttcag

SEQ ID NO: 15748 - DNA, 201 bp, Homo sapiens
tagttcaaataatacatatgctgaaattcctatatcccccccatactccagatcttcagtgtggaatttaaatataattccttattgtaaaaaaaaaaaawttttttttgatcaaggtgattttgataaactaaatgcatctttaattttactcacagcaaagcgattctttattttctctctaaaagcataattgatgtg

SEQ ID NO: 15749 - DNA, 201 bp, Homo sapiens
actaggaattgaaatggcctgaagctgagtttccactcttgtgaaggctggactgtctcttgttattacagcgagggtataactctttaggatcccgaccmaaggtttggtgtgtttaccgtggccctttcctggtgggtcctgagctcaaatttatgtctttttccttgttataaaattgccaaaagctcagcccatctt

SEQ ID NO: 15750 - DNA, 201 bp, Homo sapiens
ccttttgactccctaaggaaccctgttttgggtttcttttgaggttgaagatatttcagactctttccccctcaacttccataggaaccaaactctctttmttcctcccgtttggttggaaagttattttgcctcactgcgtgatttttctactgcaccaactcccctttcaaacgttattccacaacatactaaattaat

SEQ ID NO: 15751 - DNA, 201 bp, Homo sapiens
atcatacaatgagtggcttaaatatttattcttacagttctagaggctggaagtccgagacgagggtgccaaccttgttgagttcttagtgaggtccctcyttctggtttttaagtagcctgtttcttgctgtgtcctcatatggtggagagctgagaggaattgagagagagagagagagaggtcgcactgtctcatgtg

SEQ ID NO: 15752 - DNA, 201 bp, Homo sapiens
gtgttattacagggtagaaattcacctatgtcaagtaggcattataccaggtaacaatctcaagactcagcagggaaggatccacttgcaagcccacgtgsttgctggtaggactcagttccttatggcccagtggattgaaggcttcctttcctgcctggtgtttggttccttgccacgtagggatctccatcatggctg

SEQ ID NO: 15753 - DNA, 201 bp, Homo sapiens
aacagtcagagtgtccaagtaatctgagctagaaagttccttctttcagagaaaagttataaaaagtatatttgccggatccaaaaaaaatactgtgtatsaactactgagacctgcataatgttttcttagtattctcactctttaaaagaaaaaagaaaacctgtaaaatttgggaacttaaactttttttgatatttt

SEQ ID NO: 15754 - DNA, 201 bp, Homo sapiens
gcgtccaggactaaagtcatgtgcaatttaacaagatcttggtgagataaaggaagttgcgcttgaggaaacattgaaacacaccagatggaattttccarttccctcctacatgatagagactaggtgaagggagatagaccacaaattgattttgtgtaactcttaaattaagtggagcagagttaaaaaaaaaaaatc

SEQ ID NO: 15755 - DNA, 201 bp, Homo sapiens
ttggtgggaggtgtgcaggacacagctgaaacctttggtgtatagtggatactaaagcaatgctagtcttcttcgtgtgctaccagttagaatgaattttrctgacatcttactggtttctgagggtatacagacacttattgtcaaagatattattgattatctgatccccaaacatatggagttacatcacagcaggtg

SEQ ID NO: 15756 - DNA, 201 bp, Homo sapiens
gaaaatccttggggagccgccatcattccttccacgaaggaatgaaattataacgtaatgtattgttggagcccttagttcaacactgtcttttttcaggycatattaatgcaatggttagcatatcaacttccttctgtttttagtgactctaatacattatattcaccttgttctctgcatgttctttctttaagtcat

SEQ ID NO: 15757 - DNA, 201 bp, Homo sapiens
gggagccgccatcattccttccacgaaggaatgaaattataacgtaatgtattgttggagcccttagttcaacactgtcttttttcaggtcatattaatgsaatggttagcatatcaacttccttctgtttttagtgactctaatacattatattcaccttgttctctgcatgttctttctttaagtcatgttagatccct

SEQ ID NO: 15758 - DNA, 201 bp, Homo sapiens
ttatgtttccccagttggcacatcatggccaacaagagagtagggatcattaaggagtttattttcatctttattttatcatttaaaacacatttttttttccaatgagagtactgatgacataaaaggttatacattgaataaccacccaaattagcagtgtttcatatttacactgttcaacacagttctcttgtctct

SEQ ID NO: 15759 - DNA, 201 bp, Homo sapiens
atgctgatgtaaccatttccattctgaactcagaaaatggagataaatctcttgcaaggcttttgattttagtttttagatacagaacctttaaaaaaaaagaaaaataaacgttttgccacagtgtagtatatacaacagatgtgagggaaggacattgttttaagtgggaaacgtcagctctctcaacttctacacatt

SEQ ID NO: 15760 - DNA, 201 bp, Homo sapiens
caaagtaatataccacttttcgcttttttaatggtgagagccaaggtcaatctgaatttttctttttctttcttcctttttttttttttttttttttttawaaaaaaaaaggtgcttgaattagaaaggtagcacattgtccacatggacagtgcaggatggggctggctttttcatttctgagagctggcaatggaatga

SEQ ID NO: 15761 - DNA, 201 bp, Homo sapiens
tgaagtacaggcatatcccacagaatctcttaataccaggccaaaagtaactttatcttgatctgtagttcggacatatttcttggattgtccgcactcawaaaaagagattgcgtaacaccctttgaacaaatggatatttgagaaccatcctgtcttcagatttagattttttcaatttttttttactgtcatatgatt

SEQ ID NO: 15762 - DNA, 201 bp, Homo sapiens
gcaaagtaatataccacttttcgcttttttaatggtgagagccaaggtcaatctgaatttttctttttctttcttcctttttttttttttttttttttttwaaaaaaaaaaggtgcttgaattagaaaggtagcacattgtccacatggacagtgcaggatggggctggctttttcatttctgagagctggcaatggaatg

SEQ ID NO: 15763 - DNA, 201 bp, Homo sapiens
acatttgggaaatttgtaaagccttactttgaatgtctttttcttcactctatctgtattgtttggtgctttctatataaatttataaattggatgtacckccacagatgtcggttttctggtaataatacttttttacattaaaaaaaactcctgaaatgaaaatgtaacttagtcttattattgtaatctccccttgcc

SEQ ID NO: 15764 - DNA, 201 bp, Homo sapiens
ttagtcttttcaagaggcaaagtaatataccacttttcgcttttttaatggtgagagccaaggtcaatctgaatttttctttttctttcttcctttttttgtttttttttttttttaaaaaaaaaaaggtgcttgaattagaaaggtagcacattgtccacatggacagtgcaggatggggctggctttttcatttctgag

SEQ ID NO: 15765 - DNA, 201 bp, Homo sapiens
cattatggtacataaaagagctttctatcgcttttttacattatagtagttattcgttattattattattattattattattattattattattattatttctgagacaccgttttactctctctttgcccaggctggagtgaaatggcacgatcgcagctcactgcgacctccacctcttgggttcaagtggttcttctg

SEQ ID NO: 15766 - DNA, 201 bp, Homo sapiens
aatgtccggtttggagttggaggagtcattgattttaggcaaggtgatggtgagcccacagagcacagagttaatggaactctggccgttgatgtagcttygaagcctgaatttaagtcatatttttgaaaagttgcgtcttaaaaagttactagcgatggagaatgaaaagtcaatttggacactttaaaagtgagcctc

SEQ ID NO: 15767 - DNA, 201 bp, Homo sapiens
acagtcgtgatttagggcatgaagagctcactcatcaagatgtatgtaattcagattttctgagtgtttaattcggcgtctttggtcacaaggaacagagktttacttgtgccacctcttctaagaaaaaggtttactgtaagagataatgttggcaagctgaggaaaggaggcagttttgggtaactgtctcttgcgatc

SEQ ID NO: 15768 - DNA, 201 bp, Homo sapiens
atctaagatagtgatctggttacatagattatcagagatacttttttttttgattatcagagatacttttaaaaaagcaactacaaggtaaggattatcckttaatttagtgtttttctattaaactcaatttgctttaaagttttttacattttgcctcttttttgtatgtttgagtaccacttcctaaccaatcacaat

SEQ ID NO: 15769 - DNA, 201 bp, Homo sapiens
tacaggcacgagctgccacgcctcacctcttgttttcaataccattgataagttgtggtcttcagggacttgtgggcattttcaagttaaatatccaacaktcgtgatttagggcatgaagagctcactcatcaagatgtatgtaattcagattttctgagtgtttaattcggcgtctttggtcacaaggaacagagtttt

SEQ ID NO: 15770 - DNA, 201 bp, Homo sapiens
aagtctcgctttgttgcctaggctggtcttgaactcctgggttcacgtgatcctcctgcctcggcttcccaaagtgctgggattacaggcacgagctgccrcgcctcacctcttgttttcaataccattgataagttgtggtcttcagggacttgtgggcattttcaagttaaatatccaacagtcgtgatttagggcatg

SEQ ID NO: 15771 - DNA, 201 bp, Homo sapiens
aagaaaactcacagaagcagaaacttagggcttgctttaaatgttatcagtgtgaattgagatggtgtcagcattatttttttaaagaccaaaacaacaakagtaacaaacacacacaagccactgttagattttacaaaactttaaaaagtaattatcttaaagatatctaagatagtgatctggttacatagattatca

SEQ ID NO: 15772 - DNA, 201 bp, Homo sapiens
tcgcaatgattcggtgtgttttgttccgtgcatcctggcatgtgaaagaagtgaggtaaagagtataatttacttccttgttttaaagctagcattgcccrtgccttccacgcgggactgttgtggatatttgaccactgcaagaaaactcacagaagcagaaacttagggcttgctttaaatgttatcagtgtgaattga

SEQ ID NO: 15773 - DNA, 201 bp, Homo sapiens
aatcactgaatatgttataaccaaaaaggtcaaactcgcaatgattcggtgtgttttgttccgtgcatcctggcatgtgaaagaagtgaggtaaagagtayaatttacttccttgttttaaagctagcattgcccgtgccttccacgcgggactgttgtggatatttgaccactgcaagaaaactcacagaagcagaaact

SEQ ID NO: 15774 - DNA, 201 bp, Homo sapiens
gtctctgtttttttttttttttttttttttcctctaaataaacaaaggaatagaagatcctgtgaagagctgggtgtggtggctcatggctgtaatctcascactttaggaggccaaggcaggaggattgcttgagcccagtagttcaagatcagtctgggcaacataatgaaaacctaatgtctacaaaaagtataaaaa

SEQ ID NO: 15775 - DNA, 201 bp, Homo sapiens
gtttaatttttaggtctgtatttaaaaatctgtgtagtgacaacaattattcttattgtatgaacatattgtcggctggagagtattcagctgtcagacamagtgttctctaaagtgttcagccatcagacagaaactctattgctggtggcggggttgtgggctgggggaaccagagtatttgctcttctttagaagtca

SEQ ID NO: 15776 - DNA, 201 bp, Homo sapiens
ttttaagctaccacacagatgcaggaaactaatataccctttaatgattttctccatggcctttctgataatcctttcatccttcatctcccctgtcgccsttttctttgctttgcttgcttgcttgttttttttttttttttgagacggagttttgctcttgtcgcctaggctggagtgcaacggcacaatcttggttca

SEQ ID NO: 15777 - DNA, 201 bp, Homo sapiens
acacgaaaactaaaaacttatacatcattttatattttgaaattcccaatttgcaatgttatttttttttcttctttttttttttatgacacttttcttcyggaaaaaatccttaggacccagttactctctttcaggattttatatcataatgtgtctgtgagagacagagccagatgttcaggatttcagaccaccata

SEQ ID NO: 15778 - DNA, 201 bp, Homo sapiens
attgttttaagctaccacacagatgcaggaaactaatataccctttaatgattttctccatggcctttctgataatcctttcatccttcatctcccctgtygccgttttctttgctttgcttgcttgcttgttttttttttttttttgagacggagttttgctcttgtcgcctaggctggagtgcaacggcacaatcttgg

SEQ ID NO: 15779 - DNA, 201 bp, Homo sapiens
accatggctgaagggttattctggggagccttccctgtggaagccccattaaccatccctgctcattcctcccgtgagaccaccatttgctaaatcttctrtcaggtgatgtgggatccaagaagaaacaataatcagaagcttgccttacaggcatgcacaatttcgggtggactgtcacatgtgcactgaaaaagtcga

SEQ ID NO: 15780 - DNA, 201 bp, Homo sapiens
ggggtttcaccatgttagccaggatggtcttcatctcctgacctcgcgatctgcccacctcggcctcccaaagtgctgggattacaggcatgagccaccaygcctggccctgatttttaaatttttcatggagacagggtctcaccttgttttccaagctgatctcaaaatcctggcctcaagcaatcctctcctctgcct

SEQ ID NO: 15781 - DNA, 201 bp, Homo sapiens
gaataaaggcatggatgtgactgaggaggtaaaggtgaagaattggggaggggtggatggggctgactcatgacctaaagaacatggcatctggggctctyttgaaataatctgcactaaccactcattcacatttttttgagtctgtaagatcccaggcactcttggtagcaggggggttaggtgggtgaagggacaagt

SEQ ID NO: 15782 - DNA, 201 bp, Homo sapiens
agacatgaataaaggcatggatgtgactgaggaggtaaaggtgaagaattggggaggggtggatggggctgactcatgacctaaagaacatggcatctggrgctctcttgaaataatctgcactaaccactcattcacatttttttgagtctgtaagatcccaggcactcttggtagcaggggggttaggtgggtgaaggg

SEQ ID NO: 15783 - DNA, 201 bp, Homo sapiens
gttccaatgtttctgaaggatgtttttttaaaagaagtattcatttaggtgacacatatttattgagacactaatatatgccaggaattattctattggtkcctttggaggagacatgaataaaggcatggatgtgactgaggaggtaaaggtgaagaattggggaggggtggatggggctgactcatgacctaaagaaca

SEQ ID NO: 15784 - DNA, 201 bp, Homo sapiens
tgatcacaccacagcactccagcctggccaacatagtgagacactacctagatagcttaggagagttccaatgtttctgaaggatgtttttttaaaagaartattcatttaggtgacacatatttattgagacactaatatatgccaggaattattctattggttcctttggaggagacatgaataaaggcatggatgtga

SEQ ID NO: 15785 - DNA, 201 bp, Homo sapiens
gtgcaggttagaggctatgtcagaagcaagtcaggatttgaaggcagatctgtctgcttttgcccctctgtaaatccagagctgctgcctcatttcttacrttgcccccacccgtgcagcaattcttcctgggaggcctcattgttcatattcataaagggccccattcagtctcctttttggagaaatggccactgcaac

SEQ ID NO: 15786 - DNA, 201 bp, Homo sapiens
tggccaggagactaggcattcatagtggggcgtcctttaaggtctgaagaggacagtgaccatccaccacaggcaaacatgtgtgtgttaaaaaggaatgrcgttttggtctgtgctacaactgggatgaacctcaaacattacgctggacgtggtggcttacacctgtaatcccagcactttgggaggctgaggcaggta

SEQ ID NO: 15787 - DNA, 201 bp, Homo sapiens
ccaagttgtgtaaatcaaagcttctcctgccacactagtgtgtattaggccaggacttcatagtgtgattcaaatcaccaactgaatttttttttcctttycttcccctttctgggggactacgtttttcatggagaccggggccctccagctgctgtgatgatcctcccttgccagggaggtgctgttaatagcaaatgc

SEQ ID NO: 15788 - DNA, 201 bp, Homo sapiens
agatacaagaaggccacatgtggtggttcacccctgtaatcccagcagtctgtgagactgaggcagaaggattgcttgagaagtttgagattggcctgggmaatatagcaagatcccaaccctattaaaaaattaaaaatgaaaataaaattttaaagaaaggtatttctccccttcacggtaatttggagccagtacttc

SEQ ID NO: 15789 - DNA, 201 bp, Homo sapiens
tggtatccccaaacaaaatgttatcaaatgaagaactccttcccagctctcccttctgagtgtctgattttattcaagctcagatggcttctcagatagcktaaaaagtgatggagaatttcttttaccaattgtatgccctgtgggaacctgggtgctgtaatcactgaatatgttataaccaaaaaggtcaaactcgca

SEQ ID NO: 15790 - DNA, 201 bp, Homo sapiens
tggttagattacacgtttcctgagaggtatagatttcaaaattggtgtatttcacccgtccctcatcatggtatccccaaacaaaatgttatcaaatgaaraactccttcccagctctcccttctgagtgtctgattttattcaagctcagatggcttctcagatagcgtaaaaagtgatggagaatttcttttaccaatt

SEQ ID NO: 15791 - DNA, 201 bp, Homo sapiens
tactctaggaaggagaatctctgttgggatcttttggggagtacttgcctcccaagtgcttaggctcccgctgctgacaagaccctctgcctggcaagccstgcaggttggaatcctctgttagggttccaaagccttcaccaactcagagctctttctctctctgtttctcttttttgaatttaaattgatcctagtcac

SEQ ID NO: 15792 - DNA, 201 bp, Homo sapiens
gctgtttactctaggaaggagaatctctgttgggatcttttggggagtacttgcctcccaagtgcttaggctcccgctgctgacaagaccctctgcctggsaagccgtgcaggttggaatcctctgttagggttccaaagccttcaccaactcagagctctttctctctctgtttctcttttttgaatttaaattgatcct

SEQ ID NO: 15793 - DNA, 201 bp, Homo sapiens
ttaattatgaccataaaggccccatctccaaatgcagtcatgttgggggttagggcttcagtgtatgagtttgggatggcaggggagcagttcagctcgtragaatcgtaagattcctgatctgtttctcttccaagaaattgtttggtttcatgttgattttatctccttttccctatctgtctcaaagcactgaagaaa

SEQ ID NO: 15794 - DNA, 201 bp, Homo sapiens
tgtaaattgtctaaaattaaattttctgtggttgtcatccacatgggttctgaacttgctgttataattattcacattttcttgcagtgaaaatctacagrtcaaggtcatcttcacgtctttagttcttgttttgcttcaggtcagtttagaaccgaatgttaaaaggatattgtctattcgaagggtcagattgtggca

SEQ ID NO: 15795 - DNA, 201 bp, Homo sapiens
ttcttcctaccttccatatgagagaatagggaaaattaaagaataaatgtctctgggtttaatgcaactttactaaggaatgaaagtccgataagaatccrtatcttttgaaagaagattttttaaattccttatttttccttcctgcatggtcataaaacacactggggacagcccaccctgagaagtcaccaggcatct

SEQ ID NO: 15796 - DNA, 201 bp, Homo sapiens
cttacctctttttagtttaattaaaattatttctcagattaagagccatgctatgatgcttgccaacggatatttaaaacatgtaactgatttgttttttrtaatgcttcaggagaactcagttgagcagtaaagatgtgctcgtgatgtggttagctcagaataaggatgtgaaaaccaaaagggaaaggaggacaggag

SEQ ID NO: 15797 - DNA, 201 bp, Homo sapiens
ttgcaataatgtaattgaaataatgtaatacaatcctgcttaatattacactgtatatattcattgacttatagactgagctccttatcttgttcattgcyatggctttagcaccttttgaacagtggtgcttggcttttggtaggtggtcaacaaatgtgtattaagtatatgaactgttggaagggtctgctgtgaagg

SEQ ID NO: 15798 - DNA, 201 bp, Homo sapiens
ttaagcattgctaaattggaaaaccatggaatatagagatccagtagttaagagcctactgggagagacagcataataattacaataagtgcagaacttgmaataatgtaattgaaataatgtaatacaatcctgcttaatattacactgtatatattcattgacttatagactgagctccttatcttgttcattgctatg

SEQ ID NO: 15799 - DNA, 201 bp, Homo sapiens
cccattaaagaacacagctcatggtcggtccattaactactaattatcaaaacagtgggtgaaaacgatgtttggaaatagctgcgactctcgcgtgatasgaaaatatctgtgatttcgattgcgacaaacacacagatgcttctcacacgatcgcagtgcattgcctaaatgacagtaatgctaaactccagtcagatg

SEQ ID NO: 15800 - DNA, 201 bp, Homo sapiens
gcaggctgccaagaatagcagttagaaatagctagtatcaggcctggtgtagtggctcatgcctgtaatcccagtgctttgacaggctgagggaggagaaytgcttgagcccaggagatcgagaccagccagggtaacatagggagaccctcatctctacaccgaatttaaaaacttagctgggcatggtggtgcctacct

SEQ ID NO: 15801 - DNA, 201 bp, Homo sapiens
ttagcgagatattgtctctactctcaagaaactcgctttctttgggaatcatcacctgtttttgtgtcacggaccccttgggcatttggtgccctttgcasaataatggttttgaatacataaaacgcacgggatcacagaggaaaccaatcatattaaaatacagttgtcaaaatattaactcatgggatctagtaacaa

SEQ ID NO: 15802 - DNA, 201 bp, Homo sapiens
attcaagattggaaaatgttcatgttaaattattgttggccgactgtgggttcatttaattaggttctctgttttggggtatgttgaaaatttttcataakaaaatattattcagaggtctcaagaggcaggctgccaagaatagcagttagaaatagctagtatcaggcctggtgtagtggctcatgcctgtaatcccag

SEQ ID NO: 15803 - DNA, 201 bp, Homo sapiens
ctctttctcgatccttgcagtttcccttttgacctgtgggtacacatggtactgacgcaattggcacctcagatggttcttcctgacagctacccttgcamctgactcaggatacaaactacctttttttttggagacagatctcactttatcacccagtctggagtgtaattgacgcaatcctggctggctgcagccttg

SEQ ID NO: 15804 - DNA, 201 bp, Homo sapiens
acattgaaaacttatccaggagaggaaaggctctttcagctgctctttctcgatccttgcagtttcccttttgacctgtgggtacacatggtactgacgcrattggcacctcagatggttcttcctgacagctacccttgcaactgactcaggatacaaactacctttttttttggagacagatctcactttatcacccag

SEQ ID NO: 15805 - DNA, 201 bp, Homo sapiens
gctcagcacacttggtgcagtctctctggcttggtaattggtcccaagaaaatagtttttttccaattatggcaacattgaaaacttatccaggagaggawaggctctttcagctgctctttctcgatccttgcagtttcccttttgacctgtgggtacacatggtactgacgcaattggcacctcagatggttcttcctg

SEQ ID NO: 15806 - DNA, 201 bp, Homo sapiens
gcagagtaaacagacaacccgcagagtgggagaaaatctatacaaatctatacgtctatacaaggactaatatccaggatctacatggaactcaaattagmaagaaaaaagctaacaatcccatcaaaaagtgggctaaggacatgaatagacagttctcaaaagaagatacacaaatgaccaccatacgtgaaaaaatgc

SEQ ID NO: 15807 - DNA, 201 bp, Homo sapiens
ttgagcctaggaggttgagagtgcagtgagccgtgttgctgccactgtactccagcctgggcaacaggacaagaccgtgtctccaaaaggaaaaaaataawaaagcactgtctctctctacccttgcagtatccctgtaggagagagttactattagctcccagtttataggtgagtgatatggtttggatgtgtccccac

SEQ ID NO: 15808 - DNA, 201 bp, Homo sapiens
ggtgctagggtaaggcacgcaggatgcaagattagcgagatattgtctctactctcaagaaactcgctttctttgggaatcatcacctgtttttgtgtcayggaccccttgggcatttggtgccctttgcagaataatggttttgaatacataaaacgcacgggatcacagaggaaaccaatcatattaaaatacagttgt

SEQ ID NO: 15809 - DNA, 201 bp, Homo sapiens
acatcttcccctttcttctcccccaggtttgtcccatttgtactgactctgacccaggttgtcatgacttgagactcactagaagtttcagaaagatgcasactgctttaaaaaaaaaaaaaaagggcaaggggaggtgtgagaagaaagtataattctttttcttctaactggagatataaaaatcatataagcatgatt

SEQ ID NO: 15810 - DNA, 201 bp, Homo sapiens
gcagtaaaatagtttttcagtcactttgccttcatttgtttgacattcttggaatatttgggctctacaaggtgctagggtaaggcacgcaggatgcaagrttagcgagatattgtctctactctcaagaaactcgctttctttgggaatcatcacctgtttttgtgtcacggaccccttgggcatttggtgccctttgca

SEQ ID NO: 15811 - DNA, 201 bp, Homo sapiens
agggccacatcttcccctttcttctcccccaggtttgtcccatttgtactgactctgacccaggttgtcatgacttgagactcactagaagtttcagaaaratgcagactgctttaaaaaaaaaaaaaaagggcaaggggaggtgtgagaagaaagtataattctttttcttctaactggagatataaaaatcatataagc

SEQ ID NO: 15812 - DNA, 201 bp, Homo sapiens
ccctctgataatcctgcaagagccagcccagttttgctgacagcacagtctgctgtttaattattgtgtgttcaatgacttacctctttttagtttaattraaattatttctcagattaagagccatgctatgatgcttgccaacggatatttaaaacatgtaactgatttgttttttataatgcttcaggagaactcagt

SEQ ID NO: 15813 - DNA, 201 bp, Homo sapiens
gacgtctatgctttccagcttgccaattctggggcctggcacagtatctttcaccccggagtctcagtttcctcatctgtaaaatgggaaccatgacgtcrgcatcacagagttgtgagaattcgacaaggtggaatgaaagcaactagtgtggtgtctgaccgcttgtgttagtccatgaggaatttccttacgtattgt

SEQ ID NO: 15814 - DNA, 201 bp, Homo sapiens
atgcctatgcttttaaaaaattattgtgatacagtgaaacaaggaagaacgtgtagctggaaaaatagtatttgcttgtaatatacattcagattcataayaggcttatttgattcccaggacagggtgagcaaaggatgctgtttcctgggtgtctgctttggtgttcattgagtcatgtctctctctttagaccttact

SEQ ID NO: 15815 - DNA, 201 bp, Homo sapiens
attactgaaaaaaaaacaaaacaacaacaacaaacaacaaaaaaaacaccttccactaaaactgactcaaaaagataatagcagggaaaatgacatgtcgrtctgtgattccttttttacttgtcagtccttttgggagttgaacatataagcacatgtacctctatgtgacttttgagacgtctagaatagagaattcac

SEQ ID NO: 15816 - DNA, 201 bp, Homo sapiens
gcctgaaataatttcaaattaacccctgaggaacaaatgctcatgactttcaatgaatagaaaaatcagactgctagaacctccagactgcatgtcatgcrtagaagtagaatcctggggaagctagctcacaaaagcaagggagatacctgcaaggctgagctgagcttgcaagggaagaaaaatattagagagttgtca

SEQ ID NO: 15817 - DNA, 201 bp, Homo sapiens
agtggaatcacagacatgagccaccatgcctggcctgaaataatttcaaattaacccctgaggaacaaatgctcatgactttcaatgaatagaaaaatcaractgctagaacctccagactgcatgtcatgcgtagaagtagaatcctggggaagctagctcacaaaagcaagggagatacctgcaaggctgagctgagct

SEQ ID NO: 15818 - DNA, 201 bp, Homo sapiens
ggtccacctcctgggtaaaggagattctcctgcttcagcttcccaactagctgggacaacaggtgtgtgccaccacgtccagctaatttttgtatttttawtagagacggggtttcaccatgttggccaggctggtcttgaactcctaacctcaagtgatctgcccgccttggcctcccaaagtgctgggattacaggctc

SEQ ID NO: 15819 - DNA, 201 bp, Homo sapiens
caaattccaagcaaactttttacttcttattatgtaaaatggaagggttagccaaattaagatctcaccatcaaccttgagggagtgacttctacatgccrtgtattactggttataaagctagtcttgtttggattgaagaatttaatcatatttaacttttcaaaggatgctttttaaaaaaccttatccgcgtgttat

SEQ ID NO: 15820 - DNA, 201 bp, Homo sapiens
cattttattttgtgggcagatttcttttacagttctggctgggtttcttttagttggcttctttgctttgctcctgttacgacttagccctgtagctctgrgctcttcgattctcacgtgctgatggtgtagctgagctctgctaatgctggttattaatctgacaatctataccagggaggttttataattgccataatt

SEQ ID NO: 15821 - DNA, 201 bp, Homo sapiens
agctagtctgagtggcagccttacccattttattttgtgggcagatttcttttacagttctggctgggtttcttttagttggcttctttgctttgctcctrttacgacttagccctgtagctctgggctcttcgattctcacgtgctgatggtgtagctgagctctgctaatgctggttattaatctgacaatctatacca

SEQ ID NO: 15822 - DNA, 201 bp, Homo sapiens
ggtggttcacacctgtaatctccacactttgggaggctgaagtaggctgaagtgggaggatggttagagcctaggagttcgagaccagtctgggcaacaamgtgagatcctgtctctacaaaaaataaaaaaaattatctgggtatagtggtgtgcacctgaagtcccagctaactgggagtctgaggcaaggaaattgtt

SEQ ID NO: 15823 - DNA, 201 bp, Homo sapiens
gacaaaggtgacagaaaggaaatctcctaagttggcctacagggtgctttagaaaacatctggctgggcatggtggttcacacctgtaatctccacacttygggaggctgaagtaggctgaagtgggaggatggttagagcctaggagttcgagaccagtctgggcaacaacgtgagatcctgtctctacaaaaaataaaa

SEQ ID NO: 15824 - DNA, 201 bp, Homo sapiens
ctaagcagacatactcgatacatcttcactaatgagttctgacttcataaaatgtattaatgacttctttttgaaagtaagagtgctttgaataccagtcrttattgctttagaagttcataaaagcaaaagcacagtatttcccccagtgtttgtgcgataagagaatagatgtaggtccagcgcctagaattttagcta

SEQ ID NO: 15825 - DNA, 201 bp, Homo sapiens
cagtgcagtgatgcaatcttggctcactgcaacctctgcctcgcaggctcaaatgattctcctacctcagcctcctgagtagctgggattacaggtgcccrcccccatgcccagccaatttttgtatttttagtagagatgcggtttcaccatgttgaccaggctggtctcgatctcctgacctcaggtgatccatccatt

SEQ ID NO: 15826 - DNA, 201 bp, Homo sapiens
tctgagagcagggccaagaaagggaaagagagagagaggaaaaaaaacaaaaaagaaaaagaaaaaagagaggtgggtagggagggaggagagacatggayccacggggaatgggaagagaaatagaaatagggaatttgaaatggaaataaaacaaaagggcaggaaaggaagaaataaagagaatgagataaaaggaaa

SEQ ID NO: 15827 - DNA, 201 bp, Homo sapiens
atcttcacctgggaatgttctcctaatagtcacttttgttataaatcttcacctagcatgggagttaagtgcattttaaaactagacctggggactatgtrtcctaaaatgcaaaaatagcccccaaaatgaaaattaatgttgagaatctagtcaatctgccagcagtacgtacataactgttctgtgtatatttcacat

SEQ ID NO: 15828 - DNA, 201 bp, Homo sapiens
gtgaatgggtttggagccaacagggataatagacaacgctatcaagaggggggccaaccacacatgtgcagccactgtatgacgtctggattttccttgasttatggtgatcactattgggaggtggtaagcaaacaggtgacataatttgaatcatggttttaaaagacgccatggttgccatgaggaggacaatgcgta

SEQ ID NO: 15829 - DNA, 201 bp, Homo sapiens
cctttctcagcattccacaagttacttcgtccttcctttgttctcctctgcctttgcctcttttttctttttttattttaattttttttttttaattatastttaagttttagggtacatgtgcacgttgtgcaggttagttacatatgtatacatgtgccatgctggtgcgctgcacccactaactcgtcatctagcatt

SEQ ID NO: 15830 - DNA, 201 bp, Homo sapiens
ggattacaggcgtgagccaccacgcccggccttgatttttcttaacctttatttccaattatgcatcttctgagtaactataaagaaaagcaaaatctacrgtaggtatggagtgagtgcagagtcaccatcagcttgaacaaatgtgtgtatctgtggtcaagtttaattgcttcttctgtaatttatattaatcacgct

SEQ ID NO: 15831 - DNA, 201 bp, Homo sapiens
tggctaatttcttttgtatttttaatagagatgaggtcttgctatgttgcccatgctggtcttgaactcgtgggctcaagcagtccacttgcctcagcctmccaaagtactgggattacaggtgtgagccaccacatctggcgaaactctgggtagtttctaattatttctgtatttctatttgtatttaaaagtacagga

SEQ ID NO: 15832 - DNA, 201 bp, Homo sapiens
gtgttgttatgcagtgtgtgactgtaccagcagcttgatctttgtgcttctagagaacatttaaattgattcgcttttgtgagacagggtcttgctctgtyacccaggcttcagtgcatcagcgtgatcatagctcactgtagcctctccctcctgggccaagtgatcctctcacctcagcctcctgagtagcttggacta

SEQ ID NO: 15833 - DNA, 201 bp, Homo sapiens
agtaggagatatatcttacttaaaaaaaaaaaaaacaaacaaacaaaaaaaaaaaactccttcttcatttgttatagttccaggatagagtgtgtacctgkatagagagagtcaggcagatataggtgtgccctccttccaagatgtgtgatggtgggcaactttctttgcatctctgagcctctattttctctatataaa

SEQ ID NO: 15834 - DNA, 201 bp, Homo sapiens
aggatgtacttacaaatcctacgtggtataacccattatacacagaggctgtatgggatagcctgttgcttccaggctgcaaacttgtatagcatggtacygaactgaatactataggcagtcataacacaatggtaagtatttgtgtatctaaacacagaagtggtacagtaaaaatacagtgttgtaatcttatgggac

SEQ ID NO: 15835 - DNA, 201 bp, Homo sapiens
ggaggtgattagatcatgagggtggagccctcataagtaagatttgtgccctgatgagaagaggatagaaaggtagctaactttccttaagctatgtgaakgtgagaacacagtgggaaggcagccatctgtaactagtaggagggccctccccaagaacgtgaccatgctgccaccttgaccttggactttaagcctcca

SEQ ID NO: 15836 - DNA, 201 bp, Homo sapiens
agaaggacgtgtttgcttcctctcctgccatgattgtaagtttcctgaggtctccccagccacgtggaactgtgagtcaattaaacctctttcctttatamatttcccagtcttcgatatgtccttatagcagcatgaaaacagactaatacaggggcctctgggaggtgattagatcatgagggtggagccctcataagt

SEQ ID NO: 15837 - DNA, 201 bp, Homo sapiens
ggacatggttgtgtccccactgaaatctcatcttgaactatagttcccatgatccccatgtcttgtgggagggacccggtgggagataattgaatcatgcygttctcacgataatgagtgagttctcatgagatctgatggttttataaggggctttcttcccttttgcttggcacttctcttactgctgtcatgtgaaga

SEQ ID NO: 15838 - DNA, 201 bp, Homo sapiens
tctttttttttttgtcagactacttgccagcatactaaaatcaggatattttacttaaatgtagatttatgacagttttgaaaaatcagaatgagtattgkagactaaatgtttatgtcttccccaaaaattcctatgttgaaaccctaatcttaaggtcatggtatttggacatggttgtgtccccactgaaatctcatc

SEQ ID NO: 15839 - DNA, 201 bp, Homo sapiens
agtgattgacttacccgagtgtacacatgtttgcatctcacttgtatgttccttacatgtttacttaattattgggaaggtgtattaatgtcctgttgctrctataatggaccaccacaaactcggtgcttctatgctgcaaacctaagattataggcagtcataacacagtgttaagtatttgtgtatctaaacatagaa

SEQ ID NO: 15840 - DNA, 201 bp, Homo sapiens
ttttgctgttacgagcatggatttagctcatttttaccatcttccctagttgtatcaccttcctcccattatgtttgtaacttcagattttgtatatttcrcatatgtcaatatgtaaacattttatatatatatatatgcatgcacacacatgcatacatatatgtaatggtatatatacatgtaagtttccatttttgc

SEQ ID NO: 15841 - DNA, 201 bp, Homo sapiens
tcagttttcgtgtctccctcccactggaccacaagcccctaactcttcatgtacacaccctgactcccagtgtgggctggccacccaggaggcacccagtytatgtgtgctgcgtgagtgatgtggaatgactgcccacgtaggaagtggcaggttggagaaaaagcagtcacagctcctggctgctgtggctgctttgag

SEQ ID NO: 15842 - DNA, 201 bp, Homo sapiens
tatgactttacctatttcgggtaattgatataaatggaatcatacaatacgtggccaactgacttctttcatttaatgttttcaaggtttgtgttatttcrtgtattaatattatgttggtgcaatcacttttgaaccaatctaactaatacttcatccccttgtatggccaaataatattctattctatcaatatattat

SEQ ID NO: 15843 - DNA, 201 bp, Homo sapiens
atggcctgggaggcaagtgtgatcattcaggtaatcaaagtaactacagaaacagaggtatggattagctagtcattgcagatgtggcattgagcatatargcgtggtgtacatcttagaacttcatctggaaatgcctgtgggggagttggatttcaagatcatcgtcaatgtcatgtcactgtaatttcatttacatta

SEQ ID NO: 15844 - DNA, 201 bp, Homo sapiens
taagttcttaagatttggcagctgtggatcgtgtttagtaagcacgatctctaactctttggaactcagaactatgtaattgaaatggcctgggaggcaartgtgatcattcaggtaatcaaagtaactacagaaacagaggtatggattagctagtcattgcagatgtggcattgagcatataagcgtggtgtacatctt

SEQ ID NO: 15845 - DNA, 201 bp, Homo sapiens
gctttatgtggagaaaacagtattggaaattattactcagttcaagaaaacctcactgagcacctaccatgtaggtgctcatcccgataccactatcaggmcctttggaccagttgcaaggatgcaggatgaggaaggcaatgtgagaaaacagaaggagcaccaggcagtcgtgggcttgatttttattttactattttt

SEQ ID NO: 15846 - DNA, 201 bp, Homo sapiens
agatttccccttttcataaggacaccagtcctattggattagggctcccccattatgacctcatttatccttaattatgaccataaaggccccatctccaratgcagtcatgttgggggttagggcttcagtgtatgagtttgggatggcaggggagcagttcagctcgtgagaatcgtaagattcctgatctgtttctct

SEQ ID NO: 15847 - DNA, 201 bp, Homo sapiens
acctgaggtctagggctaaactcttgcctttacctgttccatgcttagccgttcctgctttttgcctagaacctcagtgctattgctcacacagacccagytcatgtccccaggccatgaccactgcctccccttctcccacctgtgcaggtgttaagcatcagtacataactgaggagtaggagggcagcagcccaaatc

SEQ ID NO: 15848 - DNA, 201 bp, Homo sapiens
gcttcagggaagggcagtgcaaattgtttctggactgatgccatcttttaataatagtagttaatagactgggtacaatggctgacgcccgtaatcccagygctttgagaggccgaggccggtgtatcgcctgagtccaggagttagagaccagcctgggcaaacagcctgaggcaaaacctcatctctacaaaaaataca

SEQ ID NO: 15849 - DNA, 201 bp, Homo sapiens
atgttaacctcctttggaaacacccgcacagacacacccaggaacagcaccttgcatccttcaatccaatcacattgacactcaatattaaccatctcagyaggcttcttcgtgttcacatagtctcctcaccgtgtgctgtgtccagatttccccttttcataaggacaccagtcctattggattagggctcccccatta

SEQ ID NO: 15850 - DNA, 201 bp, Homo sapiens
cccaggctcaactatcagccgccttctcatcccaagggctgtcaccaccagaaatttaacatgctgttagtgcatgcaaaaaaaagcccagtaattgtagsgctcatcagtacattgttaattgatcctcatttcctattattttacctcaaagcaaacacatcattcaccatagtgacaccagagttgtttatcttctct

SEQ ID NO: 15851 - DNA, 201 bp, Homo sapiens
ccgctgacttaaatgttaacctcctttggaaacacccgcacagacacacccaggaacagcaccttgcatccttcaatccaatcacattgacactcaatatyaaccatctcagtaggcttcttcgtgttcacatagtctcctcaccgtgtgctgtgtccagatttccccttttcataaggacaccagtcctattggattagg

SEQ ID NO: 15852 - DNA, 201 bp, Homo sapiens
ctcttacttaaacacacagcatgactctccttacacatttatttcagaagagcaaagtccgggtccccaggctcaactatcagccgccttctcatcccaasggctgtcaccaccagaaatttaacatgctgttagtgcatgcaaaaaaaagcccagtaattgtagggctcatcagtacattgttaattgatcctcatttcc

SEQ ID NO: 15853 - DNA, 201 bp, Homo sapiens
ccaccatacccagccaaaatattcttttcaaagtgattagaagtaggagaagcttgctctctttttattggcacttctgtcttacatgcactttttgattkaaattattctgtcttctatgaaatgacagtgattggaggtggtttatttttttttaagtctgcttactcggaaaaataaaacaaagttgacaacctgatt

SEQ ID NO: 15854 - DNA, 201 bp, Homo sapiens
cttccaaatgcccttaacccacagatgggaagaaaatgaggtggggggaaggggactttcttgcttcctcatagttctcccccatcctgtaaaggagcctrtgcttcccgactcccagggccctgcagcatgtcaagaacaatattggacaagcttgtcagtgagggtccaggtggttccctgccactacgatgcatgctg

SEQ ID NO: 15855 - DNA, 201 bp, Homo sapiens
actcctgggctcaagcaatctgctcacctgggtctcccaaagtgttgggattataggtgtgaaccaccatacccagccaaaatattcttttcaaagtgatwagaagtaggagaagcttgctctctttttattggcacttctgtcttacatgcactttttgatttaaattattctgtcttctatgaaatgacagtgattgga

SEQ ID NO: 15856 - DNA, 201 bp, Homo sapiens
accttcaccaccacccaatgtgtcctgctcatcactgaggtttgtcatttttactctgagtctgtccattgtcatcatctccaccatcaccccttttgttytcattgccacccttgcctggggtgagtgaagacgctcttctctggcttccacccttccaaatgcccttaacccacagatgggaagaaaatgaggtggggg

SEQ ID NO: 15857 - DNA, 201 bp, Homo sapiens
ttcccttcggaaaactccctgggtgccccagcattatgtggtaaaggacatgtatttccaactggcaggggctctgcaaagtttctctgcctcctttgctmaccaaaccctaaataattgtctggatgttccttttattgtcacctctgaaacaagacgaagatttggacggtttgctttagagtgcattaacttctttat

SEQ ID NO: 15858 - DNA, 201 bp, Homo sapiens
cacaattcacacaccaggctgccactttggcccctgcgtcaccttcaccaccacccaatgtgtcctgctcatcactgaggtttgtcatttttactctgagwctgtccattgtcatcatctccaccatcaccccttttgttttcattgccacccttgcctggggtgagtgaagacgctcttctctggcttccacccttccaa

SEQ ID NO: 15859 - DNA, 201 bp, Homo sapiens
agaataaaatatcatcaggagcagctcatgtgaccagaatgtgacaaagtctttgctctacaggtcaagttgggacttactgaggagaaatgaggggactkcaaagtccaggttgcaccatccactttatagatgaggaaagtaagaacccacagcatcttgcacgtagaattcaatatatgtcctgcttcttgaatcaca

SEQ ID NO: 15860 - DNA, 201 bp, Homo sapiens
gggattcatacggacattatttagacacacttccacctacagagtcacatattgtatagaataaaatatcatcaggagcagctcatgtgaccagaatgtgrcaaagtctttgctctacaggtcaagttgggacttactgaggagaaatgaggggacttcaaagtccaggttgcaccatccactttatagatgaggaaagta

SEQ ID NO: 15861 - DNA, 201 bp, Homo sapiens
tctgtctcaaaaaaaaaaaaaagtgtactttttgaggaaagttctatttttcattattttccactatgaatgaagaagaaaataatatacatacattactkggattcatacggacattatttagacacacttccacctacagagtcacatattgtatagaataaaatatcatcaggagcagctcatgtgaccagaatgtga

SEQ ID NO: 15862 - DNA, 201 bp, Homo sapiens
aggccctggggtggaaacacactcgatgtgttcaagggagagtaagtggtgaatgggtttggagccaacagggataatagacaacgctatcaagagggggsccaaccacacatgtgcagccactgtatgacgtctggattttccttgacttatggtgatcactattgggaggtggtaagcaaacaggtgacataatttgaa

SEQ ID NO: 15863 - DNA, 201 bp, Homo sapiens
cctttgcttgttaccagaagagtcgcccagttgtggcagagatcatctagctcgcaaaactgtaaatatttactctttggcctttcccagaaaaaagtgcsgactgctatgttagatactccagttcattcaaagtgatatcaccctaacattctctaaattagccacagcttagatgaaatttaggcaaatggaacgccc

SEQ ID NO: 15864 - DNA, 201 bp, Homo sapiens
gtgccgactgctatgttagatactccagttcattcaaagtgatatcaccctaacattctctaaattagccacagcttagatgaaatttaggcaaatggaaygccccaggccccaggaagactgtggcagcacattgtatgtaactgttggggatgttgcctgaaaccccccccttttttttaggcagctgcaaggattaga

SEQ ID NO: 15865 - DNA, 201 bp, Homo sapiens
tgaaaacatcacttttcctccacactaatgtgtgagcttagccagagtaggagatatatcttacttaaaaaaaaaaaaaacaaacaaacaaaaaaaaaaaactccttcttcatttgttatagttccaggatagagtgtgtacctggatagagagagtcaggcagatataggtgtgccctccttccaagatgtgtgatggtg

SEQ ID NO: 15866 - DNA, 201 bp, Homo sapiens
agtgactcagataggtgtgtattctcaagaagctttcattctaatgacacatactttgtctccagtcagagttatggcaggttttttttttttttttttttttgactaaattcacccatatttgatggcaagtgtgatcacagcatgtttataaaaatcattcttaattaaggcatttccatcttatcaagccccctattt

SEQ ID NO: 15867 - DNA, 201 bp, Homo sapiens
agactcctaaagggaagattagggttggaagaagatggaggaagagagtaatttaattccttaatggaaagaataaaataagagctcttgacttttttttkttgttgttgttaggatatggggagaggtttctgcaaatatcttcttcagggtttacgaagtgaaccggatgtccggtaacagggttgcatgtcatgcaat

SEQ ID NO: 15868 - DNA, 201 bp, Homo sapiens
tgctttcaggtggagaaattgtaccattgctgaaaatagcttcgctgacagttagggcaagcttcattggtagcaagtttctatctggaaagatgtaggasaggaacactgactctggaagcagacgtgacctagttttgaaacctgggataaccacttcctatctgtatgacccgagcaagttactttccttctcagaac

SEQ ID NO: 15869 - DNA, 201 bp, Homo sapiens
aaatttgcctatctctgatgattagcaagattgataggcttttcttatgtcgggccatttgttttttaacgaattgccctttcatcttatatgcatgactrttggatatgtatcgattactaattgattgcttgcctcatgtgctataatttaattttcaaaatgtcccttagaagttaatttataaagtgtctattactt

SEQ ID NO: 15870 - DNA, 201 bp, Homo sapiens
ttgatgtgccttctcatttaatataagtaattattttaaaggttattgtgattaacatgtattccttatggaaaatttagaaagcgaagaaaaataaaaayaagaataaaagatttaaaaaaaccccaattcttaccagttagaagtatactattaatatttagcatgtatgattgtaagcatgttttcccttctttcgtg

SEQ ID NO: 15871 - DNA, 201 bp, Homo sapiens
agctcattcattttgttaatcctgagtttggaatcaaccaatttatttaaacccgtgaagcctcgctctgtgcccggtcaagtgctgggagtggcatctgyggggagggccaaggcagatgtcatttccagactgcattggatcctggattcagaagctgaagcttaggagtgggcatggtggttcacgcctgtaaaccca

SEQ ID NO: 15872 - DNA, 201 bp, Homo sapiens
gcacagaaactgaagttaaagctaatacaatgtttttcatttttacccttacctctacaatgtacttaattgttacagattcgtatttattgattatcatrttgtattacattgatagccgtttaaaatttatgaagattccgtacttgtcatatttaattctcagcaccgtgcttacagctgtcttgtgataatgtcgaa

SEQ ID NO: 15873 - DNA, 201 bp, Homo sapiens
tgctgggattacaggcatgagccatcacgcctggtgaatggtgtcattttgatgtactgagccatctcagtttttccagcaaccttccctcacctttgtgstcagctagaaggtcagttaacacatgggatgggaattcttgccaatgtccttcgtaaaagaagaacttctccttcactcacatgtcctgatacttcctca

SEQ ID NO: 15874 - DNA, 201 bp, Homo sapiens
gcggggaggaaacctatttcagtgtctctactatttctacctaggtggaggataactagccagatgaacggagctaagccttttgtatgaagtttatttcwtataaagaggaacaaaatcagaatcaaatttcttctgtagttgcacagaaactgaagttaaagctaatacaatgtttttcatttttacccttacctctac

SEQ ID NO: 15875 - DNA, 201 bp, Homo sapiens
ctgtgcttgatggttttactttttgtgatttttggagccttcatgttagaagccatagtcatatggtgctctctgaaagcaagacaaggtttcttcactasactctaagaggagatctgagacagagagatgggggcggggaggaaacctatttcagtgtctctactatttctacctaggtggaggataactagccagatg

SEQ ID NO: 15876 - DNA, 201 bp, Homo sapiens
ttattattattgttgatctcttactgtgcctaatttataaattaaaatttatcctaggtatgtatgtataggtgaaagcatagaatacatagggtttggtmctatccagttttcaggcatcactgtgggtcttggaacgcatctcccgaggataagggggggctactgtcagtgtgaacctgattagatctcaactgaaac

SEQ ID NO: 15877 - DNA, 201 bp, Homo sapiens
aacttgttgtaacatgtaagaaattacatctgggctaaaaggttcaataatgattactcttataatggaatcttctacaaagcaagggatttcatgatatscctatgcttttaaaaaattattgtgatacagtgaaacaaggaagaacgtgtagctggaaaaatagtatttgcttgtaatatacattcagattcataacag

SEQ ID NO: 15878 - DNA, 201 bp, Homo sapiens
ataataaaaaaaaccatgaaaatagatgacagagtaggcacaggaagaccagttaggcccatacagcaatcaaggtaagagatgatagtggcctggaacarcacgtagccatataggtgactatatttatattttgagggtgatccaaaaggatattatgacacatcagatgtgatgtataatagtaatagaagacttaag

SEQ ID NO: 15879 - DNA, 201 bp, Homo sapiens
gattcagataacctcattcagtgctatcttttaaatgtttcaaggctcagagcagtacttatgatcttagaatttctcatcttttatactgttcattaatwcttttatagtgtctcatataacctcatgttctaaattgaaaactggtctcggccaggcagagtggctcatgcctgtaatccccagcactttgagaggctg

SEQ ID NO: 15880 - DNA, 201 bp, Homo sapiens
tgagaggttttttttttggtgaaattattagtgtttgttattgcaataaagaagcaaagaaaaactcccaatattgaaaacatatattgtggggtttattsaaatccaagaaagagtgaactgtaggtttgtgttgtagcttgttagcacatttaaatcattcactccctattaataattgtgattaatctttatagacaa

SEQ ID NO: 15881 - DNA, 201 bp, Homo sapiens
tgtgccatagtttcctcatttgtaaaaggaaatgaataagaggacctaccttacgttgttgttgtgagcattacgtgagctaatatatgtaggccaggcgygttggctcattcctgtaatcctagaactttgggaggccaagtgggaggatcacttgaagccaggagcttgggactgtggtgagctgtgatggcaccacta

SEQ ID NO: 15882 - DNA, 201 bp, Homo sapiens
cgggtgtaactacttcaccaggtccaaatttcagagccatgttcaaaggtatattatatatattctctatagcccttttgcactggaaaggaacttaatgmatagtccagtgggtagtaggtgcttaataaatgctacatgaattaataagtgatgatacagtttttatgtatgcattgacattctttctttttaaattcc

SEQ ID NO: 15883 - DNA, 201 bp, Homo sapiens
tattattgtagtagttatgttttagaagataaagtatatatctattaaatatttagaagaaaatcctgaaaaagaagtaatgaacctagtgagctacttcraacatttatcatcaataaactgttccttacttagaacgtcagatatggagtggacttcctttgccatatctatggttatgctggttgaataccattccat

SEQ ID NO: 15884 - DNA, 201 bp, Homo sapiens
gtcagtgtctgtttggaaactggaggccttactggcataatggccaaaatatgtctataaactgtctgtatatttgtcagcccttttggattgttttttgwtgagaaattattttctctaaaaacctcacattcttcctccttaaaatgcttgcatgaccagtttttaatgtgaagaatttgtttatgggtgcagaatcca

SEQ ID NO: 15885 - DNA, 201 bp, Homo sapiens
ttaccttacttgacctttctctttcatttaacactgctaatcatcctccttgatgctatccttcacaacccatcatgcgcccatgccatcttttggaaatmtgattgactttcctggtttagctacaacccacaccccaggtagataaaggtccatctgtgcatgaaacttctctcctgaagtatgaattttaaattacca

SEQ ID NO: 15886 - DNA, 201 bp, Homo sapiens
catagtgctcttacatggtaaacagtaaaagttactgctgactctacaacttctacttcctctactactgctgctacttctaactcttattctaacacagyactttcctatatttctaaggcttgaatacatttactaattatgactcatagcaatgtacatctttgcctttatgattttttaaatataacttgcttattt

SEQ ID NO: 15887 - DNA, 201 bp, Homo sapiens
tacctctcagaataaagttactttaaaaatccaaaaaaaagttatttaaaaaaatacaaaagatgatgggatatgtaggaagtaaacagcaagttgcccawcattaaatactttcctgttgaaaatactgtcaatggtgttgtttgatgttgtttatatagagttccccaaaattataaaatttcagacagaaaagatttt

SEQ ID NO: 15888 - DNA, 201 bp, Homo sapiens
actaaaagtacttgtcacaggactaaagtaagcttttcttatatgttatgtataaaatctcagcaatgccactattagagacacgtgcatatgtgttttcktctccatatctgggcatcttttgtaaggaagcacgtatcacagcgtgttaaagggaagggactaagaattttagcaaagcaaaatgaaactaacaaacat

SEQ ID NO: 15889 - DNA, 201 bp, Homo sapiens
taatattaagaagcagctctcaccctataccaggtgtgttcactctccaaggcagatgattgtatgctgctcaggaatcttctcataagtaaatagtgaarcacttttgtaatttgtaagctctgtgatttttattttttctcctctcttgaagaccttctttctctccatgtaccagtttataggcctcctctgcttccc

SEQ ID NO: 15890 - DNA, 201 bp, Homo sapiens
ttagatttctttcataatattgtgttttggtggtttgatgtgtgtatatttctagtaaatactaacagtataaatttctagatttttgtcttatttttctrtattctcaaactgaacttaataaattgtgcataatgaatagtcaaatccaacctcccttctcacttcaaatattggttgtatcctcaaccaatccagtaa

SEQ ID NO: 15891 - DNA, 201 bp, Homo sapiens
aatcctacaaccgataaagaaaacaaaaaggtgactttttggaaactaataactgtaatttacttataatcttgaacattaaggaaaagtatgataatacrttaatgtgagatatggcttatcaatccagatgtttttgtttctagagattgattaggtacataactttgtgagaaataactggataatgccacagccaga

SEQ ID NO: 15892 - DNA, 201 bp, Homo sapiens
agtttctgtatgtttaaggccagcaaagtctagggagattgaattctggttttgaaaaatatcaaccacaccggtggtatcaactacttgggaggctgagrcacaggcctcccttgaacccaggaggcggaggttgcaggcagctgggatggtgccatgcactccagcctgggcaagagagagaagctctgtctcaaaaaa

SEQ ID NO: 15893 - DNA, 201 bp, Homo sapiens
gttttagaaaacagtcaaaataaaaaggagctcttataagttaaatattatagaagacttgggaaataaagtttagcaaatcttccaaaaagtcagagatrgataatatgagagaagctatatggaagctagactgttgacccaggggatacagcattcaagtagcaggaattccagaaagagaaaaccaagggcagcaat

SEQ ID NO: 15894 - DNA, 201 bp, Homo sapiens
gaatttatattcttcctaggaaaggaatagatatagacacaaagttctgattgcataaatgcatgtatataaatgtacatataaaatttttaaatattatrtactatttttgtgcagatttattacatatagcagtgtcttaaaaacaattagtgaattgtttaataaacatataaaaagatctaggattacacaatacat

SEQ ID NO: 15895 - DNA, 201 bp, Homo sapiens
attctcaggattattttatctaatattttgaagacaggattatatagccaaaatatttaagcttatagtcaattctgggttcatctattatcactgccatkaactggctgcataatgaaagctaagttatttaacctctcacagcctcagtttcctcatctgtaaaataggaatgatatttatttcaaattctaggtaata

SEQ ID NO: 15896 - DNA, 201 bp, Homo sapiens
gccagaattccaagttatgccatctgtacattgctatactgcccccaaaatgcagaatgtgaacacattactcatttctatttgttttcctgaattttgtrtttgacttctcttaaaaagactgaatctatttttaatttattggtattaaaatacatgcatagaaatgagatatcagaatacatatataaatataatatc

SEQ ID NO: 15897 - DNA, 201 bp, Homo sapiens
taaaattgtaagttatcttgtgcaaagcatgtcacaatacatgttctgtatatataggaaattacgttttaaacaaatataaatacttaatattgaaatastcagttttgttttgttttttttggtaaaatatgacaaactaagcctaacttccccaaggattttcagaagtaggaagaaaaatattctatggctctgcct

SEQ ID NO: 15898 - DNA, 201 bp, Homo sapiens
gaacgttaaggagcaccaaactttaaaataatacgcaagtatggcattaaaaggacataaaattttttaacttttacgttataaaagtcaataggaaatcrttgaaaattcctagtctagtcaaatagaagagtcatatattctcagtgtctgttcctaggtaattatttcaatgtactctgtccttacataagtcatttt

SEQ ID NO: 15899 - DNA, 201 bp, Homo sapiens
ttattattttctagatatctccaactattaaaaaatatatttaggatttagtatagtcatgatgtcataataactaatatatactgagtatttactatatrtgctttgtactgtacatgttttgttttatttcttcaacatttatataagaaaagtggtggtgactgttgttattttttatgggtgaagaaacaaagaaac

SEQ ID NO: 15900 - DNA, 201 bp, Homo sapiens
cccttaccacttggaggctgaaagtatcattaacaaaacctaggaagtgtaatggatagtaattattattttctagatatctccaactattaaaaaatatrtttaggatttagtatagtcatgatgtcataataactaatatatactgagtatttactatatatgctttgtactgtacatgttttgttttatttcttcaac

SEQ ID NO: 15901 - DNA, 201 bp, Homo sapiens
actgcttctggttgacactagtagcttctaaaaataaaatttacaacatatgagagcaacaaaatataaggatggggcacccttaccacttggaggctgamagtatcattaacaaaacctaggaagtgtaatggatagtaattattattttctagatatctccaactattaaaaaatatatttaggatttagtatagtcat

SEQ ID NO: 15902 - DNA, 201 bp, Homo sapiens
ctgaaactggctcttgatgccatgaaggtagggcagattcatcagtaatttgtttgtattttttattcttgcctaaagacaatggaattcaaattgcatayacacacacacacacacacacacacacacacacatatacacacatatatatacacaaacatatatatatacacataaataaaatattatgacatgcctatg

SEQ ID NO: 15903 - DNA, 201 bp, Homo sapiens
aactttttctctattcagtagtcagccatatcaacaagaagcatttttttttttttttgagatggagtcttgctctgtcgcccagcctagagtacagtggygcgatctcagctcagtgcaacctccacctcctgggttcaagtgattctcctgcctcagcctcctgagtagctgtgattataggcacgcaacaccacaccc

SEQ ID NO: 15904 - DNA, 201 bp, Homo sapiens
cacacaaagaatgtttgggaagagtagacaattgtggcagagttaattctggtggtaagtcatgtttattgttgcaattctgtttttaatgaggacataamatttgctaaacataattaaggcctaatttactctgaatatgtgtttattgtaacatatctgcttttgaaactattatttataagcacaattagaaaaatg

SEQ ID NO: 15905 - DNA, 201 bp, Homo sapiens
tgggctgtagttagtgacccctgtcctacagcacaaataagatgacttaggcctagagaattagttaatatatgttaccacaaaatgatctcagctataakgaaaccacgctgtggccttttgtagaagtgtgattttttttttcttttatttttagtatcagtgattcctgcttaggctatcatgatgatttagctccaa

SEQ ID NO: 15906 - DNA, 201 bp, Homo sapiens
tgaaactggctcttgatgccatgaaggtagggcagattcatcagtaatttgtttgtattttttattcttgcctaaagacaatggaattcaaattgcatacycacacacacacacacacacacacacacacacatatacacacatatatatacacaaacatatatatatacacataaataaaatattatgacatgcctatgt

SEQ ID NO: 15907 - DNA, 201 bp, Homo sapiens
cggcagcccctgcctgagctttgcatttcccagaatgagccctgagaggaccttcactgttgggatggagcagggagtgagaatgtagccgttaagctccrcaaatcacatttaatctgaggcacagtgtttctttctaatttattccccatctacttccagaaggaatttgaagtcactcacaataaaaagcacacatgc

SEQ ID NO: 15908 - DNA, 201 bp, Homo sapiens
gtttatcttttaaacacaaggactaatggtagtgggacgaagagaatgagaatgggggatggagattctagagctctggagggactctgggaccaggatgyactatcctgttggtcatccggagcggcagcccctgcctgagctttgcatttcccagaatgagccctgagaggaccttcactgttgggatggagcagggag

SEQ ID NO: 15909 - DNA, 201 bp, Homo sapiens
cttctgaccgaccttggcccagtttttgaaattctaacaattctcatttacccccttgaatgaagaaagactctttgagatgcatatgccatcactactgygaatatctaagatttctcgactgtgtaataagtgcctggcacagttctacatggcttacctaagggaaaatagcatagaggtcaggcctgtctactgaaa

SEQ ID NO: 15910 - DNA, 201 bp, Homo sapiens
tctgtatatttgtcagcccttttggattgttttttgttgagaaattattttctctaaaaacctcacattcttcctccttaaaatgcttgcatgaccagttwttaatgtgaagaatttgtttatgggtgcagaatccatgccggcaccatcagttgcctctgggctgtgctgagagtctcatggtgctgacctattcacatt

SEQ ID NO: 15911 - DNA, 201 bp, Homo sapiens
ctgtataaaattaccaatggatagttccaggactgtgccacttagggttttatagagctgagtcagctgaactgaattaatgattgatttctaaaagcttmccttatgtaaacttaatctgtttttgcttttttatatcctaggtgcccaaaccagtagattattcttgccaaccctggtaagtattaaaaatgtttatgt

SEQ ID NO: 15912 - DNA, 201 bp, Homo sapiens
tctggttatgtttaatatgtatttgatacttcttggcattcttgaacatgcttatgaggaaggagaagtcacaggcaggaggaagagcaaaggatgatatygaaatttccatcagcaaataagcattaccctggttaaaactaaatgcaaataaaattagtaagctgaattagtgtttgtttccctgaggctttataacag

SEQ ID NO: 15913 - DNA, 201 bp, Homo sapiens
agcctgattgttgctcgttcactcatgggtttgtttttttgtttttgttttttctcctcttcctaggcccttcccaacagaagaaagcattaatgatgaaracatctacaaaggccttcctgatttaatagagtatgttgaaaatttcaagcaaaatttagccactgccaatttatgtgtccattgtgggttttaactgtg

SEQ ID NO: 15914 - DNA, 201 bp, Homo sapiens
acccaatttgagttttcaagatgttgaaattggagtttctcaataatctctctttccttgttctctctgaatttcttctcttggatctgtcctgcaaattrctgctagaatattcttccataagcactgttttcatcatacctctgcattgctcaaaattattatggtttaggggaaatactgtaggccactaatcttgca

SEQ ID NO: 15915 - DNA, 201 bp, Homo sapiens
gactgataatttaaagtttataccagccacagaaaggaatggaacatacgcatatgtatcttatattttacagatttaataaagcagagagaaaaatatgmtttcattgtctaaaaactaaaaattagctcaaaaaggacagtagtagtttttttttttattttttatagttttagagatggggtcttgctctgtcaccca

SEQ ID NO: 15916 - DNA, 201 bp, Homo sapiens
tcagatgtaacaaaacaccataatgaattcatgtattgctgacctttccatatctttatctgcgaggggggtgtgtgtgcatgcgagtgcccagtgccctwgactgataatttaaagtttataccagccacagaaaggaatggaacatacgcatatgtatcttatattttacagatttaataaagcagagagaaaaatatg

SEQ ID NO: 15917 - DNA, 201 bp, Homo sapiens
tgactagaaagatgatttttgatacagtttgagtattcctcatttgaaaatctgacatctgaaatgctctaaagtccaaactttttaagcactgacatgaygctcaaaggaaatgctcattggagcacatacgattttagatttttggattagggatgtggaatgtaattcaaatattctaatttttttaaatccaaaatg

SEQ ID NO: 15918 - DNA, 201 bp, Homo sapiens
ctaattttgcaacaaaatcctgaaaattctaatttataaatctctaagttttatattgctcgaatcgtaatcttcattgtaaattgtttgcaggtttagayagagttttggtttgtgtttaaatgatacagcagattttaaatatacctttctttcctctttttttcttcctttgcctctatgtcctgattcaggcagagg

SEQ ID NO: 15919 - DNA, 201 bp, Homo sapiens
gagaggactagaggaagtatggtgttggggtgtatgtggggagaggggaaggaatatctggagctagttatgattgaagtgcctagtagacatctagatgkgtacgccgagcaagttggaggagttggagatgtaggtataaagtttggagtcatcaaggtgaagatggtatttaaaatcatgagactgggtgataccaca

SEQ ID NO: 15920 - DNA, 201 bp, Homo sapiens
aaatggaaatagtatattgtcaaatcacatcaaatgaataaggattattcccagtttaaaaaaaatagaacttattcatacttttgttagcatataagaayattttgtgtatgtcatttaaacaatgtgtatatatcatcatgtatgcgttgctaacagtaaactctaaattcacatttccttaagtggtctcaagtatgt

SEQ ID NO: 15921 - DNA, 201 bp, Homo sapiens
cttcacttctaagtgtgccatctagcttcataaggtatacttcaggaagaagcacacataaatagacacatatatatttatttatatatatatatagaccmatataaatatttctgtatgtatgtgtgtgtgtgtatatatatatatataattttgtacggatactatattctcaataaaatgttttttaaaaactacatg

SEQ ID NO: 15922 - DNA, 201 bp, Homo sapiens
aggtatagtaattgaaataaaagccttaatggacatattacatggcatatcagacacagttgtgtaggaaattgaggagaaatctgaagaaattgctcaargagcagttaagagagattaagaagttaaaaataaaacagaaaatggagtgatgagatacaaatacatttaatagaaggagagaatagagataattgtaga

SEQ ID NO: 15923 - DNA, 201 bp, Homo sapiens
gtcatggtgctgatgggaatgtagtagtgaggacgaccagaggtcacttggttttggtaggatttagccggcttctttactgcaacctgttttatcagcarggtctttatgacctgtatcttgtgccaacctcctatctcatactgtgacttagaatgccttaattgtcagggaatgcagtcgagtaggtttcagcctcat

SEQ ID NO: 15924 - DNA, 201 bp, Homo sapiens
ttctcacacactgatttatttgaaaaacctagtctcctcaaatgtcttcagtattaaattaatccataagtcaatgtgaaactctgcttttaatataactrgtaattatttaaagcttatttattattttgatggatcctctggtttttatgaaacatgtgatatgctggctgcctgaaaagagtagaatttttggcacag

SEQ ID NO: 15925 - DNA, 201 bp, Homo sapiens
taggaaataaagcaaaacagtctctactcagcctggtttcatggaaatggatcaaatttgttttttaccttctttattcagtgctccatatttctgtctcyggccatcacagccatttttctgtgtccagctcacattcacattctaagggagagaggatccaagcaggacttagtggggttctctgcactggctacaaag

SEQ ID NO: 15926 - DNA, 201 bp, Homo sapiens
aaagacataaccgtagtactgctattgctatttttcttgttattaagtagtgatatatgctgggaccacagtgtaaagtagaatcagaggcagatttcacyccatagctttctaacagtgatatattaggataagatgcatgctaaagtaaagcaatgtagttaattcaagggtctggatactgtactgattattccagaa

SEQ ID NO: 15927 - DNA, 201 bp, Homo sapiens
gaggggttgtcatttttctggtttttggtgggggaaaaggaatagaaaatgcattctgattttgtagatacatcatagttattatagaaaatatcctcaargagtaaaatgcattgctatataaaatacataatagaatagcaataataaaagacataaccgtagtactgctattgctatttttcttgttattaagtagtg

SEQ ID NO: 15928 - DNA, 201 bp, Homo sapiens
aagtggtctattgtgttttcttcccatattttaaatcttataacttttgaaaaatttttaataacctagaattgttctggtgtaaggtaaggaaataattrattttaaaaatgtgataatttcagccagttttggtaagcattactcccagttctcttattttgtattaatgcctagccagatttttccctcatttgcttt

SEQ ID NO: 15929 - DNA, 201 bp, Homo sapiens
ggtattgttactagctatgtctgtttctgggagttaatgtatctcagaatttcctattattttgtggtaacaagttagaaattaatatattgcaggaaaayagtcttcttagtgtccttggagatgttttcttttgtaaaaattcttgaatggatgtttccagtggcaggtcagaatccccacaaagaggatttaagaatc

SEQ ID NO: 15930 - DNA, 201 bp, Homo sapiens
tagggtcaaaagtaaccttccaatttaattaaaataatagatcatttgttagtttttatactataaaatttccttttttctagtagtcttgaaaaaatatrtaccaacagaaatattatgttgtaagaaaatgatgtttggagtttgaaaagcaatttgaaaaagggtgtgactcttttgagttttagtattctatgcaca

SEQ ID NO: 15931 - DNA, 201 bp, Homo sapiens
ctaaagcagatttgcagaaccctttgtctacctttcccacctgcctcacaaagtagctcttatttatgctatccaggatgattttcatttctttacagatrccactcttcttactcaccaaaggatagacaaagggaaagaaagaaaattcatgacatggatttactctagttgattgttggcctattgacctgcaggtat

SEQ ID NO: 15932 - DNA, 201 bp, Homo sapiens
ccttcctagcttctggaatataagccacccttctaaagcagatttgcagaaccctttgtctacctttcccacctgcctcacaaagtagctcttatttatgytatccaggatgattttcatttctttacagatgccactcttcttactcaccaaaggatagacaaagggaaagaaagaaaattcatgacatggatttactct

SEQ ID NO: 15933 - DNA, 201 bp, Homo sapiens
aatacttcttaaatttatgattgttaccaaggacagcacaaactataatttggatccatttaacctatatagatactctactctcttgaacaatggaaatstatttcccatagtttacagtcttcctgacatagaaatgttttgttgatcttatctggctgtactgctttgctttgcccatagaggaggtgctaaggacat

SEQ ID NO: 15934 - DNA, 201 bp, Homo sapiens
gtttgcttttttctgcttgctctttagtgggaaagtgttaattttgaaattgcatctgtaaattatagtcatgtgaattttgtgctctgctggaatttctrtgtgttggcctggagtctgtctggagcacagcaggcaaagcagttgggtgtggctgaacatgggagtgtgtggagagtgggcagagtgagggtggaaggg

SEQ ID NO: 15935 - DNA, 201 bp, Homo sapiens
caattctttatcatttgcgtactaagtttaacacactctaacagaccagcataaatttaggcagagcagggaatatttctatctagaaaactgtgctttcrggcagctaactgcatggatgagttccaggttttatctactttgctatttggaccgggggatggtaaaacagtgtatgaggaaagtttcttactgtctttc

SEQ ID NO: 15936 - DNA, 201 bp, Homo sapiens
aaaaaatactaaaacatcttgattttatattggttacatgttgaaatgataatattctaggtatcttgaattaaataaaatatatgattaaaattattttyacctggttgtatatttttctaacatggcttttaaaatattaagttatgtatgtgacttacacatttctgttgactagctctggtccagaaactacatttc

SEQ ID NO: 15937 - DNA, 201 bp, Homo sapiens
acacaaggctattggcaatctgaatctacaccatcttaagatacatgggaagtcattactgtaacttgtcaagtttgataaatgcagccaaatcacagcaracatgcccagagttaggaggtatatattttggtgtccatttttgccacacactggccctcaaactttggtgagactatcgatgtatagaactcagcatct

SEQ ID NO: 15938 - DNA, 201 bp, Homo sapiens
cttctctgacccttagaaggttctcatttcaaaatgaaaatacagaaatcatgggttttgtgagattatataatactaatcacttaacctagtgcctgatratcataagcactcaataattatttgctgagttaaagaatggaaaaaaacaagctgattctcttggacctcagggtttcaaaaagctattctatttaagcc

SEQ ID NO: 15939 - DNA, 201 bp, Homo sapiens
ttccattgacctccattccccttctgttttatacgttggtgccctttctctccctctctccttcttttaagttctttcctgctcaagattttgagagaccrgtaacaccgaatgctcatagttcattagcggtatgaaatggtaaggacctgcctaggaggcttcctttttttactctcagatcggggtttgctgggtagc

SEQ ID NO: 15940 - DNA, 201 bp, Homo sapiens
tccaatgcagaacctgttttttcatcattttatatctcagctccttcatgaactcaccagaccttcctatcctttgatgtggtacagagaatgtgcaaacygatttacctgccctaatgttctctggccagattgccgcctaaacccctcagtatggaaattatgttactgccaatatggatcaccatctccctggtgtcc

SEQ ID NO: 15941 - DNA, 201 bp, Homo sapiens
aaatgatgaatcaagctaatttccataatcctgttttattagtactggcccatgggtggtacagcacacacaaaccacaaatagtgtcaaattcctcagtrgaaaccaggctactcctgggccagcccagatttgtggatcttgcctgataccagttcagggcagccaacttgatgtggcatgtcctactcacatggatct

SEQ ID NO: 15942 - DNA, 201 bp, Homo sapiens
taacacaaatgataatttgtattttgtgagatggtgaagagcatctatttgggcttctctagaagggcttatgataattctgcctttcagtgctacctttrttcttagaattgagctctttcctcagtagtaattcacttcaaactccaccaacatcaacaaaaattagaacagtttgaaacgctttctacactttttttt

SEQ ID NO: 15943 - DNA, 201 bp, Homo sapiens
gaaaagggcaaaagcaagatgaagggaaaaaatgatgaatcaagctaatttccataatcctgttttattagtactggcccatgggtggtacagcacacacmaaccacaaatagtgtcaaattcctcagtggaaaccaggctactcctgggccagcccagatttgtggatcttgcctgataccagttcagggcagccaactt

SEQ ID NO: 15944 - DNA, 201 bp, Homo sapiens
aaccacatacagtcagaggagctaatgactgaaaaatgctccttgttcgttgcaaaatacccaagacccagaaaaagaagtcttccagggctcctaaggtrgaaattccttttaggattttaaggccacaagtaacagagtcctaaagcagtagattttatcacagtttcaaaaaatagctatgtaattcaactacagttg

SEQ ID NO: 15945 - DNA, 201 bp, Homo sapiens
tggccaaatcaaaaggattcatatattctttatatagggctcttcacatcagctcacatttctgtttctaaactattaaagccctaacgacttatgcaaaygtttataactggatataaatgtttgagtctgggctgcccctgtagggggttttccctcttgattcaggttgttatcaagtattctctgggggaaataacc

SEQ ID NO: 15946 - DNA, 201 bp, Homo sapiens
gaaagtcaaaatgtccctctggccaaatcaaaaggattcatatattctttatatagggctcttcacatcagctcacatttctgtttctaaactattaaagmcctaacgacttatgcaaatgtttataactggatataaatgtttgagtctgggctgcccctgtagggggttttccctcttgattcaggttgttatcaagta

SEQ ID NO: 15947 - DNA, 201 bp, Homo sapiens
tcattttgatgaatttagggtttagatgactaaattgcagctttgttgtgaaactttctatagaaagttatttttttcctttttttaggtctaacataagrccagactatgcagactccaatttccacgacttcaagatgcataccttcactcgagtcacatcctgcaaagtctgccagatgctcctgaggtaagcctgct

SEQ ID NO: 15948 - DNA, 201 bp, Homo sapiens
cactcttgagcttttacccaatcttcttcaactctgagaattaggatttaatgggatgggcgttagcaatgaggtgagatcagtatgggaatcaggaattkgatgggggatatctttcggtccattactttctaataagctcagcacttttgacctggcctcatcagaatggttgttttgaaacaggaaagtcaaaatgtc

SEQ ID NO: 15949 - DNA, 201 bp, Homo sapiens
ttatggataaaatagtcccagagagagagacacaaggatggacacttagaaaacagtcccagctactcgggaggctgaggcaggagaatggcgtgaaccckggaggcggagcttgcagtgagccgagatcgtgtaactgcactccaaactgggcaacagagcgaaactccgtctcaaaaaaaagaaagaaagaaaacagtc

SEQ ID NO: 15950 - DNA, 201 bp, Homo sapiens
tctgttttactttgctgtaattcaagtaatcagtcaccccactcttgagcttttacccaatcttcttcaactctgagaattaggatttaatgggatgggcrttagcaatgaggtgagatcagtatgggaatcaggaattggatgggggatatctttcggtccattactttctaataagctcagcacttttgacctggcctc

SEQ ID NO: 15951 - DNA, 201 bp, Homo sapiens
tctctcttttccagggtattgataactccctaaggaaagggattacatctttcccttgccctttcatccctgacacctagtagaatttatggcatatgcaratactcaataaatatttaagtgaaggatgaaatgaaaataaaatcataacttctccaagattaagaattactaagaggcaaactagtgttataagaaagc

SEQ ID NO: 15952 - DNA, 201 bp, Homo sapiens
tgggtcttagcttgtaattatagtgaggattagtattaaaatagctaacaaatagctattactgctgtttattacattactacctgagcagtaattagaaygtgggacaattactttcagagtagtagtttgagttctatatatgtaattaaaaaagaaaaaaagaagaagaagaaggaggagggggaaggacccagtatg

SEQ ID NO: 15953 - DNA, 201 bp, Homo sapiens
gttggtgccctttctctccctctctccttcttttaagttctttcctgctcaagattttgagagaccagtaacaccgaatgctcatagttcattagcggtaygaaatggtaaggacctgcctaggaggcttcctttttttactctcagatcggggtttgctgggtagcccttataaggggcaatgtctttagggggaagaag

SEQ ID NO: 15954 - DNA, 201 bp, Homo sapiens
taaaatcaacctcattagtcattaccgcaaacttccctctcctatgctttgtcttagttaaaggcccaccatccaaacactcacatagacctgggtgtcarcgtcttccacatcttgattcactttcctgttcttcttagctctcctcctaagtctctctaggatgcattgataatggtgttgatatacacagaaaatctc

SEQ ID NO: 15955 - DNA, 201 bp, Homo sapiens
ctcctatgctttgtcttagttaaaggcccaccatccaaacactcacatagacctgggtgtcagcgtcttccacatcttgattcactttcctgttcttcttrgctctcctcctaagtctctctaggatgcattgataatggtgttgatatacacagaaaatctcattgtctcttgcttgaacaactcaaaagtttcctaatt

SEQ ID NO: 15956 - DNA, 201 bp, Homo sapiens
gatgcattgataatggtgttgatatacacagaaaatctcattgtctcttgcttgaacaactcaaaagtttcctaattccctgctcttaatcttattcttayataatttataaaattatcttccgtctgatggtttcattctttcacatactgtactttacatttcttacagaataatgtccaaactttccaatatggccta

SEQ ID NO: 15957 - DNA, 201 bp, Homo sapiens
ttactatttcctctgcctgaaacatgctcccttttctccgaacagttccaaggaccaccctttcattgctttctgtccaaactctttgccaatcattaacygtaccttgaccatccaatggtagcctgaattaaattgttctctaattatttctatgtaggctttatgcatttgccaaggttaggctgttctgtggtaact

SEQ ID NO: 15958 - DNA, 201 bp, Homo sapiens
caaagctaatgtaattttagggtgtcgtttccttctcacagtacaccaccgcgaaggtctaatcccagacagcaatctttatggacatttgcttttccccycactacactacatgactaagcccctttggtctccacttcttactctgacattgaccagtatagcttgctttgcatcctctcagtttaaacaaagtaacat

SEQ ID NO: 15959 - DNA, 201 bp, Homo sapiens
aacatagagtctcctaatggcttagaagtatgtaatccatgttacctctcagaataaagttactttaaaaatccaaaaaaaagttatttaaaaaaatacaraagatgatgggatatgtaggaagtaaacagcaagttgcccatcattaaatactttcctgttgaaaatactgtcaatggtgttgtttgatgttgtttatat

SEQ ID NO: 15960 - DNA, 201 bp, Homo sapiens
cacgcctggcctcggtgcatgttcttcttgaacatcctgcttattggaggcacaaacagccacctgcctgggaattgggaaggggtgtgtgggagcaggarccaccttgagcagtggtcaggtgtgagaacacccctcctatttttacacaggcatcgtcctttgtacagagtgggggaaggccaagagaccatcttgaac

SEQ ID NO: 15961 - DNA, 201 bp, Homo sapiens
ctgggttcacgccattctcctgcctcagcctcctgagtagctgggactacaggtgcccaccaccacgcccggctaattttttgtatttttagtagagatgrggtttacactgtgttagccagaatggtctcgatctcctgacctcatgatccgcccacctcagcctcccaaagtgctaggattacaggcatgagccaccac

SEQ ID NO: 15962 - DNA, 201 bp, Homo sapiens
agggagggatgaagagaagttggctaatggctacagatatacaatttgatagaaaaaataaatcttagcctgtgatagatcactaaagtgactgtagttarcatgactctatgtacatttcaagatggctggaagagaataatttgaacattcccagcataaagaaaagttaaatatttaagttgaggtatatgccaattg

SEQ ID NO: 15963 - DNA, 201 bp, Homo sapiens
tgtttagtgtagcactattcacaaacaccaaaatatggaatcgacctaaatgccaacaatagatgaataggtaatgaaaatgtgatatatgtacacaatgsaatattattcaaccataaagaatgacatcctgtcatttgttgcaacatggatgggactggagatcattatgttaagtgaagtgagccaagcacagaaaat

SEQ ID NO: 15964 - DNA, 201 bp, Homo sapiens
atttatacgaaaaaatgttcagcatcactaataatcacagaaaagcaaattaaaaccacaatgaaccatcatctcactccagttacaatggcttttataamaagggcagggaataatggatgctggtgaggatatggagaaaatggaaccctcatatactgttggtgggaatgtaaatggtaaaactaatatagaaaactg

SEQ ID NO: 15965 - DNA, 201 bp, Homo sapiens
tatacctcctgaatctaaaatatgagttgaaattacaaaaaataggtagaatatctgagtaaaaatttctcagaagacatacagatggctaatatttataygaaaaaatgttcagcatcactaataatcacagaaaagcaaattaaaaccacaatgaaccatcatctcactccagttacaatggcttttataacaagggca

SEQ ID NO: 15966 - DNA, 201 bp, Homo sapiens
atattgaactgaattggaagcgcaactttataaaagggaacactggtttgtggtgtgaaaattctttaacctttttgaaaagccgacctatgctgctgctkcttatactttgaaaattaagaaaatggtttgttcaagcactgtagttctcacttataagtaggaactgaacgatgagaacatgtggacacatggcagtgg

SEQ ID NO: 15967 - DNA, 201 bp, Homo sapiens
ggaaatgctccagaacataagtctgggcaaatattttttgtgtaagatctcaaaagcacaggcagccaaagcaaagatagacaaataggattatataaagrcaaaatgtttctacacagcaaagataacaatcaacaaagtgaagagacaactcacagaatgagaaaaaatatttgcaaactatccatataacaagagatt

SEQ ID NO: 15968 - DNA, 201 bp, Homo sapiens
cttctatgcatttttagtttactgatctatatcccaagtgcctagaatatcaccttgctatgtagtaggtactcagatatttgctgaatgaataaaggtgygcatgaatgaagttgagtaacatttatagaacagaaagggcaggaggcaaaactgttacacagtggttgggggcagaaataaatgcaggagaaaatatta

SEQ ID NO: 15969 - DNA, 201 bp, Homo sapiens
gaatattggctcagaggtttgcaatctgggcagcaatgtaaagtttcattcataaaaagtattctagattttttttttaagatgtcagaggtctttagcaktggcttccatgaacagttaccatgggtctactatgtatagggcatgttgacaggcactggggaagcattatggctctagagagatttccaatttggtcag

SEQ ID NO: 15970 - DNA, 201 bp, Homo sapiens
tctggtggtgttgaatagagagagattatgactcaagcctaccttgctttttttttcttttttttttcttttaatgagactgagtcttgctcttcagatgrcccagcccagagtgcaatggtgtgataccggcccactgcaacttccgcctcctaggtttaagcggttctcccatctcagcctcctgagtagctgggattg

SEQ ID NO: 15971 - DNA, 201 bp, Homo sapiens
ctgtgaaagagcttgaaagtatagggatgatgttgaaaattctgtcatcaacagataatataccctgcagcatccttccgaattcattcctcaacacacgyatgctacttacaactgaacacttaatcaggaccatagctagatatatgctgtttggtaatttgcttttatcacttgatttagtataacgcatatctttct

SEQ ID NO: 15972 - DNA, 201 bp, Homo sapiens
ctaacgtaaacacgcacacacacacacaaacaaacaaacaaaaaacacttggtatttactttcttttaaacttccaagtcatgtagtccctgcctggctgytctgtgtcattactacatcatggcacttgacacctttatctatattcactacatttttgtttaaatcagcgctgtttgcagtaagtctattgtgtttgcc

SEQ ID NO: 15973 - DNA, 201 bp, Homo sapiens
tacagtctggcatatcttattgccaattgtttgattttatgtggaagtgggtgacacagttattactgagtctctttataaaaatcttatttacgtaaaayatacaaggtaaggaaatgcattcattaacaactgaagactgagtgagtaaaaaaataacttgtggacactattttcttgtataattgaaaattatgcacc

SEQ ID NO: 15974 - DNA, 201 bp, Homo sapiens
aggatagtgtctgacagagtaagacctttgtaagtgttagttctactaattattatttttcagattcctgcattatttttataacagcagatgacaagcartgtgaaaaagtaccattataagtacaatgtaagtggaatacaaatgttagccatggttttctacacctttgaggaaataatattgatttttgttccccac

SEQ ID NO: 15975 - DNA, 201 bp, Homo sapiens
ggtcaatgcatttccttccttttgcctcatgaattgagttcttgctatgggaaaggaacatatttttccagttatctgattataatttagagcatttaaartttttattgctgttgctgtgagcgattagcagtgtactttcaattttgtactcttggttgtgtatacactctgggcacaatggcatgccagaggatcatc
